United States Patent Application Publication US 2014/0057251 A1 - sequence listing, part 163

SEQ ID NO: 312467 - DNA, 2776 bp, Cannabis indica
aaaataatttccaacagctaatatccatgagttgcagatggccttccacgaagaatctggtcgggccttcaacatgccgtctagagaagggaggattgacttaccttgcaagaatgtttcacaagtaatcccacaagaaagataagttctaaaaaggacctggtcgggtagtcagtatgccgaccaggagaaacgaagtcaggaaagttaggcaaagctatacaagtcttaatttcttcttcaacaacatccacaaatatctctaattgaatcctacaaatgtgaattagactggtctactcaagattgtaggagctttaaaagatcgtaactgcacccaagaatataggaatatttactctttgatcactccttttacagagttaattgtaatacccttccccctataaatagtgaatgaattcacaaggagaagggacctaaaatcataatctcgcactaagagcactttgctgaatattctttgtaaacatcctgagagttgtagctagaattcattttatctttcttagtgatctgcacagcattatctcacaatcaatacaactaaaaggggagtatgtcattcaccatatataagtgggttgaacctatacaatcttgtgtgtttttctatttatttattattcttaactctttattggtgattactcaacgtttattggtctttaagttagttggctattttttcagccaacaatgatgttgtctttttcatctaattttattttttgtttttttgccaaatgatctgagaatcaggcgctgattatttggctcatttttctaattataatcctggtcgtgtctccaataagtgaatggttcaaattggattgccgactattattttgagtgactgctattaataaaattttatgttattcaaaaaaaattaatataaaatctccttacaaaaaaaaaagaagttttatttttacccaaaaacttataaatgtactgtaataccctaacattaagaaaataaattagcgaaccctgactagttcaatgtgtattaatgtggaattatattattatataatttaatatgtgtaaattatgctgattaatgacatgttaagaccccattggtgagccagaggcatttttcgtattttgacccgaaaagggtaaaattgtaattttaatattattgcattcttattggactatattatatagtatactttttgtgtccttttacaagtgtattctgacaagtgggcgcggtatagtcacaatcgggtattttgggccaaaccaggtttggggccgaaatacatttttgagattttattttgatattttataattgattaattaatctaaaatttatttgagttatgtgtgtgtggttaaatgacaattttgcccttaattgaggtatatgttgtgtaatggccctagaggcattttgatctttttaaccatttgttttattttcaacaaatagaattttcggtagaaattgaaaaggattttttggttttatccagtccataccgactctctctccccccctatttctcattttcttccaaaatttaattcttgaaatttaaccttgattcaagcttaaattggtggagatttcggtgcttgggttgtgaggagcttgaggtagtatttccaccattttaattttgaatttgttgctgaagttgatgattgaaaaagattgtttttaagttgtgggtgttcttgaatgcatgttgtagtggattggagtgaattgatggttattatgttgtttgaacttgtaagattttgagctatggatctctacttttttagtgagtttctaaggttgtatattgagtaagaaatctgattgttaactctgtttattgttgtttgtaagttgaaaaatatgatttaggtatttaagctcttgaatatgaaattgtgatgattttgcttaagtgttgagcttattttgaatattgttaaatctgattttgggatgcatatttagatgaggattaagtttgatttatgtgttctaatgctctgatttgatatctattaatctttggggtaagaatttgagtgtatgcatgttttggttgggatccttgtgcatgttgggctaaaattcaaagctggaaatgggatttctgggtttaaaacccagacgctgcggcccctctcactgggtgccgcgacccaccccttgtaaatcctgggttttcaacccaggtgctacggccccatgtggggagtgccacgacccgccttgtatttctgggcagattcgaatgcaatattcgaatattcataactttgtgatttgaactccgatttaggtgttccgagtatcattggaaagctcgttctgagctttaaatgtttatttagatttgaatgccaattttataattttgtggaagtggatttagggattaatcctatttgtgaatctcagaaattgtgactacgattaccgacacttggttaggagcactcggggatttggaatctacacgtacacgggacatcagttaaggaagtagttagcatgtataagcgcagtggcgctcatgttgaatattataattgtgattaattaaaaatcgagattatggttattaccctaaaatgagtggttatatggtctagggttattatcctagtgattattgatgtttaaatgccatgtcatgctatatatgttgagattaagaattatgcattcaaggcataatttgattggactcggtaactagaaccgagatgaaccattctaaggcct

SEQ ID NO: 312468 - DNA, 803 bp, Cannabis indica
aaattaattatgtagaataaaataggtgtccactcctcctaaataataaatatataattatatttatatattattgttttaatattttgtccgaatggtccccatataatcacatcgattctaaattcatttctttgacttgtttagttatacatgtggatataattcatatacaaatatattatgaggtcaaaagttatatcgtgataatagtgagataaacatattagcacaacatttattttttatattgaatgctattttgttttctggttacttatgtcataatgtgaatttgaaatgaagagagtttatgaatgcataagaattaagactgagcgttgtagtctaaaataaaagacagcgttgttgctcatgccaactcaatcaatttttatacgattaacatttaatgtgatacaacttgtatttagaagttatttaaacgttctattaatttatgtctcacacattcaaatataattttgaagctattgtcctctaaatttatcccgaattacgaaaatagacttcaaataactcgcagcgagacacccaccgggcaccaaaaattaatctccaccaataaaagttaatttttactgttagatcataataaacggtagaagacaatttatttgtatttttttcttatttttgtggacctataaaagaagagaaaatttgattacttatgcatttattagacaaattttttttttgtaagcctatactattcaatattggtagatcgaatatgtcattttttcttaaaacctcattctacccctctctctctctct

SEQ ID NO: 312469 - DNA, 605 bp, Cannabis indica
taagctctcacggttttatttttgggtaccttcccaaaaggtctcatactaatggagtggtggaatatttatattttaggaaactcttgcatattcttcctatgtgggacttgggttgataccccaacaatcttccccttaaactaaggatcacatactcgcagcgtgccctctagcgaaaccaccttgtgccgccactatcaccaatgaaactcgtctcttgatcatcaactttgtgatcaggaagactttcccctaagcattgatctccatcttctatcgttgtaatcattaacgggacatgccacctgaccaccacattattaggtagacttttgatacaaggcaccatataaatctttaatcgcgaggtcatcacattgaaagcttctcctacacatcgcaaatgcagctcactatctcaacgctctttaacctttgattctaataccacttgggccctgttattctaccttgttgggctgccaccttaccttaactttcacattagtatgatattttttgctttgggtctaagctctcacaattttatttttgagcaccttcccaaaaggcctcatgctaatagagtaggtggaacactt

SEQ ID NO: 312470 - DNA, 1089 bp, Cannabis indica
atatatatatatgttgtcaccatcactgttcacacacctcaaacctcactggcctcaaattaaaatgtgcgtttaatataatatataattaaagaaagaatgaaatctaaactttgatgaacagtgaaaagaagaggtaaaagaaagggattggctgaggctgaggttgtccaacaatattgtaagtcaaaaaaaattaaaaataaaaatttgatggctgagttgaagagagacattaattttcctccattggaagtgggattttcttttggagttcgataggatagccatgaatgaatattgaataatatatcgatgagtatcttatcatattccatcccattgttcattccaacatcttcttttcatatctacaaattcaaatcaacaccatgcaagcacatgtgatcaagtcatatgtgttagtggaaattgttatggaaaccttaaattttccatttgatcaacaaaactatatatgtaagaacttgattagaaagattccaaatgatctatagtgtgtcttgtttgcttatatatataacacatgcagagaaaaattaaactatcatttgataaaggtagtacaaatttacaatcatagatatttgtttggtgttctatattcataagaagtgagaattatagtcaatagaaatagatgatcatatcatgattcatgcgagattagcttaaacagtttagtttgtatacattaaaatataatgaaagagatttaaattaattctcagacatcattatatgaacgatttctctatgaggccgcttattgatactttgtagtgaaattttgagacttcagatttctacacttgttcttttaatacatataagaatcaatccttttttttcccaactcacgcactcctcacatactatctgaatcgaccatcttaattggtgtgtcccaacttgttttttgagtagtctgttatgaatttgatttacttagaatttcagctatttattttttaggttttttttttttttttttttttttttatttactttttaaattttttagtttttttttttttttttttttttttttttttaactttttttagt

SEQ ID NO: 312471 - DNA, 1123 bp, Cannabis indica
tgggctttatttagggcacaaaacccaacagcctggccttggattgactggagaacctctattccaatgcacaccaaacagagtgtgacgatgtaaaattggcgacggaagctaggacgccctcagtcatggaggaacgaatccaagagaacagtaactgatcttgacgtttccattgattgtaaactggattttgagcactggtgacaaatgtgacagtagggggaatccctgggagaaagatgtcgccatgatcgtgccctacaacagttgcaagcacctgagatttccaagacaagaagttagatcaatcaagtttgattgttaatgttgaagaaagagagtgagaaaatgattccaggaggaattctacggattcatgtggtcgtcggttgcctgagtaaggactggggaagccatgggagcttgaaaaggatcagtggacgtacactccattgaagacgtaggtcaaggcgactgataccacgtagtacaatagagttgcagagaaagaaaaagaatgcagaaacaaaaagaaaaatatgaacaactcactttattgaattgaaagagattagtatttatacaagtgaaatagactcaagaaaagccaaaacaaaaaagctaaaataacagagcagttagttgagaagacacctcaactaacttttaacgactttaacagaacttagttatctattacaccatatgattacaagagacaagctaggcatatgcatattatacattgtccactagattcttagctcctgatatctatcatggagaaacattctaaaccaggaagttgaacttgagaaccaccctaatgctaatattgagactcatattcactttctatacatgtcttaataatgtctgcccctacaggtgagcgcacatatgtgtacttaataagatgatacaaatgttaggatttataaaatactcaagaaatataaatatcacagatcgaaaacatattcctaaaagtactttaatgtagaaaaccctaaattagaaatttatagaacctttgctaaattaaagaagaagatgatgataaaagatgagcgaaagcactaagctgaagccattgttggagattgcagagaaggttttg

SEQ ID NO: 312472 - DNA, 1430 bp, Cannabis indica
agtaatcatgaaattaataagcagaattgatgagattcaataaataaatttagtttattggagattagaaatataggtccatgacccccggatcatcactgtaaagtattgtcaaaagataggataaaagttgtatatgaaagtttagaaaaatctattttgaataggcgaaataataattatttattttttgtattaaataatttaatttctaaattaattagataggaaaaaagacaaaagttgtcgagacaaaaattgtcaggataaaaggcacattcattatcttaaataagacaaaggaggcaccacatgcaatgtgtccaaacacagtgggagttcctattgattttgtctttttaggttaattaatttattaattaattaattcaatggaaaattatctgaatttaaaaagtagttgagaatttttttcaagtggttgtgagattttctcaattaattattagatgtaaaaatttataaccgaattcagttgtattatttattaaataattaaatatgatttaataaatagatttaaatttaaataattaactaaataaaatatttatttagtttatttgaatatatataccatataacaacattttcgtaggagattttgtaggtaactttttcagaaagcctaaagaagagtttttgccagaaaactttttttttctttatcacataagaaattgttcttgctcatatgttgagatttatacaagaatttcatatacactttattctagaagccacaatattccttgtatgtagtggatcaatctagaagactacagtgtgagtttttaatcaacctaaaatgatacaacttacgaaaagaatcaagaatacgcatcaaagggtatttatttctttcatgtaatttatattttaaattaatatatatacatctgaagattcttgagactgtgctacaatgataatcaaatatacaattcttcctcgacatacctaatttagtaccataaaactaacactagagtacacaacagattagagataacttggccatctgcaaaaaaattaaccctactccaacaccttgactgacgctgtttaaatgctccaaaattaatctcttaagtttatcttatttcttattaaattaaataaatattattttcaattaatattttatatattataatgttatttaaataattaattaatattctacttaactaatgtagttttatttaataaaactaaatagttaaatatattatctattcaattcacaataataataataaataataattaatacaaaattattattttgctttcaagactaattttctttacaaaatgaattctttatttaaataaatcaatccctatattaatcttaccatgtaaagtagtggtatataggaataatttaggtaaccgtagaccta

SEQ ID NO: 312473 - DNA, 598 bp, Cannabis indica
aaaaataaaataaaaataataaaaatccattacattacccttaatggcattccttacaaaattggtaggagaagttctccctttcttttctcccttatttaatcaacttctcccttttctaattttaataatgcaagtaaataaatgtaagagaatgattaccttactattaattcctattacttattagtaaacatgcagttcttaactgctaaagtcctcttgtagaaagaaaaaagactttgatgctaaaataaaattgttattaacttttgttatattttaagcacggccgatcttaaaatatatgaggtctatgataaaatctcctaaactaaagtatatggggagacaaaattaaattttaaaactcttatttaaatatattaattattattaaaataataattttagtattttagtgtagtggtaaatatttttaaaatcacaccctataccagtactactacactgtttattattttgttgtattttcttattatttaaaattttatctatagtaataagtattaatttgtgttaatctttatcaattgctgaacataatgttagagattttataacaatggaagaaaat

SEQ ID NO: 312474 - DNA, 723 bp, Cannabis indica
gaaagttcttatttaggatgttaatatacttgtgagtagatctaagatcatggtaaaataatttccaacaagaacttactatttttatcaccattttttaaccacagttgtttggaccgttgtcgccaaaaaatttcacgctggtttagcacctcaaacagctgttgtttggccgccgcatattgctctttcccttcaatatcacgtcttcctttaaggtacttgagcttcctattacgctgcttgatacgtgaagaaaaattcccagcaaccgactctccctaggcttgcaattccttgccacaatgatgaattttctagagcaattgaccccctcctgaatggctccaactctgcctaataacagtctcgcaatcttgaaaactttagcataatatccaacaacaaaggattatggtcagaaggtgacacatccaaattaaaaactttagcatcgggataacgagttaaccaattaaagttaaccattattcgatctaacttagcttcaatccaagccagagtgtctctactcttctcccaagtgaagctatgaccttgtaactctaagtcacacagaccacaatgctgcacaacctcctggaaaccctcaattagccatctcgggtaaggtttacctcctctcttttcattatggtgcagaatgttattgaagtcacccataatgtgttgggttttatgccctaaataaaactctgtttc

SEQ ID NO: 312475 - DNA, 478 bp, Cannabis indica
tggatgggggacctggacctgggactcaggcttcagaactggcaccgagaacaaggacttgaccctggacccataccctaaactaggacctggaccaggacctgggacttaaagtggaactagaattgaacctgagaccgagatccagatctggacccagggcttggacctaacccatagtagacgtttggatcagggacccatacccggactaaaaccgagacccagactcggtccccaacccggacctagactcggacttgtacaccgtgacccgaaactagaagcggaactggaagcagaccaggaccagggaataagaccaggggactaggacccagtctcggtctcagtcctggaactggaatctgactaggacccagacccagacccagaccaagaccaggaagcagacccaaataaaaacttcgatcgtgactcagggcacgaactagaacccagacacggacttggaccc

SEQ ID NO: 312476 - DNA, 951 bp, Cannabis indica
aatgtaaaagttttaatttgacacgtttttcataaaaattctttgattagcaaagattgcactgtaattgaaaaagcactgtagcgtgccttagcattagggtgttacacgttccctacaccaacaacgaacctagctgtacagaccctttgccccaagagaaagagccttcttgggggcccaatggtcagtatttttatgtattttactccaatagtaggtgggcttttccagaaaactataggcgagtcatgggtatgcccatacctgcactttagcctatctaagcttatttattttattcacaaatgggggataaaaaaattacagctgaagctctgctaaaatactctctaagcttttatatttttttaagaaaaacgtagagaaacagagttagggtttcattgtaaataccactcataatatatttaaacgcctataaggccagtatactaaatcgtgaactagagataattaacgtctgaatcccataaaatcttctgtctcatttattaaacagttatgtaattcttacagctttaattaattaatttccaaaaatctcgataaacaaagatagagttgcaactattgcaacatcagtggttagcaaaattgatacaacacttgtactagctagccttagacttttaattttaggcaatatttattttgtgtttttattagtaagggcatagcatgttgtaaagtactttaactttgttataataaaattaaattgttttttctaaactttaattttattataatatatttaaaataatttctatttcaaattaattctttattatcgtaattaatttataattattattcactactaaaaattaagaattaaggaaatattacatagaaaatataaactaacactttatttacaaaaatacttccataaggtaaagataacatttatacattttatatgat

SEQ ID NO: 312477 - DNA, 1412 bp, Cannabis indica
caaaggttcggttaagactataatatcaaacatatacatattaatatatacaaattattattatggttcatttgttctcatctgtttttttttttttttttgggtaattttctttgtatgagttgactaagactatatatgcatggtgactataagaacaaaaccaattataacacattatcaaaaataataataaaaaaaaagtcatgacttttgtttatgttgacttataaagttataaggctatgcatggtaacaaatatacatctttttatactaaaggatatatacgtatacatatatatatatctctacttagctagtattcttggctgagactatgaatctgatattgttttcataacacttattaaaacaaatgttatatacatcttagcttccacagaaaaaaaaaatagtttaaagaattaataacacttcataaaatgttaaccaattaacttatactatatatgattaagaatctactttttattttattaattaagacttatagtttgtatttgttggatcatggtgatcaagtacacaagtcaccataacattcctcaagaacaaaacactaattagtgtatactgctcttttattagtatatgaatttgcacattagtacaaagcttgccaaagctaacaataattactatattggcttctatttatagaaatatagaaccattacaaaaggtgtaacctaacctaattaacatagcaatatagatgtattattcttaagaataatttttgtcataataaaataacaataataacatttgttcgttatcatatcatattttttatttaattataattgaataaaaaatatgtaaattttgttttacaaataaatattgataacaatgtaatgaaatatagtagatttcccaaatattaattaatatcattactttagagataactaagtgtaatagatattgactttaattttatttttaatgttaagaaaaatgtatacctagtcaataactttcatgtcatgtgacaatattattattaattagaaacaccaaaacttaaaattattactaaaacaaaagaaactagttattcaacaaaacacaccaaatttaaaatcattaattttaacgcgtacaaacaaacttacaaataatattatcatgacatgccctaataaggtactaaaatcacaaaattctgaaacaagatgtgttatcttcaatgcccatgtcatcaccagcgcagcgcagtagtgttctacaacaaaataaaaactaaaataattaaatgtaatgatgatcataggagaacgtaaaagtaaattcaaagaaataaagtacacataaaataacaaaaaaaactaaataattattactaacttgtttaagtgtccaagctagcttttcccctactc

SEQ ID NO: 312478 - DNA, 1334 bp, Cannabis indica
gatgaagggcttagtaatttatcacttgaagaacaagtgtcaattccagaacgtttgttgaacaaggaattggctattcaaggacttagttattcatcaccttataaagaaaagtcgatcagagagcgtttgttggatcaatatttgaaacaaagaagagaaatagatgagaaattagagaaattggaagatcattcaaagcaagtgaagcaattggagcaattggagcaattagcaaggcatttggtaatacaatctaagagagaaaaggaagaattggagagattggagaagagaaaggctaaacaatatgtggatgaattgatcaagagtgcacgcccataccaaacgtcttacaatacctcttctcccacacttgaggaagtacagtcgagcagaaagaaaattgagtgaagatttgtttaatattttcattatatatcttttgtaataaaatatttgtttgtttgtttgtgtttgccatcaagtaaattactgttttcatatattcacatctattttcatataacgtctgaatttcagtggtgtgcttagcattacttaagctgtcatatcattccgtttagcaaatcgtttgtaaactaccacctaatatattattggtgtccaattcttcctcgtctcaaaattgaaagttcttttgttggtttagaaatataattgtgttaggtgtacaatcaaagtcctacattaattaaaaatgaaatttatgagtatataagaatgaacaatatatgtattagaataagactttttgaaaaagtgcctacaaataaaattgcaaaggcttagggctaaagagtaacactgatatcataataataagtgacactataatagtgaatttgaagagtgcttgagtgtaaccattgaaaatgctttgagggaatcaaatttaacaacttttaatctccatatatctctttacacttaccttgaagagctaaaaaaccttttgcactaattaagaaaacatattgtaaaagatgatctctttgccatatacctcttcatggaattacttcgccataaacctaaccatttatttacaataaaatatcttattgaagagacacattatattaacttgcaaattcattattgcttaaaacctagcttgtttcttagcattcaaaactcattatatctactcgatcacatgcttcactcataatatctttttccatttgtctgacatagacactcaaattaaaattagcctaaaattaaagaaaagctaaaaggtattaatagtgcctaatacaatatggttattagtgtaatcaagtaataaatctcatataattaatata

SEQ ID NO: 312479 - DNA, 539 bp, Cannabis indica
aaaacaacaacaaaaaaaaaacatcagaccaaacaaacaaaatttgaaaaaccaaataaaaaaaaaacaaacctggttaacatctgcaataattctcaaatttttagaattcttagcatcatcattggtggcatctttagaagtaaaatcaatttttgcaccatcatcatgctttaaaccacctttagcaacaacaccagcctcatcactcctcacatctccatctccaggctcaccctgcccaagaccatctctagcatcatcaaggtcatcatcatcctcactgccatccccatattcatcatcaagaacatcatctcttttctcatcctcatcctcatcttcatcctcattctcttcctcagaaatcgactcttaatcatcattatttttataagtgcggagcgcatcatcagattgagtactagtttgagtaggaatagtatgagagggctggaagaaaaataaaattaaaattcgtaagaaaatcaaataatataaaaaaaaaaaactaccaaaaacaatataaaaaacaaaaa

SEQ ID NO: 312480 - DNA, 2202 bp, Cannabis indica
acttcaaaatagcaacgtacttgagttgatggtttgcatgggcttagtgttggcataatgctttgtttcataccgccaggaatcatacaccttttaaaatcttatatggtcgggactctctagcattggttcaatataagaaaggcacaattcaggtatcaatagttaaagggatattagaggagtgagatttacaatttgatgaagttaagatgcattttctttgagcttaacaaaaaatgaaagatgctgcaaataagaaactatgagatcaaagaaaattttgacactggaaaaagatgtttgtgaagttaaaaccttatcgccagaagaccccgttgctcgaatgagtgagaagttcttcccgcacaattgtgggcctttagaggtgttttcttgtgtcaaagatttcgcttacaagttccagctactttcatatcctccattcatcttatttttctcatttcttaactttgtcaagcgcatgagagtgttctagcatcaacaactctaccttcaaaactgagtcatgactttgaattcgtgtatgaacttgttgagttatttggtatacataaaacttacctgatacaagaagtgatttagagatctcgattaaatggagagattgaccattatttcatgccacatgggagaactatgattgcatgttgcagcagtttcctaagtttcaccttgaggacaaggtgaaattttgggtagcaagcaatgatgaacatcgaattcaattctcctatgcatggacgaattgaggtaaatgtggggttggtcaaagtaataatttggaaaacttttggtaatattattactaatttacacaatgttatgatttattttgtttttacttttaatttatttcttatttgttatgagaaaattatgaggtttaaaggggatgaaaccaaaagggttggcacataccagatattttatgtaaaatcaagtcttcgctctgaagagaaaccaagtctctagtgagaaactccataaagtttctcccatttcatatgaacgaacttcttatttcttatatttgttacttgatattattgagatacacaactatagtgcatcacaaaggcataaattgggagcaaaaacaagcatcatgttgactaacactcctagtcctacgagctttagttttggaccatcttcttgatgttttcaatgttgcaactttccaagtaacacccatcatcccactaattctataaacacccaatttatatttgataaaagcgggttggtgaaatttgaaaatattaaatattgatctcaaactttaaaaatagaaaccaaattaatgatccttgttattaagtgttaggcaatatattgctcttaagttaactaaaagttaacccagctaaaaattttcagaaaaaaaaaagatcaacctagttagaaagagcaatacctatttttgaagaattaaaagtatatttattgaaggcaaaatacataaattggattggtcctctctttccacactatgacccctataattttatcttttaaaatttttttcaattgcagaagtctcttggattataaaaattattacaaatttgttgaatcaccactaacgtcgtgtaaatctagtcaagtccaatagtgcggccaaacaaaatatgaatgtataaatagtattctaatatatatatattaggtaaatattatgtgcaaggcaccttttaagttattttgtaaatgatgtgttttgatttttaaaggttattagaatcaaaatattatatataatttaattaaataataacattattataataaaaaataattattttaaaactctataaaaggaaacataatagtatatttttggaaaaaaaatattaacatgcttacagcttttagaacaatttatctcccaaaagaaacttttagaataataaattgaattcaaaatgtattaaaaaatagtaataatattttagaaattaaaggaagaaatttgtagatttttgaaaattcaaagaaaacacacactacaaaaaaaatttactttttatgataactttttagtcacaaaataaattttttgtaattaaatggaatttttagtcacaacaaaaagttacttgtagctaaaagatagtatttagatacaagttgtcactaatttaatttaagttacaacaagtattgtgactaaaaata

SEQ ID NO: 312481 - DNA, 622 bp, Cannabis indica
ggaatgggttaatgaataattagggatgtatattttttccatggggatggggtcttgtgaggatccgctcttaatggggcggggatttcctgcataaaagggaaatggggcaggaatggagattactttttattcctattaagagttagtctcacattgttaatgtgtggaaataaattgtgatatataagatgaatgggttactccttccatagtcaattggttttgagatagaatctcatttattttatcccacattctaacatggtatcaaagccacttgggatccgttgtgagcccaaagtgtcaccggttcaaaaagtcgtttgtgatttgttgtgagctaaagtgccactgatccaaaaaagatacttccgctctctctgttaacctccatttgggacctttcgaccaatgtgtgccagttttcagtgttgggatctttaacctgtttcaaaattcacatatttcccgacgtgtacacccataaattttctgatatttggccttgtgaaattttttcaaatgccacatttggccctatgatctcttaaaggtctttcattatacccacatttttaaggcccaaacgtgaggatggtgtattaagagttagtcccac

SEQ ID NO: 312482 - DNA, 992 bp, Cannabis indica
ttccacgtttttcccacactgtccagcatcgaggttgacatcacatgtcaacctgggacgctaggcctagagtagccttcagtaaaattgccttcaatcactcaatattgatttgattgatgcgatccaacttgcattttgaagatatttctaagatctgtcaagtcatgtctcacacttaaatgtcaattctaaagttctcgactccaaattttaccccctaaggagttacgaatttaagctacaacttacccccgagcgggtcctgccgtagcaactagggcttcgaaaattgacggtcaacctcaaaagttaattttcacaattagatcattatttattgtgaaaaatagccaacttgtactttctcatatttttggattattttattcccattttcaaggacctccttcatctataaaaggagagatcctctagctgacttttaacaatcaaagaagtagccataaggtcagagcatctctctctattttctctctctagaaattagagcttccacacttagccattttcttttaatctcatgagaattaaaaactcaaagtagaggtatctctattactgtcatgacatggagagtgaactgcatttctattcatctcgttattcatctcgttaatctagcgagctagtgttggccacttttaggatcaacattttggtgctttcattaagggccataacttgagttacccaactacatttctatttattttcacggagctttgtttcaaaaggaatttataagttcaagcaagaaatcctcaatgaatacgagaagcaacattaccactccgtgtacccaggctactactcaagaagcaacaagcactaagattccccataagaaagcaaactatgagcgaccattcgaaatgactcaggctcggaaatgtcgatctatactagatttggagcgatcacctattaggaaagtgagcaacgagcgagcatccaaaaggactcagact

SEQ ID NO: 312483 - DNA, 1610 bp, Cannabis indica
cattccgtgggtgtaagggcccaatgaagacttgaagcggggacgttacagataattataaaattataatattgtatgtatatttgagttttattatacacatttattattattataagattttttaacgtatcatgcaagttagtgtatttgtatttacgtgttgtgttttttgatttgtcgtgtcgtgttgtatttaactctatatttctcttgttgcgcatgtcctacgaatttgtagcattgtgtcacatgtaggttttttttaggaaaattaagttaattttagcaataaataaataaatcttaaaatatcaaaacatacaaagaaagaaaaacatgtagaacaacaaaataaggaatatataattgagattaaattgtcatttgttttagtttagcactttcaacaatttctctgttctatcttttaaaatatctcatcaatttttttttttattttacctcatatatttatattaaaccatacatatcaacttctctatattttttctccatcatttaaatattatatttttacataattttattaattaaaataaataaaaaaagaaaaaaaaagagtaatgaaataataaataaataattaaaagaatgagagagaaagagaaaataatataggtctaattcatctacttttctaattaaggcaactccaataataaatattaaatttgatgttaaatcaacataaaaataataaaattgtaacactaaattttgttctaatcacaacacaaaattacattaaaactacattttttttattattatattattttattgaattataaataaacaccaataatatatatacaaaaagtttatttataaatatattatttaaataataaaagaaagttgatagtatgacactattaacaatattatatataagataaattttataggattagcataaatttaatgtaaaatctcaacaaatttaaaattttagtataccttataattggagtagatcttactaattgacccatttcaactcattttatttttaacatgataaaattatcttattatatcatattatccaaatttatatgaatttaacatatatttttattcctaatttttatcgtctttctcaaattaaataagcgttatagtttgaaaatttagaatcaggatcatgtgtacttattagtaatggattcattttgaccctatttttttttaattaaaattaattgaagacgttgtgggatcattaaaccttaaccatttacgaaaaaaataaaaataaagcttaaccctttaacctttcaacgaatatatatttctcgagaaaaaaaaaagaaattaattagcaattttccttccaaattttgatatagaccaaatcatgacctctgaattttttggctgtgaaaaatttctcctgaactattaagattgttagatttaaagatttttgtctaatttcattaaattttactgtttcagtgattgtttatgtactaaaccatgctccccagattttgatatctaccaaatcgtgtctctcaaattttgctatgtactaaataacgccccctgaactttcatccatgttagaatttttttactaa

SEQ ID NO: 312484 - DNA, 596 bp, Cannabis indica
attgaatatccagttgaaacttttgacagcccaagccccatcataaagtacaactacaaacacagttgaatatgcaaacaaaaatgagaaaaaaaattaattcatataaaaaatatgtcgagaaatattgcgaaaaatattgtaatttatcgtggaatacatcgaaaactatatcgcgacacatcgctgcatgtcgataaatgtcattttggacttcaccagacactatgcctaaatatatcaataaacatcgcaaataatatcgatataaatggcaaaaatcatcaaaataacacaaaactacagtgtgtcgcgacatacattgcgacacatcgccacatatcgttaaacttcatccccgacctccaacacactcttttatcgctaaatgtcgctaacaacatcgttaaagatcgctaaactcgcaaaaaaatccagaaaatgcaaaatcgttgtatttcaatgatacataaaaacaaggatatgtgtagatctattcatagaatcatatcaacataaatacaattaaatccaataataattactaaagaaattacatacctattattttttaaaggaatttctttctaaaagtt

SEQ ID NO: 312485 - DNA, 2408 bp, Cannabis indica
aaaaattaaattatattttattttttataaggaatgccaattaattttaaagtaaagggagttctatttacgcctcataaaataataaatatatcccataatgaaacacaatgggatatattatataggatacggttacattgatcaataggaacatgtaacaaaaaggaattaactaattgttgtaacataaaatataacaactaactaaaccataactaactctaatacaccccccccccccctctcaagttacactcggctctttgagagttaacttgtctctaaacttggcaaactgaacttgtggaagtggtttagtcaatatatatgctgtttggtgatcaactgaaagatgtcgaatatcgagtgtgtgatcaaggactttgtccctaacaaagtgaaggtccacttctatgtgcttggttctttggtgaaagacacgattggaggcaagagatgtggctcttaagttgtcacaccagagtatgggacaggagtgaagttgaatattgagttcactaaacagtgactgaatccacacaagctcggtggtggcaagagcaatagcacgatactctgattctgtacttgagcgtgccaccactatttgttttcgagagctccacatgatgagatttccaccaaggtagacacaataaccagaagttgagcgtcgatcttctatggaactcgcccagtcagcgtctgtgtaggcagtgagttgaagagtggcagctggtctgaagtgaaggccataatttatggtgcctaccagatatcgaaggagccttttgcaagcaagccagtgttcatgggtggggctcttgagatactgagagagcttattgacagcaaaggagatatctggccgtgtgagggtcagatactgaagtgctccaatgaaacttttgtagagagttgggttgtccattggagtgccttaggtagctgataacttggtgtttggacacatgggagtgggggttgaggctgctgcatccatgttggtgcgagttagtaagtctgaggcatattttgccagtgtaagataaatgccagactggtttcgagtgactttgaaacccagaaaataccttactgggccgagattttttaaagcaaattgttgatgcagttgggagatgagttgatgaataaagggagcatcttcacccgtgagtaagatatgatcaacatagattaagagaagagtaagtttgcctttctttcttagaaaaaatagggaattgtcagcctatgagttgtagaatccccattgcttaagggattgtttgagcttatcaaatcaagctcgaggggcctattttaagccataaatggctttgtgtaggttgcaaacatgagtaggatatttcagatctttaaaacctgctggttgtgccatataaacacactcttgtagattcccatttaagaaagcattattaatatctatgtgttgtattggccaattttgagtagctactagagagaaaattattcgtacggtacatggcttgattacggggctaaaagtctcaaagtaatcaaggccaagagtctgttggaatcctttggcaacaagcctagatttgtatctgttaatggtgttgtccgggttgtatttaatccgatgaactcacttgttatcaagaactgtcatcccatgttgaaatggaacaagactccaagtcttattcttaacaagaccagttatttcagtttgtatagcaccaaaccggagaggatcttgaagggcaactttgagtgtctttggttcaatactgatatttgaggactgtaagggctttgggcttatgtattccagctttgggctttgtaaccatggggtgcttattgacaggttgagaaataatggatggctgagtttgtgtgctgtcaactgagtgaataaatggtttgggttcatgatcatttgatgatggtgagatactgacagagattggtacagtggagttgtttgttgcgggtagtggagatgggggatgattagtagtatgaagtgggggtgaaactgggtttgtggcttgggaagcaatgataggggtggtggtaaaggaatttggaaggcatgtgattggtttggtggtgaggttgtgggaacagtaggttgttttggaaatagtgtgttgtatggaaaatggtgttcattaaacttgatcgttcgtgctatatagactctacccgagggatgcatacacttgtaacaccctaaataattaggcacgctactcaaaatacttatggaatcctaatcccctaattagggattactaatcaaaatagcgcagaatttaaacttttaaattaaacggagtgaaaataaaacttgtaatatatttaaacttttaaacggttgggatcccaaaaatatttataaactt

SEQ ID NO: 312486 - DNA, 416 bp, Cannabis indica
ctatctagctttgagtaaattctaactccctcttcatgttgtttgaccacatgaagtatgacccttgaactttttcaactcatcaactttgaccccatagcgagccagtcgttgagcatcttgaattttcagagtgttttgacttgtcttccaccattttctatccttatagaaaaatatagcattgaagtcaccaagaatgatccatggttcttttagattgccaatgcctggcagcttgccccatagctctttcctcaaattaagagagttgctaccataaactgctgtaacaaaaaactcatctttgaatcccacaattttgatcttacaatgaacaagttgactatcctccataatcacctttacttgaacaagcttgtcaatccatgtcaacattatgttggaaattattt

SEQ ID NO: 312487 - DNA, 2784 bp, Cannabis indica
aagatatggcttgattgtgaagaaatagtattttagggttaatttattaattaagagactttatggagtctaattaataaatattataaatgataattttatttgataattattttaattattaaataaatagttttgacatttatagggttgaaaatgaaaaaagtggtatttggaaaaaatagataaaatagttgaaaaaaatgacaaaaaccaaactagtgtagggcccactatgtggccgaccactaggtgcaaattttactctatttttatcaattttttattccaaataaatcaaccctaaccctagtgaaaattagtataaaaggaaagctatggtctcattatccaactaatgcctcaaaagctaaaaacctaatcttctttctaggttatgagacttcttccttcttcttcttctaattttgaaaataccatagccatcttcacaaaccaatttaagccttagtgattgagtgcatgcccacacatatcaagtaagtcttcaatcatagtgtgtaagactatgaagaatccaaacaacaagaaggagtttcgggcttagatcttggtgatactctgctgcagaaaggatacaagggttagagatctgagcggaatgagtcatataattccgctgcaaccaatgtaaggtttctcataccttttatgtgtttattttatatctttttagaagttcatgtttaggatgtgaaaaatatacttgttagtaaatctagatactggtaaaacatattccaacaaatctttgctcaaaataacaattcaaaacacacaaaagcttgaaccaaaaccaacaaaaattttccatttcacaagcttgaacacaaagcttttaaacaaacaagaaaagcctagaaaataagagttaaaacccagaattcaaacaaccatacacagccctaaaatccctcaaacatgttagatgcaacctacatactcccaaaagcttaaacacactaaaaccaccaagattttacatcaaatcatcaataatccacaagagttgcaacaacatgtatttcatcccaagaacatcaagaacacttaataatacgtcatataatttcagaaattataaaatcaaaaaggttaagaatctttaccacaagttctcctaagcttcaagtacaaaatctcaccaattacactccacttcaagcttcaattccaaaaatggatcaaggtttcaagaaatgagaaagggagagagagtgggtcggctaagggcttgaaaaaatcagaaaattgattttcaatataatttctcaaaatttgcttttgttgaaaatgtgataaatggtcaaatgaccaaaatacccccaaagccaatatattcacgtatatgtaaataagggcaaaatagacattgcaatcacacatatataacacaatatttttcaggttttcatacttatcaaataaagccaaaactaaatcccgaaaatgtattttgggccccaaacccagtttggcccaaaatatccagttatgactataccacgccgatttgtcagaaaatacctacagatagacagaacaaatatacaatataataatatagtccacaagcacgatatatcattaaaattacaattttacccttctcagatcaaaattatgaaaatacccctaatacactaatgggggtcttaaaatgcaatttattagtatagtttcacatattaaattgtataataatacaatttcacattaatacataattaaactagttaaggttgctaatctgattttataaaccttagggtattacaattgtaaacaacccgattagaaagagattagcactataacaattcaaaaagaggtttatagtccttggcggtgaaaaactattacaagtggtttggaaacaccttggtgaaaaattctaggttgtaaagggttagtcaagcccgttaacttagctcgttagtggaactcaagctaggtccataactttgaataccaaggatgtaggtggctttattctaccgaaccttgtaaaaattgagggtttacaagcttttacccttaaactctttactttacaagcttgattatttgcttaatatattttcttgccatactatttgcatttacttgattaatttcatagttttgtgttgaaagttttaatttactgaaattagtttaaatttctaattcattcccctcttggaaacatatcttggtttaaaaattggtattagagcaaggactcttatttatggatagatttcacattctaagagtatgttgtttccatacaattcacacaatagcatgttagaaggtttaagcacaagtcaaacaccattttttaatggggtagactttccttattggaaattagaatagaaacttattttcaatccactgattaatatttgtagtatattttatgttatggtccttaaattcctatgcatgttgtagatggtgtagtaactgcaaagaaatatgatgcatatgatacaagtaataaaaagatgatgtctaaaaattccaaggctaaaaatgctcttatatggattagatagagatatatgtaaaaatatttagcaagcctcatcgactcatgatatgtgaaaaatattagaagtaactcatcaaggaactaatgctatgaaagaaactaagtttcaaatttattacaatacaatataaaaatttcaagatgagacaacatgaaactatttctaacatgtatactcattttactactattatcaatggtttgaactctcttggtaaggt

SEQ ID NO: 312488 - DNA, 571 bp, Cannabis indica
gattcttatttagctacttaacaaagcattaagcttttcttacctcagtcaagaacgcaagtgtacaggccaactcgagtggaaacaaagctgggcgatcccggtcctatgtcacgacaactaaaactcaataaatgcattaaaccaaaactccataataaaaccccaatccaaaaccgaataggaacctaacttccagcaactccaaaataggtcatatagcacataaacaacctaaaacagatactacgcaccaccccgagccaaaatagaacttgaagaaaatctaagaatttcccctgcagggcaaccggtcgaccggttctattgcaccataaccaaccggtcgaccgaatctgtcaggccacaaattcaagagctttcttctccaaacacgaaccaaactcttcccaaacctgtgtaatagctccagaatagtaaagtatcataaatacaacatactcaattcatcaattcatcacaactcatcaaattactcaagtcatcaaactagaatccaagaaatggggtttaaactaaaaaaaattctaaaccaagctaaacaaccaag

SEQ ID NO: 312489 - DNA, 1686 bp, Cannabis indica
cataaaacccaacaacaagatatggaaaaacaataaagtaacaaccgaaacgagttaagcgaccatcaaggggctataccaacatgtcaggccaaccatgagaagcctataggctggccagagtgagcttgtatggctggccaagatctgggcacaagctggccaaccgaaaggtgacttccaaacaatgggagcttccatttcaccaagagaacctgacctctacaaggaaacagtgtcaaagttgtcctccacttgccaaaggcgggccttcacatccaaaagctagcctcctcttactaaagctgacagtacctgcaggatcctggcaggcacatgacctcaacctacagaccttgtatggtcggccagaccatatcctacaatgtatgtgggaccaggattggcgtggcaggattctctatacagcctgatacgtggactgcaatttacttacgaaatgggctcttaacagcccaaaacttatggaaaatatctactttaaagggggaatttagtcttttatatgtaatcaatttaatatataaatatctaagacttcagttgttaattagggtttaggcgttcctatataaagtccttaactctaacctagaaaatctaagtcaaattgctataagtctaaaccctaatctctcttatttcactctctctctctctatctctctcactctcttgtacacgcctaaggggctctctcatcctctcacccacatgcctctaaggctatacctctatctcattagtgatctgcatacttgattcacgttttgtaaccttatagactactatatcaaatctcacctatagtgatctgaatagtattatctggtactaagacaaccaaaaggagagtattacccgctaactaagggggccaaacctctataaaaatccttaacttatttactttattgttcttattatgtaacgcgtggtaaacattagatttatacgaccgcactatcggttgattatttttttgaggtcaatagtacccttcaagtggtgttgactgattcttctacttgggtgaggtgcccttcctaatctggtgacatccgattatagatgtagatatcttgcatcaaagatggttttgaggcccatctctccgtgtactcttggcccattatctcgccgtgcttctgaggatgccttatcaattaattttgtattggaaatgtctttattttagaaatatggataatattttatatatttatatatagaatacttcttaatggataataatagatattaggaaaatttacaataatataaatttttgtatcaaatttacaataatagcgttactactattactgacatgccatgtaagttaattctaatgtacttgatgctttctattttttaattattattttattttcttgctttttctaaaagttacttttttgttactaatagtgttgatacgaaaccaggtaactacctttacataaaaaactttacgttcatatcatataatttgagatacattttggttacttccaaaacttattgtaaacatcttagtaattaattagttatttttaggttctattattatagcttataatttaaaacacattaagttaactttaaaatttatttatttatttatttttttttttgtataaatcaggacattatattgcacaa

SEQ ID NO: 312490 - DNA, 609 bp, Cannabis indica
ttttgcttgtttggactgttgattcctcggacgttccaactaagtattctatccattaagaagaggaggctctccccccccccctttcctttgcttggcccttcttgatctatcttttgttgcccttcaattccttcagtattatcattcagcccaagagctttaaaagtgttagacaattgcgtatcaggtactgactctttattttttggtttccaaccttttgtcactggttggaaatcaccaagattcttctgcaattcagctcccaggtcctttgtcttactcttatctttcactacccattcttgcttcttcccctctttccttctacagtcctccgatgtatgccccattccttggcagtgcttgcaaacaatgggtttccattcatatttgactgccaccgagaccttaataccatgctcattgtcaaagtaaatcaaatcagggaaatcctactgcattgatgtgacagtcagtagtcccgtgatccgtaaggggaaataccgggtaagctgtgcaatcccacaccgcctagggaatgtcaagtgggatgattctgagactgtgtaggtatgggactacacagttgaagagagcttaaat

SEQ ID NO: 312491 - DNA, 916 bp, Cannabis indica
atcccacttataacctgattaacagataatataaatataaaccctaattatttaccattaggcttatcgggatattacacctttggttttggtcagccttgacatacttctgtaaatgcgagttattttttcagatcaaaaactcgatttcttgctttagattattactttcgtttgtgtcgcggccgtaatctgcatgaaagtggtaaaacttggatttatttctcttacttacatctttttcatgagagatggttttttgtacgacaccaaagactaagttgtcgcatagactgtgtctaggtcgtctgtcagtacagagaaggcaatattttttgaggcattttccctggggtgctactcgacattgctagttaatttccccttctttctattaccctgcctgttgccgttgttagacctcttcccatttgaatttgagctactggggtactatggattctggacggacgttcttatcgatgaggcaagttgctggtttttcttttgtctgacattatccacacatcgaacaacttcttcgaactttatgaacccatctgctatgtctagaaattcagccattgaccccacaattaaccttttaatgtcattccacaactcttcaagtggctcaatgcccccagtattgcagccagcctgccttcttcagttagccctttaacttttgtagcatcgttcataaacctactaatataagctatggggagttctcctggcatttgctttacttcgaccaggtatccaaggtatgagggaagttgacgagaggaggaaaactgtgcatgttgttggaaatattttaccaggatcatagatttactaacaagtatgttgtttaaacatcctaaatatgaacttctaaaacgatattaaataaacacatataaagtat

SEQ ID NO: 312492 - DNA, 1856 bp, Cannabis indica
cagctgagagaaaattagggttagaagttagatttattttttagggttaggttttttttttaaacgggataaagcccataactgaattttcttaatgtatttttgcttcggttatgcaccgacgctaatagtgtatataatcactttttacatcggttgtagattgacgctaatagtgtaacatatcctctaatatatgaattatcctcttggactaaccatttatctaaggatggaaaattgtactgaacttctgctttgtatccatggctcgctggagacttttccaaaacttagaagtgaacttcagatccctatctgaaacaatggacttcagaatcccatgaagtcacactatttcttttacgtaaagctctgcatattgatctactaagtaagatgttttactagagaaaatattgctgacttggtaaatcgatccacaactacccatatggagtcaaacatacccatggttctaggcaatctaaccacgaaatctatagtgacatcttcccacttccactcgagaagtgtcaaacgatataacaatcctgtaggtctttgatgttcaaccttaatgtgctgacatgtcaaggatctggtcacaaattccacttgatcattcttcataacacaccactagtagtagggttttaaatattagtacatcttggtgataccagggtgtaatgaatagggagtggtgtgagcttcatctagaatatcctttctaagttccataatattcgggacataaactcgggttttataaagtaatattctgttaccctacactatgaaatctctagcttggctagctaaggcttcttctcggatcttcagcacatctggatccaccaatgatatggaatctatagcttctatgatcacatagaagtgaaacgatggtttccttagagcttggctgaacgagtttaaatggtggagtactaattttagtaattatattagtttacaagtacctaagtattttaaggattaaatacattgaagggtaaaatggtaaatttcaaccaacatgatctaaattattcatagagaatcattgattatttagagtgaaataattgatagtttatagcatatctatacttagtatagagcattctatgtaatcaagagtggaatttcaaatttatagtggagtcaggaggagttaacaagataaagaatttacttggtaaactacaaaactacttgttgggagcttggttatattagccaatggtccccacactacatgagataacattatcttatggactcaattaattaattttattaatcgattagaagtctgaatcagaccatgtcttacttatgagtttcactaagcaatgacaattttgagaagagaaagagattttaagatttgtttattaattaagaaactatgaaatgactaattaataaataagttaaatgaaaattttatttaataattaaatagataaaattggaatttataaagttagaatgaaaagtggcaattttgaaaagaaagataaagttttataaaatggcaaagttgaaacatataggcccacatagtatttcagacataccgtttaaataaggatattttttgtaagacacaattttttgtaaaatatttacatttttacgttcaaagaatattttttttttacatttttacggttttccaaaaaataacacgaaaacaacataaaatcaacaaaacaacaacataaaagtaacatgaaaataacaacaaaaaacaataaaaataacatacatataacaaaaattaacaacaaattaacaaaatttcaacataaaaagactgtattttatgtaaataaaatcaaaaa

SEQ ID NO: 312493 - DNA, 744 bp, Cannabis indica
cattctgtcatcggttgtgaagtacttactagattatgaattttcagtaaccatgtgttctcttaaattacaattgtgcactatcgatgaggaatcattaattaaagtacccaaaacaattcaaagaagaaagaaaagaacaaatttgagacaaatcatagaaacgaatttacttcttacaacttttgaggaaggcattttttaaacaaactatggctacaaaataccaaatctcaaagacaaaaaaggacaagtacatgtaatttggagatgaggctgagagtaaatttgatttggaaaaagaaaaaaaaaattacagataagaggtaccatagatttctggctcaactaggtgcttcgactgcaatacaagacatctcaatgctccatagtatgtacaaaagagaaaaggaatttggagaggcaaaccaaagcaaaacagatacagactatgctcactaaaactcatttatatctcttaaattgggagtaacaatagtaaattgcttgtacgtgtttctacataagcctgtgtcaagaaccaatcacaaggccctcccgcgagatattcgtaacacgtaagactgcctgtgcactgagaggagagagtttcgattgacaaaagctctcccaagagttcgtctcggggtgctcagatacttcttccacggatgaaatatcgaaagatttctgataaacagtttgcagctccaaaagaagactccgagcagcctcccttgattc

SEQ ID NO: 312494 - DNA, 576 bp, Cannabis indica
acaaacattgctgaaaggtacttgatacttttcaaggtgatttgtgttggacacatcccaaagtaagtagcaatgtcttggaagtatggatgaagcggcaacactgcccctgctcaatatgatactttgaccaagccaaccaaactaggggaagtcggttcaccctttgatctctatgaggtatctcacaatggacacccctcactaaaccactaacaagtaccttgccaaaagcatcaacatagagggtagaagcgagtgagacccaactgtctccctgtggtctagcatccagtatctcaggcttaaaagactataccaagatatgatccaagccaagcactgaaggcccaccaagcctgttcagaaaaatccattagcttcgtaacgacccaaagggtagttggagaggacaaatacatatcctgtatctccttctcctaactatgcatcctcctcaagatcagactcagtatcgggactctcaaccccttagtcgacctcaggcacctcttcctggtcaacctctagattaacattaatgtgaagctgagtagcctcctctacaatcctgac

SEQ ID NO: 312495 - DNA, 2176 bp, Cannabis indica
tgggcttcacatattggacctaaataaatataaaaattagtatttttataatatgtggtgcaatgcagttagaaccgcatatcaacaatttaaaactacaaactgtaccgtacgtcgcggtttaggaaaaattcaaattgcaattgcactgcaaagaattgcaaactgtattttttggtaatgcaggcagtttaagcggtttgagcagtttgatgaacaaccctactagtcagccatgggtcttaggtggtgatgagtttggggaatagtaccactaattcctatttagttatgccaattcatatgttttgtttttactttcaatagtgatttttacaccactttccaaaattagtaaggattgtcaacggtacgaggataggggaataatttgatctctattgggtaattggtgatttgttgaatggctcgagttgcttttgcaagagtgtcttattttctttcagatttgtctattggctttgtgttatgctccaattgtgaaagagtgtcaaaacatagttagtcttgttattacctttatttattatttaaatagtagaattattattttttaatttttataggaaaatcattagttaatagctattgatagataaactctctcaagtacctatttagtttgaaaacttagtatatactttacatttctttaatgcttcatcgctgacgtgtctttttggatatttagttaaggttgatgttaggggtttcttcccttttattgtaagcgacttgataagcatattattgataattttattctacaagctatattttcatgtaatggattttgcccaattggcctattaatagaaattttaaaataataaaaaattattaatttataacaaataagtaaataaaaaattttaacatttattatagcgcgaatttgattcattatttattttgtaccaaatttaagtcaatgttaaatttaatacaacttttacaacagacaattcattttttttaatacgttaaaacatgtcaatgcacaatctttacaactcttcattgaataaactactcttatataatttaatatcaagactgttatatttttgtttaaaatgaaataattggaatccccatttgattgtaccaattaaaaaacgatgatgccatatgaacttatattcataatcaattccattttcttttacacattctcattctcattcctttttttctttttcattccattctcttttacacactttcatttcacatttcatttttcccctattcaattctcttatacacatacattatatacatatctcatttccttgatttatggcagggacatcatttaattatttgatattcaaaatgcataatttttccaacaataaaaaaaacactaatgaaatacacatgttatttattaagttaaaaaaaagatgcaaaaatgagtataaaataaaatgcttttatcatttttcaatagttaatcatgtgaagtcaagatatcaacacttggagttagaaaagagaaggtttgtcagaaatactagtacttgaaaaaaggggaatataataacaaattaagtgtagaacaaagcaaaagatggtgcaaaaccatagcacttgttctaattgcctaaaagagaaaaatcaatgacaaattttatttttagagtcaatttaaggtggccatctatggtcaatatatattcctactcatgaggacaaccatgtggctataagtaggtcctacatatgatatgatcccataactaatagatttgggataagattatatataatagatccaatgtagaaggaccaaatatcattttgcattattattacaacatttgtttccctttgttggttgtagtgaccactttccacttaactagctagtcaatatataacatgactcattgattgatacaagttgaaaataaaaggcttgttgtagtttgattttgagtcactaacttaagttgtgaagaatgcataatcaatttcaattgaaaatcctaacttaataaattgtgtctaacacctattttactaacactttaatatatatttaaatttttaaaacataaataaataaataatattaattggtcgaagaattaagaaagaaaaaaaaaatatagattataatgttagacttttatttgggcttacatta

SEQ ID NO: 312496 - DNA, 2585 bp, Cannabis indica
ggggatccctcctattgtaaaagtttttacaaaataactatatataacgacaagtccaaatacgaaatcaaaatacacaacaaatatagcccaaaacaactcctggcaactcggcacataggccggtaaggtcaatatgtacattgctagagaagactgtcaccttatggttgcactaatttttctttgcctttacctgcaccactgaaaaaccatgagtcataaggactcagcaagaaaactaataaaagataatacataaaataactaattattcattccagtattataaaatgattaaacaattcaattaaagagtggataatataaccagccatatgtatggaaataaaagtaatcatatatcacgttgcctaatcaagaaaacttgtgtcataatctggtatcacacttaatgtcgttgtatcacctaattagataagcccgtgccataacttggcaccaatgtatcgcatcgtccaactagatgagcctgtgcctcaacttggtactaatgtattacatcacctaaatagacgagcccgtgccacaacctggcaccaatgtatcacatttcctaaacagacaatgcatgtgtcacaacctggcaccaatgtatcacatcgcttaaacagacatcattctctaacaactagtaaatgagagactcctttctattgtcatttcgtaacttattcattgttcttcaccaatttgagccatagcgatagagtaccatgcccacacatagaaagtcaagtactcaaccatagtgcagaagacggtggtaaccaacccgaaggagaaaaggacatccggactcaaatcttgttattactctcaacagaaaggaacaagggttagagatttgagggaaggagtcatattattctgctaccatcaatgtagggttttctaaactcgtatgtgtttgatttcattattttagagaattcatattgagggtgttaatgaaacacacatgttagtaaatctagatcctgtaaaataaattccaacaaagtggaggtcttcttcatcccttctaaaactgtagcagcacaagaggtcttcttggcgagtgacaacaatgtgttgtagcactcgcgagcagttgcttaattgcctaggagataaccgataccagccgtcgttgggaacttgacagacaagtggtaaactgatgagatggctgtaaggtcagaaaaggtaggcattctgagcatcacattgtacagagacttcacgtccaccattatgaatgtggccatgatggtgatctgccttagggtagtgcagtttgtgagtggtagcttgatcttgccacatggtgggatgctggctctactgaaaccatacttaagttgtttgcattgttctagctcttctaatgttaagcccattctgggtaaggcttgcttgaacatgatgtttgatgacgctctgtcgtcaatcattaccctagccaccatcatattagctatttggatctcaataattaaaggatcattatgagggtaactgacatgatacgattctgattctctaaaggttattgattctttttcatagcgctcagactttggaagtcgttctgctacctccaggactttggctcttggttcttgttgaagtgcccttgcatacctttctaaggccttccttgaattcccagctaagtgagggcctgcaattacaatctctaccctgcatgcaactggcgcacgctagagtgcagcattgtccccagttggagcttcaggtcgcacataccattgaagagcagcatctttctgtctaatgagaaattctatctcgtcccacaactggttacactcgttggtgtcatgaccgttgtaacaccctgacccacaagagcgccacgtgtgtacttttacaaacttatttctaactaatctattagtttaaggaatgtgtggtttaattaaaatttccataattaaattgaaaataaaactttcatacaaaatactgtcataatacggggatcccctgtttataaaaattcttttacatccatttacgactattgttgttacaaaagtaaggttatacttccaaacatagaaaagggattgatcctgcttctcggaagccaagacaccacgactgatatgtacactgctgcaaagacctcaaactcatggctgcccaattttgcctttccctttacctgcaccatttagcacccgtgagtcacaatgactcagcatgaaaagctactaaaatcaaaaacattgataatacaagtattctcatcacaacatagtatatgtgctcgtgattcactgcataatcagcacgcgtacatattttacaatctatacaaacacattcattacatattattagaaagtcatagcaactcataatcaataatttcatcatttcactaacagatattaattcaatacataattacatactaacatacttatacaatttcatatttctaatcacacaatctcggtatttcattaagcacccttacaacttgttaaccacaagctacatatgtcaatatcgttgcccgatacagtgaacaataagtaagaaacttatcc

SEQ ID NO: 312497 - DNA, 1722 bp, Cannabis indica
aaaatcccacaacatgcaaaaaatttactttttcttacaactcaagaaatcaagaacaagttacaaaaagcttaccaacaatttgagcttactaaaaccttgagaaaacagcttgaatcacaaagaaaaaccccaaatccttgctgctcaaagagggccgaaagagagagagctagagagaaaatgggtgattttgaaattttttcctttttctttaaattttggtaaaatgaaataacatagtctttacttaattacttcagccaaaaaccactaataaaagctgaataaaattatagctaagtccactaaaggacaaaatacaaatggggcaaaatggtccacactaaaataacataaaagggatactgagggtatttttgggaaattctaaattctcaaccaatcccgacattcccaatgtctaaataaactgcctactatactaaaatattaaattgtgattctaatgagccatacaccgtgttccatgttaccgggcaccgaaaatacaaaattatgaaattccactatatgacataaaaatgcattctgaattcaaataaatcaacataaataattatttaaatatccataaataattttcataattaaattctaattatctgctaatttctaaatttaaactaagcggtctttacattgtgatggcaaatgcctagcacaaaagtatctctttacatagactcaagttcgtatgagttacttggacttcagaggtagaaccaatgttgagcactgaaagtcgttggtcagtgtcctcatgactctagctctgaaggttgttggtcacgtgtcatcacgactctagctctaaaggtcgttgatcatgcatcctctatgtcctcacaaatctagctctgaaggttgttggtcacatgtcctccgtgtcctcacgactctagctttaatggtcgttagtcacgtgtcctcacgactgtagtcatgagtagacctccactttggacgtaactccactttggccatgagtgtatctgagtggactcatcatggtacctgggaaacttgatcatggcacccattgaacttcgtcatagtgcccgaggaacttcgtcattgcacctgaggaactttttcatggcacttgaggaaccttgtcatggtacctggggaacttggtcatggtactcaagaaactttgtcatggtacttgggaacttctattgactcactctcataagtgtattgaaatcactaatatggaccccgggatttttactcccatcatatttttcgtggttgatgtgttgaaccctagaggatttagtagtgtcaagatatgtggtgggaatgattcgagctcctcctctgacccgtacccatcgacatctttgttggtgtttaaaaaattattggatttattgttctatgtcgtaagtcttaggtcattaatcccaaaagctaggacattgtgatcttctggtagaggagcaaccatattaaactgagatgcatattccccctattgaggagggacgtcatatggtgcctgatatgggacatccctttctgcatgccccttgtttaggtggtctcttaggttaggtttccttctttggttgaggtgatcctaaaaatctgggtcccttgcatcatgaggtggatgtctagggtactccttgtaaactgaggtggggcattgtcatgaacactgttggaattatttttaccaggatctta

SEQ ID NO: 312498 - DNA, 794 bp, Cannabis indica
ttcattttgatgttgccatttgagactttttctcaaacaatgtgacagtcgatttccacgtgtttagttctttcatgatgaactgagtttgctgcaatgtgtatagcagcggagttgtcacaaaagagagtgaaggggagttgtggttgaatgtggaaatctctgatgatgttctgtagccaagtgagttcacatattgcattgccatgaccctatattcagcttcagcatgatcgtgatactgtgggttgcttctttgattttcaagagataagagatcgaccgaggaagacacaatatcatgatattgatctttgagtgttaaggcatgcatatgctccccaatcaacatcagcaaaagcttggaaatgaatggtagggcagtaggcatagaaaaataaaccttgtccaggagtgcttttgaggtaatgtaagattcttgttgcagcaaacatgtgtggttcccttggttttagaagaaattgaatgagttgattgacagcaaagcttatatgtcggatcttgtaagatatatgtgtcagaaaataaatgtgcgaagtaaatgaaaaaggaattgagaacttactcaaggatcgaaagtctggattcaggttacgccaagctaaacgagcagtgcttgtgaaaacacttcagcaaagttgaagctaaaacctctctttttgctctaaacttacttagcaaagaaggttggtgaaaatgagtttgtgaacaaatgctcaatggtatttataggcaaacaaagaaaaggggtaatcatttcaaaaaacctcaga

SEQ ID NO: 312499 - DNA, 2668 bp, Cannabis indica
aaaagctaaaatatagtttacaaaaacttccttttttttcaagtctttaaaacttgtactttgatctaattcttatggttaatcctaatttactttctaatataaaagtaatagtaatgattgatccaacttttgtaacacgaaaaaatttagactattataatatataattaattttaactcttaaaattatatttacatatcgttacctacttaaaaatatttataggtggaattagtatataaattaaaattacatatgtattattacttttaatataaatacacaaataaatttagtttgaattcaaagaagtacaaattcgaagcctttattgtgttttgtcaatcttttagcttaaactctattaggaataaggatagttgatttatttacctaactaattatgttgttgagagttaattgcgagtaacatttatatatagtgttgtacctcatctttgttgattaattacaattacatattaataagatggtattgtattgtctgtccattttgtaatatggtatcagtgcaggaaatataggctttcttatacaatccagttaaccagccaactgcgtctgtcttctctgacgaagctgcgtcacctctgatcttcctctgctgcagtcttcttcttgttgaatctcaattgcttcctcctcgttgagattctgcaatgtctactgataacaaccaaacgaagcaagggactcatggagaagcctcgattcagaccattgttggtgatccacaaaattcttctcttcaaatctcgacttcaaagaatccacccttcaccatggagagaatccaggacataccttggtttctcaacctctcacgggataactatgtgtcttggagcagggccatggaactcgccatctcagtcgagaacaagattggtttcttggacaattctatctctaaaccctcaccttctaatcaagttctttataatgcatggatatgaaataataacattgttatctctaggattttgaattctgtttctaaataaatttcatctagcattctctatgatgaatttgcctctgccatttggaatgaccttaaggttcggttccactaaagaaatggcccccatatatacaacctgagaaaagatcttatgaatcttaaacaagataatcaaactgttagtatgtactttactaagcttaaaactatatgggaagaattaactaatttcagaccatcttgcacttgtaatggatgcacatgtggtggagttaagagactccaagatcactatcacatggaacatattatgtcatttctgatgggactttctgattcgtattctcaagtttgtggtagcatcctccttatggatcctcgaccagaagtgaaccgtgtgtttcatcttgctacacaagaagaacaccaaagaggtattgtatctaacaccaataattctaactcaactatggctttttcccttcaagggaataagaatgcaggacaaaagaatgataatcaaaattctaagactcaacctcccaaaaggaacataccattttgtactcactgtaacattctcggacacacaattgagagatgttacaaaatacacgtgtatccacctagtttcaacaagaataaacctaaagaagccaatgcaaatcatgtccaagcgactgatgaaagtagtagcagtcaactagagaatcatgcactccttccacaactgaccacaactcaatattagtaattactcaacatgcttgcatctcagaagtctggtatgaataatcagaaccaagcacctcatcatgtaacacaagtatcattttgtcccataattctgaatctcctttacataattcttggatcatggattctggagcagcaagacatatttcctctaacatgagtattttccaatgcatatgtaagatacttgcaactaagcttattctacctaacaatgttttttttgttaaccaatgtagcacagttgttttgaatgataaaattatgcttactgatgttctttatgcacctaattttaagtacaacattatttctactagttatatgactagaaatactcctgtctcgataaatttcacttctgatattttttatattcaggagaatgccaacaagaggatgattggaagaggtagcactgtcaatggtctctacatccttgatactgcaccagatcctccccaagttctatctatcttagcagaaacttggcattctcgacttggacatttgtcccacaaacgtttagatcttcttaaagatactttgcattgtaatacttttgttttgcataaaaatagaccttgttacatttgttctattactaaacaaaagaagctcccctttcaaattaataacaaattgacagaccacatttttgatcttatccactgtgatatttggggaccttaccacatagcttcacacactaatcctaaatattttctcactctagttgatgatcattctaggttcacatgactttatctaatgcaacataaatctgatgctataactatcattcctcaatttatgtcttatgtgcaaactcagttcaattatgttttgaaaactttcaaatctgataacgcacctgaactcaaggccgggccaagcattgggcagcttgggccattgcacaa

SEQ ID NO: 312500 - DNA, 1005 bp, Cannabis indica
gaatagatatgtatatatatttatatttgaaaataagataggtctaaacataaattaaagcttgatgaaatgtatttatatgttagctaaaatgtagtctaaacataaataagatagcacgtgtatcttaaataaaatgtatttatatgttagctagggttttgtgtaggaatatatgaagaaattaaagcttgatgaaatcccatattatcatggaaaagcaccacccactttagtatactctaatctaagtcttccttattattaatttgatgagtatatttgtgtggatgaatttcatgattagaatatatacttagattattgattaatttgatataaccaatattggtatattataattgggtaaattgtgcaatttcatatcgtactgaagatgacttaaacagattaacagatgctaattactatgccaaaaaagatgaatcttctttttgatattccttcacctgagaaatccaaataatatgtgcgctttactcggaatagccttatgataggtgacctaaacttttcaagaagcgtgcgagtagagataaagtatgatgtgcaatcatcgtttggagaaactagttactatgataattctaagattgtgtaggtatgagactacatagttaagaagacttaataattgaattaatgggtaccaccttaatgggtactacctatgccaactaaatgcattttctttcagtaacccatcatttaagaactccaaagttaagcatgcttgatctggagtagtctcgtacatgtgacatcttggaaagtttttccaagaaacgtgtgagtgatcgtcttggtttgtaagacactacaaaaaatcttacttttagtcacaacaaaatttgtgactaaaaatgaaaaaattgtgactaattataaatcaatattcctatgttatgactaaaaggtctgtgactaaaggtattaatcgaaaaaattacaatttattgtgactaaatgtatttttagtcacaa

SEQ ID NO: 312501 - DNA, 630 bp, Cannabis indica
agccattcttcataagtcatggcttccttaacacttttcagttcaaattgtgagacaaaataaaggaaactaatcatatttacatacctcttcctggttaccatgctttcttcatgatgtccaagaataagatcttttggatgattcaatttcactcggctccttggtttcttatgaatagaatcagtaatgatgtttggatgaagagaaccatgttgttttggtttacctacttcagttgcagtagaaaatttgacgcttgattctgtagtattcaaatttgttatgtcaatatccacacttgttgcttcagatgaaggatacaaaaaattgtcaacctcagcttcaatggaaaattttgcaaaatcttttaagtcatcaacaaccacattaattgataccataacagcttgggttctcatgttgtaaacacgataagccctactatttgaggaataactaataaacacactggaaacactcgtgttggtatgtagggtcagtcatcagtccaggaagcagccagagtggcgtacccgtgtataagagtcattagtccgtgggtgtaacgacccaatgaaggcttgaagcgaggacattacaaatggtatcagagccttgacccagccg

SEQ ID NO: 312502 - DNA, 1016 bp, Cannabis indica
tgattatagtagtgagctgtaagaaagcgagatgaggatttttacgtggttggggcgttaatgagccttagtccacgagtctttgttattaatggatgtatttaatacagattccacacttgagggaatgtttttctcataaatacagagactgttcttggtgagtattttctcttcttgctcatatgcaacccaagattctcgaccccattaaatgagctttgagggggtatttatagtgttttggtggggtgatccctagatttgttcagatcttggtgatgctctgctacagaaaggaatcaatgggtagagatctgaacggaaggagtaattatattctgctacatccactctaatctgtgggggccatcaagagtaaagacacttggcggaccaagctacttcttgagtataatttatgattactcaaggaaggtttagatattcttactcaaaagtaaggatgaaccatttgagatctttatgaattggaagaaactaactgaaaatcatattgggaaaaagatcaagaaacacaagacagataatggtcttaagtattgttcaggtttttcaaagaatattatgtcaaggaaggaatagcaaggcatcacatagctctaaagactactcagtagaattaagttgtagagagaatgtttagaatccttatagaaagagttagatgcatgataatttgagctcgtttggaaagacagttttgaggagaagttgtcaagacagcatgctacttggtgaataggtgtcactctattgcatttgatttcaagacaccccaataaaaattgtaaagaaaagagatttaaataattagaattgacattgaaatggttgaatttaaaaattggcgtttttgagaaaatgagatgcagaattgataaaacagcaaaattgcataagtgaggcccattatccaaagcccatggccggccacacttaatgggttttatcatttatttttcattactttaatgccaaataattctaactta

SEQ ID NO: 312503 - DNA, 762 bp, Cannabis indica
tatatatatatatatatatggggctattatagtagggattggtatatatatatttacagacactactataaattttgtgttttgtttgttgctctaagttttgtgttagaattttctcttcatttccactattttctattttatatgtatttgttttgtaacattactttgtcaatgttatttttcttgtattttttgtcatggagtagtaatcttgttagtttgatgtttttgttgaagtttaacattttctaacaatatggcgcggacaaaatgtaagattcctaccaaaaatctcccctctctttagtggtaattttgcgtctttttgtagataaagttactttttgcgctagtgtaacatacctataatgaggcaaaatattgtcagcaaaaggtgaaaaaaatgaaacacaattcttaatatacgcatagttatgctagcacaattaagtaaattttaattaagccggcaaaattctattttgttgttgtgttcattggcggaagtagaaactagaaaccacgacgctctccacatgtcaaaaagttgactatctcttcattattctaaaattacaattttgattgggaaaaggacgaatataccctaacacttcttaacatgattggacacacaattacgatcattctagagaaaatgagagggacccacctcaaagggctaagagttcacttatcaaggtatgggaagcagcatggtgttcctgctttttttttaagaagacatggtattcatgc

SEQ ID NO: 312504 - DNA, 1041 bp, Cannabis indica
gattttgtcccgtgatgtattttcacggaatatattccgtgatacattagatgggtctcagggtacattaaattagtgccaggctacgttgctactttttaaccctaattactcctagatcaatctcagccgtcagattcaaataactctctcatctgacggcttccgtacatcacggattaaaatccatgaaagtacaataacgagacaaaatcatatccctatatatatacataagggagcaattcttttgcacgaagatcatgtttaattaattagaagtattgttattttgtgttttaagatgtttaatataaaattaataggatatttcatatcaattaacagtttataatattattattaaattaaaatatataaatacaatataaaatacacaaacatggccgtctcacaacaagtattcgtgtattttgccagtaatactggtttcagtgtgtattgtatgttaggcgaagctatttatataggagttagttacttttttgttattttcgttaggactaattagttcatggtatgtcggtttatgacagttggtcattcactatttatgtactctgtagttcttcattgtaattcattcaagacaaaccatcaataatatttttcttttttgttcactctctaatctgcaatatggtatcagagcgggaaaggaaagctttcccacgatcttgacccttcttcttcatcgatgtgttctttccctttggcgatcactgcaacagaattggtgtttctcacatttctgtgtgctctgttcttgatcaagtctttcttcacttgatcattttttgttatgtcaaatcagacaaatccagctgtcactacaacaattatcataattagcggcggaccctctccgccgctaatagtaggggtattagcggcggatcccactgtccgccgctaattgtggccaaattttttttttttttgaaattttattagcggcgggcagtccgctgctaatactagtagcggcggaccccgccgcaattactccgtcgctattac

SEQ ID NO: 312505 - DNA, 543 bp, Cannabis indica
aatcataaacaattaattgatggacagacaattaaatgaaattaagtacaaataaaatagaacatagaaattgaggggaaattaaatcatactaaaactaaaaattaatgtcaaataatatcaatctaaatcttaatgaactgtttagctactcatgaactgtcaaataatagccatttcatacatataaatttagaatagaagaagaaaatagagaagaaaaaaatactgaaaaccctattgagaaaggcttcaatataaactttgttcttcaaaattcgtactccttgattgcctcctgaattgcctgtcgaaaataactgaggtccactttttatatagccaataagggaataaaaaagatagaaaaaataaccccacgctgaaaactcctaatttgccttgaattagatgggcgggccgtgacatggacttcctatgccgcagctcgtgtggcaaaatccttagtctccagggcttcacgtgacacgggcctaggcatgacccccatcttgtgtacaattatcttttatgtgatctttt

SEQ ID NO: 312506 - DNA, 636 bp, Cannabis indica
caagaaacatcatcatcataattgttgaacacatggtcaagccaatgtccgagtgtggaatcgaaatgagctaacaacatagctttgtcccagcagctggttgcaaaagggcagcttaaaagtatgtggaggctgattctgcacattggtggcatacagaacacatgagatatatcaatgtgtttagctatgagttgaaggcatgtatgtagagtgtttgtcacgctctccacatgaaattcttcaccttaggtggtattttgaggtgtcataacttatgccaaaatcctgaattgttcacaccctccttatttttggttctgcagcatatcctttagttactttatttttaattactttatttttatcttttgtccatttggaaagcgaaaccaagaaccaccattatcattatccctccttatcccttaccaagacactcttatatctctctctttcactattatttcttaaaaaaattacatagaccaagaaccaccattatcattaaaaaaaggtaataattattaaaaattgtgtgttctaaaaaagaagaagtgattttagaggtgatatttaagtttaaaaaatgtgtgagttatcatatttaaaaaaaaataaataataaaaaattat

SEQ ID NO: 312507 - DNA, 3198 bp, Cannabis indica
agaaaggataaaagggttagaaatctgagcagaaggagtcatttaatttcgcttcaactaatgtaaggtttttcataccttttatgtgtttattttatattgttttagaagttcatgtttaggatgttaaaaacagacttgttagtaaatttaagtcctgataaaatatattccatcgacctctcctcctcaaaggtggggcctcggtgtattcttcgacaacatagtcttcaccggtctctaggacatcgcctgcctcgaaaattggctctcctttatcattgtagccaccaaacggcagcaaccgagccactccctcttcttctccttcagcattagaagggatagttggacggaccttgcccttgtcctccacttcttggacttcaacatcccccacaacatcctcctctttgttagtgggatgggccggttctgccctaggcaaggtggcgaggcgggcgatatgtgggtcattcagtgaggatttttgtaccgattgcttggtctgcaccatcattctatgcttggaacaaattttatcagacgtgtgcctagtaatagtcacagcaaaagtggcaataggcttacctgcagcagcatggtttgggtggccctcgagcagagtgtcgactatgtctagttggactaagtacgtccagttagttagaaggtagcatctccaccctttcttaagttcccaaatgaactgaccgtatccttcgccttggatctggttgggatagaagtgatgttacctcgggttctggggaaggcgtgtgttcactacttatttcccagtcttcaaagctagagtcagaaagattgtcactggacgtggatggactagcacggagatgaggatgatcctcgatataagttaaagaaaatcctggtcgatacggtggttgcctctccaaaactcaacaaggttaatctacaaaaggtaggagacaagaaaatgagaattggtcggagcaacgaaagaaaaataggttgaatgtaccaatcaggttcgattgaggaattaaaaatagaagtttcacttagaagtagaattttcattccagaaattcaaaactttgaattagaatctaattttcactacacacctaatggatgcgtgaaaatggatactataaggttaaaatcaaagcgtagttaaattcaggcgtcatggttaagcacaataaagatttctaaactttgaacctatggtttctatggttatcttagaacaattcaagaacaagaaagattcacagccaaaaacccagaatattaagcatgcaaatatataaaataaataaataaagaacttactcactggtttgaagcttcttgttctgcttagatgatgttgtcaaaagttttcctgggaatccttcgaagaatctaacagaaaaatatgcttgaaatttttttgctctagttttcaagaatgaaaatggataaaaggatcactaaaggatctcgatcctatttataagcagttcaaaaagggaagtaatcatttcaaaaatttaaacctctcgaattctcctccaaaatataggttatataccaattacaggtagagtaaccgtcagcacgcgcaaacattaagccgtgattcgaggtcggactgccaattagcattaaatgagggcaattgaagagaccaaccctaaactgtagacccctagtcagggtcacgtcgttcgtcatacgatgcctaggacacaagtcacccatctggacaagactctaggctgagtgaagtccatgtgcggccaagaaggtcccatgtagaattgggtggaaaatattatccagttttttgcacattgacgtggcaataggatcagatgacacgtgtcccatatttctgatacttgggcgaaagaaaatatccctagcagcctgcacatgactagtcagcatctataatagtcgattatctaagcaagattgtggagaagatatccgaccaggtagaaaatgtttgtgctgagcaacttacaagagatagcaacttcagagaataatctcgctgtatccacacacgaagaaaatccccataatcgtgggattgagtcagagaaaaatggtaacctgttctagttttctatttctcatattgtaattatagaattattgtaatttccaattttgtgcaatgtaagcaaaagggaaactatccctcatgcattaagtccctataaatagtggcctagcctcactatgaaagggctcgaaagaattttctcaaagagatattctacagagaaaatagtgacctaagagagaaacacactcagagatcagttgtaagagctttcaagaggaagaacactctgttccttctcttaagtcaacacaatacaaggggagtaggctattaccacccttatagggctgaacctctttaaaatctggtgttcactttattttactgttttagatctcttctaattatattatttaatcgctttattatttgactcactgtcgttggctagaagcgaggtcaacatataccacaaataaattataataaaactaaaattagtattttaatactcaaaaagtatatataatgctaacaaaattatatataccactattaaaatatgtataccataccaaaaaatttatatatagtcattatatataataaaataaaaactaaataccatgttcaataaataatataatatatacaacaaaatatatataccatacaataaaatatatatacctacaataattaaaaattaataaaataatataacattatcaaaaaaaaaaatagatataccatactaacaaattatgtacacccattaaatatttattccatacatactaaattttaggacactacatttatatataataaaataaagattaaatatgagctaaaataaaataatatactatacaataaaacttatatatcataaaaccaaaaacatacacctcaatagaaacatatataacaacaaataaagataaaatatgtatatagcatactaataaaattatatgtcatgtcagaaaaagtgcaataaaaaatataacttaaatataattgtaagaagatgttatactgtaccccataaaataaccatttaccattcaccaaaaagtaatatactaatataataataaaaaacaaacataataactaaacaaataatatatatcacgacaacc

SEQ ID NO: 312508 - DNA, 4210 bp, Cannabis indica
ttaattattgtgacaaaatacatataaaaattgcgggccaagtctttggcctgtgacaattgacctttatcggggtcattgacccaatccgacccgactcgataatagttgtgtcagtcattgttagacaattattttttttttctagtaaaggagagatatatagcttttaatattttattttaaaaaatatatgagcaaaattaaaagacattatcaaattaagagaatctagtattatgaaaaatgaaatttatatagatatttaaagttaaaaattctaccatcaaaaaaaaaatggggggggatgttggattagatcgtgccaaagagaatgccaagacgagtcattgccgagtcaagcccgaccggcccgattgacattcctataaatatatatatatatattactcttttataattatttattattgttaatcttttttttataaaataatatgaaatataataaataaaattattttaaacctttaaaagaaaaaaaatattaaattattagtattttaaaaaaaatatatatatatatatatatatatattgtaaagaaaaaattagacacatttcattcctatgtcaagcaaacaaagtaatcttcatattctcatacatctttataatattattgagcataccggaatattgctttcctaagtttataatttccttcatcacactctaagcaatattaaacctattctcataaaataaaaactgcataccaaacgatcccaaaaagtaatccccagattttctaccacaatcttggaggctgcataagatgaagatcatcctttcattcataacaactacctgaaaacataaaactcttgcactctttatgaaagccactaaatacaacctctgaccaattaaaagtttcccttgacaaaaagaaggtttgatattacaaacttactgttacagtaaaaggaagtcgccaaaagatgcatagtttcccaaatttgttaaaactagaggatccataaattcgtttacacaagcaatcagatgcttttcagcattattgtgatgaccaattacagggagcttataaaatttgtcattgcgaagctttgaaattgctcgcagatcttgatttctgcagataatagtgcagtgactttaaaaacacaagctgtgaaaagtagttaatttttgagacaatgcatagagagggagactcgtacaaaatattcttgggagttgtcaattaagcccaaagtaaaaatgattccgtaatattaggtacaataacaatatttattttccacactccagtacttttaagtctagcactaagattatagtcattattaattatatttataccattttctatgcacattttgttatgcacaaatagcttcttcaaagagcctcacacagtagtcattgaattgtacaagaaattattttcaaaatctaacctagggaagccatttcttggccttaaccctcccaacctcttgaagtaatgcatcatataattatagagtaaattgtcacttacaagcaatttcatcccagtgaaggaacccgccatggcctctggagtttgtaaactcatatacagcaccagaaactgctcagtcagttttttttttcgaaaaaaaaaagaagagagatatcagtcttcagtttctctgatccattattttcaacgaacatatgccaaaacaatgacactaacataaaaagtgaaacactgtacaatacaatgttgaattccggactacagagactttgttggcattgttactagagaagcataaaaaatctttcaatgtcatttgaaatacatttaagtttacggtaagaaatgaaaaatatttatggctttaataagctttcagactttttcaggcgtcaacttctattgatctatctttgctatttagattcactatttcttaacacgatgaacttaagtcaacagtacctttataacctccatgaactggatcttctgaaagcagcagtggtgtatccaggtctataaacctgtaaaagacgtggtacttaattaataacaaaacagcgggacataagttaatatgtacttcttacaaataagaaagaaaaaacttactgaaaaaccccaaggccagcagcaagatggccagaaaatcccatagctaatcttgtctcaatcataccaccaatcatcaatttcaatccagatgctttggctatctcaataatttcaagggccccaacaaccccaactttggcaagcttaatatttatgacatcagcaagatctccttcaactattttctttacatcagttacacttctacagctctcatcagctgccactgatacaccatatttattccttgcaatatgggtaacataaccaaggccatcccaatcatctctatgaactggttgttcaaacaaaataggggtaactcccatttctgcaaaaataacacaacaaaacttaatactaatgcaaaaaagggaaaaaaactattttacctctgagaggaggctaaaagtaggaatttgataagctgaatatacaggcatgattgaacgcagaaaatattacatctttcaaaaaacattcatgaaaaaaaccagagaactataacactagatgttgaaaatacatcatttaccatgtaatttttcaagaacttcaacagcttccattggtttatatccttcattagcatccaagatgaaaaggcaatctgggtggatttctcgtattgcctgaagaacttcaatatctgtatttagattctttcccaccttaagtttcaatgttccgaaaccttgtttgcagtactttgaagccaatgcagctgcatcagctgggggaacaattggaatctgcatatattagtttgacacaattttcagttgctaaagattgtgtaatatacttacgaaaaacatactttaacttacagaaaattgtacatatcagattcacaggttgaatctgttgaagacaattaaaaaatgaacaaaagtgtaaacacaaaattactcaaacaatcacccaactgttatatcagtggttatggtgtttgaaactccaccaaacaatctccacagaggcaccccaatatcgctcgcaactgcatcaattaatgccatctccactcccgctctaaccttcaatacccaacattgtgtattagaatttaacaaaagatatcagaaaaaattagaaatctaaaatcagaagactatgagaagtaaaagttttcagccaaatagtgaaaggtaaccatttaagatatagtaacacttcacaagcttcaacttacttcactatctccaactccaagggtgtataccattttggtccaacgttttcaccaatttgtgtatatttcataacattttcaataaaaacataaatcaaataaccaaatattacactagacagaatatttttcttcaaagacactaattctaaacttggagattttttttctttttctataaacttaatactttttagttatatgattatccttgtaaatatcttcaaaatatttaaacaaatataaattgaaaatttaataatcaaattaaaggtaacatgtgatcaaattcatttgaaggttattttttaaaacaaaatgataattaaaaaagggggatcgtgtagaatttggtccctcggggcaaagcttccgcaccatttagtgttttgcaccaaattggtgcatgtttggagtttgaacatgtttattgcaaatgaaaataaaacaaacaagcattactgctcagtagagagagcttcaaaattggtgattactgaaaatcagtacagcgaaatggcacaaaatctgaaactctccagttcaacagttgttttttaggaattttcttcgtagctagttttaagagccacctacccacttatttattaaaagcaatccacacatagatatgtaacttatgagaaatgctaatggacaattaaggtgccaagaaccataagaggtatcatactgctactggtgtattttaatatcggatccaccacattggtgtgttgttgagttccttaagttgccaaatggcaatgctcataactatcatatactcccataatcgaactcatgtaaacctttgacaggcaacatgaactgattaacccgaactaaaggtttccagtctcgagctaagttcattacacaaaaagcaaacacagtatcgg

SEQ ID NO: 312509 - DNA, 619 bp, Cannabis indica
ttttgattataatcctcttattctctcttgtaatgaaaacttttccaacagctcctaatattaaaccaaataaaagaatagaataaaaaattgttttttttttctatttcattttattacccttaactatactttagccagaacactgccaaataagtgttttaaactttatatttctttaaaatagagaatagaagatacaaatttatcaaaattgacatattacaatattttattttacataaatttttagagttatgaatattattgctctacatgtgtagagcactattcattgctctaaattcattttattagctttttttttttgttttaaattatattttatgtataggtatgtgtgtatacgttattattatatatatatttatttttttttttgacaaaataattagaatatgagtatatgtgattattatatatttaaaatatactaaaaggtagaatataaagaaagtaatagaaaaattaatgtaaaaatttactataaaataaataaattaagattttgataatgtattttaaaagataaagaacaaatattatcatacttactatttactaaggtggcgtttggtaacactttttaatcagtttt

SEQ ID NO: 312510 - DNA, 807 bp, Cannabis indica
cgtgaaagacatatagaagtaccctaaatcagatctaatgcactcacaaaacccagaagtttgatacttctcattctcatatacccctctctcactctatttcattattcgaatttgaagccctagcaagtatgccgcctacgtgtctctcatctcacaaatctctttctcttctcacatctcatctctctcctccccctctttctttctcactttcgtcctctatttgttaagttaagtaggggtggcgaacgatggggaatgggtgagggactggacgagagatttgacggaagttcaagtggctgggatatttttacgacggatctgtatttttacgacggaagttcaagatgaagaagcagcatggttaattttttttttaaattaaaaatcaattttaacatttttgtgtaaagattctattttaaagttaatttatattattaatattttatgtatttattaattatgtgtttttattttaataaattaaataatatttagaatattagttttttagacaaataattaggtgacacatgtcgcttcagtcaacaattaacagtaaaatggatggaaaagtaacagaaggactatatttctacaagtgtaaaatataaaagagtattattaacagaccatatattttagggggcacaatacaatagtgtcataagttgaaggggcaaatatgctaattattctatacattattataatatcttttttctcttaaactattatatgtctattgcacctttaattttttattaaaaaacaaaaaaacatagcatcaatgtcatt

SEQ ID NO: 312511 - DNA, 1001 bp, Cannabis indica
agatcctggtaaaataattcccaacaagtatttctttactaaccgacaccattgagtactctttggtttcggtttataactgacacttaagagataggctaattattggtgttggttttttaaattgattctcgaaccgacaccaaaagtgacttttgtagtattgaatttttaagttttttttttcattaaaaaggactttaatattccacaccttgacatgaacccaacccaccccaacctcatcatagacttcggatgtgggtcccagacccagactccaaatacagaccttggacctagaccccgctatggacttggacttgtattctggaccaagacccaaacttgaacctgaactctaaacttggagccaaaccctggccccaaaccctgaacccaactccaaacctaggtatatgtgagagaaaatgtaagaaaaatggtagagaaaacaagaaaatttatttttgaaataaaaataatattttgatgtgttctaatttttttattttttttgtttgtttttataaaattgtttgtacaaaaatgggccaaacacatcctattgatttttaaaagaaattttatgtttttaaaaagtgaaaatattttttttatattatgaagttgaatatcgctttaaatttggaacattctctttgtgagaactactaggctagagctactttagacatgagtgaaaggtaaaatagagtattagagttagtcccacattactaatgtgtggagataaattgtcatatataagatgaatgggctacttctcccattgctaattagttttgagatagaatctcatttatcttatcccaaattctaacatggtatcaaagccacttattatccgttgtgagcccaaattactacgagtgtgtataaattgtcatataataattgccaattgattttgagatgaaacctcattcatcttacctcaaattttaagatatagtctttactagggctgtacaaaaaaa

SEQ ID NO: 312512 - DNA, 848 bp, Cannabis indica
gaacctataggccgtgcaggcctaactgaagaacaacgcactgctgattgcgatgtattcgctcagcagagacgtgaattcctgagatggatggatgactaggagtacatcaattgatctcaccaagcagaattagattgccgcaatagggaggccaatgatctagtaagacggttcagtcagagaatcgaaagaagaggccaggatctccttagggatccacttcaaggaagattgccactaagttcctcaggaactaggacagatcttcccttgaaaaagggaggacatacctctgctcaaaggttaaatagcgagattagccagatcctggcatccagcgacttgaggggctggccagggatcccttgctcaatagcaatccccagtgtacaaccactggctggccagccatcagcaggaatacccatggtcgaccagagtacagcagttcccccctaggggagcgaggtgcacaaagatcaatctttgaccgacgagtagtgagactggatggaaaccccaaaatggcaattcgagaagtgaaactgatcacttcaggcatctagatccaccaaactctaacaattggtgtaatgtacccccaatcaacacacagccgacaccagtcgaccgaggagtcatgggcagctagaccgtgcccaatgtaggtctacccggccatggaagcatcacacgcggccagaccttgccctttgcaggtctggcttgccatggaggaatactgggcggctagaccctacttaatgtaggtctatccggccaagcacagtaacaaggcacaagcctggctggcctaagccaactcccatacctgggaatggccg

SEQ ID NO: 312513 - DNA, 2387 bp, Cannabis indica
caaccaaacgccacctaagttttcgacacttgaaagaaataatatttaatttttttttataattgtctacttaccattaatttttaacaaattataaattaatcttatgataccgaaaccgaaattcaaaacaaccaattgaaagtttaaactttattttcggtacaatgaacatgaatcgtttgaaatttttcaaaatgataaaatatttacgataactacaattatacgttatcatattaaaaaataattataattataagttttcaaaaatataactttttctaaaaagattattttatggaaaaaatttagaaaaaagttaaaaaaatatgagaaaaatagtataaagtaactggttaccctttaattatcctaaaagttactggttacccttacataattttctcatattttttaactttttcttaagtttttctcataaaataacctttttttaaaaaaaaattgtacacataaaacccaaaaatttgtaatttcccctttaaatttaaacaattcgacaaaataagtgtataaaataatatatatcacatacaataattatacacacatgtcataaaatgggtcatacggtaaactcatcatttttgggcccaatattttaaaatttgaataaattttacgaattttgcattgcacatcaccaaaaaaaaaaaaaaaaaactacttctcaacaattgtttttaggaataattatataaaataccattctttataaactatttttacgtttaaagattttttttacatttttatggtattttataaaaacagtaaaaaaataatacataaaagtaacaagaaaataacacttaaacaatatcaaaacaacaacatagaataatatacaaataacaaaaaattaacaaaaaagcaacatgaaaataccgtattttttataaataaaaaaaatataaatcataaaaatatttaaaattctgtgaaatcatattttaataatttttttattgtttgtgtatttatgaaataatcctattttttttacatcaaagtctcccttacaaataaggtttaatttgcatagacatatgttgctcccttatgtataaataaccttaaaagtaaagctcaaaactcacttgtaataataaagaatatactcatatgtaccttgtgttttttcaaaaaacaaatttagttttttgtattttaaaataatacatatttagtcccttcaagtcaaattaattaaactactctcaattatatataaataaataattaaataaatttgtagctcttataattgattaaatacaagtttaaaatgttaaatatgtacaattttaaaatataggacacttaaaaccattttatttttttattgaaatagaaaaaaattcaaactttacatctctttttaaggagatgtgtaatatcattaaactatatatttataaccacaaagttaaaaccacttaaatggagtatttttttttagtgcaaatatttttaagaggatgtgtgttggtattttaatgatggagtagataggttgtggtgactacatgtgaagaaaaatcatgcaacctatcaattttttttggaaatgataaataaaatggaatagaagggacaacacatgataaaggaagccatgcctcttttggttcccatcacataataatggatttatttaggtggcactatattataagttatagctttgtcattttgaatattatcttgccatgtcccaaaagtttatcaaggcatgcataactttaatttctattcacaacccttcacacacacatatataaatataatataagaaatttatgtaggagaccctcctacaaagtcatttcggtagacgctttatttgtttcggtatttaagagattttttatttttttttataattacgttcgtatagctatttagaattacttgtaaacttttaaaaaattccaaataatttacggtgctgaaaataaagtttaaacagttacttaccacgcgtaaaagaaaaaacagttgcgtttataacaaaatatgcaaattttatttttagtattatgaactactcggaatattctgaaaatttacaggtggtcttaaataactataacatatacaggatcatgaaaaaaaaaaaaatttagataccgaaatagataaagaatctactaaaatactattttaagagagtgtgtgcggtagacttatcatataatataggctaattagaatttttatccctgaactttgacatatactaaatcatatctcctgaacttttaaggtcgttaaaaatgtctcctgaactatcgagattgttggatttaatgactttttttctaattttagtaaaaaagtttaacatggatgaaagttca

SEQ ID NO: 312514 - DNA, 1565 bp, Cannabis indica
tataaaaaaaaattagactaatttttttattggatatcgaaacaggatgcatcagtccactctactttagggggtgcattagaagcactcgaaatctacaatgcaccccccaaaaaaaaggtgcaccaatgcatctcttattgttccggcatctagaaatttttttgagagattcagaataatttacaatatagagtgctcaatcattctattctacaagtataaaataaaagaatcgcgcgtttaaactctactttttggcatgttaaacttttccaaaattttagtgaatatcttgtataactacaacatacacaattattcaaaaaattacactaaaaaataaaaattatccaacatatttaaatatgcattggtgaatcttagattttctaaaaatatatattattcgaaaattctacactgatccttatttattttggtattcaatttttttttatttaatgtttttttatactcgtatatattatagttacttaaaatattctgtaaaattttaaaaaatttaacacgcgaaaatatagtttaaactgtttgttgcatgcgtaagcataactcttttattttatacgcatataaaatatactatttcgacattaatttttatactgtaaattaatttgaatttcaaaaaattttacaaaatctcttaaatattaaaaaaaaaaaaaaaagactaagataccaaaatgatggtggcagggtggatggtagaaggagctatattatctattaaactgaaagtgttttcattctctttatccttccaactctaacttccgttcttcaatctctcctctatcggccttctggctttcttcggttaactcactaagctgtaccctagaaatattatcaacctccttcactactggtcggagatcggagatcggagagtaggaattccgtttcaatcattgcatggataaacaattacttcactcacagtcacaacaggtactctacttacggctttgaggctgctaatgaggattaaatacaaagagacgatgcaaactttgtctggttttttgagttttctcaagtgattctctttgttttgttgtatatagttgttctactttgccattctacagggttatggcttagctattatccaattctctttctttttttcttcttctttttatattagagagctttgtcataattagttataatgtctggttctaagatttagaaattgtgtatattattaccatttcaaacgttatagtatgaatgtgttaataatcttaggaaatggtccgaatttttgttctcacatcttttccatttgaagcgtaagagaagggccaaaaaaactttcataattttctgatttcggttcaataaaaaaaaattctgtttctttcatgtgaatcccatttctatggtatttgttcctacatatattttatttcagatttcagcactgcatttaagtttgggataattctatatgtttgtgttgataaagtttttggtgacattgagaaacttctctctaaataaaatctaatttatggtgtttctaagcaatt

SEQ ID NO: 312515 - DNA, 887 bp, Cannabis indica
gctttttgaagtgatgatcaagtttagaagatcaagcttttggattaaaggttgattcttttctaaacaatttctctgtttaacgtattttctttaaataatagcatgccttctgggtcttttggggtagaaatttcatgaaaacaataggataagttctgggcaataaaaacctaagaggaaataaggaaaaagggggaatttttctggaaaattctttcctatcacttgtatgttcacatcttcttcattatgaacttcgaatactcgcacttttagttagaacacattgaatattcacatattttggcaccaaactatgatctcaaactctgacaatctgaaatgttcactaagtggttggatatttcacagtgatcaaatgtttattcagtcacacaaacattgaatcattgtgaaacaccgaaccattgtgttttgctttggtgttagttttattgcttttgttgatatttttattccatttgaaattattatccgtgtgaggacacttctctttaaattgcactcacaacacgttgaaaagatcttctatctttcagatgagcgatctctcaaatagcagccagatattcgaatttaagggtggagcatttgtgaatgaaccttagaagagtggcagccttatcccagcatcgttgctaaaaaatgtgggtccaacaagagtagaccaacaagactcgtggtctactggcgagataggtcacatggtccaaaagttggaggcattggttgtgatcgagatacggggaagcaagtccaacgtatctgctaaagggagctttatccatccaagggctgctctggatgtagaggtcgaggaaatgaagcaagattttaagttgcctgtgttggaaattatttta

SEQ ID NO: 312516 - DNA, 583 bp, Cannabis indica
acatgcttttataattggttagtagttttttttttttttttttattaatttttattaaattaaaataagtgaggttcaactatttgaggctagctcaagtgacggtgaaaagccttatcgatggtaagttgccggagtggagggctcgcggagtgtttgatgctaccctcattctgctccgtgagcttccgaagtatcgattgtgttggattcctcgttgtttgaattctggtgcccataacttagcagcttgggctgcaactaataactgctttaaactgttttttctaagggaagtggcactttttgttgccactatgaactttggtttttaggccgtttgcttttcaataaaagtttctgttattaataaaaaagaggttagctcaagtgactttaagagggtgcgtatgtgttgaaggtcctgagttcgagttttagattatacaatgtaatatttatttaaataaaaataaatgagatttaatattaaattacagtaataatattatactttttttttttttttttgtaatggaaaataattttattaaccaacgaaatcagttaccaaacaaggtaa

SEQ ID NO: 312517 - DNA, 2349 bp, Cannabis indica
gggaactacactgagagtgtcaggatttgttgtactagccagcttagctagtgagtctacatttgcattttattcacgtagtacttgttagatggagtagtgcttaaattgggttaatagatctttatctttgcttaagtatggtatcatgttcaaccatcaggcttgatacttgccaaaaatctgattaataactagctgtgaatcattatatatcttgagtgactcggctttgattgctagtgttaatcgtagtcctgatgggagtacctcatactctattttattgtttattgtggtgaactcaaactacaatgcactgtgggttcaaaatccctctagagttatcaagatgagtctggcatcagaaccgtgctcattggaagatccacctacatagagtttccacataggttaaatgtccccctaagctgcagcctcaagcgtgtggacctggtctgcataaatcatgggatcgtattcttcaaggttagtgaattcaacattaaaatctgctaatgcctgtccttagatttcctgcaaggctgggaggtgatctcaaactgacctacttcaactacccacttgagtaggcatcatgatgcttctggtttcatcagaacttgcgtaagtggttggtcagttagcaccttgattgtgtgagcttggaagtaaggccttagttttttggaggccaataccaagcagtaggcttgcttctcaatggtggtataccttgactcagcctcaatgagacactttctgatgtagtagactaggtgttctttccctccttcctcacacactagagtagcactggctggatgcccggtgattgccaactagatgaacaattcttcaccatctattggtttggataggatgggaggcttggcaagataatttttgagaggttggaaggcttactcacactcatcagtccattcaaacctcttgtttcttcctttaagtaaattggagaagggtccacacttgttggttgactttgagatgaacttgctaagttcaataatttgtcctattaggctttgcacgtcttttactcttgacgaagacttcatgtctttcgaggcctttatcttttctagattcactttaatccctcttgagttcacaatgaatcccagaaatttccctaataggatgccaaatgcacattttagaggattaagcttcattcgatactcccgcaagatgttaaagcattcctctaaatatttgatgtggtctttggatttctttgacttaactagtaaatcgtcgatgtagacttccatatttttcctgattaaatcgtggaacatacggttgactagtctttgataagtagcacctgaattcttgagtccaaagggcattactttgtagcagtatagtccaatgtcaattcagaaactagtatgtttgtcatctggtgcgtgcatgctgacttggttgtagttggaataggtatccatgaatgtgaggagttcatggtcatatgccccatccaccagttgatcaatttgtggtagagggaaacaatctttagggcatgctttgtttacgtcagtgaagtcgatgcaagttcaccacttaccgttcgacttaggcactagaacaggtttagatacccaaatcaggtagaaatcttcccttatgaagttgttctcccacaatctttcaacttcttccttgagatctttggaatgctctttgtcaaggagccatagtttctgttatacaagtcgaaagattatttgtctttgttgagggcatgacagatgacttgggggtcgatctcgatcatgtcatcttgtgaccaagagtaaatgccttaatttattctgagacaagccatgagcatctctcttaagacctctgtcaggttttttccaatcttaaaaaccttggtcgagtctactgtgttgaggggaagctcattgagttcttcagtcaaaccaactcccaagtcgatttctgcaaaatggggtagtccccgtcttgggcacaatttcaagtggatttaagtcctgtctccgtcttctccataattttgactttaaaggtctttgtcatctctttgattcttgcaggagaggtcttccttgctcctatggtgccatagcagcataggaggtcttatttatcccttttaaggctgaagcagcataggaggtcttcttggcgagtgataacgaagtgttatagcactcatgggcagttccttgattttcaaggagacaaccaatactagctgccgggaatttgacagacaaatggtagattgacgatgtaatacccggaattaagaaaaatgattagcaaaaccctaattagataattatg

SEQ ID NO: 312518 - DNA, 1616 bp, Cannabis indica
tggtgcaattaagtatcgggtcccatatagtttaatataataatttttatagagtatcgctagccaattgcaagtcgacacatttagaaggtgctaagcaccactggtgcccaataacaatgctctatattcaaatagcattcttattagatattaataatgcttattacttaggtagtactttaaaattagttagtaatatttcttaaaagttactttaagttatatgtgacttaatatattattatattaataacaatatgacaccaaagaaaagagagtattagataccaatagtaccttttaacaattctttcaaaataaaatagttaatttaacattattatcacccttttttcctttttttttttataaaccaccacctttagcaatatcaacaattcaacaaaagacttctcttcatttcagtaacttaaaagaaagaaagaactttaggcactgttctcatttgataggattttaaccttataggtcggttgccttcatcaacattctattagaaatgttacacattaataaaagaaaaacaagatacattacaattttacagtaatataaaatacaaggaccaataaatatgttaaataaatgctacaacaatatatatttatatattttgagcttgtttggtaggttaagggtcgtattgtattaaataacaaataacaatatatttgaataaaataatgtattatattaattattacgaccataatttttaatatagggagtcgtattattaaatacataacaaattatccatattagcttgtattataatatttacaaaagatctagggttaaccccggtcccgaccccaaccttggaccttggacccggacctagacctgaacccagaccccggactcaaaccttaacttggactcagagcgaaccccagactcgaattcaaactcgaccccgaacccgaacatgaacccaaaccccggaccgggacccaaacccgaacttgaaccctgggcgcaaactcagactaggacccgaattcggaccttgaccctaaacccgaacccaaaccaagaccctcgacttggacccggacctggacccccggccacgacccaaacttggaccccaaatctaaacaccgtgcccaaatccgaaactcagaccctgtccctgaacctagacctcggggcccgggtctgaggtccaagtatgggtccgagtctgggatccaagtacgggtctggggtcctgttggggtttgtgccctaaataaaactcatttcaatataatcagatttactaatttatacaagatcagaaatcgcttttattttgcatggttcacatgatttatttcatgattatgtttaatgtataaattctattaagtccaaaacatatatatatatatattcatgattatagtgtcgtcagcacagtggaatacaatcaggaatatgttcaaaagtttaattctcatgatttgtcagttcactggatttatactgacatgataaacggcgataaggtatacttacactttggataagtgttatgtcatttacaaggcattggcaaagtttaccagtatcggatgtatgggtgtatacattggaagagaccg

SEQ ID NO: 312519 - DNA, 1222 bp, Cannabis indica
acgtttgaagttttttgaatgcgcgtggtaaactagaatatcaagaactctgttttcggtattgtaaacaattcaaaatttttcaaaaatttatagggatgatactgtaactataatgactacaagaaaaggtacttttgccggatgctcatgagagagccaatgtcactatggcttgtgcatttttggccaattggcccgaaaggaagaatggaatggtcaaagttcgcaataaggaagtcccagccccttctgatgctatcaatagactctatcaatcgatgaggtactctagaaatgaacaaaggctgagagtgatcgaggaggataaggaacttgattatgaagacattgctaaaactgtgagtttccttgggttgagatttcatgaattggatgggtcaccaaatttgctatttcgttgtgagattaatcatgtggccaaggtatggctatatttttttagtgcttgattggtatacacggcaaacatttttttgatgtgcatattgatcgcctgaaatatgtgtatgccatcatgaaagggtatattctgaatgtgggcgagattattcgccaaagttttgacttgatggttcaaagtgccatgggaggtggagttgggttggctagagtcatcaccaacctttgtggaacatatggtgtgaagcaactttcctatgacaatttagtgacaccacaaaggaagatggatgtgagcatggtaaataggctcaagaacccacatccctatgggcaacctccacctgaggcctaaccacaagaaaggaggtgcactgctggccaacaagagaatgaggtcgaggacatgccacaacaattactcaatcctattgattcggcaatgcaatactcgcatgccaaggttgactacatcatccagcaaaataaccatatgcagaattatatggagcaaatgagtatttttgatgagagtcaagttactcaactaaactctcttatcactagtatgaacattgaattcgaggactctaactatttggtgcaatctccctgatttcacccatatgatcagccaccgctaccaaaccctttctgatgggggtctcacgtaagtctcttttcccttagatatcatggaatattggggacaatgtgaattttagtttggggggtgatgcgtgtcgtaagccacaacaaatttactatttttttttaattccaatactttcaattattt

SEQ ID NO: 312520 - DNA, 3341 bp, Cannabis indica
taaaaacattgtattcttcttcttctatagagcccatgcgtgacgaaccttccctctatatgcccatgctggaataattattttctatttatctacaatattttctttttatgttttagatcctcagctagttttgttctcattcctaactcattttaacaatgaaatctttattgacatttttccctatgggtgtttgcagaaaatgtagatttttgttaatttattggatcacattagatatgtaatcacaaccacaaaccgcactatatatactacatcctaaaattatagtgcaatgaggccatatactagtacatcctattgggtttactcagaaaatttgaatgaggctattttcaaattaatataatatatatcttttaattggtattacttatctatgggtagtattaagaaaatttgaatttttacgttaaattttaataatctaattagaaaaatttctcatgttttagacaccattccaacaacaagcacttcagctatgaatgattctcttacacagccattcacaagtagtgaagtgttcaatgctcttaaaacgattaatccagataagagcccagggagtgatggcatgtctgctatgttctatcaccaatattggcctattgttggagatgtagtcacaaaggttgctttgggagttctaaatgacggacacagtatggcatcttttaatcaatcactcatcacattaatcccaaagattaaggttactcgaggtatgagtgatttcagaccaataagcctatgtaatgtcatttacaaaataatttccaagacccttgctatcagattcaaagaggttcttccagtggttatctctgaaacacaaagtgcttttctctctaatcgactcatcactgataatatccttgttgcttttgagttgatacatcatttgaagcataaaacaaggggaaacagaagctactcggccctcaaattggatatgagcaaagcgttcgatagagtggagtggctctatattcaagaggttatgcgaaaaatgggcttccatcagaaatggatttctttgattatgagttgtctgagcactactagtttctcatttatgctgaatggagaagaggttgggcatgtgcaacctactagaggtcttcgccaaggtgacccgttgtcaccttatttgttcttgatttgttctgaagggctctcacgtctgctacaacatgaagaagcaaatcaaaatctcagggggttaaggttaactcgtcatgctccttccatctcccatttattatttgcagatgacagtctccttttttgtgaagctaccaacaattcagcaattgccattaatagggtcttggatatctatcataaagcatctggccaactgctaaacacatccaagtcagtcatgtctttctcccccaacactactcaagcagcaaaaaatttattccatcaaattcttggaatgccaataagtgaatgtcatgaacgttaccttggtctccctgctttctcgaagcgagacaaaaaggaaatgtttagtgatatcaaggaacgcatatggcaaagattacatgcatggaatgaaaaactattttcagtaggtggaaaggaggtgcttttgaaagctgtggttcagtccattccaacatatgcaatgagttgttttcgtttaccagctactttttgcaatcaattggaatccatgatggctaacttttggtggggctccaataaagatggttcaaaaaaccattggagaagttggaaattgctttgtaagtcgaaatttgaagggggaatgggtttccgatcttttgtacacttcaatcaagcactactagccaaacaggcttggagaatttttcaatgcctaattctttgctcagccgactcttaaagcatcgatacttctccaacaacaccgtcttggaagctcgtcttggccagtctccttcacttacttggcaaggtatccattggggccgccaattattagaagaaggattgcgttttaagattggtaatggacacaatgtgttggtggtgtggataaatggattccaagttattttaattttaaaccagtcagttatataggtccaaacaatgtcccagtctcatcattcattacagaccaccgtgaatggaatctccctctgcttaatcaatatttttaaccaattgatgtggataaaattgttgcaattccactaagctttttccctagtcatgatcggtatatttggcatcataccacaactggactatatactgtaaattctggtttccacttggctgaaaacttagtagaaaaccgagaatcaagtggatcaaacacacatagagattggtggaaaactttttggggtctaagtctaccatcaaaagtgaagatcttttcttggagagtaatgcaaaatgctctccctgtggctactgctctttgccgaaggaaagtaataaattctgccacttgttcattgtgtagtaatgcatgtgagtcaattggtcatgccatgttcaattgaacaaaggcaaagaaagtatggagggaaactaagttcaaaatagaccataatcatgctcacaatatgcacaatggtgattatctcattcacttgtcttcaattcactcaaaacatgactttgaattgattatatgtaccatgtgggctatttggcatgagcgcaacaaggtaactcatgggggtgtcccaagatcaagtctcaccattgccacttttgccagcacgcacttggagaaatatgctcggagcagatccaaaatccggcctcactcttcctgcaccagtacagccactgctgctacaccaattcagcaacaatctgtacatgttcttaatgttaatttgaggatgccccctgcagatcaaagagctagcacttctactgctgtacatgtagatcatcaacattcagaccgtattttcaaagcttttccctggacaccaccaccagattgtggtctcaaattaaatgttgatgttgctgcaaacacagacttaaaaatcctggggtgtggagcgatagtaagggaccatcatggtaatgttatagctgctctatccaaaccagtccaaggatgcttccgatctgatgaaatgaaagctaaatcgctctttcatagtctcaattgggtgttacaactacaacttccgattacacatatagagaccgatgcattgcgtgtttctttggccattaattcagttttccaggacctctctgttgagttttatgtcctaaataaaactcattttaatataatcagatttacttattaatgtagatcagaaataacatttaatgtt

SEQ ID NO: 312521 - DNA, 1095 bp, Cannabis indica
cattatcctataattgaccaaaagaaaaaaaaggtactacataattattatagctaacgattttttataattgttattaaagtaaaataagtagttttcatttaatttaatacattcatgcttttcctaaaaaaaaaataaaaagataagtagttttcatttaatttaatacattcatacgtcaaaatattatgtataaatggattatcatccaaccaactaatcttgttgttttattcgtaatgtacatttagaatttagtgaataagctaaacgtaacgaaaacccacacatacataagaatgaatggaatgatagataaaaaggatctaaagtaattcctaatgatcaacacagcatatcaaatttgatgatgatgagagcaaaaaaaaaaaacaaaattccatatttgaacatttatcatctcatcaattattatttttcttttttgaatattatgatatatatatattataattatttaagttttaaaacattattaaatattttgataaattcaaaataatttaaaatacataaagttggtctaatttatttcgcatatagtgcacatataaaataaaataaacaagcgtaataaatgtttaaatcataattttagtattaaattattctaaatttctttaatttttttttttgtagatgaaatttctttaattatttgtaattatataattatttaaaattgaactatatatatactaataatattatatacaataagcaacaatatagagaaggaaatgaactatataattggtcctattaattgtccttgtccttgttgttttcatagatatatattatatattttatcactaaaccactatactatatagtccgaagaaaatcatgacaaaaagtttgtatacgtagctgtcattttttttggtcaaacgaacgtgataatattgaattattttctttcgaaaagaaaaaaaaaaatctagtagctatagccttacgagtaaaaagtatacctttttgatatatatattttttgtagttatacaaaaaaaataaatatataacgagaaatatatatatatatatatatatatagtaggtagtaag

SEQ ID NO: 312522 - DNA, 696 bp, Cannabis indica
ccgaaacccgccaacccgaaacctgataaacccgcccgatgttcagccctacatactacatccatcatttaagactcccaaagcaactttagtgacaacatccccaacaatgggccaatatttatgataaaacattgctgacattccatcactcccggggcttttatctgggttaattgtcttaagagcattgtacacttcattactggtgaaaggctgaacaagagactcattcatctcagaggtaacagttgtgggaatggttgcaaggatgtgactcaatgcctccaaattgactgttgtagcagaaaaaagctcaccaaaataagatgtaatgattgatgtcataccaggctttgaacttacaacattaccatctctgtccagcaaagatttgatggtgttatgttgtttacgcgaggatgcataggcatgaaaaaatttagtattttgatcaccgttttgcagccaatcaattcgcgaacgttgctgccagtacataatataaaaattaaatttggactaataacataatataccattacaaagaaataaaacatagtttacattggagaattaattaactaattaactaatcatttataattagtggaatgaaattaattgtgtaaatatgtaataatatccctccgcaagtgtgagtattaatagtattttattttatttgatttcttt

SEQ ID NO: 312523 - DNA, 778 bp, Cannabis indica
aaaaacgtttttaaaaaaaaaaaaaaaaaaaaaattcgccaatattttacaggtagttaggaattttttttatgataattattaaattaatatacataagatttgatattgaattccaacaataataataatatggcatttagtaccaaatatcacaagtattatttaacagtgctcattatctatttgagaatataacaccaagcaactatacctttaaatattaacctttggagttggttagaataaataatgtttaaatatttttagttgtaggcttttctttttagaattttctaaaaatttaattataattttaaataataatctaaaaaaataaaaaataaattaaaaaatttccagggcgtcaaccacaaataaaaaatctaccaaaatatttcattctataagaggagtgagctacataaatttctcatatttattaattgagtattgttattagacaccagtattacctagtacatgtgttgccttgcaattaactaataatactttttaaaaactctttcattaaattatatgcaactcgatacttagattaatagcaatattgacacgtaaaaggtattcagcaccaataatgccttttaccattctcttataaatttggagttataaacatatcaattgaaggtaagatgagtccaaatcgaagcaaaaaaacaaagtaaaggaggctcctctctattccctgaccgttgctttttcttttcttttatttttcatttaaagatttttctttttctctttttttctt

SEQ ID NO: 312524 - DNA, 689 bp, Cannabis indica
gtcatagtttatgtcatggccagaatgacattcgacattggatgggttatcttgagaaacatcaaccacttctctgagatgaaaaccacagcaggtccggtacgtagtgccttaattaccgcattgtgctcgcgacagggtgtgcctatgattgaaggagacgtcctaaaatcacccatgtagtccatctcacgctggcattactatgactttccccctgcatcattagcacctccagaagaaaacgccaaaaggatgatattgatgtcgaggaggaggggccagcagacgttggtcccagtgagacagtgtcacacctattccccaaactgaacccccactggactcctgtacgcagggcacttacgatagactggatcaccttatcaagaaaaatcattatcttgttcagtccaaccagtaccttgtctaggcccaccaggccaaagctgcttattataactcatatctccagcagcaacatgattttgctcaaaggcaagtccacgagttaaattttgctttctcgttgtggagactggactcagatgctcctgaccacgtctcacagccagcaccgtggcatccatacaagccaccaccaccaccgccatactgatgtggtgctcaggtaagttccattttctctttctttaatgtcacattggggacaatgtgtcactttagtt

SEQ ID NO: 312525 - DNA, 2640 bp, Cannabis indica
tgtagaattttaactgcaaaacaacgtaaaaaaacctttgtgttcatacttttttctttactatttttatttttctgtgccagtttatcaacatttaggctcaaatctggttaacgaaaatttgcattaacagtaagtacttaactcactataggatataaaaatttgaagaagaaagagacaggtagtcgaaatctaagagaggctctttatttttcttaatttttcaacaaactagtccgatataggctatgaaactatgagcctatcattatctatttaaaaaatttcttctagggtaaggatttaaattatatggaattagaaaagataaaataatagctatattaaacccttaagtggtcggccatatatgtgggccccacagattttaattttaccatttatttaacaatttcacaaatgccatattttaactctaatcctataaatctaaaatttatttatttaataattataattaattatcaaataaaattgtcatttaacttatttatcaattagaccttacaaagtctcttgattaacatattaactctaaatcctctctttcttctcaattaagctcttcctaagtaaaaattcataaataagacatagtctaatttagaattctaattggttaactaaaaccaattaacttagtctacaagtcaatattatctcaactagtgcgagggccatgggtatatataatcaatctcccaataagtaggtctaaaatttaccaagtaaatctcctaagttattaatgcctcctgactccactatagattcgaaattgtactcctcattacacagaacactctatatgttccaaatatatgttattaattatacattatttcaatcaaaataattaaagatcctctatagatgattcacatctagtagggataaatttactgttctacccctcaatatattttatccttaaaacacttagcttcttataaataatattttagtaaactaatataatcactgaaataaaagctcttccatttatctctgttaagccaagttcaaaggaaatcatcatttcacttctaggtcattatagaagttatagattctgtatctatgattagcagttctactcaattgtactatcatgttcccaagtattgagccaatccatttggtaagctttaatgaacaagtcaaagaacacaaataatatagttaagctagaacctaaccatctcaatattaagatctattgatctaagatcaaccaagtgatattgactaagaaagatataacggtaagtttatgatatcttatacaagttcaatatcagtctagtctgatgtatccaatactagaatactttactaataccctggaaaggtcatactacttatccgagtgtaggtatactttatcactgattatcatgtccatataaatacagtttactgataaatcatggaactgaaacattgaagtatataatcataattaattttcactgtgatgacatcactgtaatcatgaataattacatgttcaggatttatcacaaattatatattaatccataaacatgaaaataacatgtaaacttatataatttctaatctttcattgatagcatataagattatatattaaaatggattttatttagggtataaaatcttaacgttaggtgccttcttgcctttcggtttaggcttgccactgttgttatccttactgttccatttccttttcttgtctgaagaagaaggagagctggattttacttcaacaatatttgattcacctttcttggacttatccttgttaaggttcttaaacatgatcaactcggtcaataattgagtcatgttgaactctagcttgttcattacatagttcgtggtgaaagctttaaagcaaggagatagtaactcaagaatcatactcaactgagtcttttcgtcaacgatagcctcgtgtatcccttcttcatacataagctcaatcatgtgtaatacataagttctaacagggacaaccttcttcatcttataattcatgtaactatgagtaacatcatgtcttgtttgattagaatgctgctcaaacatggcctgtagagaattcattatttgagatgcattttctatttgttcatgtgtcttacacagaacatcgtttattgtaagaagcatgaagcatttagccttcttgttagattgaatccaagagtcgtatatgtcttaaacatttttaagggcattggtataacataataaatattattttggaataattgtaaacgtgatgcatgagtgcatacaagtaaaacacataaaatattttttaagttgttctataataaaactctttgacaattgatcgtcatcttaggatcagtatcaagtgtggcaatttcttctttttagattttgagcccttggctcgagtgacatcttcttcaagtttgataaagtcatctactctatccaaaaagtcatttatagtgtagactaacttgagatgaaagtcaaaccataaaggactcatctttttgagccaggctgcaagggccattacccttacatcctcgctaattatttttgtcttagcagttgcctctaagagcatctcaaatggagatgcaaata

SEQ ID NO: 312526 - DNA, 2081 bp, Cannabis indica
catcgggcccgacgacaaaaatgcagaaaaccagaacaaatccagatttcacaggcagcaaactttttaacagaaaaaacagccaaataacagcaacaatctacagatcaagcatcaaaataacattctaaactaaatataacaacaacaaacaagattacacaaacaaaaaaaaattacccatgagttagtgtatgatgctcgtccaaaaatgagagaaattatgtggtgagccttgtggtgagccttgtgcagtaactgctagtgtagtgagctgaaaaagatgagaatagaggagcaaaaatttgaccttccctttgtgtagcttcgggcaggttagagaaaagaagagagagggaaagagagaagaagtgataggggggtgaaggaaataaagagggtattttgggcataatagaaaaatggtcatatattttaaatatggggtattattctattaggtatccaattttattatttattaagcatacaaattcaaatttcccaaataaaattataactttttaagataatgataaaaacatgttgtgcaatgaaaaatatataagtaaatgtgctagttattttttgagccaaaaaattaaaattttattaaatcaaatgaactaccaagatagcttccaaaccagcagggacaaaactcctgcggaaaacacagccagcaatagaaccagaagaacgagctaaaaaattagccgcctgattcccggaccgtttaacaaaactaattgaaataggaaataaaagagaggattgcataagagcaacacaatccgaaatcaaatgccccactggagacaacaaccgcttcttctgttgcacgacttgcaccagcaacagtgagtccgactccacaaccacaccatcagacataccccctcaacccaccttcccttcacccaactgaacgcctccttcaacgccatagcttcagccaaaaacgagttgggttgaccataagttttaacctagcgaatatgctagttattaattactctactttaaaaatatgtattattttctattaaaaaaataggtattatttggagatgaatgatggagtgagtacagtgacattagagatactttgtcctattattaagtttgtccttaaaaataaatgataaaagaaaaaattattatgtttgtagcacacttatatatttgtaacacttacagatacttttaaatatatttttaatgtagtactaatataatgttaatctaatgcactttaagagttcaaacaaaaaataaattgatagtctaatgataactttgttaggaattgcttcctatgcacaacaaaattgcaaaattgatggtacgctgaacaacactcacacatataaataatttatatattcataaagaaaagacaagatccattaacatgtcatatatattgttaattatgtaatatatatattaaaaaaatactcatgaaatatatatacacccatacatgtatacatacacacatacacaagtaaatacaaaaaaaaaaatcagaatacgttgacattaacaacaacctcaacaagcataataaacaataactaagaaataaaaataaaacaaccacttgagttaggagaatgagtgtgtgttagaggttctgggttcgactcccaaattatatatagttgtaatatataaatgcttaaaagaaaaaagctcaatcatagtatggaacaccaatttttaacatgggatcttaattcatagttatcccagatgaagctatctcctttcatcaaaagctcttggtttatcaatgaagtgatgaacgaaagaaattaatctcgaccattagcgcccattctattcgaatcctacagaacaaaattgacatcacctaagattaatcacggtccccgaaactgttttcccgtctccataagctaagatcataattgttctttttttttttttgataattataaggaaggccatatatacgagagagcagccatgtatggtaacaaggatcttggattaaaatcgtgggcacatatgtataatgtatatattattataaagtgtgacacaaaattaag

SEQ ID NO: 312527 - DNA, 545 bp, Cannabis indica
ctcattggtgctaatatcagcagcagtctcttcagatttttgctgagtggtgccactttcagctgcaattgcttgatttggttgaggtgtggaaagtagggatgcaggtgtgtctagaaattgttggggagttgcattgggaattgtaggtctaggtggaggatggcttggaaaaccaggtggagagacaagatgactaggaccaggtatgtgaccagaagtaatacatgtgtcaggggttggcatagtgatgcttgggacagcagattgagcataaggaaaggaatgctcataaaatacaacatctctttagatatacaatctccctgatgcatcaagacacttatagcctttatgattaaggctatagccaacaaaagtacaaggagtagacttgaactcaagtttatgcttattgtaaggtctaatattggaaaaacagctgcaaccaaaggttttaagtgtaagataatctggtttcaggttaaatagaacctcatgttgggaatattttactatgatctagatctactaacaagtatgtt

SEQ ID NO: 312528 - DNA, 1706 bp, Cannabis indica
ctcttgcgcagtgtcgtaagtttgtgtggtttttcagtttgtgatctgcttgctacttgtaagaattttctttggttttattcaccaatttattgactccctacccaagcatcagattgagttaattttagttgtcttatgagaagtttagttttgaaagaataaatgggttcataatcacaagatcatttctctcgaactagtggtgtcatgggcttatgattttttgccagcctatcaaaagaaagatgctctcgatctagtggagaggagccaagtggtgttgttcaggttcctttgtcttcgacacaatatgtggtggatcctcgttggtctcctcctctattgggtttcattaaagctaacatcgatgccacattggatttgtctaagggttgttgtggcttgggtaggatggtaaggaacactcaaggagaggttttggcatcaacttcttaattctttgttggaggtttctcacttgaaatttttgaagctctagctcttcgaagtgcaggtactcaatgttgtttgtttgattttgataatgtcatttttgaattcgattgtctaaatttggtccaaatttaacaatcatttgttgttggactcctctttagggcttgttttggacgattttggcttgtattttattaagttcagtatggtgagtctagtgcactgtccgagaactcttaatatggtggctcacactttagttaagtatactttgataactactgttacccaggtttggtggcccgactatcctccttgtattcaatctcttgttttgcatgagacaattaatgattgaatgcaagtttttgtgtccccttccttttttttagaggttctctctaagaaggtgaagttgttgggaccatttctttcagaaaaagaaatatcatgaagtgacatcttgcgaatgattagtgataataaaattagtaaattaaatcatgtgagacttaatatttaattacattaataacgatataacatattgggtagtaatcaacaacacacctatttttttattaaaaaaaattatacacaatttttttatctactatttaatttaactataaataaaattttaataaaactgtatcacaataaatcaattatacattatggatgtatgtaaaaaatgtgttgagtattattaggcattctacatcaaatagatgtattactttacaaaatatgtaatatgtagtaggatccaatattaaattataacaataaacacattttaaatgcgctttaacaatttttgtaaattaagtgtgtgctacatgcactaaaatactattcatacatgatttttttttttgagaaaagcgtttatattatagaagcaaattgagttagacctcgcggtcattacaaaatagagtttccggtataaaagacaccgggatacaaaatactattcatacatgataattatttttagaataactcttttaaagaataatgtcacatcactactgtaataattggagtatacatatatcattaattattgtgtattgatcgttgcattcgtttagatggacgttggttatgtatttttaatgtcacttgaatgtaataattcataattttatgtggggagtattatttgcatttcataaaataataaatatattttattattaaaaaaatgaacctaaataatattataaaattacttttaa

SEQ ID NO: 312529 - DNA, 1496 bp, Cannabis indica
cacttctagctgttagatcttccatctttgaccttaacgttactgggctcaaagtataaaatggtaagaatctattctcctccatttccatctttgatactcttactgcaaacttgttcagacccgcccttcgactctcggtgtttgaaaaacttattttgccagaagttatgtcttcatttacagaattttttagcatctagcctttcaacttcacacggtgagtaactcattcttacacgagtgatgatccgccttacgcctcaatacttcatttgtttcaatatctagggttcatatatttttttaggcatagtttatgttagctatattccatagacccctggtttgttaaatttcatctagaaattgggattgtcattctcccgagatatcccttccttgttagaaaatttaacttccaaaatttgcagcaccggaatataccaaacatctatcctccccatatacacccaaaattttgaacctcagtccaaattggaaatgaatgattacgggattgaagatcatccgattaaaccaaaccaagaagaaacggccaatcattatagacgattcttacaagagattttcgaaggtaagcatcattctttgtgaattgtggcctggtctgaactcatccctctttttttttaaacttctactccatttacaaaaccaatgtttttacccagcgtcactgatcttttacctttgtcttcgcaagaatggacgtagattttgagagcatgttaaaaagtcttccccaagccgataagagatatgggaagaaagtagcccaagctgatcaggtcgcagattctctcgaagaacctaaaaggaccaagactaaagccttcacgaggacatcctcgaaccagcttatcattgaggctgataaatctcccaaggtagggaataaggtctctactgcggggactgaggcctctactgcggggactgaggcctctgttgcgggaattgaggtctctgctgtgaggatcgaggagcaacctaccagatcggcacaccaggtcaagtcctctggttctcgtccggagatggttctcctcgagccctcctgcccctaccccttgaagttgggactgaggggtctcaactgagctcgcagcacgccaccaatagttggcacaacctcttaacactcggggtctcgccattgggatcttgctattcgcgacaataccgaggatctgaccaaaagaagtcatgtacttctgcattaggtcaatctcgtacttctttgatcttactcttccctactctgtctttcttaataacttcaatttgtcctttttttctcaggcttcttttctcgcttacgctacacatcatcggtcgtctcaaaggattgagatgctagagactgagctttgccaaatgaaggaacagagggatgtcgtagctaagaagtggagcgatgttgaagctgaggtttctcgcactaaggatgaagcagaaaagcaacaccaagc

SEQ ID NO: 312530 - DNA, 2112 bp, Cannabis indica
tgtaaggtgttacaccaccacacttgtacctaaataatagtgctttattcaaattgtagttttttttttttatttgagaggacttaattataattagctaagtttaaccctttataccattttaagtttttgattagttgtgtttctttaaacatacaattaggtttcttagaatagggcttacataaatttggaccagcatttttcatcattattttgtattgaacacagtgtattaacaaattaacttttagattatgtgttttgtaaaaataaaaaaaatacaaaatatacttttagactcacttttttataaatttattttttaaagatgaccaaaatattttgttagattcggaattcattgaatttttcttcgagcaaacattttccagatctaattatgtttaataatatttgatattaaaatcgagtccaaaatctttggatagcagtgcagaatcggttgaaaacaagggaaagagttcaaaaaatgcaaattgttgctgatgcttcctgtatacttgtatactgtgtaataatgcagtagaaaacactctgcatctgttctttgactgcaggtatgctcgatgctgcttaagagaattaaaaacatggctgcactggaagatcaaagctgaatccctgccgagtattttgagatagattgatcgagcaaaactgagcaaattcaaggcaagttgttacacagcttgcattgctgccttggtttacaagatttggcaatccatgaatcaaatgttatggtcccaggatcagactacacaaccgcaagcactcttgcaagaaactaaatggctgataaaaaatcaaattacttgtgtaatgccaaaatgtatagatcaaaaagaattagaatggtttcaagatttataagagttttttattttttacaataagatgtatagttgtttgctcttcgaagagccataggttgtaacaaaaaaggttattgtgtaatgaaattcctgattcaaaaaaaaaaaaaaaaaatacgagtctaaaaacttacatttaatctttttacaaaatataaggttcaaatgctaactttttaaaatgtgaggtccaaaataaataatagtgcaaaacacaaagtaacccttcctaataaaatttattttaaaaatctatttaccccatgaaataagattatgagctttgcaaattaaacatccatcattggtctggggcttgttcggttcttgctcaatggaaatacgctcaagctcatcgttctaagtcattgttggtttctaatggtactagtagcagcgagagcattggtctaaaccagaggtgaatctgatcaaaatcaatgtagacaaaacaattttggctgaagctggtgcatacggggctagtgtcttggctcaagattcaaatggtgagttgttggagggttttgttgtgtataagggaggccatgttcaaccagtctttactaaagtagtcggtgtcaaggagacattaagctggatcaaatgtgaagggtggtcaaatgtaattattgaaactgattcacttgtttcagttcaagccattcaaagttcaatttttgtgccctcagtttttggttttttaatttttgagtgtaaataaatattatcttgtttggtttatgtctgtgtttcttttgttaaatagtttgctaacaaaatcgtttatggttttgctcgtagtttttgttattggtcttattgtttgtttaatggcagcattgttgatactatggtacattcttgtatattagcccatttggctattatagtttaatgaagtattactactaaaattcttatttttagtcataataaaacttgtgattaaaactaaaaaagttgtgactaattataaattgtcatttctatgttgtgactaaaaggtctatgactaaaagtattagtcacaaaaattacaattattgtgactaaatgtaattttagtgacaatgcttgttgtgactaaaattaaattagtgacaacttgtatcaaaatactatgttttagtcacaagtcacatttagtcataaaaaattatattgtgactaaacaattatcacaaaaaataacagctttcgtagttatttc

SEQ ID NO: 312531 - DNA, 870 bp, Cannabis indica
aaaaacagtaaagaaaaaaaaagtatgaacacgaaagttttttacatggttttgtagttaaaattctgcatagtccacgagtcaatcttattagatttcgtatacaactctagggcttttcctcttatgaatttttcgtccctttttcagtctaacttttctctatttataattacataatcatgccgttaattatagagttgactgatatctttacaacaattatctcctgaaatcgtggggtttgattacatatgacgtaaaataaatgtggttaatatttgaataccacacagctgtgattagtccacttttactgggttaagacaatcgtgtattaaacacattataaatcataacgttctgggatgtctcgataggtactcagtaccaatgaccttgatagcgagctggaacttttcccctgtctttctgaggttgataatgtaaacctcgttgctccttcgcttgaagatataacgcttcattttgacattcgcaattaattcttagtgacaaggggtactttaacagttaacatcatttgaatgtcagcctctgctcaacagaactttcttgtcaagactataaatatcattaaaagacgtctggaacttattggtgaaagttccacgagcgtgccttcctatagcaagatgggtgcctcactattagttgcttgggtttacccgactgttatacttagtttgtatactgtctattatacactaaatgtcctcacagtcattatatctcgtttacatccacttttgcgtaacgaggatgatgcctcgccttgctcatataatgtcgtatggtttctcattaatgcacgaggcaacagtttgtatatctttatctcgcataaga

SEQ ID NO: 312532 - DNA, 801 bp, Cannabis indica
taaaaaaacaatataaaaagggtataaagtataatttcttcctgaaaaaaaattaatttttcttgaagaaaaaaattatgagaataatctcttatatgtttgccaagttgcaacagaagaagttaaatacatttggtatcttgacgctggttgagtaactgcatgacgaaaaatgaaagtattttttgtagtcttgacaaatctaagacgaaagtcaaaattagtaatggtaactttatggaagcagctgtaaaaagtatcattgacattaacacaaaaaaagacaagagatacatcaatagtgtactcttggtacttaatattgataaaaacctactcaatataggctaaatgattgaaaaatgttactctttgcactttgaaggagattattgtacaataataaatgagataaatccttccaaattacaaaaatagaaaactcaacacccttaattattaattaattttgtttgtattgatgttcactttagtgtttagtgcatgcatataataactaacttaattttaatttattttggagcaatataattggttgttatgcaaaatttataaaatgaaatcgaagacatgcatttgccaatgagaggacaaaagagccaaacacaaaaagatacaaattagtacatgatgagagcatcttcaatggggttgctcatggagtgatctttgccacatgtatattttggttaacattttaaacaaattttatgaacacatgacattatttatttatttttggctaataaggatttttgccctttgaattttgacatgtac

SEQ ID NO: 312533 - DNA, 954 bp, Cannabis indica
taatcacataatgaaaccggaatcacatgatcaaaaaccctaatctgggaaaccagaacccaccacactaggttctgttatactctctagggattacactaacccaggaaatagggaaacacctaactacggcactggaatgcacgagaattgagaaaatggagcattcgggaaccctgccaaaacttgctaaccggttttacaggtactagtaaaactggttacccggtttgcaccagttcacctaaaaaattccatttcttgctcaatcctccaccaaatgcaaccaaaccttctagagtacctaattagggtatacacaatatttttcaaccactaattcacagaaacactcactgaaactcaacatgccattaaatatcaaagctttgagctcaaaggtcaaacttgaacaaaaccaatcccaaacatcgaaaccagctacaagaagctataatcaactcaaatgaacctaaatattcaaaccctaaacatttataatcctaacagccaccaattcataaaatcacaaactcaaactatagaaaaagattcaaaatacatattcatggattctagggtttatcttggcttgattcccactgaatcattgctgaaaacaccctaaaatcagcaacgatctcctttgttctaggctggttcgaagagagaggaaggaaagagagagttttcccaattttggcttattcctcttatttttctttaatttctctaagtgaataaaggttaataccttaaccttggctgaagtaatttaatgctaggtgtcaacacctaaggcagccaccaaacacccatgttgtaaattactaaaatgcccctaatcttacaacttaggtattttccaaaactagggataaaatggtcaaatttcataaccccgctcaaccccgatattttatttcctctaaaatatttcccactaagaaataa

SEQ ID NO: 312534 - DNA, 2171 bp, Cannabis indica
gtactatcgaccataatatttagacgtatactacggtacgctagtcatactctagtcatacctatgtgatagggttgatcagattttgaaccatacaaacattggtatccaatataactctatgtatattgataccactatcaatgtaatctaacaacttaataaatatgtacactaaacatgtaaacacatatgcatatcattatactaatcttatctcatttctaaattaatatgccagccaacttgagtggaattgctactcgacgatttgtaggcccttaaatcatattattcaaaaaaactaatgacttacacgccaaacaacttttcagggacctaatattgaaactaaaagtttccctatcaatggataacatagaaatacactaaatatagaaaaaattggaaaaactagggttccataaactacgccaaccggcacgcccgtttccttactggaagaccgattcggtagggttcttggggaccaatcaaaattccagttttgataggtcccactgaactagtcgaccagtttagtgcaggaaaaacctaaaaccccacaacaacctcaattcaaacaaaaatgctaccaaaccttacagagtacctaattacaccataataaacataatccatgcaagaaaacccaaaaacaacccttgaaactcaaatcaccattaaagaccaatgtttgagctttaaagctcaaaccatgtccaaaaacataaccaagccatcaaacaacaccaaaacaactcaaataataataattcaactacaaaatacgaatttaaacaccgtaaaataccttagaaccctaaccttagcaaaaccatgcaaaaacgtaactttgagcttaagaaaacaccaagggagaggctagaacatttacctagagttggatacactctaatcttgtcaaaatacccagaatcaaactagaaatcttccaacactagcaagttgcttgagtggtcgataaagaaagagagagaaaagagggtttacgttgttttctttctaaattggataaaatgaaataatggttaagttaagtgtttatgtaactaaaataataaaataaaatcaagctacataaatcaattaatgtcattaaaagacaaaaatcccaaatggcaaaaagaccattttgcccttgcacacatcgaaaagtgcacttgtcacttaggggtaatattgtcatttccaaaacctctgatattccttacattcccaatgtctaagtatattctcccactattactaaaatactaaaatttgattctattggcctaatgccgcgttccaattttgcgtggcacaagacatgaaaaatataaaaattcatatatagcataattaatacacattgaattcacataaatcttcgtcaattcataaatcataattagtaatataatttcataattaagccctaattattagctaatttttgtattaaaactaagcggtcttttcaattaccccccgttaaaaggattttgtccacaatatctgacctaaacatttctggatattgagccctcatcttggactccaactcccaggtggcttcctccaccttactgtttctccagagcaccttgaccaaagctatggtcttgttttgatggactttatcttttctgtctaagatctgaactagttgttcttcatacgataaatttggttgaagctttaggttttcgtaactcaacacgtgattgggatttgaaacgtatttccgtaacatagtgacatgaaatagcttatggacagctaaaaatgtggaggcatggctagacgatatgccaccagtctaaccttctaaagaatctcaaaaggtcttgtaaacctagggcataagttgtcctttttccctaaacgtgtgatccccttcattggagacacttgtaggaatacatgatctcctacctaaaattctacatttctacgctttggatctgcataactctttgcctactctcagagtcaagcattctggccttaatctttactatagcctcattagtctgttgcacttattttagacctagatatttcctttctccagtttcattccattgaattggatatctgcacttcctaccatacaaaatctcatagggagccatccctatagtactctgataactgttgttgta

SEQ ID NO: 312535 - DNA, 685 bp, Cannabis indica
atttaaatatttatgccgtaaaaaaaaaattgacaagtttttaaccatatatatataaaaagttttgtaaagattaaattagaaaattgtgacaaagtatatttagtatttttgttattatatgtccatatttacaataaatttatttatttttctaaaaaactatgaaagatgtaatttttcttatacttaatatattcttatgctagttctttttactatagtttatattaaggagaataaatttgatttcacattctacaataattttgacaatgtagaaatcctgttgcatacataactccaacaaagactaaaattggagtaaagccagcgccagttatggcttcattttcatcaagaggacctaacgttattcaaccagctttaattaaggtcatcaactaatgttaattaattttattcttctcaaatcataattatattttatcatgaaaaaaatatgagttcatactatttcggactttgtgttttgcaaacgttaccaattagaccttctgttttgttaaatgataaaatgaaccctgtatttttcacaatagtaaaaataggatcttgatcttaatttttgaaaattttttttaatataactaatttgaagacaattcctaacccgaacagatacagaaaatgtaaacagttttgtcattacacctttagattg

SEQ ID NO: 312536 - DNA, 1881 bp, Cannabis indica
taaagctctatttcatagtctcaattgggcaatccagcagcagctacaagtcacacatattgagaccgatgcgctaagagtctttaatgctttaattcatacatctacagatttatcttgtttttcagatttaatcatagatgttcgttgtcttttgtcctttttccctgaagctactatttctcatgcgatgagaaatgctaatcatgctgctcatggtttagcaaagcatgctttagagttggaccaagacatttgttgggtaggagaaattccctatcctattttcactactgttgtaaatgattgttaatttataataatagtgaaactattttcaaaaaaaaaataacttattttgacacctcatttaaaatagcaaaaatacatttaaaatatataaaaggttcgtttgttcttcttcatatttttaatttttttaattaaaaaatctctctacctattttttttttttttttttgttcaaaaccaaaaatctccatctattactctattttcagtgaataaaaacatctattctttattaaaacaagaaaatattccattttttttttttttgataaattaatgatatgtattgcataaactaactttacaatctaagagcaccccaaaaaagaggcctcaatctatacaatttctttttactgctgtgtgttttttttcctcaatttgttttacatcagaattctatgatgtctatagagcacaaaaccactctctatcgacacttgaaagttttttggcaaaaaactttgaacccgagtccttagactccatttcacctcttcaaccaaccgaatagtgtcagcttgcaccccctgccacaacacagcatttctcattttccaggcagtatacaccattgctgcaaccgcagcactgtagacagctttcttgaatcttgatacttttgccctcccaatccacttaactagatgctgaatgttgtaagtgacagcattccagttcagccatgacttgatctcaatcaagcattgattggtgatcctgcattcaaaaaacagatggtgtatagtttcattacagtcagcacacagattgcacgtctcttggagctttatgcccattttgagtagtcggttaaatctctataaatatcatcagttcattgtttttgattaaatacaaaaaattataaagaaaaaatataaaatattaaagggaatattttatttttcgaataatataaatgattaaaaaaatagttacaactacaaatagaaattctcaatcaaaaaatgatagaatcaaggaaaaacaacaaagaaattacaaaaatacgctttcacggaattttaaacatttttacgatttttttattttatttacagaaaatatggtcttttatgttgtactcttgttaatttattgttgattttttattatatgtatgttattttttgttgttgttttaatgttatttaaaggctaattagtaattcccctcccccgaactttgacatgtaccaaatcatgctctctaaacgtttttagccattaaaaattccccctgaactattgagattgttaaatttaaagatttttgtctaatttagtaaaaaattactaacacagatgaaagttcaagggccatgatttagtacatatcaaagtttgaggggcatgatttggtggatatcaaagtctggagagcatggtttagtacataaacaatcattgaaaatagtaaaattgaaatgaaattagacaaaaatctttaaaatctaacaatctcaatagttcgggggtaagtttttaatggccaaaaaagttcagggggcatgatttggtacatgtcaaaattcaaggggaagaattactaattagtctatttaa

SEQ ID NO: 312537 - DNA, 516 bp, Cannabis indica
gcataaaacccaacatcatgttggtttatgtgttatttgatgaatgtatgtgaattacaaaaattttccataaaaataattttgttttcattctgaaaataatttatttggattccttgtgaaaaattgagcaactttatttttacagaactcgattatgataaaaatgagaaagttatgttaatttgaagtttcgggtcgaattgttgtcaagaggctcgcatcgcacgcacctgtcactcggacaaggtgctcgtgcacgtgggcatgcctcaaacatcacgctgtctgaattcgctcgtcggcctgctcggacacgtccatgcgcataggaaccttgcaacctgctgagatttctcggcagatgaggctgcagcttcctcccttccgcgctcattcaggctgcttgcagccttctctggctgcacgtgcagcctcctaggcagtaacaccaaagatgcgatttttgtggattttttccacaaattttgaattttcccaatttcaaactctaaa

SEQ ID NO: 312538 - DNA, 1231 bp, Cannabis indica
gagtgatccttgagaaataattatcttacgaaaaccttaaatttacattacttattaattagaatttatcataatatatatatatatatatatacgaaactttaaccttgaatctacaactcaaatcatagaatgctataccttaattagcttccaatgagatctagatgagcactaaaacttgaatgtaaaaatagtggtgatgatgataatagtgtatagttttgaaacttagaaaataagaataacaacgatgatgattttggagattgtgttggctatggaacaccacaaggaaatcttgatatcaaacaattgatagtgaagatatatataaatatatatatgtatgaacttggtttaggggagtgcttaagggtgtatggggctttgagagcttagcaatgacaagagagattattggcttcgtgtgcgtgagagtaaatgggaagatgatggcacctatttatagcttaagaactaaccccactcacttaaactatactcttaccgtggttcttagctaactatggttaactctattctttaaattaattaaataatgaagtaagtagataagtcacaattcaaaatcctattctccattgagctccacttttcatgccagccgaatatgattttaagaattattaatcactattaaatttttgtgatttaacaaactctcctaagttgactaattcttctaaccactacctcaactaagaccatttatcttagaaatattcataattacatattcaacttaactccatttttttctcacttgaagccacacaagtatactattctaacccccacatgaagcctaagtttcatataaatttctaattattccaataaatttctcatgcatatcggtacattcatatacgtgtcatagagtatataaatgtttaaaaacattaacttgtactctaatgctatatatatggtcctttaccaatttaaatggtctcgttaacctcatttcatgccacacattataatatcacttaaagaactcttaatttcttatgtctaatccgtaaagaacctaattcaaaacccaaaataataaatgaaagtattattcttgttatttttgagactaacacgaatcttatataattttgaaaaatactacgatgttcaagaaactaacttattctatacaatcactatttccacatcgagtttctagacataaaataataactgaatattttgg

SEQ ID NO: 312539 - DNA, 2521 bp, Cannabis indica
tgtaagaaaaaactcagaaaaaaataccctccctgaagaatattcaaaccttccatccatggtaaatgacacccctcaaaatgaagatactcaaccaggagagacaactcagcgtctaagaaaagaacatcaaaattctcacaggacaaatgcaattaaggctcctcactcgggaataggaaatagtgaaggaggatttgaacaaactaagggtgaaatccaagaaagacgtagtgaggacgcgtccaatctcacaagatacgaaccattagtggaattggaaaacagacaacttcaacaaagattggaaaagtcaaatcagaggaatgctgagttggaacgcgaggctgcggttgcaagggctacgtgcagcaacacaccccttaaccaaccaaacacatgcactaagcgacctcggggaagacctagaggctcgaggaccaggagacatggggaaactcctagaggtgataaccatggaaatcttatgaatccccaggtgatcaactagggagtacaagggatatacttgcagtggacacatgatgtccccaaaatccaagaaacaccaacaataaggagatttaacccaaaaatccaagaacctcacacggtaacacgaatcatgggaatgtgcaacctgacaacccagagtcatctcgcatgaatatggatgccagacaaagacgacctggggaatagggattcactcagcagatgcaaggggtgcaaggggacgacccgaattagggcatccaccaagacactcacgaaggccaaaccaaaatgacagagatagcacatatacctagttgagtaggggacgtgtgtcaaatctctttcgaagatggaggcctatgcgagaagaaccccaagaaataggatcaagcactggtttgagtgggtcaaggtcaaggactcgtggttagaatagatcgaccagaacccaagcacatgaaaggcaacgtgaccccgatcttcatgatcatttaaactgtagacaacctgacttatacgagcatctgaatcataatgccccagatctctgagacttgttaaatctgaacactattcgccagcaacaagtcgagcaaccagccatggatcctattcaattaagggtgatttagttagaagataagttcagacgatagcaagatagggaatatgggaaactgttagggtatgattccgacaaggaaatagaacctttcaccctaacatacttaattctcaattccctacaggatttaagaatccacatgtcacataatatgacgggacaaccgatccagttacacatctgaacaacttaaatactataatacgagcaagtaatgtctccaataacttgcgttgcatatattcccaacatctcagactggggccgtgagtagttgtttgataaattcaccaaccactctattacctcatgagagaagttatccaaagaatttaagaaatagttttagaccgcaagagacagaaggccagaagcatccttgctaacaaatatcgaacaacaactaggagagttgctaaaggattatctaagtcattttagtacaacaacaatagaagtaagaaacctaaatgatagtattcagttaacaacgctccaagctggaataaccactgatttgtcgatcgtgggaggcaaattgtgggatgatctgtagggtcacccagtcaaaacaattaatgaattcaatgacagagcaataatcattgtgcgaaatgaaatgaaaatgctcagtcaggctcaggagataaacttagcttgagtactgctgctgctagtaccgtgacaatgaaagtgggaaattcgatcaaaaatgggttgaatgggaaaagaaaagattcatcaaatgataagaagaaacaaaagaaacacgagaattatgttttcatgtactctatttataagaactaaatgaaactcttgagaatatctatcttgcaaacaaaaattgggtcactttctgaaggcccgagctaaagaaaaattcaaggagtaagcaagatccaaacatatattgtagattccatagagatattgggcatactaccgatgaatgtcgccaattgaaagatgagatcgaaggactcatttctcgagaatatcttaggaagtatgtgagaaataggggaaatgaacaaaactagcccaacaaccagaattaaaaccaaggtgtacaacctcccccaattgagggcgaggacattatggtttatttctggaggggcacatctcgctggaactagcaatagtgcccaaaaaggtatataaaccaagtaagaaatcaagagttaatatatatatataaattgaataaagaaatagtttagcacaaaatactaatattaagtaggctaataaggattttttcccccgaactttaacatgtaccaaattatgccccctgaacttttacggtcgttaaaaatgccccctgaattattgagattattgaatttaaggacttttgtccaattttagtaaaaaaattctaacatggat

SEQ ID NO: 312540 - DNA, 2396 bp, Cannabis indica
tttttttattaaataaaaatttctttcattaagcaaaagagaattttttttttcaatttttatttaataaagtatatcagatagctaaattcaaaatacttctccaataatattttaggaccttgttatttcgatttttttccacctggcgtggcatgtctacgtgaccaatatcagcgccacatggcagcagttcaaccaacgaggagtcctgacactcaaacgtcatgacgaatgatggattagccacctcaaagaggcctgccagcttctggacagcacaaggccagccagcctacatcctccagatgcatggccagccacacattagcatggcaggattttggtgtatagcttcgtacgtggtcaacaagctagactgcaaattttgccttaagaacccacaaaaatagaaagaaaatatctacttttaaggggcattatagtcatttgtattttactaattaaatatgtaaatatctgcttattttttctaattaaagggtttaagctctcctatataaaggacctgaactaaaatctaaaaccatacgctctaagctctagctaaaccctaagctctaagtctgaactctctctcacacacactcccaccattgcttctctgttaacttgagatttgccatctttaattcttacattgtaaccttaagagagctatctcagatcccacctatagtaatctgaatagtattatctctagttatcaatacaaccaaatgggagtaggtcattacccactaactaaaggggtcaaacctctataaaatcatgtgttcttttactttcttgttcttattgtgtaacacgtggcaagcatcaatattaatatgactccgctatcgattggccaaatctgaggtcagcagtttggttctttcattgagagcgagttgatatcatatttgatcaaacgccatagttaacacgaggagaactccagctacaccatcagcattgtcagattttcctcaagatcctctgactgtagatcctagtttccatgttccaaccacgactagaatttctatgaacaccacagatgtggtcaacctaccatctcgacaggcactacgaatctggccattatagctggctagggtgacataaacatcccggtaaatctgagcaatctacccttgcctccaagggaggaccctccattggcgcctcccattgaaggaaggacccatagggagcagcccctaggaacaacaactggacctcgtctccagttctatgttgaagagatgggactaggaattggcaagcctactattggtgagccccttgtagatttgggagaagatcttgaattatccaaacttagagaggccatctaccaagccgaccagactgaagaaccacgcactcctaattgcaatgtattcgcttagtagagatgcaattccttagatggattgatgaccatgagtacatccttcaatctcatcaggcagagctggattgccataaacgagaagctagtgacctgataaggtagttcaattaaagaacggctggaagaagccaggatctcatcagagatccactccaaggaagactagttgacagattggggagattatatcgataagatatcccaccaggctcttcaagaactagtacaaaccttcctctaaccaaatgaagataggccttgccacaaaggtctaatggcgagaacagatggatcggcaaccagtgctctgtcggccagctagggatctcaggcttagtaacagcccccatcggccaaccttgggctggccaggcacattggtgcacctctggcttgccaagggaatgatctccctccccaaggcatccaggagcgagcaacccaaagtctaatcttcacccgactagagtcgggaatgggtggaaatgcccaaaacaattgtgaagtgagagtaatcattttagggatcaagatccatctaactccagcaactggtgcaatctacctcttgtcaacacacgggttacatcagccaattgggggatcatgggctgccaggacaactgcaaagcataagcttggccggtcaggaccaacctccctacctaggagtggtcggccaaggccagcaacactgcacatgactaccaaccttccaccatacacgctcctagagtatggacagccaaaccctagcacatttgagcctgcaacccatccaaggagggccagtttgtcaagtccttgcagcaacggatccttctgtgcaagcacagttggatgaaataagggacatggtcaatggctgtgacagtcattagtcctgtgatccgtaaggggaaacagcgggtaagctgtgcaaccccacaccgcctggggaaggtcaagtgggatgattctgagactgtgtagg

SEQ ID NO: 312541 - DNA, 1275 bp, Cannabis indica
tattattaatattttcaaattaacatcatcaagttcatcatcaagttcttagtcaaagtaaagaaaagaaaggaatgctagttaaagtagaattccaactccaaatatatagagagtagtgttaattacaattattattaaaaatttttgaataatttatagtcatgaaaacaagtttgaagtttttgaacacgaatgacaaactgtcaaaaactttattgtcaatactataaagtattcagaatttttcaaaaatttacaaaaatgatgttgtaattatagatgtacaccctcacttgcaaaccaacatgagtctttccagcgatatttgtcttcacttgcacgtttttcaaaagtcatccatcctaagattgttccataataattacgctaactttggagttcttaagaaatgactaccgaagagaaaatgcatcttgttgatataagtaattcttatcaatttatttaaaccttcttcaattgtataatctcataccctatatagtcttagaagatcatctcacttgatattttccaagcaatacaacttcagatctttttccttgcagatcacaaaactcttattgtcacaataacgaatatcgttgtaaaaaattaatgttttattttttggcatatgtttttggacgcgtaagttgtaacaagagattgtaattaatacttttcatatataaaatatacaagcattgctatcctattattattggtataatttaataacaaatctcacatatttcaatataagttcaaatatgtaagagacaacattcatttaatgctatttaatatttctttattttatatgatgtgtatagtgtctttactcaaattgtttaatttatcccataatattgtaattttggttcatatacacttgatatgtaatataatatcatgaaaatctatgctttattccataatatagtagctttattcatacttaatgtatgagtaaattaaattgcatgtgttactaacattattcaatgttactagtcacaatcccttatttcttttaactacattaagtagtattataaatatatatattgggatatgattttgttccgtgatgtactttcacggaatgtattccgtggtacattagattggtcttagggtacattaaatgggtgtcagggtacgtttctactttttaaccataattacccctagatcaatctcagccgtcagatcaaataactccctcatctgacggctgccgtacatcacggattacaatccgtgaaa

SEQ ID NO: 312542 - DNA, 2409 bp, Cannabis indica
gtgtaagtataccttatcgctgattatcatgccagtctaaatttagtgaactgaaaaatcatgataattaaacttttgaacatataatcatgattatattccactgtgctgacaacactataatcatgaacaaatatatacatatttacatacgtttcagacttaatatgatttatacattaagtataatcatgaaatcaatcatgtgaactatgcaacataaaagtgatttttgatctttattaatcagtaaatctgattatattgaaatgagttttatttagggcacaaaacccaacatgtttctcgttgattttttgccttagatcaaccaggggatgctttcgacctttcctctctctttccctgagctcttggtgcacgaatacgctctttcggtccactcgatcctgagggctaagactctctcaagggagcttgcccctctacggacctttctcttttgggaaatcagagcagaccttttgcggatcctgtgcttttttgtttcttccgaggattgaagtaggatttttcttagggtctcccttagacgtataggacttggctccctagttttgggtctttgagtgcttggcgaggactcctcttgtgtttcctccagtctcgcaggcacggctttgggatgcacatgtattccagctgtttccatggctttttgcatggcaaccactatttcttgcatcctcatatttcgttctttttgggcagccagtttgacatcgtgatcagctgctttttgccttaggaccagcaactcagtgtagctaccctcgtcgtaagcatcgtaccctttaaagttttctttgtattcttcgtcgtttgtctggtctcgttccttagagcccacattcactcatgaagcagcctctttaccttctgggttctgaggatcctaagggggacaaggttggcgtgtgttgtttcgagtttccaccattgcaacttcgattcttgactattgtttctcaaacaacgcttcccacagctctcaatgaaagcaccaaaatgttgatcgaggttttcaacaaccaattaaatgagatatgataagagctttaagataattaatgcagacgatttttacgtggttcgggcattaatgagtcgtagtccacgagtctctgttatttatgagagtttcttgtacagagaatgttcttaacgtgtttttctctcttttttttatgatcccctttcccatttttctctgaggtatttatagagattggtgccagcaatggatgagcacaagtttctaagagatacaaaatagggcatgcattacctataccgtaggtatcgtagggattaggtgagattaatctttatccttccttgattgatgtgattcttcataatgaagccgtcactagccccttcgattatggtgtaatcgccttaaacaaggcttacgatgtctgacatgtcctcttatgggtgttcccagacgctttccccatgttgcattaaatgcgacgcgactgttcgaatatgcccttctcgtccaggagatgcctaactacacctttagctctcgaagaggagggcatgcttttgtactacttcgggggctcgctccccgaactacacttgttctttttcatacgattcttaactagtccccgggtgaggtgtcctttaggtccacgtgtcatacataaccgtggccacgtattttgggaaaaactcggggcaacaattagtgtctaaaaactattgttattgttgttgcaatatgagttgatttgttcttgaaattgggttatgatttttgaggatattgtgcaatgggtttagattgggatttagggttacgaaatgaaattcaattttggggaaaagaatgtgacgaagggttgcaatataggttaaatagtgatgcaaagatggataagcattttagatgaaatagaaggttacataaaaaaaaatctataatatctcagaggaaagaaggacattaaagaagaaatatccaacagaactactcttactaaaatatgaagaaacgatgaagatgagctacaatagtatgaattaagccataaagaagaaagaaaactcaatgaaaaagaaatttaggtttttgagaacaaagggattaagatgaaatatgagaatgagaatggaaattttttttctttaataaaatggataatgaaaactgactaagaatcctgtaaaaattaaaaaaatatatatataatataaaagtaagtaaatgaaataataaaaaacataaaattaaaagtaaagatgtaacttaggtggcgtttggtaacacttttttaatcagttttctatttttaaaagtagaaaagtgaaaaaaaatttcaaaaacatgttctataaaactgtttttacttttcaattttataattagaa

SEQ ID NO: 312543 - DNA, 589 bp, Cannabis indica
attctccaactcttcaagctcttttcttcttgggtcgttggagcttggttttggggctagaactagatcttgaatcactttgactatctgaaattaagccaatccttaactactcattttttttcttcaagtttgtacaaataaattcagacttgtagcattgaacaatcaaatcctaaatgagcaggaacacaaaattttatttaccaaaaaatgaaccacttaacaagctcattttgatacattcagaataatctacatattctacaacccatatagcagactagagcaaccacacccactcgagatgacccaaggaggttcaaaacacaaaaaaaataaagcagccagtaaataaagcacccactcgatcaaacttgtaactttctaccaaaatcaaagaaagatagaagcaaatcaaacagcagtaaactcacttatctgcaatattgattccaaagatccgaaccttgtgcatattagggaactttaccatgaaccaccacaaggattaattctggttgtaatcgccctatttcttgcgcaaaggtctccagtagttgacgagaaaccaccaatggtacatcgt

SEQ ID NO: 312544 - DNA, 1133 bp, Cannabis indica
aacctgagtggaacaactgttcagcaaattaaaggctcctaaatcacatcgataacaacacgaataagtgacacgctaactcacaaccagggacttaggttttaaaccaacttaacatagcaataccctgaactagcagggaattaatcaaccaaggctttgaaaataacacgaatcgacaacatgaatttttcagggaacccaacaacaaatatccagataaccgattttacaggccttgtaaaaccggttagccggtttagccagaaaacccaaacaattccaaaactcaacaaaatcgattccaatccttaccaaaccttccaagcgtgcatattatacctcagtagacatattccaaagcaacaaaacaactaccaaagctcagaataaaaaatgaccattaaagagccaagcttgagttctaaaactcaaagcttgctcaatcaacaaaacaaccatcaaaacatgcttaattcaacatatctaaacatattctaactacaaaaatacatttcaaacaaccatagtaactacaaaactgaagtacccaaaatcaacaaaattcttaacttgaaacttaagataaccaaaggggaagttggtaggagcttaccttggcttagatacactatgatcttgctgaactttgctagaaatgtagaaaaaaatcacccaaccctagttggttctaggggtttcaaaagagagagagttgacagtgagaggctttttctccatttttccaattttgatattttttgtaaaatgagttaatgaaaaatagttttgttttattattaatatcagcttattaattaataaaaatcaagtttaaacaacttattaaaactcacaaaatgataaaactccaataggaaaaatgaccattttgccctttccacactaaaaatcataaaagatcacttagggggattttagtcagctctaaaatcttgactattcctgacatgcccaatgtctaactatactgccccactatactaaaaatactaagatgtgattctaatagccaaacaccgtgtttcaatgttgttgggcagaaaacatgcaaaattataaaattctatttatgacttataacatgcattctgaattcaaataaatcatca

SEQ ID NO: 312545 - DNA, 1299 bp, Cannabis indica
agttatgccctagatttacaggaccttataagattcttgagaaagtcaaattggtagcctatcgtctagctttgcctccatccttgtcagttgtgcataacgtattttacgtctcttgatacatgttggaagctacaacaaattactaatttttatttttatattaccaataacttcagtataacggaaaatataggtcgatcccacgaggactattatcaatttattattcaagaatcagtaacaagaattaaaaagggaggttttaattatgaagattaaatgaaatataataaaaaaaaaaaaaaaacaaataaaatgagatactacgatattcaagaaatagttagaggtttccaccctcaacaatcatctttaactcctaataatgaatgttattttagaattccaatcaaactgttaatcctgcagataacgctgaagttgtcaattatctcaatctccatattgcatttattcaatgcaaagcgctcaataattaactcttttacctaagcagtatatccacgaaggatgtaatttatttaacttagatatatgtttaagttcaatggagcttgattaatttaggaaataaattaatgaagtatattattcatttaacataggttctattttttatcacagttaaaattatctttaaaaaaattagaaattgtaatttatcacaaacacatagaatcctagactattaggtgaatagtaatcttaagatgacaatagattaaagtaaaatctaattagtggtcatctaaacaagattaagacatcaatcatggcattaaatatagaagaatagatacaatttgatatattggaaactagaaattatcatttatcaataaaattaaaaattcatgtctcgggttttgaattaacccttaacttataagaagctaatcagaactaaatattaaaatttcaattataataaatagtaagagtttaaggagaagaaaatgaactataatgtagaacaatccatgttgcaatctccatctctctctgagtttctcttttaattgcgtagttcaaaagtaccaaaaattgtaccctacaagtcttatttataagaaatttttacatgaaaaatcacttttgcacaatttaataccaaaatactcctacacgcctatatcaacttttttacttacaatgttggttttattacacaaataccacttagtcatcattccatgcacatcaatcatcaatcaaatcctactctcttctctctcttttttcattttctatcaatcaatccatcatttcactctc

SEQ ID NO: 312546 - DNA, 880 bp, Cannabis indica
aatattatattattattataaaacgtatccgatatgtatatatattttaagcttgtatgaagagcagtacgaacgaaactctcctatctcagtttaacgaaactctcatccccctccatctatttgttttttattttgaacccgaaatctaacgatctaagctccggtaatagcaggatagcaaattctcagagagcaaaagtttaagggccgagatcatcgggaatatttatccactttggttggtcaatgtgtatgaacctcgattaaaggtaagaaaagtatattgtactgcataatactttgaaatgtaatacaattagtattgttgtgaattgattaatattgagatatggctattatggctattattgttatataatgaaaagattgattgattaagcaatgataatgtaatgataccatgaatgggatatgcgggttcacctgattaggtgatgcgataaacctggccgcgtaccaggcataggtacgagcgtcaatcacatatgagtaccaagcgtaggtgcgagctcagctaattaggtgatgcgatattcctggcaacatatcgggcgtaggtacaggcgttaataatatgaaaaatgcctagttatggcatagatcaaaaccattgttgggtttcttcctggcgacgtatcaggcgtaggtacgggcattagtgatatatgagtatcgggcataggtaagggctcgtctgattagacgatgagatatattagtgctaggttgtggaacaagctcacctgattaggtgatccaattatgtaataggcgtaggtattggcttgtctgattagataatgcgatataatggtgctaggttgtggcgtgggctcacctcattaggtgatgcaat

SEQ ID NO: 312547 - DNA, 1924 bp, Cannabis indica
ttcaactcttgggtcgagttctcatgagaattttacacacaattttcgtcctcgagacttgtaccatcacagctagaagaccttcttgaagttaaacaaagacaaggggaaccattgaaggattacatctagaggtttcttgctgaggctacaatagtcattgtcaaaggccctacagaagaaggcctttatatggccatactaggaggcatacccttattgagtgacttctggaaagatatcttaaggatctctaccaacaacatggtggagttccttgatagagttaacgagtttattaaacatgaagaagccatacgacaggcccaggcagagcatgtcaataatagggactgatgaggcatccaacagtctcatgaccaaccatgcgcgtaggcagacgccaacaactctacctagaaatctatggtaaaaatactagaaacaagcgcaacaccaatatctctgggaggaatagtggcaaaaaagggatgtttaacacttctcccacgccacaaaagagcaaggaggagaagaacagctacttcaccctcctaacatagaaacctgaggccatcttcatggccactcagggaacagtcccataacgaaagccctttcatatcaaaaaggaaatgaccaggaggcacatgtcaaagttctgttgatatcaccgcgacttcagccatgacaccaatgagtgtcaaagtttgaagaagtaaattgaatatttcataaggcgtaacaatccccacctgcgtcgttatatacaagacgaccaaactcaagtgctaggactctaaaatggagatccaatgccatcaccagtggtaggacatcttggagtcattattggtagaccccatattgtaggaaaaccatcaaagctagggagcgctatgcttagacaatatgtcacaagcctaaaagcgatatcctagttgtcaaagataggacccttaaataataaaagcctttagagcccataatctccttcaccaaagaagatgctactcaagtcagtttcccgcacaatgaccccctagtcattactgtacaaatcgggaacatgaccatagcaagatgtatggtggacaatagagtctccttcaacattctttttaaatcaacgtttgagaagatggcactccaactcaccgacctggcaccttgcaaccaagtgatgtatgacttctttggccaaggcatcgcacttgttcagattacccctcacagttggagaaaatccaacaactagaacaatgatggcgtagttcttcgtaatcaatgctccctaagctttcaacgcaatgataggccgactggccctcaaggacctaaagctggtaacatctatctaccacctatgcttcaaatttccaacaagacatggcgtggcatgcgtgaggggagaccagtagtctgcctgacactgttacaacttggtcttctccaagggcaaaaatgagaccaacaaggggcaatgaagtctagcccaaggtggggacataaacatagatccttcctttagggatcctataggaagctttgggtctgtagaagtgttggaagaagtttaggtcgaacccacttttctaacaagaagaagaatgattgggaaaggcttatctctagaaatgaaatcaatattggtagaatttcttagggaaaaccttgacctttctgtattgtcacattggcatatggtcgggattgacccctccatgatgacccatgcactaaacattgatacaagcatccagcttatttggcaaaaaaggcagttgttggacaaggagcgtaccaaagtgctcaaagaaaaggttgaaaggctgacaccccatgacatcataacagaggcattctactctcagtgggtatccaacccagtaatggtgccaaaacccaacaagaagtggagagt

SEQ ID NO: 312548 - DNA, 1355 bp, Cannabis indica
cccaaagttctaacaataccatgtgtcacacatgagcttaacttatgagtcttgcctttcttaattactacagagattacttgccattacaaaaaaaaaaaaataataattacttttagtgataattttttagtcataacataaaacttttgtgactaaatgtgaattttagacacaacaaaaagttatttgtgagtaaaacatattatttaaatacaagttatacaaatttaattttagtcacaacaaatattgtaactaaaaactcatttataaatcacaacaaatcttaatttttgtgattaatatattaataactacaatttttttattcataatataaaaataataatttataattggtcaaaatttttttttacgtaattttagtcacaagtaatgttgtgaataaaagtaaaaaaaaaaattgtaaatgtccatgggttcagtcattacttagtgagatggggctatcatccacttcttctcttaccatttagtgtgataatttgatcaatgttcttctgtctgtctgcaattctccacattaaatactcaaacaaaacttaatgtcttggacttaaattttcttcaaaaaaaaaaaaatctagcattttgacaaagacagttgctcaagctcggttttgatttctttgttccaaattttgagtagaagacttataatctctattttctggggatgcaaggatatagtatagttagtattctatttctagctagtttgttaattacctagttattcataaaattttgttgtgatcctccatgaaaaataaattaataataacccgtgacaacatagcaattgaaacaatataacatgtccaagatttattataataagaaggataagaaacattattacaatataacatgtccaacaattacaccaaatacaagcacagttccaaagagctacccttgatgatctcaaggcctaataagctaattagaacttttatttattattgacttatagtaagtcatgaatatattatgaaatgatgtgttgtcatgattctcattggacggagacttatctccctgccacgttggcatttgacaacctcagcttcttttccttcgagagttcctcagcaaacctaccacaaataattaattaatgattatataaagaaaacaaatattagaataagattattacaaagcaatgttaatcataccaagccgtcttagctcagccggtagagcgcgtggcttttaaccacgtggtcgtgggttcgattcccacagacggcgatgttttattattgtctaatgtgtatttcttttttttttttttgacatcaattgtgtgatgtgatttaagttat

SEQ ID NO: 312549 - DNA, 780 bp, Cannabis indica
acagtaactaacttatcctaataaaaatattatgtatgaaattaaattttaatttttttattgtatatatattacttgtaattaatgtaaaaatatgaagaagatatataatcttatctttaaaacaagataaatattgataaaaaaaaaatatttgattatctaaattatgataactctaaatttatatttattttcttatagttattatttttttatatatagtttctcaaatttaataagattatcttagcatggttagagagagtgatctaactttcaaactattaatcaagctactaaaaatataatttttttaataattatttaaatataattaatgtaagtaagaaatgaagaaaggtttcttattatatatgactctaacatttatatttaatccatatgtccaatacttgtacactatatttttatttttattttggctagcttcctcgaatttttggtaaccgaattcaaaaaattatatagagttaatttatataaataagagttttttgcggctaaactctcttaattattatttcttttgtatttaactctctaaacttaaattttaacagtaaaatcttttaaattactgaactgcttgcaaatttaaggtgtcatctatttttttacagttaactgcctatatagattgcttgtatggacacttttgtacatatatcaaatttatattggtacacttaatattattattttaaaaatataaaaattatttcaaaatttataatagtttttagtttttttaaatat

SEQ ID NO: 312550 - DNA, 611 bp, Cannabis indica
tgccagtgagttttgggacggttgttgtcattaattccccaccaaaaatttgccatggttgattgataaatactattttgattactatatatatttgttatatatacataaatgattttggatttatcactttggttttaatttcgtttggcttcagtaactattcatattatttgttgatcaataactaaagattattcatgtagtatgtatgtaatgggcttggtattatatatgtcgttgttttaattgtgttattcgatttttcgcattatgacgtggtagcacatgttggtgacatgtggttcctatttcttatatctggttgaaatgatatttcgaacagagctcagcatacacttgcacagatagagtcttcccgaccgaacagggtaagggtagacagttcgagcaacgtatcaacacttagcaattccaaaattggcatcgtgaagcaagaaagtaatccctacaattcaggaatcgtatcaaaaggatagatcaaaggcattgtgcaagcaactttcgaaacccttcattgaaaccaaaagttttgagaacatttcctaaggaagaccattccatatgatcataatgttgggttttatgcc

SEQ ID NO: 312551 - DNA, 1176 bp, Cannabis indica
ttaaaagctcaaatttggccagccaactccctggtaggatgatcgaccactggtatcctcaagctcggttccctcgtaacacgaaaatgtgtaaaaggtgttgggattttgttatgcatatctaatatagtaggtggatctaaatatctcaagctttacatgtccttcctcttgaaatgcataatatttctatattggagtgacctttaagaacgtacggtcaccaacaatacttaaccttttatcatgtttaaatcctcatcattctccatccgctagagcgacgagcattctctgtcatattttgtctaccattcttgatacttcttgcccacttataggtggtacccactccaagtaaatttagcactcattaaacatctcatagggtgccaaacgtattgttgccaacaaattatcgttgtaggagaatgttatcaacaacaaacacttactctaacttaccaagaagtataccatttgtaacgtccttgcttcaagcctccattaggtctttacaaccacggaatgatggctcttatacacgaggacgtccctttggttgcttcctagatgatgcttctgctagtttacctgacttcatctggttctcttaatgtttttatttgactaacacttaaaaatatactaaaattcatttagatatcgccttctttgggaatgcaaggttcatgtaatttttattagtttttaatgctatgctcttacatgatggcatgtaggatgtctaatcacgaatccaattgccaccttctgcatactcattcatcttttacctaatcattgtaccattttacaactgactagagatgcatctagttgggtataggttgtgctttcgtcatttgctcgatcttaagtatccattgtagtacgtttctttgcctccgagcagcaacactaacatagttgctttcgtggttacaaattttggtcatatcctttgtttcatactctgcttgaggttcgtcaaggtgtaggctactacatattaggcctaggaagctttcagtctttcttcgatctttatgcgctgacaacttttgaatattatcacgcttgtaggatcaaccacaagttctgtattaaaaaataagcattttttcgaaagccaactccttgaaccaatagctttgatcttctaatcctccagtt

SEQ ID NO: 312552 - DNA, 2695 bp, Cannabis indica
atataaaatattgtttaaaatataatttaatataatattatgtaatacaatatggtgtaatagaggataccaaacgaacaatataaaaaagtgacagactaaaccaattttatattatgttgtcacattaataggcatattctttcaaagggattatattctgtaagtgtcgtgttttctctggtgaattgtgcttgttgttagtttatctgttggctatttagttgcatatgttctgactttattagttttgcatttaagattgtgttagttgcatcttttaaatttgttctcatcttgtttttgccaggttagtttttagtttgttattcagcttcttgccaacgtggcggagctggttttgacggttggtttggtcgttattcagggttgttaggtataaaaatctaagatagtttttttctaactaactcttcatcttttttagaaccatttagagattcttgctctgctagggaaaaatctatctttgtgtattcagtactttttttgcagtttgtaatttattagattttcaagggtgaagaaggaatgtcaatctgcgatgtctgaagggattttagattgatctgctgaacggagttcagcttgttggaagaaaggggatattttcttcttggatgtaaggggacttagatatttcttgattataatcaagtttattggtaacttctatatggaatcattaaagtttacattatttaatttgtaaatcaaaattggagaatgtatgtttgaatgatttctttgtgaaggttattttacatggttctttgagaccaagcactacccagtaggaatgagtttccaatgtaagacaagcttgtaattatggtgttcatttaatttattatttttatatttatgatagaaaacctaattgtgatttagtaacttttagaatatcttgaacattcatttggtatcagagccatgtttttaatgtaaagaaacttgatcctgtagctaagtaatttttggttaggttttccttgttatatgaatagaatctggtgtaattttttttcccttctttcttaatttgttatttttggaaatctaacaatgcagcatagtttctagttgtgatttgtgtaggttgacaggaaatggagatgttcagagaaggaggatccacttctcctccaccaaaagatctaattatccttattggaagaccaagatgagatccttcttgaaagctttggatgaatggatatggatgactattgccgatggttggactccacctattgttgttaatgatgaggggggaaaaagaataaaagatccagtgaatggtcaactgaggagatggaacgagcaaattttaattcttaagctttacatgctctctttaatactgtctccataaatcagtttaaagtaatttctaattgtgagattgctaaggatgcttgggagaagttggagataaggaatgaaggaactgaggcagttaaaaaggctaggttaagagggttagccaagtctattgaaaattgtctatggatgaaaacaagttagtctctgagtttcatgccaaactctgtgatatatcaaatgaatcttatgctcttggaaatgtctattccaataaaaaacttgtcagaaaagttcttggagtcttacctaaaagattcatgtcaaaagtgacttcaattgaggaaagtcaagatattaaggctcttaaattagattaattaattggtttcctccaaaattatgagttgactctacatagatgagacaaggataagaagatcaaagattctaaaaaggacaaagctaagacaggagtagcttttattcactaagaagaaaatcacaaagagttggacttatttgaatgtttgatagattgtaattttgctctcttggctaaaaattatgcttgctttctcaaaaagaattttaaaaaaacaatcctgggagaaaagaaaaatcttccagcaaaaacttctctaattcgaacaagcatcctcaacaaaacgagatgaaaggcggagctattaaatgtcgagaaggtgaaggttatggtcacattgaggctgaatgtgaaaacaccttgaagaagaagaagggttttgttgcaacttagagtgatagtgaagaagatgaagtgagtggtgagtttaaagaagataagtcagttataacattcatggctaaagaagcttgttggaattttatgccctaaataaaactcatttcaatataatctgatttgttatcaatagaagattagaagtcatttatgtttacatgtagtttttatgtttattgtttaatgtgtacaatttctgttaagtccagaacatatagttattcaaaattacagtgatgtcaacagagtggaaggtaattgtgattatatgttttaaaagtcaatgtccctttgttcatcagtgtactggatttacactgatgtgatagtcaatgataaagcttacttacaccttggataagtgttatgttcttccaaaacattggactaaagtatgctagtattggatgtatggagtataccttgggactgtgactgatattgatcttagtaaagtatattataatcttacgttgtataatctattgcttctatatggacatagaagtgaaatgatgatttccttcgagcttggcttaataaagataaatggaagagctcttattt

SEQ ID NO: 312553 - DNA, 1834 bp, Cannabis indica
ccatctcccatgaaaaaggacatcagttctgtcgtttcacgcgaattacggccatgacacaaatggatagaataatttgaagcatgagattgaattttggattagaaaaaataacacgtgcttacaaaaatatgtcaaggttgacctagagcgacgggctgcccatgcatataataaccagaaccaactaatgcctccactagtggacgggcatctacaggtgatcattgggggcccactcctcgatgaagactcaggcaaagctagagaaaagtatgtgcgggtcttgcaaaatgaacaaaatgacacaattcttgttgtggaagaaagaaaacctaaaataccacgagtatggggaccaacaataacattcaccaaagcagatggtagccatgttatcttcccacataacgaccctcttgttgttaaagtacaaattgtaaacaagatggtagcacagactatggtggataatggagcttcttcaaatattcttttcaaaacaacctatgagaagatgggacactagcttaaagacttgatcccttgcagtcaacttgtatacgggttctccagtcagagtgtgcaccatttggacaaattcgcctaacacttacagtttgataagctcggataagcatcactgttatggcacaattcttggtgatcgatgtcccttcaacttttaatgtcatattaggtcgatcaaacctatatgatttaaaagttgtcacatcagtttttcatttgtgcgttaagttcccatctaaaaggggggtaggttgtttgaaaggaaattaaaggagtgcacaaaatgctacaatcttgctctatctaaggtaaaaaggagaatacctccagccaaagttcagacaagggagcattgcccaataggaactcgcccaaggcagggacgaagacatggatcctcgacttgggaaaataaatactaatgttgggctaataaaagaattagaacaagtggaaatcgatgcagatatcccaactaggaagctgaagatcgataaagacttgttactatcttaataaaacttctgagagaaaacctcaacattttttcttggtcacatgtggatatggtcagaattgaccccactgtcatgtctcacgccgtgaacattgatccaaactttcgtcccatccagcagaagaaaagacaattacataaagagtgtggacaggcactaaaagaagtggccaaaaggctatgcgtaaacaagttcatcattgaagttttctacccggcttgggtggctaaccccatactaggacccaagccaaacaaaaaatggcgagtatgtatcaatttcactggcctcaacaaggcgtgtcataaggactgttttccactcctaagaattgatcaacttgtggatgcaacagccggacatgaaatcttgagctttattgatgcatattcggggtataaccaaatcaaaatgcatccacctaacaaagaacatacaagtttctgaatcagatatgggtctatactgctataaagtgatgtcgttcggtctgaagaatgtaggggctacctatcaaaggttagtaaaaaaaatgttcaacaaccagatcagacagaatatggaagtatatgtggatgacatgctcataaaatccaggaaggttgggggcacataggatttggatgaatgcttcaaaatcctcaaaaaatacaacataaaactcaatcccttaaattgttcctttggggtcagctcaagtaagtttcttgaatttatttttaatgctccaagaataaaagccaacccagaaaaaatacaagccctcctggatatgaagtcgccaa

SEQ ID NO: 312554 - DNA, 791 bp, Cannabis indica
cgcaccattaatatcccaaaaaattaaatactattttaatctgaatattacacaccgactctccattttttgtaggtggttggtgtcacgcggttcgagcgacgatgattggtggctgcttctctacaaacgttttatttgtgtattacacaatatatatctgataattttcatgtaatatataaatatattgtgtaatatttgtatttatattgtgtaatatctaaggtctgggtttcgatttgtataatatgtgaaatttatgcattacacaatatatatttgataattttcatgtaatatatatttgagatctaggttttgatttgtgtaatatgtgagatttgtgtttatttttattttcgattgtgcttaaatctgagttcgtatgggctcaaatctaaggttatttttctagtgtgtcgtatataaacagatgggataggtgcaaaaattatttttatacttgtttgcgagtgttgaaagtagatgaaaaacacaaatacacatgtttttgtgtctacagtaactgacgatgaaacttttaatgtcagttaaaatccggtatgagcttttttctagtagtgttataaaatttatcttctaacagatttttaattcatcccacattactgcattaaggtatcaggcatgtcctaccaattccaccaagtacgggcatcttcttgaaacatgaaatagcgacacaattaacccactcgttaccaactacacccattattatccaattaatatgtgtatgacagtactcatccatttcaactttgata

SEQ ID NO: 312555 - DNA, 772 bp, Cannabis indica
cacacagatgctaagcccattaacaattgatcaccaacaacatgggctaacacagcaaagaactatccaatcaacccaagttttaataaaaccaataaaatttaatgtaagcccaaataaaagtctaacaaattagatataattaaataaatgttagcatctacattattttagaaaaacttaaggaacttaattaccaaattttgacaaataaaattcaaaggcagaccaaacattatcctggtgtcacttgacttttttttttgatgaatactggtgtcacttgattgaaatccttgaagtttattttatagtgaatttggagggagagggcacgtgagtaaatgtgtaagtgagagggtagtttgggaataaaatttgtagtgcagacaacagtagcagcgtatccaaagataatatatactacccggaccagtagcagcaattttctgtcacgccatactccggttttcctcacgttttgccacgtggtgctacaccagtggttagattgtaacaccttatcgtacatccgacttacgagaaagtgattatgccttgtgaactcaaacactatacgacacatcatttatttcattatgtaggatcgaaaacgaaattacaccaatatatatatatatatatatatatactagatgagatttacgtggcgagccacgtaaatattattatataagttttagttgtttttgtttaagaattcagtaactgagcaacggcaacaataatggtagatagatctatttaagtt

SEQ ID NO: 312556 - DNA, 705 bp, Cannabis indica
atgactaaaaataaaaaaattgtggctaattataaattatcattattgtgttataattaaaaggtccgtgactaaaagtattagttacaaaaattataatttgttttgactaaatgtgtttttagtcacaatatttattgtcactaaaactaagttagtaacaacttgttactaaatactatattttagtcacaagtaattttttattgtaattaaaagttacatttagtcacaaaaattttatgttatgactaaaaaattatcactaaaagtaacaattttttacagtgcatacagactttacatcacgaaaaactgaccatattcgtgagttttaaataaagtaacagtattaatataatgaaatctattttaaataaatataattggctaaagattaacattttctattatgtgtagcaccaccctaatgaggtggcacctaaaaatggtggttttctataattattataaatgtgaaataagtaggacctagtattgtattatgatatcacataagtgtgctatgcagtaggtaccatgggtgtgttttttatagtgaacacataattagatatgaaaattagcaaattattaataatttaactattatatgtgcattagtagaaaatatattttattgtcataaaataaatattagtgatataatttctcaattacggaaatttcattaaattctatagg

SEQ ID NO: 312557 - DNA, 1921 bp, Cannabis indica
gaggtgcgcgcactaccatgttctagcaaaggggacaaaattttattatgtgtcataaaactataatcgtcgctgggcgatcctgattgcattaaaggtagacatctgcgacattcttgggcgagcatcatccgtggtaggcccttcgagtacccattcgggtatctgttgcgaagactttgagtttggaccacttcgggtcctagagtgataataggtcatcagtgtctatgaacctaagataaggtgatgtagacttcttcttatctcttagtcttgacttgttctcgcttctgtgaagcttctccatgactaggctttaatgggattttaattaacgagattatgagattatctcttttctttcatgacatgtgtcacctatttagaaatgcaaataacttttaccccaagttttttggactcttcaagttacgggagctggcaatcttattctggcttcactactacaaaaataggtttcagtcacacacattgagtgactcttaaacgttttagtgacacttgactgcgcgtcactaatgtgggtgactgaaaaaccaatatttagtgacccttcatagtgggtcactaaacccttctagagtcactcactgagcgtcactataggctttcagagtcacgctttgtcaaattataaaaataaaaccacacactatgcgtgtcactatatccatttatttattttttattaatttttattcgtgacatagtgacactctaaagacgccactttatcattttttttaaatgttaaaagtaaaatagaaaaaagaattgaaaggaaatttctcatcttcatttattcttaattacaacctacgaaacaggaaatacaatctaattttttttatacaagttaatctctcaattaagagatctgtacatgatatgaaatttgataataaactaaaatggtttaaatctagacaaaatttagaatttggaaggcacgatgtcttgcacttggaaacctaatctctggaaagactcttttcttttctagagatctgaaggaaaataataaacagcaaaatatcaccataagaagcaaaataaaaataacaaacaataagaatataacattattaaaatctgaaacctagaaaatcatcaaagaattagaaaagaagaactttgtgtcactcaacccagaaaaaaaaatctttaaaaaaaagagaacatcttgccactgttatattcatatatatatatacatatatatataacacatccatctctatctccattatcatatattatcttcatcttctctatatatttataattatttcacttattctttaatatagcacatatataactatttctctcatacttttcctaatttataatcctcaactaataattcttactaaatatattaaaatcactattattaaatgaaaatgttaaataaattttgaataacaatataatattatatcaatttagttctacaattgcgtacaaaatattcactaccggaaaaaaatcagatctttttgtaaaataaaataaaaaaatgggcatctcgtatagagagatcaaaccctttagggaaaaaaattagatctttttgcaaaataaaataaaaaatgagcatctcatttagacaaaccagaacgtttagcaaagaaaaaaaaatagactagagagagattgtgttgaccttatgattttgatgtcggagaagctcgtcgtggggtttcttagcttatggggtcgtcgtgagtttgcttagcttgtggagcagatggccggtgacaagacagaaagagaaaggttgagtgagtggtggagaagatggccagagaagattaggaggttctgagatcccttgcgaccggtggtagagcccaatcggatgatgtaaagctggatggtcggactgctggtg

SEQ ID NO: 312558 - DNA, 1710 bp, Cannabis indica
tattgttatcgtattctatattaaatacaaatagatcttgagtttattgttaatttatctaacgatatcttgatgcatttgctggaatagttacagtatcatgtggacactgtcatcctagttttgtaaatgctgccattgaacaaaccaaagttttttttttcaactcggcattttagagcactctcattagcttctctattctatctttcaaaatacattaccaaaccttactttctctattttacctcaaacttttacattgccatgcatcaacttctttaaaatacatcactaaaattctattttttttcttcaaattttaatatatttttatttatttaatatataatattaatatttatacatgtcttcatatacatgtaaaattaaaaccccaaataattaataaaatatgtttagagcaataaataatattatataaatgtagaacatgaatagtgaattttaaagaagttttaaaataaagagagagtttagagtatttgatgtagcgtgtttttaatttagttctttaaatattttagagattctctattttaaatcatctgatgtgagtgctcttagcacgatatttataattaagtagggtttcactttagaacgagaaatgtgatttttgccaaaaaaaaaaaatcattaaattagggtaatatattaagcctctctttgataaggaggtcattctctagataaccttaattcttggaggaaattagactctatccatgttttacattactaactctcatttttacactctcttttaaagtctttcatttctacattttttccaaacactcaactaattttacccctatcattacacgatactctccattcccttataatttgaattctgctctaactctccctgaaacctgtctccacgctcaaaaagcactgctagtccccatcgagatcttcaaagtttagcttccaaccgtcgtgggctccaaggattcaaaaccaccattcaaccatttacatattgtaccgtcgtaggcttcaaagatacacagatagaagatggtaactagacacgccaaagctgatttattatgcctatttgtgtttcttctctcacaaactggttagaaaaaggaataccttttagattggttggataaacaatcattacttcactcatgttttaactctaaatcctctcatctgccattagcaacacatgaggtatacttaaaatctattatgattatatataatatatatatatgtgtgtgtgtatgtgaaatttcattcaattcatagtgcaaaatctgttatgaatacatataatattgaagtgggcacatgcaacctgtttccctttgaaattaagaaaagaaaggaaaaaagaaacatgaatggaggcctaactttttgtaatgagttttattgcttgcatttctctgatttggatttttttttacaataagcatagaagataatgttttcttctcaaaatatacttttatttgatgactgataaaaagaaaatttttgtttgatagtcggctcataacaattataatatatatatatatattgattctcataattcatattgtctctaaaatcgtacattcttagtatcatacatttatctataataataatcataaatcatactctaatacacaaagaattaaattatgcaattcaacacatacaaaactatctaatttc

SEQ ID NO: 312559 - DNA, 731 bp, Cannabis indica
tcattattcttcttttcaagataattagtttaataagtagtaataatagtatattaatatttatttggaatatgtgttattatttatgatcagaaaaaagtggatcgagcattacagataatgcagattgcagtgagtttgggaaatcttgttgcggccaccacagcaatgtgttcaatcatgtgatcaaaaaacaagcttatatatttgagattagtttatataagcttataatatgaaatattctatctatcaactactttgttttttatattgttagagttgtatttatttattttattttggtcttttttttatttaattttatgctttgtttagttgtagagagagggatgggtacatgtgttgttgtgttggtgtgacaaggttatattatatgtgtgatgtttttttttttattatttaatttaatggagaagatgttagatgttaatatgtgatctgttgacaaaataaatcaataatgaagagatgtgtaatccttgaattaatttgaaaaattacgttaaaagtctctaaaaaatttactttgatgtaaattaatctttatcgcaaaaaatagtagtaatagtcttacatttttttataagtctgataatcctaaatttaactgattcgttaaatttttaaaaatactacatgttaaagtattattagtctaaataataattttaattaaaaaaaactaaaaatgtatattttaaaatcat

SEQ ID NO: 312560 - DNA, 1999 bp, Cannabis indica
tcttcagtattaagatcaatgtctcttgaaggtgccatagctgtatccccattatcagcatcactcatatctatggcaatggtcattcctttatcaagatccataggagtactggatcgattaccaaccaatggatttgtcttccctccacctttttctgctagagaatcgtctgattccaacattacatagacttcggaaagttgagactcatatttttcatcacattgactgttgaaacttttggagtgatgagaatcaactcctacagcagaaaggcaaaactaaatcaaataattcaatgtcaagacaagttcttcctctgataaacttgaatatcaaaaacagtgaaccaaaatatatttttaaatgcctatcacaattcctgtgacttaacggaatattttttttaaaagctgttggtttcgacagaaacatgtcaaatactaacaacaatgctgaagagatgcaaatgaatacaccataattgttcacaacttctctaaacaagctattagttggtagttattcaatgaagcattgtccattttgattcaaaacttctctaaacaagtcatctaactattcaacgaaacattgcctattttgctcctcctattaaaacaccggataaaatttgatacaactacaatttatctctccaatttatctctccaatcaacaacaaacattgttgattacaattcaaaatgcctagaaacaccataaagtagattttatttggagagtttctcaaagttaccaaacacttcatcaacactaagattagaattatccaaaaacttaaacacagtacaaatgggattcacatgaaagcgtgtatatatatgatgacattgtgtagccctaaatatatgttatatgatggactgtaataaattcatatgtccaaagaaaagaaccgatgaccgagagtctcttcttctttcttccacttccacatatatattatatatatcaccatcatcatctttaagattacgaataaatacacaaattctaaccaacaacaaagcatttactcaaacccaaaacaattcgttatcgagaaccatttccttcaaaaataaatttatatataaatataagggcaatccccatttatagcatactgtcagaaaacgaaataatcccatcaaagaattttcccattgttaatgaaagaaagaaaagaaagagattggatatttttttttttttggatttagttttcaaaaactttctaccaatcaaaatcagatattattatcaaatttttttattgaaacaaaatcagaaaattataaaactttcttagcgtttcaaatctttacatacagattagaacaaaatctcgtttacacacaaattttaaatcttcgaaaacctaactataaccaaaaagaaaaaaagaacacattttgttctcatatccctgtagaacaactctatagaaccagacaaagtttgtttcaacatcaaaactcaaaaccctaaggacagtacagtacctgtcgcgagttgagttgtgagtgaatgtaattggttatcaggtggccaatgagtgaaacggaatggctcgtcctctccgatcgaacgaatcagatctgtgcttaggtttgaatttgaaaaatggcttcttgacagaaccgaacaaagattgattttggatgaaatccttttatatgtatttacttttggttttgggtctgctttcctatcataattgggcttgggcttatataaatatgacctttttgttttgggcctcctatcataattatatgtatttagttttagttttgggtctgctttcctatcacaattgggcttaggcttggacttgggcttatataaatatgacctttttgttttgggcctgctatcataatttggcttatataaatgggtaaatttcacaaatacacaaaaacaacaaaaaaataacaaaaatacggtttcacggaattttaaaaacttttacaatttttttgatttt

SEQ ID NO: 312561 - DNA, 523 bp, Cannabis indica
aaaaaaattagcaactaacccaataaaaataaatagtatatagtaactaacaaaattttatttattatgttacatatcctattattttcatgaataaactaattagcaaacatcatagaaattcacaacaccatggattcatgatcagattcacaagcagtaaaaaataaatattgttattaatattcatataaaaaaaactcactcactatttttttaaaattttttatcagtaaaaattttacaatcacacatagacaagaaaaatcacacaataataaaaactagtaatattttttttatcacaaacaaatattaaaaacaccaaatgagattacaaagaaaaacaaactagatattaagatagacctgagcagtgggctatggatactccacgatgatactaacgacgatagggatgtcaacctgatcaaagaactttgacgcaatgcgatctgactttcttctagcgagcactagcagctatgcaaaaaaaaaatattaagccattgatttaaaaaaa

SEQ ID NO: 312562 - DNA, 2198 bp, Cannabis indica
tgttgaatatgcttgccacttgttcgataaaatgcctctatgttgcaatgtggccatttggaatgcattgattactggatgttccagtaacgggtatggtgaaattgctgtgctttactttagtaaaatgcacaagagttctattaggcatgataattactctcttgcaagtgttttgagtgtgtgttgtatagagactttggattttgggagacaggttcatttgttagtgattaaaactgggtttctaggaagaacttctgttgttaatgctctacttacaatgtatttcaactgtggaattgttttagatgcatacaaggtatttggagaggctgatgatgatgatgcatataaggtatgtgatagtattacttttaatgtgatgatagatggtttagcaagggtgggaagggatgatgatgctttggtaatgtttgaagagatgcgttctgtttgtttaaggccatctgagctgacttttgtgagtgtttttaggtcgtgtaaagttgctagaattgctcaccaactacatgctgacgctattaaattaggatttgaagctcatcccgctgtgagcaatgctgcaattaacatgtattcctgttgtggggatttaaatgcagctcacatggtttttcaaagattaggaaacaaagacattgtctcatggaatagtatgatctctagtttttttcaagggaatgatgggaaattgggtatcttggcctatttggaaatgcagagggcaggaataaaaccagatgaatttacttttggaagtttgctagcaaaatcagagtttgttgatattgtggaaatggtacaagcccttatatgcaaaaatgggcttatagctaaatctcaagtttcaaatgccctagtttcagcatattgcagacataggaaggtgaatcttgcatatcgaatattccaagatactgagtgcaaaaatttggtgtcgtggaatacgatgatttctgggttcttaataaacggatttcccgtggatgggttagaacaattttctaggttgttgatgacaaacatcttgccaaatgtatattccttgaccattattctaagtagttgtgcagccatttcagccttaagtcaaggtaaacaagttcatggctacatcatcacctctgggttttgtccgggaacttgtcttggtaatgcacttattacaatgtatgcaaaatgtggagttttggattggtcactgagagtttttgatacaatgattgaaagagatgctatctcatataatgctctgatatcagcatatgcacaacatggacaaggagaggaggcagtacgttgcttcgaggtaatgcaaggcttgtctaggatgttcaaaccggatcaagccaccttcacggctgttctttctgcttgcagtcatgctggtttagttgatgatggtataagaatattcaactccatggtgaatgattatggtcttttagctggagtagatcatttttcttgcattgttgatcttctaggtcgtggtggctatcttgacgaagctgaaattattaccaatagtaagcatcttaaggcacattccaacatatggtgggcattgctcagtgcttgtgcagctcacagtaatataaaattaggaagaatagttgctgggattcttcttgaaactgaaaaagataatccttcagtttacgtgttgttagcaaatatttatgcagctgcagatcagtggcaagaagcagcaaacactagggaaatgattagaagaacaaagatgacaaagcaacccggctgtagttgaactaacttcttttgtgcaaatatcctttttttagggtgattttgtgtaaatatctaaaggtgaacatataagcgacatggatatccacaaagtgattcataatagaacttaattttgaaagagaagttatgagggaaccatcattcactctttcttcttggaaaatgttgcatgtgtgaggaagaaaaacttgtggaaaaccaagccatcaacgcaaaagataattaaaaatcagacaattcccaatttctcaataaatcaggaaagggaatacaaaatgcagcaaagttattgaacttcttgacgcaattcaactaaagagccaaaagaagttttaaaccttttcccaggttttttttgttgttgttgttgtttagtaccactgtagcacatgaccagaaaa

SEQ ID NO: 312563 - DNA, 1265 bp, Cannabis indica
tttatcccacttttatttttttcatgtgtaaaaactgagataaaaagtcccttttgttgctgtatcttcaattgtgaatctgctactactaaatacagagtatagagcttcctctcaataaagctattaaccggcaaggttggaacataacttagttcagaaatttataaattggcaaagagtaggaatttactaaatgcttcatttctatactagaaattcaggtgggaaatcttcatctgagacattctaaaacattcaaaaacagggaacccaaagatttcctcaaaggcattctatatcattcattcatttgtttataaaaaagactaatgaaattccatttcactacaagggaataaaaaagagtagtgccttttcttcttcaaacttggaaatagtatctaacaccaaaaaaataaatctcattacatttttgtctataatcttatttcaaacatcatgttgatattaagtaagaaaatatagaataagattataaattaatgtattataacataacttacactactacaccactacaattagtacaattattttacaatataatgttgtgatttgaaacactaaatttaaaaagttatttaaaattaaaataagagagaatacctttcaaagcctgcaaatgggttgctttttccttacaaaattgttgataaattgattaaaacttagaagtttcgctttttaaacagttctcaaactacaaaatatgaaaaacatagaattaaaactttcacactagaacctctttcgagctctgtgaaagtgatttaacaaacttcaagctaattttttactataattcattcacttctaggaaaaactttttgaataaaagttctatatctctcttttatctttccaaaatatcttaaattgtttaattgcgagttatattgagagagatgaccaaaatactattggtcatcatcgcagcaggaaacagaaaatgggaaacttcgaaaatcaacgaagaaaataggaaatcccttgtaaggtcgtgaccttggtgttttttttttggaaaacttggatttttggctctatttaaagagggttgaggcaaagctttgacactattcgaaagatgagagaaattctaagtgtagaaggagagcaaggagcagaaggcaccgatggaggactccaaacactgttatttctcctctaactctatcttttatgtctttagttaaatttcttttgttttagaatgtctgatagtagctaagttcttttaa

SEQ ID NO: 312564 - DNA, 2063 bp, Cannabis indica
atactatatattgcatatatataaacatagaagaagaagaattcaacacatacacatgtaatataataatatatatatttatatatatatatatatatatatatacttctttacaagtttaagtatagattagtagggattaacataacttgaacaaggtagttacaccttatctctaagcactaagaaaagtctcatggaaatagttttgagaattatcaatccttagacttttctaacaatttgctttttttgatataaaaaactagttcatttcaaatgagcaccaaagaccttattttataatgtttaggtgattacacttagaattcaatcacacaacacctcatttctctcatataaatgagtattaatatagtttataataactatatttcataactttgaatagaaaatttgacttagtatgcttaaatgtaaaatatgttattttaatatactccctaattagaaaaagtgtacatatactttttgtaataccctaacgtttaataactggattagtaaccttaactaagttaattaagtaataatgagaaattatattgttatatgatttaatatgtggaattattgtgatgtattacattttaagaccccgttggtatatgtcaggggcattttcgtaattctgacctaagaagggtaaaaattataattttatggtatattgtatttatggactatattattatatagtatgtttattctatctttatgtagatgatttctaataagtcggcatggtatagtcacaaccggatattttaggccgaacaaggttcagggcccaaaatatattttcgaaatttaattatggattatatgtgttaaatgagaaaatatgaactatgtgatgtctgtgtgtgagtggaaatgacaaaattatccttttatgtgtgctttagtggcaatatggtcatttgaccaaataatctattctcatcaaaaatcaatttttagcaaatagaaattcattttctgggttttgaaaccccaaactgccctctctctctcaccctctctgtttttgtgatttcaactaaattttgtggaagaaagcttaagtttggtgtagaattttacggattctcttacttggaacttggagaggattaggtaactattttgatctcctttttgttgcttgaatttctgatttttaagcttcatgatgatgttcttggtgttcttatgttggtggttacatgttgttgtaaattaagagaataagtgatgtttttagtttgattatactttggtgttatgcttgatgtttctatattgatttgggaagtctatggagtggattgtgatgttgaaattttagaaaataccttgaatttttttaggtttgtgctttaagttatgtacaatattaatttttgtgtagcatgcctaaagtatgttttttattttgctcttgagctatttgttgtgcttagttttataccaatgttggattggtttggtgttgattagagtttgatttgtgcataaaatttgaatgagttttggttgaattttgggttagtttcgaaagtatgaaagttgggtttttttgagggagcagaggctgtcgccgcgaccacagcaaggctcaccgcagtgagctccaacagattggagctgccgcggcgaggaccctgttttcctgggtttttattttttttgtttttgtcataacttttgatttcgaactctgccatatctacaccactaacaaacaaaatctaaagttagctatgtaacaagtaatctatacgaaatattaaatgcataaacaacattatgtattcagcataaacaaacacaatataaagtaagctatatatcaagttaccaattagacacgttttctttctttttttgtttatgtttcctgaatcacaattgacccatattccctcattgatattgtttctaatgtattcagcatcgtcttcctcaaggttacgatcaattcccataacttgctcatgaattggttgccaaacaatgaagtcatcataacataagtcagcattctcctcatcctcttc

SEQ ID NO: 312565 - DNA, 2248 bp, Cannabis indica
gcagtaggatcatcagaggagctggactgaactggagaagcttcagagattggaccagagtccattgatcttagacttcagacatagctgtgagcaccgtaacaactccttgctcaaaccttttctgacgctgttgatctaaattgtaagcatgagccaaattctgaacttctgacagtaacttgacttgccaatgagcagagggcaagcgagagacgggtgatgtgctcacttgaggaatttctgatacagcaggggcagcagggtcagatgtagtaaatgctataaccgatggaggaatgggcttgccaaacactggttgaaaagtcttgccaatggagggcacaggcactgtaacatcctgctcaaggatagctggattacctcgaaagaccaatctctgaatcagactaggatatggaagagtgtgcttaacacctttagccttagcagaatccaacattcgggtgtagatcagtgatggtaaatcaatagagacaccagtaccaagggcatatagaaaacgtgcagtgttatagttgatggtagatgtatgtgaattggcccaccaattggacaaagcaattttatgaagaacccgataaaactcagagaggatagtaacaggaaactcctttccattccacacaaaatcaggttgactagtaagttcagcaccaacatccttaaacaatggtttatactcatcggtgtaagtggggtgagctagcctaggaattttcagtataaggctaatggtagacggagcacacctaaaccaagacccacgaatatacgcctgatatttgtgttgacttttctcatttacaatactttcatctagattagcataaaactcacggacaaggttgacattgggcgattgaaggtgagtgactgtgtgttcccattttctagcctgaacaatctcacgaaccctagcaaaatgtttcaacttaaccctatactctggccacagagggcgggaacagacattctcttgaaaacgaagaagtttgtcatgggagtagaagggcaaaccaggagagggttcagactcagagacaacacccttatgttttttggactcagactctttagccccctgaacagcttttcgtttactcgacgatggacctaagttcttaagaagaacaggtggggacttagaggacgatatgggtgaagtggacccagggggtgcagtcaacacaggtggagctggtgagagagacggggaagacagagatgaacgagtgaaacgtttagggtttgaagacatacctgacaaagtggaagggcagaaaggtgagacgattcgtgaatggagacccaaacacttcttcaggaacagtttgcacgcttccccagacagcaaaagatgaacggtcgaaggtggagtgtgctgtgatgaatgaggggaaaagatgcaaacttataacaaatggttgttggtcccagctgaacaaatagttgtagtatgtttcagaaatcgtacaaggcccacaagcccaacaaaacaggcccacacaacattcaacccaacccacgacatacgaagaaaaaatgaaacccctaactgagacaaaacttgttttaagaaacatgtattccacataagctcaactcagtagaaaaaaaacaaaaaaaaaactatagatgcaatctcaaacacgaacttagaaaaaaaaaaacaacacaccagacactcaatggataaacaaggaagtgtgagtactaattaaaaacaaaattccttctgatgatctgaacacaacagatgtcatatgtgtgtgcaagtgtcctcatgtgagccctccaaggattagttggacaactcactctctctacttgaacagttaggacttcttctagacatttgatatatgaatatacttgtgagtgtatgattttttttgtatacattcatgttatttttccaaccagttatggctttcactcctccctggagatgtagccgtctccttatgaatatttctcaaagaatatagtgagaaggagcaaactcctcaaagacattcagtggtacaaaggaagctcttcccattgcatctagggagggtagcctttctaactgggacatcttacagttcagatcaagagagaaactgtgcaattaaagaaaactcacaccacataaaacaaaatgctagagggactgatgcacaaaaattcaaatggtgcaaacaccaatacattttctgagatgtgtaaatgagcgtgcatc

SEQ ID NO: 312566 - DNA, 6574 bp, Cannabis indica
agatcctcgtaaaataatttccatcaattatatcttatttattctctctagatttgccctccttgttaccataaattctgtccctatttatagatacatagggtgatagttattcccttaggatctattcattcataaccgctcatgaaacgtgaacatcccccacgtttcattattatgcatatgggataatattagataaatgctcttttgtttttatttattgacagttatgctgactgtacttaattattcttgtcgttccagtgatatctttcttaaatatttttgtagaaaaatactaattgttgagttatgatgcatcttgcagcctttcttaactgtttgagtgaggtataagcgagatggttacttcaacgtgttaagagcgagatgaatgaatgttaatatcatcctttggacatgcaagtatgtgggtcaattaggttcaagctcttgcatgtatgtgggtcaataagttacaagctctttgttcattcgtctagagcaactctcattacgtattttgttcaccccaagatggacttgttgtctcgccaaatttacttgtttatagttattattcacatcttgcttttgcctaggcagggacgagtttgaatatttgtattaactgttattcttgaggcgagttatttattgtgtatttagtaatgcacagcttgggctagtttataatacaattatgtacaagtgtcgacgtctcattattagccaaaattcaggtatcaattatccccccaaaagtgttttttttttaataaaaataactttttaaatgccttcaagggtgctatttccatttaaaatttgcatcctttcattttggcagttcaaaactttgaggtgaattatttcttcatttaatgctccgactgttcttttctcatacaattcccatccgtttgataaactttctttggatcgaacttactatcatttaggtataaatttcaaaccccctcttatttttcacatttctgcccacaaaccttttctggttttgagaatctctcagccaactccttctttgcatgccctcattgtctttcaccttttttcttcatatttcatccgactgtatttgccagcttcaagatcatcaagacccagtttcttttgaattgaagatcccatcccaaagttcttcattacccggaatctcttaacgaagcaataagtgttgacctcgctttagccaatgacattgcgtcgattattaagtgattaagaatataattaaaatagagcaaaaacaaataagcaataaagaacaacagattttaaagaggttcgaccccgtaagtgtggtaatagcttactccccttagattgtattaacttgagatgaagaacaaagtgtttttctctctcaaagctcttacaataaaatccctgggtaattcttttagatctctctctgaagcaattctttcgatccctttcatagtgaggctaagtcactatttatagggccttaatgcatgagaaaaggtttcccttttgcttacaatgtaataagaaagtacatttattacataattatgatacaggaaatatgaaattggagcaggatgccatattcctctgactcaatctcacgatcatagggattgtctttgtgcctggacttcacgagatcattctaaagtacttaagtcctgataagtagttcagagagccagatttatgcctgcttggatgatctgcccttcaccttgttcgtataattaagaattatacatgtagatgtacaatatgaagtctgttcaggacattcatctctgcctagatgcatggaatgtaggacatgtgtcacttgtgtattttgccacatcattcttcaaaaaataggataacattttcctcccaagtctgagcgggaccttcttggtcgcacgtggacttcactcaatctggatccttgtctgaacgggtgcaacgtgttcgaagtgtcggttgatgatccgatgtgactctgaccaagggtctcttcaatttttggctcattaatgctgactaacatgtacctcgatccaagcctttgaattagcatgttttgatggttattcttcagataattgagtgcataacatacacttttagggggaactcaaggtatttaaaatttgaaatgattactttgactcgttaatttgcttataaatagggctgaaaaccttaatcaacaacttttagccaattttcactttcaaagaatcagagcaacaccgaccaacgtcatccaagcaactcaaaagcctcgaatcagtgagtaagttcttcatttcctttcttttacatgtttgaatgtttagttttcttgggtttctgttgcagaactttatagctcttgaacttgttctaggagaaccgtagaaaatttaggtataggactttgaaatcttaactatgcttaatcacgttgcttgatcataactgcgttttaattttgattccacgatactcactttcacttacccatttgaggcttagtgcaaaccaaatcttaattcaaaattttgaaattctggattgcaaacctcattattatgtaaaatttctattttttatcccttgatcggacttggtcggtataactaacatgtttctgtttgttctcccgaccaaacactcatcttgtgtcctaccttttgtagtgagttttggggaagcaaacatcgtatcgactaggatctgcttcaacttctatacgaggatcatcctcgcctccgcgctagtacatctttatcttgtgacaacctctccaattcaagctttgaagattgggagataaatagtgaacacacaccttccccggaatcgtaagtgcaacatcatttttaccccaaccagattgaaggtcaaagctacagacgcttcatttgagagcttaggaaggggtggaggcgttatttactatccaactggacatatattgtccatccagatactgttgacaccttgtccgtaggctgtccaaatcccactgctgcaggtacccccattgctacatttgcggtaaccatcgccagacacaccaaccaggttttttccgagactaggatgatggcacaaactaaacaaatcgtgcgaaagtcttcactataggacccacacatagaccatctcgccacaatgccgtgtgcagaacaggcccgacctacggttgaggaagaagacattgctagggacgttgaagtccaagaggtggaggattagggcgaggtctaacctgatactcctaaagctgaggaggaaggtgcagctcgaaggttgccctttggttgttttaatgaagagggccgacctgtgtctgaggccggggaggtcctggaagccggtgaagactatgtcactgaggaatacaccgaggttgttcctctgagaaggtatgtcatactaggagctcggtgggtttctcctccatccatggtgaacaaggcgaagatgaagaatttgctcaagcatggttacttaggggatgtcgaatgcttccttccctcccctaaccaattggcgaccagtccaagggagggttactgcgcttcgtcgggcactcacactaagcaaggttccatgttacccttggttctgtactttaggaggattgcgaattactaccacatcttctcgatgcagtttactcccaagggcatcaagtacttgtccaccatgttcatcctctatgcctcacaaggatggggtgagccatccccgcatgataccaactggatctttgatctgaagtcaagacccaagaagagcaggttgggatatttctactatctcaaatcgaggagaagtagttgacgggcaccgtagactccggggtgagtaagatagggaactttgtggatgaatagtactttgtctagggaattgacactgtccacactcaattccagtagataccgtcgtactgctggcctaccttcacattggggctcaggaagagggcataaagaattcttcaactactggatgctgctcgaaacatcgctctcctagccactgaggccaattttgtcaagtacaaactcttcccaatagatgttgtgccaagggccgtgacgaaggggaagaagccaaatcctaaccaagacgaagtgaccgagcaggaaaaattgagcaaaaagaggaaaaaggttcctccaagtgaccaggcaccaattgagtgtgctatcaggattagggaacctgatagacctgtctggctatctgccccagtggaggaaaaaggaaaggccatcatgagaaaccaggaataagaagattcttcggacgatgagactttgtccttacttgttcgggagaatgctcctgatcacatgcaaggtactttaacttatatttatttgtcccaatacatgctttacattatattttcctttaaatgtcttgtcttgtttatgtgcagccatgtctcaaaaggtgctccaagctctgaagaaaaggactggtgacagttcgagcctgacttccctgaccaaacgatatagaggtgacgtggtcccgtccaaggagaagggcctgattgaaatagtgatcaaccactccgaggaggtgatgcttgctgtggaccctccatcccaaaaagtatccaagtcaaaaagtgccgaaggggggagctcagatggatctggtccaaccaaggcctcctctaccgtcgtggtgctgagctttgaagccaagaaaggcaaggacatgctccagtactaccttgaccgctcacttcctgaagtgagtaatcagttgtccgggttggacaatgagttgtccttggagctggtgatgggcggggatcctgaaggaagaagctcgcgtaagtatttccttctttatttttatcctgtctttttaccaatggtagctttaactttttttctgtgcaggtcaatctgaacatggcctacgcctactcttgagccaaatccacggtcgtgaagaatcttgacaccaccaacaatctgtagagggaggtggatgcggccatcaagagggtcctggacgtgagaaatgagttgggagaggtaaacaagaaacttcttgctgccaacagcatggtcgaggagctgaccaaagagatccaagagaagccatcaactgccaagctcgaggcaaataatgacaccttaactaaagaggtcaacgagattaaggacgagagggagggcctccttactcttcttgcgaatttaaccaaggataagacggacttggaagagtacgtcaaatccaggcaaatgagggaaggtaaacccatcaactaccaccttggagttcttttatgaattttggaaggtaaacacattaggaaatattgattacctcgaagataccaaagaggcatatcttaattattgtgtgggtcaggcggccaaagaaagccttgaggtagccaattccacaatttcgaccgactagagcactgagacccctgcccctaccgtctatagtgtcaagcctccgaccccttctaaccaggctgatccatacaaggagccttggatccctgctgtatgaaataataatttttttatctgttcggcacatgggcctttattagagacaaaaaggaccggccaagcggtttttaaacttgggtaatattttattttattttaagacaactagctgaccgggtagcttttaatcccgggtttagatcatgctttgttatcattttcaatgaatattttcccttattttgttaatcattcgtgcaaactgttatgttttttttagcttgttacttgcttttaccaatgctttgtacaagtgtagttgccccccaagtgaccgagcagacttttgactcttggtcacttgcatttcacaagtatagttttcgtctgttcagtgctttgggtcgagcgaaccttttgtatgcattaatggtaaattcctgactttctaatacaattgacacaattagactggaaataaacatctttattcatttattggtcggaatagtcttgttaccgtagtaacttacatttatgaaagctattacatgatctaatctgatctttagctaaattttaacataaaacaattgcacttacagaaagaaacaaaaattatacttttaaaggtggtcatccgacctgagtacttaattatttcattaaaacctttgggcgagatccgcctaaagcccatctacttaaaagtaaatgcttttgctgtgtgtacctaaagtggtcatctaaccttgtacatttactggtagtactttctcaaatgttccccattccaataccttggtactagaacgagctccttattttgtcataccgcccaagcttatatgcccctattgtagaacttcgaccacttgatatggtcctttccagttgggtgttagcacactagcgtgctatctttcatgttcaggaatactcttctgaggaccatatctcccacaaagaatttccttgccttcatttgcttgttgaagtatcgagccaccttttgttagtgtgctactaagtttaggtttgctgaggctcgtttttcttcaatttcatcaagtgattctgctagg

SEQ ID NO: 312567 - DNA, 1582 bp, Cannabis indica
attatgtgttattcgtttttactcaatttgttgtagaactagttttgtttttaattatttttcaatgttttaggaactggttttctctttgttctttagttataacttatttgagttattctgtgttatttgtttttattttatcttatagaaccaattttattttaattataactggttcgagttgttctatgttatatgtttttattcattatgttatagaaccagttctattttaattataatcaatttgagttattttgtgttatttaattttattcattatgttataataaaaccggttctattttaattataacagatttgagttattatgtgttatttgtttttattcattatgttatagatttggttctattttaatttatatctgagatatctaactccggtaatttttctaacaatgatgataactctaatgatttttccagcaccaattaattttttggtgattattctgacaccgataactcttttggtgactttttcgggttagtgtctgctccagcgacttttttagtgatagttattattataaattttactaactttatttatagtgttttatttaatttctcatattttaattattatttatttttaattcacattttttttatttttttattatttatttctatcatgtaaaagtcaacttcattatttttttccatatttatcaaaaaaaatctcataggtaagagtccaatacgaaaattaccacgattcttatccttataaaacgttacgtgatccgtcgggtgcattattccttcttcctaatttttgttgagagaaaaggaaagagagttgattaggtctcaaatagggtgagtggcataattgtaaatttacatgaaatgtatacccttcttaaaatagaaaaaagaatagatgacaaggatctttaaatgacttattataaataaataaatttgattgtatataaataaataatcttcttcccaatgagcctcatcctatgttatccaaaacttttgccctatcttttaaactttggggttggccccacattccctcaaacaaacacaatctagtaccgacttttcaaatttcacactcgaaaggccaatctatgtcctttggaagaattatgtaagattaagaaaccaaaaccattcatcacgtgggacccacacctactttggcaaatcttgacatgccacctcacgcacttgcttgctgtactctggttggtcctccccacacgtgtctaccatgtgttcatttagacttttctttctttctttttttaacaaaacttagaatttctcttattttcgtgtggatggtatttcacatttgttttaggatttaattagaggtgagtataaaattcagaaaattgaaaaaatcgttcaaactgatttactgaatgttattggaatcaaaatcgacgaaactgaaaactaaaaccaccgcttacagttaaaatcactattgaatggtcagtttttttttgtaataaaccgcttgaaaaacccgaaatcgatacatattaatttattaagttttttttttcatgtattatagttactaa

SEQ ID NO: 312568 - DNA, 4130 bp, Cannabis indica
taattttttttaaaagaataattgctggaaacttaccataaaagattattagattgttacgttattaatttttttagtgcccatctatgggaattacccattaagaagtgttcgagaactttgaccagatcttatgaatttgttgaggttcatgtccacaatcacttgcacttaagccttcttctctttttgctcaattttcatttataccactttgctcaaatctaaaaaataacataaaattatattaaattaaatatttctaattcaaataattttacaattaaaattataaaaaatatctaatcaaattaattttatgttgacaattagaggcttaaaatatacaaatttgagccttaatcaatgtttcatgtagagtgtgagaccaatagagtaaatcttgggctggaggctgaaggattgggatggtttggatagcttggcacacatcgctcgggaagagatgttgaagttgtggtatatcccaatctccattggccgttattaaactagacaccttactgtcaagggtagttggtgtttgaaggtaggggagtttcccatatcccgggatccaggcatccttgtaaatagatatggaggtaccattacccacaagatttcataacccaaaccagagaagagatttgccccaagaaattgtattctagaaaagagaaggacaatgccctttgccaaagtcaaggaaagaagagtgaggatagtatcgagccttaagaagttgggcaacaagagaggaagaagcctgaagaatacgcctgtttggctaacaatgcttgactaaaagctttcattgatcgaaaaccaaggccgccatgaaatttagatttacaaagggaggaccaactcttccaatgaacttcctattgtggtctgttcctccccaccaaaattgagccatcgtggattacattttttggtggaaagtaatggggcagtttaaaacaagtcattgcataggacggaatcgcttgaactatcaatttgaggagaatttctttgccttattttgagaagaaggtggagtttcacctgtttaaatgggaccacacgcgatcttggaggtaagtaaaggattctttttttgagctaccgaaaaattgaaggagacccaaatatttcttgagagagtcacgagtaggcacattgagcaaggaagtaatctgattcttaatcaagtcagtggtgtttggggagaaatagagcgatgatttgccgtaattgactagttgacctgaagccatgctgtaagcatgaaggagttctttgatatgtgtggctgcaataggagaggtggcactaaagagaatactgtcattagcgaaaaatagatgagagatgattggtgcaattcgggagatcttaaggccaagagcatgttcccttggaaggcgttgatggacttgttgggttatgagcgatgagaggccttcaaagcataacaggaaaagataaagggagagtgggtcaccttgacgaatgccacgggatgggataacggatccacgaagttgttgattgattgaaaaggtgaaggaagtggtggaaagacaggacataacaaggttggtacagtttgatgggaattgaaatttttgtataaccctcataatgaagttccattcaacacggtcaaaggccttggccatgttgagttttagagccatccaacccaccttgccatgtttgcggtgagttaaagagtgagtgacttcttgcccgatgatgatgttatcggagatcaaacgattgggtgggaaagcactttgggctggtgaaataatgcggcgaagaattggtttgagacgattgaccaaggtgcgggaaatgattttatatattatggagcaaaggctaattggtcgataatcagtgatggatgagggtgactctttttgggaataggaacaatgatgcgattattgataggcgataaataaacattgctgttcaagaagctaagagtagcttgaacaacgtcaatttcgagcaaatgccagtttttttggaaaaaagttccgttgaagccatctgagccgggtgatttatcacaaaccagttggaagactgcgtgctggacctcatcagccgtgaaaggtgcttctaggcataagcacttcgtatcggtaagtttatcagagattctagaaagaacataatccatttgctcaatactaggttgttggctaataaaaagttgagtaaagtgttgttcaattgttgtcaaaatgctctgagtatcggtgacaattgaggcatcaatgcatgtgagtgagcggattgtgtttttggctcgacatgaagaaacaaattgatgaaagtagcgtagtatttttgtcatcgagtttcagccaagtgatgcgagagtgctgctgccagtattcttcttctttattaagaagcctatgtccccttggagttggcgataatgaagaatctggggaagtggaaggttggggatggctttgaggaggctgaagttgatattgaacatttctgatttgtcgaggaaggggaggctcaagcattttttgccactgtgagagagtaagagcgcaattctaaagcttgttagcaaggtcagagatatgatcttggccacaggattcatgagtaggattccacgcctgacttatgcaatcctcaaagccgttctcattaagccatttgttatcaaaatggaatcgttgttttggagcacgaaagcgatcgtcatccttgtgaagggcatggattacagttcggtgatcagaaccaaagaagttgccatggaggaggtggggcgttgggaaaggaggagatccatatgaggttgaagatgccctagtctaattgttcttggatgtgggtgagatgtgagtgtttatcagtccatgtataaaggctactgtgaccatgtatggggtgaagtgtgtatgtatctaagaaattcctaaaaaaagcaaaggttgtttgttaactgcgtccctaattttttcaacaggggagagaaaatcgttaaaatcacccattaaaagccaagggttgttataaaaagtattaccaagacgatggaaaagttgccacgtgttagagcgatttttgtggtactgggcctcatagaagccagtgaaagtgaatggacaatgattaggaaactggatgtaacagcgaaagtgacttatattataggaaagtagagttacatcaacatcctgagtccataacaaaaggaagccgccactaaggctgacccgagggacttcaagaccattagcaaaacaaagcttagatctaaatttattaatagcaccaacagggagtttagtctccataatatacaaaatggttggtttaagctacttaactaagagggagagctgagggaatgctcatttactctccaatccacgagcattctagcttatgatactcatggctcctggcgggtgcgcgttgagcgacacccgcctcatcagggttgctttcatccaaggattttgcgagattacgattgcgcttaagaagcttcctgaactcgacttcattgatgcccgagggccatttaggcttaattctgcgaccagggggagcactaagggttggtgcagaggatgttctaggggagaattacagtggctgagaggccgttaatccgcaagtatagtggagaagctcgggagatcagaacagtgtgccaattggatccattcgtgacagagggaatcgacatagtaggtggtgtggacatggttggcaaagggacatggagttgctcagcagttgtgacagttggatagagtgatgtaggggatttaggaatttgcggggtattggtctctaatgatgcattggcttcaaatctgagtgaattgatgggtgtcagtgtggggctcattaggttaattggttggtgggagacatgagggagcaggttatttcgtgtgagggtattaatagtgggattccatcctatcgcaaatgacggagcatgagaaaccgtttgaatgggtaaggatctaggagtgttggagggtccctccacaaaaaggcctgctgaagcagtacgtgttggaaattattttatcaggatctagatttactaacaagtatgttggattaacaac

SEQ ID NO: 312569 - DNA, 1941 bp, Cannabis indica
taattattaggtggtggaaagaatcaaactttgtacaaaaattcccttttgcaagagatagaattgtggagctctatctttggatgttaggagtctattatgaaccccaatactctttggcaagaaatattttagccaaaatcatagctttttcctcaattgctgatgatatttatgatgcatatggtacttttgaagaagttgctttgtccctgtcgttttaacaagttgcttgagttggtgtagggcaaacttggaaattcacaccaagaaattcctacagggcccagatattttcttttacaattgtactctaattgtatatatacacgtatatttaaaatttgtacatgtcatatagtcggtttccaactttatcacaactcaaaatatgtttgagaaataactttatatttaaaaactaccgttgaaacgtatcaaccgacaaagatttagaaaaatttggagtttagtaggctccaccttatgtctaataatttttagtttcttaaacctgtcacacaccattatttgagtgtgccatgcgtatgtatttggcaatgaacccatgctttttatgaatgacattattttacaaattaatgttgtaaagacctttaaatatgtgtgtgagcatatttgataattttaaaataaaatcactactatattggttgtttctgaagtttctaaatgtgggatcatcattttgtctgtggataagatttgctcacaattagtgacttctttaagtttatttgtataccaagaaattatgaatgtagaataacaatttaaaataatttactattgtaaataatatatattaactatattagaatgaagtcattcaaaacaaattgaaaatttattagtggtaataaaatgtggtttatttttctcaattgtacaataaaaatttatacatcatttagtaatccttataataaattttgaaaatttatacttgtattgtagaaattattaaacaaaattacttgttaattaaagttttaatttaataagattagatttagatgtagattataataaattttattaaacagtttataaaaaaccttcacgtttaatatttttatttcaatgaaatgtgttaaacatttcattattttataaaagtttcaaaattttatactttatcataaaaatattaaattaaatccacataattgtctgtagggtaaattaagagaatttaatttaacatattattattattattattatttgaaaatctgctcttagaaaacgacgattcgtttgcccaacaaaatatacaccattccctaaaacaaaaagtcgtatggatggaacaatattggaaacgacgtgtcacgtcatcttctctagcaaattgggtcattttgacccatttaatctgcgtgggtctgaccgatttggagaaaatccaatcggaaaatgtaatttcgacaacaaaaatttatgaaatcaattccaaataaatctaataaatacaataattaaaagatttatgtagcttttatgcatctaaaaacgtaaatgtaattgggttaggttatattagtcagtggcattgtgttagataacgtatcttcttcgagacatgacaaaatctaaatgcattcttcgcgatagtgctaatctcccaataaaaatactcctaattgtaatttattttcatactaacaatttactaactagtcgtagttataccatttgatgtagcacattggtagcttgtttaagctttagaatcttcgattccattctttacaacaaaaaatcttacttttagtcacaacaaaacttgtgaactaaaagttaaaaaattgtgactaattataaatcataattcctatgttgtgactaaaggtccgtggataaagtattagtcacaaaattacaatttgttctgactaaatgtatttttagtcacaa

SEQ ID NO: 312570 - DNA, 1570 bp, Cannabis indica
aaaaaaagaaggagataaataaaaaccaagcctacattataggagacttgtatggatcttcttctcccactgtcctttcctccttcctggccttttcacaataggccgaaatttccttctcatcttcctccaagaagcttgtgtccatgttgggatttgccatcaaggctcgataaatggtacgaaggccgacctgattccatcgctccttggtttcggcctctttccccttgaccaccctcttaagttcattgcattcatctgttttggtctttaatgccttctcggcttcttcaagactcttctttgacatctcggcttccttggtgagatgattaacttcctgctgagcatcgtttcattgcttgaccacagcctcgcgttgggctagtgatttttgaacctcgctctccatgtatttaagtctctctaggattcgccgataagaggtaagggtgatgaaagaagcctagaaaattcacaagcaaaggtatataagaaacaaggaaaaaaaagaagagaaatatatggattaagacaataaacttaccatgagggtatgacacaagctcctcgtcagcattttttccgaatccccacgattaattagatcccaatcatgagggaggagagccttgagttggcgccagtaggcagtcccaaactcctcaacaaactctaaacctgtcttcccagccgctagatggcctggctcgaggaagcagaggcatgggttgtgttgggaggaggctcgttggtaccttggttgactggcggaggagtctgttcatgagtcttagtttcagagacctcaagattgataggttcagagactttcttcttttaatgggcaatagtcttcttttgccttttgagaggctccacctcagtgtctgaagggacccctgagttggttgcccttttcttccctttccgttgcatggcatcctcaaaatgcatatctacaagacaagataaaatattaaaattatttaaaggcaaatgaaagggaagtgtggagtgtaattttccacctaagaaatttaccataaccactagaaggcaagctatcactagaagaaggggttgaaggaccgtagtatctgctaaaatacctacaaccggtaatcttgaatatatcaaagggctcgattggttctaaatcctagctcgcatctatatgacttgccatatctgtcatgatgccatattactcggctataccataatacgactcgttatagttaatttggacatggaatttagggtaccaactgtcaaacctatgagcaattcggtctacgagaaggggatgccaaatataaaaattaaggcggctatctcagaaagtaactaatgtgttacgctcagccctaagtattgtgggtgaccaattgcattgattacctcgggatgctctttcaccggcttcccaagggatagtgtttcgaaggtattatgcccgagccacgttatcccaagccttatcctcctctagaaagggaacttgctgccaagaagaatagtggggaaatttataatcacaagtaaactccttgtcagtaaggag

SEQ ID NO: 312571 - DNA, 781 bp, Cannabis indica
aaaattagtagaaattagatttatatcttaatagacgttgagatataatgttttctccactaaaaacgatgaccggaggtataaccaccacaaccactatctctaccttcgatttaccctaaaaatgaggaaaaatataatcttttcaggtatatagttttaggtatgaaaaatagaagatttagaaataaaaatgagctaaaatggtgaaaaaatggtgaaatggagtgatttttcgtggtggttggcggagagggtttggggtttctctgatttgggatttctgggttgactgaacgaatgagaaagacgaagggatgggctagggttataaacccttttggagtcgattatttggaattaactgactccataaaggggacaccctatggcatcaaattcccttccaaaaaattacagccctatggtgtcggttattaattattatgctaaaaaaagcacctctgaacgcttgttttgtagtagtgaaataatgtactattttcatgattatatttttgtatacaagcatactctgaatactacaaaggaggatttttatgtcggtcaacacgttttcaaaatcgataccaaaaaagtacactttaaactttcgcatcagtttagaacagatgctactttgtgtcaatttaaaatattgtacaaacaacgaaaaaaagaggtcgtcatgtgtaaagaccgcttagttttggctcagtaaaatcacaacttagtatgttactattgtgggacggtttattagacattgggaatgtcggga

SEQ ID NO: 312572 - DNA, 1653 bp, Cannabis indica
cttagcccgaaaagggagtttcatagttaatctcctttccccctctgcaagcacatagctcttgtcagtcaagctaatttgtgtaattaaaatgttacacaatttaaagagtatttttatgctccagcatgttacacatgtatgaaaacgtgttgtttgaacatttttagatttgatttgcattagggacatgaaattgttgttgatctctaaataggtatctcattttttctaggaacattgcttctaatatagatacatataaatagaattgatttgtgcctgaagaattaattgcattgctttacaacatggtatatattgtttttgacatttagtttgttgtagtgatacttgtttgtttatttgtatgggagagggttaatagttatgactgtaaaactatgattgtcattatggaaggtcagcttatatgaatgccaagaaccaagaattggctcaaaaagggggatgttcattcccatccttgccgatccgatttgggatccctgggctttgctattcaatcctgttgtggaattgatagaaacatagttggccgtcttgttatttccttttattctagattgaattatagagttgttattactcaatttttattggaagatctctgactcatagtcattgatcgggtagagttggcagttgttcaatcagattggaaacttaggcattttttgcaatcttttgatgctttattgctggcagtttagtgggcttttagttgaagatgctattaagatttttggactttcttcgatttacctattaatggatatttttcgtttacctttaacaaaaaagtataaaaaaagaaattagatgttgaggatcatgcattatggcccgaagctttttgtttaatggtctctttcatgatgattccaaaaaaggaatacatgcaagtttagataatgaaagatggtgtgatagaacaaaaacttgtgaatttaatcaatgtaatagttctaatttttatttaactaaatttataggtaattcaaaacttaatatcacataacatttgttaagataaataaaatagttttgacactaaatccaaacttttatttcagaatcacacctaaaaatacaaataagcgcaaagaagcaggaaagtttaaataatggtggggactgttgggttgtatgaacctgatacgtacatggaagctcggccaacatacccacttgaatggtattcaaagctggcagctctcactcctcaccacaacttggcttgggacgttggcacgggcaatggccaagctgctattggggttagtttttcttttcttcatcatctatttctttctcgtgatttattcattttgtttatgaaatatatataggtggaagctttttgttttttgactgtttcctatagaaactacacctcttaaaggatcatattctttttttaaaaggattttatcacatccatttaaagtggctagttttagtttcttataaggataatggtcattgatttcagctgattaatttaaaaactcctatgacatgaaatctagctctagatcactaagatcagaagtgcctccatccctttttttcctatttttttcctttcacattgttgatctcatttggccaagatttttatatcacact

SEQ ID NO: 312573 - DNA, 1105 bp, Cannabis indica
gttttgcttttaatttcctgtgctttataatgcttgagtcggttgatcagagctggaagttagttacaagaattagttgtaactaactcctggttcttggtcttgtagaggcaaagccacctaggatattgagtcttatttcgtgttatgtaattgttgttgtgtgctgatgtggatattatgtaaagggactgattataagtggaatttattcaacaacatactacacatataaagaaaaaaatacaacaaaatatttaaacttcattttagtactttaactttttcgatttttctaaaaaaaaattataagtagtatgtattaaataacaacaacgatcacaaataattatgaaaaaaaaaaattaaaaattatcttggatgttgctacaaataagatgtgtattaaactataaattttttcttacttatattttttagtacagttttatgtttttcacttagtatattaatttttttttgaaataaacacttagtatattaataattatttacatttaagaaacttatgaggttcttttttttttattttgtattgttcttcttcctccattggaaagatacaacatatatggggggtagatcaacaaatacaagaacttaaattttttgtgacctcaaaacatttgaaaacaaaaatagattcaaaatttaatattgtggttgagatcaaaaattttgaaagaaaaacaactttgaaaaatgatgaatgctagaaatagagggtgaaatgctttattaaacacaaaatattgaagaaaaacattttggaagtaattgaagatttaaaaagaaaaaaggaaataaaattctattacttaaggataggaagtaaacattggactgtcaaaaaatataacaaaaaaaaaaattaaaattaatttcctaagtcacgtcgtaacttctgacacatgcatagtatagtttttattacttttagtttttatccatttaaatctttcaataaagtaaaataatataataataaaaaagagaattgctaaaagatgttggtgtttagtatcattctcggtgttatactgctattgatataattaagtatatcgaatctcatataacttaa

SEQ ID NO: 312574 - DNA, 5029 bp, Cannabis indica
tgattgaagaagaaggatcttttgagttacgaaagcttgaagctttccaggttgattgggatgctgggttcatagaagaaaaagaaaaaattaacaacaacaataatatcaatgattgggatgatattgataaatacaatagagggaagtatatttcagactacataagagcaatttttgagcctatgctcgaaaaacaatttggaaaaactgtcatggatgatttatttgagaggttcactcacaggatcatcgaatcaatggccaatgaaaattggcactacataaacttggttatgtctttgacaaagaatcaattatcagcttaaatatcaaattatataagtactcatacatgcatgggaaagcatgtatatattaatataattgtaaaagaccatatgtttttgcatatgtcaataaatttccttgataataataaagaaaattgtggccgtaaagattttgcggttacagaatgaaatcttcatacagcataacacaaatttgcagaagcaaaagagaaacagaaataaatagtgtggaattaattaaaaacttgacacaagaaaattatatgtagtattagtgttttttcagacactctcttagtctacgaggccacgcccagtgaataaaatcaattagtaaatctcaaataattacagatataattgacttataaataagtttagactccctcttataaagttttgtcgcaatctgtaatttactttgccaatctaatttctgaacaccaccaaatagcaaaatcccttcgtcttttaatgtgtaagtgcttacttcctcccgaagtaagtctttgacaagtcttctcccaaaaatctttttcttgttcaatcaagttcttcaactcattctaagaatataagaacaaaaaaacaaagactaaaaccaggcttgaacactctaggttttcacaaaagaaactctctcctcacaaagatgaaaatatgaaaaatgaagttgaaagaggtgaaaaacgtttggatgctcaccaggtcctatttatagaacatagaaactttagagacagacacaaacacgtttataaagctgtacaagactttactaaaacaatccctcatttgcagcatcaaaatcatattttgctgcagtagatcaagaccacaaaggaaactttccgaaaagaccaagatcacaaattggtcttcaatacctaccaaataaagtttatttgatcttttacaatcatggcaaaactgaattcatcaattagaaaaagaaaaattcaagtttcccaaaagtagacaactttccataagagaattccttctcttataagacaagtttcctaaacaaatgaaatcagctgagaataaaaattttcttagaagaaaagagcaattagaagcacgaaatcaacacaataagatcaatttaattgcacaataaaaacacacattaattaaaaaatattttgacaactattttgccaaaaaagactttacaatctccccctttgacactttagataatcaaaatatttttaattaacaaacaactacaaaacaaagttagcaaaaatatacaaataaactcaccctgagaagcacaacattaaaccaaaataaaatgccaactttaaccaaagtataacacaaacaccaacctcaactctccctgaaaaagaccagagttgattatacaatccaaaaaattaaaaccattactcccccttttgtttatctataagggtcaaagacaaaaagaaatcaaaacaggtccaagaaaatatcatcaaacgagtaaaagcaagggagagagaacacaaaacttaagcttcataaagcttgaccaatgtggacaattttttggacatcttttgttgaacctcctccattgcagccaagcgattgttcatcaaagtcacttcatgcttgacttcgtaagtagaactagaacctgtagcagcagcaaagggagttgcaccagcagatgcattggagcgcttggagaaggctccatcaaaatactctgagggttgaaaatttgttccagtaaggggaggctcaagtgtctcatttgaaaagaccacattctttcgagaggaaagaaccttatagattaggttaggaaaaataagcttatggttgcatttcttaccttgacgtacagaaggaaacaatttgctacatgatgaaagaagccaggttaatggttgctcctgtagtgattctataaagaaaggccaaatcttgagacatcatcatcttgttggagtatggaaatcaattgctaagagcaaaccacatcagagaagcatggtcataagtgagataagtgatgcagacacgatgaccagcaagccattaaacttgttcatcagtgatttttaagagaatcttatcatgattcaaacaaataatagcactcttaacaccttttggcaagtgcaaagcttcatcaatatcatcttcagagaaagaaaaccaatgcccgcgatcataaactttaccaaagaactcagatttttcatcaagaaattcatcaatcagattagcataaaattctttaacaatgccatcaatataaccttcaaaactagttaaggtgccctcccaatttctatattgaacacatgtgacaatgccataaactcgatgagcacttagatcaaaattcctcttattttcaaacttatggataccatataatttcaaacctcgttgattctcattataataaaatctagaattgatagcatgagaggaagagagaaagagaggttataccagaggagatcccttcataggttgttttccctttcttgtggctgaagccttggctgcagtggaggaggttcagcaagagatgtctaaacaattatccatcctggtcaagctttatgaagtgtaaattttgtgttctaattccttttcttttacttgtttggcgatattttgttggacctgttctaatttctttttgtctttggcccttatagataaacaaaaagagggagtaatggttttaattttttgaattgtatactcaactctcgaccctttttccatggggtgttgaggttggtttttgtgttaaactttagttaaagttagcattttattttagtagaggagagttacaaacttgtacacacttgtcagacattagtatgttcagtatcgttgtccttggaaagattttcattttcgcctttttcaatttgatcccacagctgaatgctgtcataccatactgaaggtcgtccttttctatagtactgcatccttttcataatacttaattacaaagttttagcttactcaaaagatggcttccagacttcagtataggtagctctattctagcaaggggtctgacaagaaacaaaaatcactcaactctgtattattactttactttatcccaatcacacatatgtaagtaacttgaatcttttaactcaacctcaaaagtatgaagagaattattacccaaaagcaagtaagttttctctaccaaggatgaaagaaaataagatgcaagatatcataagaactactcataaatttgtacaaaatagagaaccaaaagaaaataattatgcaatgcaaacccctaaagattttctgagggagtcaaaccgacttgaatctagggccttagtgaaaatatcagccaattgttttccaatatcaacatattctaactataatgtttggttgtcaacaagttccataataacatgatgccttatactagtgtgttttgtacgagaatgttgaacatgatttttagaaatattttataccacttgtattgtcacaaaaaattgttaaaatacccaattcaaaaccataatcaaccaatatttatttcaaccataacaatttagtacaacagctactggtagctatgtactcggccttagcagtagacaaggaaatagaattttatttcttactatgccaagaaaccaagttgtttccaaggaagaaacaacaaacactagtactcttgcgatcatctgcattacttgcccaatcagcatcactaaaacaagacaggctaaaataatgtctttagaataccatattccaaaatcaagagtactattgacatatctaataatctttttaacagtagaaacatgagattccataggtttacatttaaagcgggtacaaacacctacactgtaacatatataaggtgactagtagttaagtaaagtaaactaccaatcatactacgataaagtgtagagtctacctttactccatgttcatcttttttcaatttcaaagttaagctcatcgaagtacttacttgtttagccgattaaagaccaaacttcttaacaagattcttggaatacttgctttgataaataaaggttgctccttccgtctgtctaacttgaagacccaaaaataatgagagctcaccaaccattctcttttcaaactcatttttcatttgattaacaaaaaactgctcttcatggttagatgtagaaccaaacactgtatcatcaacatatatttgagcaatgattaaataaattattatgcgcttgatgaaaagagttttatctacactacctctttaataaccatgagagattagaaattgagttactcactcataccaggcacaaggatcctgtttcaaaccatacaaagctttttctaatttgtacacatgatctggaaaatgcagatcttcaaaatccttgggttgttcaacatacacttcctcattcaaaatcccattcaaaaaggtagatttcacatccatttgatacaatttgacatcaagaacacaagaaatacacaaaagtaaacgaatagactctaatcttgctattggagcaaaagtttcatcaaagtcaatactttctatctatgtatagtcttgtgctagtgccaccaactgagccttgtttctcacaattgtaccaaattaatcacttttgttttgtaaatccattttgtcccaatcacattgataccttttggtcttcaaaccaaaatccaaa

SEQ ID NO: 312575 - DNA, 1394 bp, Cannabis indica
acaatcagggaaacgcatcattccccttacaccctaaggattaaggatcataatccatataccatcatcaataacgactatttttcagcagtgaatccaaataaatgtcaattacacaatctccaagcttaaaaaaatataccatgttgtcactgcaattagatgtcgtctaactatgttcatcaaaatccatcttttgtatcagtaggcaaatacgcagcaactatggaaattagacagaacctaattcaatctgtgtaatagctatataggatccttaaaattcctaatttcatagattatccaacccatcagattctgctccacaagattatcaacgaattcagtaaaaatctgcttctataaaggaaactctttatcggattgggaaccctagttggtcaaatggaagaacgccataaaataagtgaaaatgttctctatagtctataccacatatatctatatacatattacatgtttctataggtaaattgatatgaacaaaaaaattgaagagaaggagagagataggtacctgaggacttcgttgtctctctcaacttcgctgacttcagcgaagaaattcttgagaagcaaatcgtcttcggtggctgactcgcccatctttggtgtctgggcttttccccttttgttcagattgaaaagcgatactctccaatcgtcgtttgatattgacaaggatgaacaccgagtcagtttcacaactcgcccgagttgtaataaccttttaaattagaaaaatttacatacaaaataacacttttattacaaatttatctttattattgttttgcggctaattagtaatttttctcatgaattttaacatgcatcattctcatgaactttaacatgtatcaaatcgtgctctctaaactttgttggtcgttaaaaatttctcgagattgttaaatttaaggatttttgtctaatttcattcaattatactatttcagtaattttttatgtactaaatcatgctctcagactttgatatctaccaaattacgcccctcaaattataatatgtactaaatcatgccccttaaactttcatccatcttaaaaaaaattactaaaattagacaaaagtccttaaatctaacaatctcaatagttcagggggaatttttaacggccaaaaaagttcagggggcacgatttggtatatgtcaaagttcgagaggaaaaattactaattagcatgttttatttatcaaaatatcttatacacacattacatgcattaataatgtcatttgtttagattgtaattcaaccaattttctctctcttttctaattattttctatttaattttcaatttcaatttcaatttttcattcacgattgctgaaaaagtttctccc

SEQ ID NO: 312576 - DNA, 3515 bp, Cannabis indica
acaaaatggctgaataatatctttgaatcaagggcactttggtcttttgtaaatatctaacaaactatgcaagtattaaggtatttgaaatgtaaacctagggctttagacctcctatataaagaccttaaccttagcctagaaacctaaattgcctctaagtctgaaatctacctccaagctctaagtgtctgataaactctctttctctttatcacttcctatctcacacgcattccctagcattatctcaacaattgggtttttccattactgattcataccttgtaatcctaagggtgctatagcagatcccatctatagttatctggatagtatttccctcagtataagtacaactaaaaggggagtaggtcattacctgctatcacaaggcggttgaacctccatataaaatcttgttgtttattgcttttcattcttatttgtgtaaacatgtggcaattagatctatacaacccttctaccggttgattactttttgaggtcaacagttttgtgcattctttgagagcgtgaatatcgtaatctgattaaaacacaagaagaactcctgtcacatcatctgcatcttcaggtctccctcaagacccagaaattgcagatctaggcactcaagttccagcacaactggactccccatgaacactgcagatatggtgaatcctgtcaccataacaggcaccatcaacctagacactacagttggaaaaactgatctgagcaccctagtggatccaagtggcacgcttgtgcctccaggattagacccaccattggcacctcccactgaaggaagaacccagaggcgacaaccctttagaataacaactagatttgaactccaattttgtgatggaggggcagggccgggagttggcgagcctcacctggacctaggagaagaccttcaggttgccagactcagggaggttgtaggtcgtccaggcctaactaaagaactaggcattgctgattgcaatatttttgctctatagatacgtaaattcctaagatggatggatgaccaggagtacatcctttgatctcaccaagtagaattatatcgcctcaaccaaaaggagaacgatctaataagaaggttccatcaaagaaccgatagaagaggccaggatctccttagggatacactctaaggaagacttctgccaagttccacaggaactagagcagatctccccttgctagagggaggacaaacctttccttaaaggttaaatagtgggaacatccagatccttacaactagtagcatgggggaccagccagggatctctggctcagtaacacccccccttgtgcagtcgctggacagacatccatcaataggagtacccatggcctaccaaagtacaccatttcctccccaaggggagcgaggtgcctagaggtcgatcttcgattgatgaggaccaagagtggatggaaacacccaaaacgatgattcaaggagtgaaattaatcacttcagacatctagatccaccaaactccagaatttggagtgatctacccactgtctagatacagccaacaccagtcaagtgtaaagtcacggacggccaaaccctacccaatgcaggtctggctgaccatggaagcatcatgggaggccagaccctaccctttgtaggttttccagctaaggaggagtactgggcgggcagagcctacccaatgcaagtgtgcctagcaaagcacagtagccaggtatagcctggcaagcctagggcaactcccgtactttggaatggtcggccagggtatggctgaccttcaccatacactctcgcagggtatggccaactatcctctatctcttcagaatctgtagcctccccaaggagtgccagtcaaccaggtccccgcagtaacaaatccttttgtgcaagcacagttggatcaactcagggacatcatctagggtatatctggctcgaagcttttagaccttgaacttgattggtcaagaggatcaccattctcggcatacataaatgcctttcccttgcccaagttcaaatgctagtatggaagatttataccagacgagaagacctgctggcccacatcaaatacttcgagatgcaacttgatctccagaaggttactagtgatgtgtgttgtcgcatattcccagtcacattgtcgtagacaacttaacaatggtacttcatactcaccctaggtagattcaactcttgggctaagttctcgcgagaattctacacataattctcatcctctagacttgtacacttgcagctggaagaccttgtaaaagttaaatagcgacaaggggaacctctaaaggattacatttagagatttatggccaaggctaccaaagtcaaaggccttactaaagaatgccaatatacgaccatattgtggggcatactcccactaagtgactactggaaagatatcatgaggatatccaccaataacatgaaggagttcctcgatagagctgacgactttattaaacttgaaggagccatacgacaggcctaggcagggcatgttaaaaacaggaagtcacgaggcacccagcagcctcatgaccaaccaggcgcacaggcagacaccagcaactctgcccattcttctagtggtaaaaacactagaaacaagcgtgggaccaacaactctgggaggaacaatgggaaaaaggggaagtgttggaatttattttactaggatctagacttactaacatgtatatttcattaacaccctaaatatgaagtctttaaaacaatgaaatttaacacataagagtttagaaaaccttacattgatggtagcagaataatatgactcctttcgctcagatctctaaccttgttacaatctgtcgtagagtaataacaagatctgagcctggatctccttctctccttcgggttagttaaccaccgtcttgtacactatgattgagtaattgacttgctatatgtgggcatggaactctatcactaatgctctacttgatgaaggacaatgaataaggatttgaaatcactaagaaaggagtctctcatctactagttgtctgatagagttagaaaactagatttggtaggttgaaagtgctagatgagaatgggagcatcatgttcctcttatagtatttcaactagggtttaggatttatatatattgattaaaaaagaaaaaaatatgggaaaatttcactaagtggctggtcacactaatgggctccactagttatcattttgccacttcatttcaaccatttttccttctttcaataataccatactttttaatttcaatcctataaatgtcaaaactctttatttaataattataagtaattatcaaataaaattatcatttatatcatttattaattagacttaacaaagtctcctaattaacaaatgaaccccaaaacctctttcacaattaagcccttgcttagtgaaaattcataaataagacata

SEQ ID NO: 312577 - DNA, 1118 bp, Cannabis indica
aatgctcttttattgaaatccatctaaaaatatgaggcaggatatgctactgtctacattatatatttaatttatatctattctcatatcactggttgatacataattatactagtagcatcactaaatgtatgaacatataattactaataggttaattatgggtgtgtaatgtaaaggtaataactaataagtatatctatatatttttgagagggaaccaattcattaaagaaggaaacatctcaggcaagtctgccttagttagtaatgtttttattttttttataatccatagtaattattagtgctgtaaatttgtgtcatgttattttgtgtcataaaaaaatataaatcgtgttgtgttatatcgtgtcaatatttttaagaggtaaacctaatattttttcttcgtgctttactctgacaaacttgtattttttaaaccgaacatccaattttcatatccaagtttgaattcgtgttttacttatatatatattgcaattattaaactatatattataaaattatttaatacttatgtaattttttttacaatattttacaaataatcatatacaaaacttattagcattattagaattgaatatttattgataaatactcaaatttttatctcacactctacaaataaattgatatattgttagaaataatagagagattacaatagaagaataagatgaataaaagactaagacaattacaactctaaacaaaatattacaaggacaatatattaaataaagagttacaatcccaaagcacaaaatacaaataaaagaaaagagttacaactcaaaactcaaagatacaagtaaatgtaaactatataaaagcatttgtatataatagtgtatatatatgatataaaatatatataatagagtatatatatgatataggatatatataataaagtatatatatgatatagaatatatataatagatgatatatagtagagatatatagagtgtatatatagtatgtatatataatatatatatatatataatactatataattaatcaatatataaatatatgatagtatatatataggagtggttagaggagaacaagagaacaaa

SEQ ID NO: 312578 - DNA, 823 bp, Cannabis indica
tttcaaaattaaaaaaaaaaagtgggggaaataagttgtgattattttactttgaagaaacatgaattgactaataaaaatgtcatagactacaaacctgtgaagagaagttggaacatcaaaggagcgcaccccatctggttttggataatgaatttgttgatgtaattccgctacctgcatggtgaaagagcaatgtcagtcccagtctatatttcccaccaaatcattcaattctaacataaaacctcatgcttcgtgcttcactaagatctctagaatttgttttcccatcaaataattcaatatttactgtcacaagaaaaaaataatcaatattttgcatctgctgtcatgcaaaataacaattaaaggtttaaaagacattacaataacaaatgaaaattattaacatcgctgacaataaatacatgctcaatctaatttaggcttaaggagtagggatggcaaaatgggcattttagcgggtcggtcggactgcaacccaggacatccaagtcgccatccgagtctttgcccccggcccggcccgctactttttcttccggtcggtcagattcattttttttcctttttcgtgtccgtgcctacctatcccggttcagatattattaaaaaaatagatctatcttgttcttcttccccacaggggttcttcttcatctaattttatgaataataataataatggttacataaatatatatatatataaatctgtatatatatatgcacaaaatattagttttactaagaaattacatttagttttaatataattataatatgtaatatatatata

SEQ ID NO: 312579 - DNA, 582 bp, Cannabis indica
ttttaaatttgatttcattccattctattcctattccctttctcatttttattcttatatttagattcctcccaattaaacacgtacctgtgattttataataaatttgaatttgtcaaaacaacaatgagtagatcaatagtacgtacgagccaaaaagagttgttttggcctttcaaattttattagttaaattattttaatattcgtgtatattataattatttaaaattacatttaaatatttaaaaaatatagaataatttctagtgccaaaagtaaaactttaaatattttattgtacacataactatttttttttttacaattggtggtaaataaccgagaaaactttattttcggtaatataaattattcaaaatttttgaaaaattttaaatagtaatgctaaaaaattacaatgtacacacttatgaaaaaaaaatagactaaaaaaatctttaaaattgccaaaataaatagatgatgtaaagaacaactcaatatgagtaaaggtttttttttttttttttttttagttttttttcggtacttaattatttcgtaactttttttcccgta

SEQ ID NO: 312580 - DNA, 1397 bp, Cannabis indica
gtaaacattgaatttaaattctaagtgtttaagtggtattatctctttgcagatattaaaaataccatagattttgtgtcattaataaataaataaaaaacatacaagatcattgcaaatagaattaagcccatcctacctaatattatctcccatactcaagctaccttcgttcctgaaaaggatatacaagataacaatgttattgtctaggaaatcatccactccttcaacatgaaaacgggcagagagggtctctttgcaatcaaaattaatcttgtgaaagcctatgacaagcttagctggcagtttgttgaccatgtcctaaggtgctttggggtcccagataaattttgtaaatggattgaccaatgtatctctaccacttctcttaatgtttatctgaatgggggtcaggttggaataattaaaccatcttgtggtctgaggcaaggggaccttctttccccgtatctttacatttgggatgcagagattttatgtagactttttgaggattcgggtgaacaaaggaaagatcaaaggtattagaattagtcggaatgaccctagtatcttgcatattttctttgcggatacctcatcttggtttgtaaggccactgtgggggaggctatgggtttgtggaactgtcttggtaatttttgtgattggtcagggcaacgtgtgaacaagcttaaaacctccatcttcttcagcaagaatacttttgagaacatgaagtcggagattaggaaagcccttggtattggcagcccagaaggcaacatcaaatacctgagtctccctttgttcagatcaagacacaaggatgtcaacttcaatttcattctatagaatctgacatccaaattacaaggttggaaggcaaaaacattttctaaagcaggacgtgctactgctaccctcattaaatctgtggggctggctatgccaacttatgctatgcaaactactaagctttttagtcggctcactagaaagattgctggtatgggattcacttgagatcttgggataagatgtgcctccctaaatcctgtgggggccttggcttttggaaaacagaagaaatgaatctggcattcttggccaaatggggttggaaactgctctcaagatcccagtctctttgctgccaactattgagagctaaatatctgagaggaacaaatattgttaagtgcaaggccaagccttctgattcctggttttggaaaaatgtgattaaagctaatgatatcttgatttagggtacttgcatagtcatcactgatggaaaagatacaaacattgggatgacccttggatctctcacggtaagaactttttgttgggttttatgccctaaataaaactcattacaatctgattag

SEQ ID NO: 312581 - DNA, 2057 bp, Cannabis indica
attaaaataaactatttaaaaattctagttcaatttctttttctcccctcatcatcttcttcttcttttcttcttttctttctttatttgtttgtcttctaaaatggatcattctctccatgttcgaaaaaaagaagaaaaaactgaacgtataaacaatatattaaaatgaaatcaatgaacatcactaattcttgaaattgatgaaaaaaacagtccctaaaaacgaatatattccaattttaaaagaggttagaaactgtccctaaaaacgaacatattccaattttaaaagaagttagaaaatatataacagggttagagtcggtcggtttacaacgataacaacataggagcaatcaaactaattgtaacttccagaatctgagaccaactacacctacaaagacgcgtgtaaatcaaatcaaacacaccgatccatcatcatagacatagttttcaactaattgaaaaatacttgttctatttttccttataacaattaaatctttacaccaaatttgacctgaaagtattattttattatattttttaaaaaagaaaggatgatgaggccacactgcataattcatatttaattctgttaagcatcttatacagtttttttttttgggaaagttagcttttaattttatcatagacgcgttagccgactctgccagccttccctagttccctttttaactttatttttatcttattatttatttttatttttttatcattaatttttaccttctacgaaacatcctcttcgtaatatataaataaggtatgcaaacatcttcattcatatcaaagtttacaattatttcattcatatcaacaaacttagcttcacttttcatatacataactttgaatcttttttcttcttctcaagaccgtcatcttcaccaatctccaaatatgagttctgctcagccatcaggtacttcaaataattcttcatattatccatttcatattcttagaagataataatttatatggttattaatgatatttttgttaattgggcagtttcatcttattctgccggacaaggcccatatgtggctccaccaccggctggttaccccaccatggacgcctctgctgcggttgggcaaccccaaaacagagttgaaaccaaatccaagggagatggcttctggaaaggatggtaagaagaagaatcatcttaatcaaatcatatacaaatattatacatatatatatatttatactgattatatatgctctgtgattgtgcaattgtgctgccatatgctgctgttgtatgttggatgcatgcttctgaggattcaggatcatcatcatgactcatcttattctatggatttttatttaacactatttgtgttatatatttgtttgtttgtttctaatttttcatagcttttagtttgatcattgtacatgtatgatcatcacatattgtatcatcagactcagcacaggttgaatattttacaatataatgaataatactacattcagtagttttctgctttacaaattttacttaaataattatagattattacaaaaccaacacattaaagatctcaatttagtttacaaggaaggaaaaagtgtagagaataagaataataacaagtggcgtgctctgctggtgcaacgtcattacataacaagtcatgccttggtgtcaataattgtattttgtggatgatgattcgtcattaaatatgatgggccgtcaaaggcccaataagtcaaccaattatgtcatctatgacttatacctttggtcctttggatgctctttgatttcatcgcttattatttttatttttaagattaagatatacactgacgttattgtcttaaataagtgaaattggtgacatttcgattatgacgagatcacacacctaatcctttctcctgcttttgtctgtcttatataaactagagtaaatactagttttgactttctgtttacaaaaattatcaattgggctttttgttttgttaaatgacaaaatagactttatattttctaaaat

SEQ ID NO: 312582 - DNA, 581 bp, Cannabis indica
aaaaaaagaaaatgtatatatttaatttaatttaatttggaatatgagatattattcttcaacggatatgaaatgaaataatatgaatgaatggtatgctttccttgaaatgtaagctaagcttaaaggcttctcttttctttttttatctgtactgtattcattttcgatacacacaagctcgggggagaaggtctagctggccaaacgccaaaagtatgatccaacagtattgtgacacgtggacgtgatcaggctatattgccgttgaggaacgtatattaattttggactttatgactagaagttcgaacgttagaatgttgagagcgtttggaggaaaattccagtgtggcaggtaccatgtggaaccacgtgtgcttgtcatatcttttatctttcttttttttccttttttaattgtttgggccggtggaacgtgtgggacttcaactgattcactcccaagaatcttaataaggcaatatcttaattagagcatccccaaagagacatcaaatttggtgttacactatcacctaaatttggtgtaaaaaaattatttctactccaaccacaac

SEQ ID NO: 312583 - DNA, 1621 bp, Cannabis indica
tcaaagagccaagaatcacaacgaggttagattcagatcttttttgtctagaaatcacacgtcacatatcctaaggctatcatacagatataaatacatagaggacaacaatctaatgtaggaatcaagagatattcgaagcaaaaaactaatgttcatgcattcattgaaaaatcaaccaaatcacgtgaattagcgggaatagaacacttacccacaacaagaaatcattgaagacaaagatgggaagcttagattgacaaaacaatgcaaaaattctaagagaatggtgcttgtgtgggttcggccctctagagagaagaaggatcttctttaaatgtaaatttcttgtgagagagtgaaaaataaaatagcaaagagggtttgcccccaaaagaacttatatagtacatgggggaccccccattcacttacctcacctacacaacaaagaggaaaataaagcagttagtttactacaacaaacgattttagatacccaaggcaaagtatttgaaatggttaaacatgcactaacttctattcaacaaaggctacatcagttctaactacaccaatctaattggtaagtcccaatactaaggctagccaacctgcttcctgtaggtgtttgcccagccaggagaagaacgggaaggattttctgtagaattctacatgtggactgtgagttgggctgtaaattgggccctaacatcccaataaaatagctggaaaatttctatgtttaaggacattttggtcttttgaaattaactaatttaatgtataatttctaagggtttcagttataaattagggttaagatctactatatgaagggccttacttctaatatagaaaccaaagtctcattctatcctccaagtgataaagttataagcctaagtctctaagtctcataactgtcttcctcgctatctctctctctcacacgcccatacaagcattatcaacacttgagatttgtcaaccttgatttatactttgtatccttaagagagctatatcagatcccacctttagttatctgaagagtattatccctcaatatcaatacatctgaaaggggagtaggtcattacccgctatcaaagaggccaaaacctctataaaaattttgtgtgttctttactttctaattctaatcgtgtaacaagtggaaaacatcaaattcatacgaccccactgtcggttatccactttttaaggtcaacataccagaaatttgatcagcaataataagatacttcatcggtagaggacgagctttagggatgtaaccgaagagatcatggcctatgatgacaataaggacttcaggtcaccaaagtaaaaaattgtgattatccaacttcaaagagaaattatgagaaaggataaatgtagtagttgcaatcacaatcaccattagcaattgttaacctcacttttagccaacgacaacgaatatattttataagcgataaatgatttataataacaaatatatgataaagcaataaaaagacacaggaattttatagaggttcagccccaagcagttcggtaatagcctaatcctcgttacttgtattgacttaagatcaaggagaaagat

SEQ ID NO: 312584 - DNA, 753 bp, Cannabis indica
taataatatatatgtataataaataatataataaaaaatatttattaaattcaaaacaattagaaaaattacgctttacaatattaaattatttttattaaatgcgaagaaaaaattagttaatagtcaatatccaaattcaaaatttaaatttaaaataattgataactaatctatttataattctaattaaccaactaatattctatacgtaacaaatatttcaagtaacctaatacttaaaatataaaagtaagataaatcttaacatttctcattctcatcaaaaaccacacatattctttctcttcctcattctaaattactttgtcattttaatttttatcttacttgcttactaacttaaaaaataagtatacatatttactctttcttaataatttttatatcttacttgcttgctaacttaagaaacaggtatcttatgtagatttataagagtgtatatatctataaaggaaaagtataaaacggtgatgtggcactctaaaatcactttaatcttactatctcttctttctttaattctattttttcttaattttttattcagttaatcaatattaattattaattaattaagaaaaatctatctatatatctatctatataaaggataagtatgaggcggtgatatgacactctaaatcttttcaaagctatttttctcttctctccttaattctctcattttttaatattttattagagtataaatctacaaattgatat

SEQ ID NO: 312585 - DNA, 2908 bp, Cannabis indica
tttcaactattctggtttaaattgaataggtgtctgttaaagataacttttttgtggtatattctgttaaatttttggtatattctgttaagtgcacaacaaaaactgttagatgggcattttatatattaggtaagatatggatgaggattcattggaaaactcattggacccctatagagtctgacataccctgtaactcactaattgatacgcctaaaagatgccttcatccctgaacccatagatgccaatcatccaaggaattctaagaagtgaaactatcccatttgccacaaccaatcagagaatattctctaggttggtctcctgaaataatagcgagcctatctttatgtcttttagtatgtctcattaaattaaagatgttgacctcatatttagccaattgacagtggaatcgtatttaatattgatgtttgccacgtgttacataagacacaagattttatagtggttcggtccccttagttaacgggtaatgacctactcccattttggtgagagataataccactcagatcacaatagtagtgggatttgaagtggctctcttaagattacaatgtgagaaccaacgttggcaattctcaagtgagagagagagagagagaggagaagaaagaagtgagtttcgaactgagagttgagagcttatggagcttagaggcttggcacttagcgcttgagacttagcccactagggttaggctaatgctctttatataatagagcttacatccctaatatcctttaaaaataggtaaataaaactatatttacataattaattaatacataataaacgattaaattattccttaaaaatagggaagttgctgatatttttgtggtatcttcgtgggttgtcaaggccaaactcacagtttggcttgttgtacacggatgagggctatgcatcaatggcttgtcaggcaaaagttggtcagccattcacctgtaaggtgcaggctggccgaccacatactatctgcaggttggactctggctggccatgctcctgccagggtttggtcggccatgctcctgccatctttggcaagtgttggccagctttcgcaagtgttggccaacctttgtaagtgttggcgagcctttgtacaccttttccttgtagaggtcagacttccttggtcaaacggacccttccttgatctgaaagtcacttttagccagccagcttgtgctcaaaccatagctagccatacaagcttatcctagtcagccaatgtactccccttggccggctaaacatgatgatgcatcctcttgacggctcgcttaactcttttcgcttgctgcccacaccttgtatggagactttgtctttctattggcaagattgtattcaacgtgtcctcagtcttggcttacatggacatgccacgtcaagtggtcaaaatttggaataacatttgccccccaagtccctattcgaacatctggtcggatatggaatttctagctctcgtcttgcttgtagtagcctctgtcaagcagccttgtctagccaagggttggctttttgcatggcatgcttttagatctttgatcttctctctccatatatgcctcatcttcttttctttgacattcttctttgaacctgccattgataagttttaagctttttaagtgtttagaaactttttaattctcacgttagattgtaatctttttggtactttgatccgcataacaattttagaatacataatctgtgatttcctgatggaaaatattcgattttggcctttgttgttattcctaactctttgagttatgaagaacacattcgagttttgaaaaaaaacaacacacacacacacacacacacaattcaaaactaaccttggctggccctaggggtcttgtttgaaacatggctgaccctaggattcaatcatgggagttggccagctctagggtttcaccctaggaagctagcatgttcatgcttaggtttggtagccctggtcggttctcggctgagttgtgggaccctggctgaccctctcaaggcttaggggccctggctagcataggtcttggttctaagcgggtggctagttttctgtcctcttctgacctcgacaagaatcttgtcatggccatgtaggcatatacaacctcagtctcatatgtgatttccttagaaactctgtatgaaactcaatggtgagtctattatagtcaaatgctcaacttaagactcaacatttgtccaagttgttacacttgagacttgtactttgctaattcttcaaatatatgaattagtcggctcccccacttcaacttgggaagaatttatctcttagaggaataccgttcaaggtatagctcgcaagctaactgcatacttgcatatggtccctccattccaaatatccatttgatgaagatgttgaactgatgcctcagtcatgatatgtaacacgatctcagttttgaaaaaatggtggcggtgactcgaagaaaatataacaaagataataagagcatacaacgaaccaaaagaaaactcagtaaggccaccaatttttttttcggtgagggctctgattaagaaagtggatgaagtaaataaaatgaaaaataaaacttccttataaggggccaattgaacactgtttgattaataatgatttttcatcaatggcgatgaacttaaaaggacaggtgaattgactgttctaaaaagttttctttgaaaaataaaaaattgccaaaataaaggcgtattcagtacacataggattcgtttggtacgtcgtattgtattgtgttggattgtattatattgtaggctaattagtaatttttccccccgaactttgacatgtaccaaatcatgtcccatgaa

SEQ ID NO: 312586 - DNA, 834 bp, Cannabis indica
tttttttttttgattgaatcagagaattatattgccaaaaccaatttacatttttagagcacccccaagttaggagcctcaatttaaatctatacatactttgtatttacatccatacaattcataaaaccaatctctatctttacaattaattttcttaggcaaaaacatattaattcaagttttaattctccacttcaagtcctctatcaaccggatgcaacttgcttgatccccttgccaaataattctatttcgagcctcccaaatgcagtacactaaaccagcaactactgcagcatatacatgcttttgaaaccgactcaccttagctctgcttaaccacctaagaagctgaggcaactctgtagtttttactctccaaaccagccaattcttttctgcttgtaggcactggacagcaaaggaacactcaaaaataagtgttgtgtattctccttctgtgttacaaagactgcagcaatcatccatttgcagcccaaatttaactagtctttcctttgtctttaacctattcaacattgccaaccatagaattacactatgctttggaatgttcaaccttgcccacacttattggctccatgttactcgattttgactgggactaagtaagcaatatcctgctgaaatacaatatttttgcacttgaaatgcagtaggagtagttatagtttttaggtgatctttgagagctacaagcttcttccagtaccaactagaatgaatagaagacaaagtctaactttagaattataattgattaattaaaatcaattaactgagtcttacaatcagtttgtctcaactagt

SEQ ID NO: 312587 - DNA, 794 bp, Cannabis indica
ttttttttaaaaaaaaattgtgggttcaccagttcgggttcaggcaggttgctcgggtttcggtcgaacccgctcgaattgttcagtcctaaaatcggtcactgttagaactgttctaatcttagctgtcacttcatcttggcctgttaagtaattggatgttagcaatgcttttttaaatggtgatttgcaagaaacagtctacatgaggcaacctagaggctttgaggatccaaacaaaccgactcatgtttgtcaattgcataaagctctctatggattaaaacaagctccacgagctggaatgagaaactaaggcaaacactcttgcagtggggttttcgagcttcaagatcagatacttctctatttgtctatggctcagaatctgatttaataatcctcctagtctatatcgatgacatactagttactggacctaactcagagttgatttcaaaattaatagctgatctaaatgcttcgtttgccttaaaggatttaggtcctatacactacttccttggtatagagatctatagagatgttgcgggtatgtatctttctcaaagcaaatatgtcactgctttgcttgttcgacttcagctagatggtgtcaaaagctgccccagtcccaccagctctactcagaaattgtccttatccgatggggaaccatttcagtacatcactctttatcgaagcacacttggtgctttgcagtacctcacattaacacgaccagatgttgcatttattatcaataaacttagtcagtttattcatgccccaac

SEQ ID NO: 312588 - DNA, 797 bp, Cannabis indica
attaaatactaaaacagtaaaaataaatataataattagaaggaaaaaaagaacaacatatttcaacaccacaaacccaggagtcggtaattttattatcatttccagcaaccaaacacaacccaccaacaattccttcataaattttagaaaccaaacataacccaccaacaattccttcataaattttagcaaccaaacataacccaccaacaattctttcataaattttacatctgcccaacatcattcaaataaatcccaccacagaccagtaaagatctaacatatgtataagaacaaatcaaagctctattcccaagtttgaaacccaagaaggtaacgatgaagctcccaatagttaaagacttatgatgttcatgttagataaattataaaacagcatgataatataatgataatatgttgcatataatttagaacgctgttaataattcaatgatatagaaaatatacttgatcgctctatataaattattgagaaataacaagagattgatagtgcaatactaacctactaattcttcctccctaatttttaaaacagaagtaaatcaatgaatcaacaaaatcatacaaaatataatacatgtatttataagattaggaagatgacctagcaacaaaataattcaattaattagaaaagtttacatttttgtttcaactagacttcacatagatactaagcccattaatcataaatcactaataatgtaggctaaaaacgacaaaaaagaaaaaaaaaaagacaaatgtgaacttgatttttggca

SEQ ID NO: 312589 - DNA, 1518 bp, Cannabis indica
aacctgaagaggtctataaaaaaaattaaagagttatttgacttcataacttaaaaattattttctatctataaaaatagaaatcaacttttaaaaactaacaaggagcatttgaactttttttaaaaaaagagttttttaaaaattgaattaaaaaaaaatcagaaaagataaaaaatgtttttttttatttccaaaagcgaatttagtttttttgtctaatatatatatatatatattttttacattttctcttactttgggtcttgggctggggtctagggttcagcatctaggtcttaggttcgggtttagggtataaggttcagattagagttcaaaggtagggtcctggtctcggggtcgggtcctagtcccggggtgagcgctgggttcgggtctcgggtctcgagtctcggtgtctgggtttcgggtttgtcttggggtctaggccgcggctaggtctatggtcagagtccaggtcttcaggtctagggtccaactcgggtccagattcgggtcagagtttgggtccaggtccaagtttgggtttgggtcttagtctcatgtcatgggtctcggtggtccagggccaggtcttgggatccaaggttaaggtctggttccaggtctagggatccaaagttcatgtttgggtccaagtccaggtcttgagtttggggttaggggttcaaggttagaaggtcggggtctgaatctaggatccgaggtctatgattggtctaggctcaggccacgtctcgggttcgggtggagagtgggactgagttcatgtcgtggtatagtgtagaatatgaaaagaaaatttagtgcaaaaatcttaaattagttttagaaaattttagctaaaataccattaaatttttaaaataataaaaaataaatttttattcttatatttgaaaacataattccaaaaactaaaaagacatagaaatagcttctaaatctccaatagatgataataagaaggtaataaatatatgtatatgtacatatatcttcaaaaatattagattagactggtatgtcgtcctcataatgattctttttcacctcagcctcttcgagtgctggaatatgtgcttcagccttattatcagaattgctctggttttgaagagtttggtccttactttttccccacagaacagcataaaggctaacaaccaataaaatcccacctaaaacactacacatattaaaaaagtaacaagatttgttagaagttgtgtgaagtagtgttaaacttgagtttgcatcaaatgtcgaaggagctgaatttaaacaaatattaatatttattcacctgccgaggttcatggcctcccctaatagtagcactgaaccaatcattgtaatgattaaagtgaatggttgtgatatggctatgaatacaggtcctttaatctgaatcacccatgtttggatgcagtggcggactcaagatttaagttgaggtggggcggaaattttttttttttataagtgaggggt

SEQ ID NO: 312590 - DNA, 1891 bp, Cannabis indica
ggtggtagaaagtaggtacggtaagggttcggggctaaggtctgagtccaaggtcaaagtgttggtgtgggttggggttggggttcagggtcaggctcaaggttggggtttgggtttggggtcgggtccgaggtctaaatttgggctccagggttgaagttcaagtataggttcggggtgtgagtcagggtccgagtacgggtatgggttcgagtttggagttcaagaccgggtccaaggtcagggtctaggtacgagtatggggtccgaggtcaaagtttgggattgagatcgaggttcgaggtccaaggttcgcgtctaggtctggggtataaggttggggtccggcatcttgctcggggtctatgtttggatccgggtttcgattcgtgtttgtgtccaagtccgggttggggttcaagtaacgaggtttggggttcaagtcgaggtcctataacaaggtccaaggttcgggtcctaataggatcggggtcggggtctaaaatattgatgaaaaatacaagtagactataattaagaaaatgaaaacaaattgtttaaaaaaaatttgaaagagacttttttttattttcaaatttttaaaattttgattctcaatttaaaaattaaacagtgaaatgtaacatgtttttttaaagaattttacttttctaattaaaaaataaaaaactgattaaaaaagtgttatagaacgcactcttaggtagcgtttggtaatatttgtttgaatatttaatcacaaaattgaaagtcgaatttttgttttttttttaaaaaattttatttttgaaaactaaaaatgtgttgtgcaactacttttattttttaattttaaaaacaaaaataaaagtgtattatgtaaattttacttttcattttggttttttgtttttatttaagcagggtttgggatctggggtcagggtttgggggttcggggtctaaagttcgagtctggggtcagggcctaggttcgggtccgagatcgaggtcaaggctagggttggggacaaggtcctgacttcaatgttcagatccatgaaaggtatatctcaaaaagttgaactgaagttcccaaacaatccaactctaagtatagtctaaaaaaaattacgtcaatactacagtaaaatatttatcctggtgcatttttcgttattttccaaatttttaatggtgaatttgttcatattaaatcataaagagacatgtaaatagagttatacgtacgtgaaaacactgttctgatttttaatgtttcacaacagttgcataaatattttgctaacagttatttcatctattgaaatcttcgtctcatgtaaccttcgaccaactacccaacaaccaccctacaactatcgtctgattgaaacatttgtttgacgcaacaaccacacaaccatgcagcaaccactctacaaccattgtctgattgtgtaagtaatagtgtaggtgatattttagtaattaaaattacataaaatgtataaatgttatccacagcttatggatatataatatacctaaagtgtcaatttatattttttatataataattcctttatttatcatatttgtatatagatatgtaaaataaaatatcattgaaactcttacaatcatatgcatgttataaaaacttctataatataattatcatcaaactataagcatgcattttgtggaattcaagaaattttatagaataaaagaaatattattaataaaaatacaaaattatgcacaactaaatttatatgaaattatgaatattgcgcgtggaaggctgtctcaatctaaaattaagcctttggcaaaatcacaacgtgagaccataaaataatttttttttatacttttacaaaaa

SEQ ID NO: 312591 - DNA, 1569 bp, Cannabis indica
catgaaaaccgaaaaccgaatttcggattttttttgtgtaagaatccgaccaaaccgaccgttgctcacccctaccttgacatataaatcaccatattgatccactttatgcgtagtttgcactggtgaaaagtgtgttgtatttgtatatcggtccactatcacccagatagaatcataaaatcatgttgtccttagtaatcaaactataaaatctatagttatatcctcctatttcgatttaggaatcttcagaggttgaagtaatcccacaggcctttggtgctctaccttaacttgttgaaaagttagacatttcgacatgtatttaactatatcacctttcatacctggccaccagtacagtgttttcacatcttcatacatcatggttgttctcaggtgtaacgaattctgtatggtatgagattcatctagaatctccagcttgatcccatcatttgcctttgtatcgcaataatccatttgatgaaattgaaaaatcctttgttgaaccatcattgaaattttctttatactctagtaatattggatcactttgttgagatgtcttgatcctttctagtaagtcgaattgtaaagtaatgttggctaattttccaatcacaaactcgattcttgttctagtcatgtcttcaaccaattttggtgagatcatcttcaactcataaacttatgttggacctttcctgcttaaagcatctgctaccacatttgctttccaaggatggaagaggatttcacagtcatagtccttaaccaattctaataattgttgttgcctaatgttcaaatctttctgagtgaaaaagtacttgaggcttttatgatgcatgtagatttcacacttttccccatacaagtagtgattccaaaccttcaaggcaaaaactatcgctcctaactcaatctcatgtgtgggatactactactcgtattcctttagttgcctagatgcataggcaataactttacagaaatacattaaaatgtattctaatccttgtttagaaacatcaggagatcacaaatttctcatcactaatcggcagagttaatactggtgtcataattaatatctgctttaactcttggaaattactttcacacttattagtccaaacaaacttacagttctttagggttaatttttttgagggtgtgaaaatcttaacaaacctttctacaaatcttctataataccctactaaccctaaaaaacttctaacttcagtagcagacataggtcatggccaatcccatactgccaaaatttttactggatctactaaaattccatcgttatttacaccatggcataagaaacttacttggagtaaccagaaatcacacttttaaacttagcatagagttcatgttcctaaagatgctacaataccatctgaaaatgtctctcctgtgactccttagagttagagtaaaccaagatatcatcaatgaagacaatcataaagtcattcaggaagtctttgaacactcaattcatcaggtccataaatgctgctagggcatttgctaatccaaaga

SEQ ID NO: 312592 - DNA, 828 bp, Cannabis indica
aaaaaaaaacaggtaaagaagagtgtagttttaaggggacatctaggttggaattgatgaaaaatgagattgagaagaatgagttgttgtcacattcaaaaattggtccaaaagagctttggccaagtgtatccaactatgtcctcaaactctcatcatcagaagatccaaatacaactcttgcatttttctatgtcttggattctgggggtggtacctatccacaaattatttcaactgctcaaatagaatggttcaactccaccacccaaaatcttaatccagattcaaggtacatataattaaaatatatgaaaacatcacctacttttcactatatgatgttatgttttttatttttaaaaattattttgtattctgctccaattttaatcttgagccacgtggtagaatgtgattgctacaaagttgtcgttcgacaatttgaccaatcgtgtactaccatatggcttaggataaaatttgtggtttaagatgtgtagatcgtctacaatatcatgaccaattaaaaatgtttagtttctcaatctcgagtcgtctgagttaagataggctaccctaagcagggacggagggactttagcccatatgtaggctaaagccctcactcaaatatatacctcaaattttttgtatgtagatatatacatatatttattcactttgctcaatttattaaagctcaattcacaaaaaccctcactcaatatcttaatcatgattcatgagcctactcttattctaatcaagcccattttaaaaatagtccaatacaaataataaaaaaataataactttattaaaaaa

SEQ ID NO: 312593 - DNA, 1451 bp, Cannabis indica
taacaataactgaaccgacttttaacgaaaaaaaaacaaaaaagtaaaaaaaaaaaactagaatcaatcatgagaaaagctattaagtatagggtaaagaaaaatatgctttagcaaaaaattagacaaaaaaccaatacaaccaaaatgtaaacacaaaagttatataattaccattaaaaatctatagagaaagatgatgagttaatataaggaactcactaaattggaagcaaataattgatgattctttctacatatgaaaagctaaaggatctgtaaaacttattaataattagttaccctttaaaagaaaaaattaatagtttgccaggaaatttattagatcgatgaaaaagaattaattattgagtaatataaatttgatgttagatcaggttactaaatttgtacttaacagctttttcatcatattattgctaatgatttttgtaaatataaataatgatatgtcatataaatatataacgtcatatacgtacatttactagtatatacatatatttaaatgcatgatcagtacatttcttttgcttgaaaagttttttccttttttttccctatgagattcttttgattgaaagttgttaatcaaagttgagttccctattcgagaaaatcatgacactgcctacgtagcacgtctggactgaaacagctttaaatatataaatatatatgtcattaaattaaatgaattgataacaatgaaaaaaaatatatatatcgatatgatgatggtttaaagaaaaaatatgtcttaattagagattcgatctatttagacctggaagaagcttaagctcctttcccatatcggttcttgttgcacatgtgacaagactacgaagagtacagagggtccacctatatatattatatctacctaatatttatatatatatagctaagagacagagtaatacaaaaaccatggtttttcgatgtgaaaaacgtaaaggcaggcagtggtttttctctgaaaaatttagaatgaggacgagaatagagaggtattgatttcgtttcctacgtaagtcatgtttattattattattttatatatagctgtgtatccctattttgtaataatattaataataataatagactctctttagtctagtgcaattattagatgtttatttaataaaaatgaagttataataaggatgatggtggtgaggtgaaatcaacaggcagcgcccacaatatatgataggagggtgtgtgttttgtgtctttcttataagaaaaccgcttttgatgaacagcgaaatttgattgatgggtcgcttttattgtggggggtggggagttttgactattactgggtcccacttttatgacaaacacaaaaggggaatcatatttgtgaatctgtgatgcactttagcaatgacctagctaactcttaacgtcatctattc

SEQ ID NO: 312594 - DNA, 2388 bp, Cannabis indica
ttctattttaaattctctcattttctattttttttattctacttttaaggatatttttcgactataaattattagttttctcttatttagattgttatttcttaatattcttagtgtttttagttcattttatgtgttttttaaatttaaagagtaaattagattttatgaagaaaaatgaatggatttgatgtttatatcattaggtgatgtttagaggatcaaagcactatttaaaatgatgttttgattgagtttggtaaagtgttgaagtcccaaaagttgagagttggcactgcaacaaagatcaaagtttcgttacaacaaacgaaggagaaaaataagtaaagctgaaattctgtattttaatattattaatttattatttaattattcaattaattaaatgcgaataataaatatggtaatgaactagtttttttatagctacagaacacgactctgtaaatgcagaataaaaaaaccagcaaagaataaaagtgcagaaaataaaaaatacacaaagtttttatacatagtatcaacaatccttacagattgttactagtccatggagccaaacccaaagataagatttattagatagatctcaagaatacaaagtaattaacttgtgcataaattgactccctcttattatatgtcgcaagcttgatgtattctaccttctcaaatgaatcttgctgaaacttcaagtgcctgaactcccttcaatctgcttgaggagtgcttgctttctcccgagacaagacttgaaatactttctcccgaaagcttgaaaagccttctcccgaaggttttcactttgttcttcttttttgttaactttattacaaactcaagacaatacaaaatacataaatacagaggaagagacgaacattctctcctctacacaacaaagggatatagttaaggatttagatagaacgttcactacccttcgcaaatatcagatgaagttgaatccactgaagtgtgtatttggcgtgtcctttagaaagttcttgggattcttggtcaacgagaagggcatagaagtaatccccaaaaaataaaagcattaatagacatggagtctccaaagaacaggagggaggtgcagtgcctaaccgggagagtaaccgctctaaataggtttatttaaggtccactaacaaatgtcttccattctttgacaccctcaaaggaaataagaaatttatttaggattagaattgcgagaggaccttcacaagcttgaaggagcatctaggaaactcgcctttgttagctaaaccagaaaagggtgagaagttgtacatatatctggcagtctctgaacatgcctttagtgctgcccttgtaagaggggatggaaagcagcaatagcatgtgtactacatcagtaagagttttgttgatgatgagactcgttaccaagagatcgagaagttgacttacactctcattgtggcgtcgcaaaagttagagccatactttcatgtacacccaattgtggttttgaccaaccaccctttgaggcaagtgttgcacaaacccaaaacctcatgatgcctactcaaatggtcgatagagctaagtcaatttgacatattttacacccctagagtgttgatcaataggtagatgatggtagatttcatggcagagctcacctatcgtctagacgggggagaccaagagtgagaagtcgacgaagagttataagagaatggagaaggagagtccatttgggagttgcatgtggacggagcctcgaatgacaatggagcaggggctgaggttgtaattacattacaaccccttgaggaactaaaatgcattgcgcaataaagttcgacttcaaggcctccaacaatgaggctgagtatgaagcaatgttagctggattgagactcactaaggaagtaaaggtcacgtggctgtagattttcaacgaatcacagttggtggtttttgaagtgaggggagaataccaagcaaagggaccaaggatggtggcatacttggccaaggttaggagctacttggagcagctgcaacatttcacaattgaacaaatcccaagggagagcaacgtcagcatcgacgccctagctaagcttgtgtcaacttgggaggtcgatgtcctagagtctgtactaatggagttcttatcctaatcaactattgagtgtgatctagcgttacaagtagaagaagaagaacccttttggatgatgtcgtacattgagtacatccaagaagggaagttgcccatggataagaaggagactcaaagaatctactataaggcctctaggtatgtcttgatggatagagttctgtacaaaagaggttactccacctaggggtgttcataaa

SEQ ID NO: 312595 - DNA, 3475 bp, Cannabis indica
tgaagctctttaagttcaacagtcaaattggttgttgcctccaaattggtctggtgtagctcatctagagacttgagcttcgcaataagttcctagttctcctctttggagtctcaaaggtccatcctggtcgaagcagcgatcttgtccctggcctccagcacagcctgatggttctgctccatgagggcctccttttcttgggcttcattatggatcgccaacttctattcctctgactcccggagcttcttcatcacctcgtccatgccaccaaattccaacatagtaaacctgtggtcaatcaaagtcttggaaagatgaccagcctcaacaacaatctagcagccaacagaaaagagttagaatttcgaaagtaaaaacgtaaaagaaacttagaagattgttacttactgcagtaagggtaacactcatgtcttgaatctggtacacgtggttagaagaagcgcatgccgcatacctcttggtggggagttgggttagatcagcagcgaagtggctcaacatttctgaggcaaaaggagccaagttggaccccatgaagcgtttaaaccagtccgtcaagggatccaaattcaaatcccagacgtccccagcatattcgcctcgaaagggcccatcttgagcctccctaagccatttctttaaagcttctgcctctgggtctcccctagacagttcccccacagcgtaattatgctttgtgatgttggagctgaaccctttcttcatcagggtgagtaggagtcaagatgatgcccggaggttcaggatactcatcgacctcagaaggaatccccaagtcaacacttgtactgggggtgtcaaccctcttcgatttttaggctttggctcgaccataatacctttgcgcttccggtcaaggggagggataacttcttcttcttcttcctcctcatcgatcaagaccaactcttggttcccagaagcttcaacgaccggtccccctggagtcacactcactctacactgctcgggcaggttggactcaagactgtaagtttgagtgagggcatccaaaaagtcctccatgggtttcgttgtttaaaataagtaaaaatttataatgatatcaaaaaaaccatgtatgcaagtatagcacattggagttattcctaccctgatgatctaattctcccctaggaaattcacaaattaaaaggctggtgtcgtcatccccttgaaagctatctgagggaaggaaccagcttgaagtcatataggaggagtgatcgaaaggaattggtacgggaggacctgagcccatccaggaccgacccaaaaagtgacttaagttcaaaaaataaaagtttttggcgttatcaccccaccgggaatggggcatccaaaaactatacaatctgtaatcaaattccactagccttaagtcagcatagtcttggacaggatgaacgaagtgaatgttgaaaggagacttacaagctttggaggtgctagcaccaggggccctagagttgggaaccgaaaatggaaacttgggccagattgggattctctctttccttgcctcctactggaagattcttccaaaagcggcctgtgcccgggcaaatgctagctcctgctccctcttgaatctatacttattgtatttgtcctccgtggacgagataatatcctcccggagtgtcttcacactcccaggattccgtacgttcgagcagataaccttagacaatttgaagtcttccacagactggctctccaagatcaacttagctctcctgtagttggccgtcatgaccaggtcccccacgttcaattcttccttcttgtaaccagcaaacacttgtgcgtggtttagaaagagttgagtgggagcagtgcggtgcatggggggaaccctgacccaatctgtcagcaggtttgggtgctcaaaggctttaaactgatggcggtactcctttacgttcttttgaaagttgaagggtactggaatttcattggccgagtgggtctggagattatataaaccgtctttaaacttgtccccctttttggggaccgacagaagttcataaaaatacagaattttagccagacggggcggagcccagttcctggcaacataaaaaatatacaagcctgataacaggcggtaagcttgtggaataagttggtagggtgaaaggccgacgaagacaaaaaaatcaataaagtaatcctgaagaggaagcatggccccagacatcaaatgggtctggctccacgcctcaaagccattgtaattatgattaggagtctcttcatccctagggagacgatgatagacccccgagctagagggtttgatcctagagacagtaatgatcttttccaactggtgggcgtaagttaatgtcgaatggagttcatcggcttcctagccattggagcgacaggcaaactttttgtagactaccgggccttacatgacctcatccaaggtggccaacttctttagccccttcttcgaggatttcactacggcagtcgcagggcttgacatggaatggacttggtggaggtcgatgatttcttggtcaaacccaaagagactgtgtgtgtgaaggtcacgaaggacttcactcatctgaaacagaaaatccagcagtaagcccccataccaaaccctaaaataaaaaaggggaatgggggtcccctaaccgttgggaagaggccccctccggatgtctgtcgaaagtgggaatccaatgattctctaaggaaaacatcaggtgcaaaacatcctaccaaagaagaagaaaaaaagaagaagagaggaggtgcgaaagtcgcttcgaacacccaaaaacaagcacacaagaaatcaccatgttcaactttcttagaaaaggaaaaacgacagtgcatatacaacaaaattagtaaatagcatataatgacgaaaaaacaaagagcataagtcatcggacaccccattttgggggcaccaccttaacatcagccataaccgccgtttcaaagaaaccaagcacatcagatgaaaatacaatcattcatacttgccctaacaagtgagaaaactatctgaacaggaacttacacaaaggtagcgaggaagaggccgatgatgcttggtgataatatttcatttgacagtggcggaggaaaagcataaggaaatctgaggtgtctggaattttgtcaagtgggttggatagactagaaatcgcaaggtggtgaaaatgacccagtagggaaaagtgtttgcttttataggcaattggggatgcgagacaacaatgatcaggcatcatcatacggtgaatattcacaacgattcgaattctgtgatccaacggatgggatgaacgggtgtgaagaggagaaagggcagttgaaatgtttgagtacctctctgacaccagcattaatggaatagtttgtcaatggacgggaaacgaatcgt

SEQ ID NO: 312596 - DNA, 780 bp, Cannabis indica
aaaaaccagtagaagacatacctctgttcatcaattgagaactcccagcaccaggtcctgttgaaaccaggggcattggagtaagataaacaagtgttttatccacattttgaggagaagcagcgattctttttctcatgggagataatacagctgatgactcatgatttagattttgccttgcttcctgagccaggttgatgagctccttcctaccttagcatggcaaaggttccctcaatctgtcagctgaagtaatgccagagccatctgcaccttgacttttgctaacattccagccacccaaatcattattacgagttttagaaatcaaagcctttttctaatgttcttcatatctaaagttgacttgtaatcatttgttgtcttgaggcgagctgtttctgaagatttagtatttggtaacttcctatctttggtttgagtagaacttgtgctaggaagtttgacttgatcagtgcgagcactacatcctacccttgatttgcctgtgaaacacataattcatcgtcttttttggttagtggatcacattttcatgcaataacatgaccgagaaaatgaagagatagattaagaacaagtatcaagattacactaatgctaatttcatttagatctcagagatgaagactcaccagtgtttccatatttctgatgtaagtcctgccaaagatagaaaaaatgagtttaatgagataacatatcattgcgtgtattatgcaggctttataaagaatcagtaggcttaaattagat

SEQ ID NO: 312597 - DNA, 934 bp, Cannabis indica
tttttaaaaaaaaaaaacattctaacatgtattctaataggaggttgacagtaacactctttttatatttatttaacatattttgaaaaaaaaaatgagaaattcagaataacttacattatagaatgcagtattcaaaccgcctattttatacatgtataaaataaaaataaaaaaaatcacgcattatgtattgtttgaatcttatttttgagaagtgcgttaaattttattaaattatttaaattttatagaatattttaaataattatttaagcaacaaaaatttataacatacaccaaaattaaactattttttttaaaatgtcaaaataaataaaagtgcgagtgcagtgtaaatttttttattaatttatttagtttgattcaatttttaattatttttaaaagaaatataatttttaattagtaaataagaattttggaataactttgtttgctcaccgcagttggtgccgcttatggtgcgactcgtcgtattggatcatgtgttctatatatacttgaagatttaacatttttctcgttttatgggttaggatccgctgcttacgcgaccaccgtgtgatttagtggtctccacttgaaaaagacgtgttttgcaatacacgacttttttagtggagggtttggctttgaaattacgctcctgtgagtcgatattttaagaattaggcaaaataataataataataataattaatttagaatggttagtttaaaagaagttaacctatatgtgactaactatgactaggaggagagaggagttcacgtgagccaaagacaaataaattaatattacacgtaaaaattcaatttattttctttgggagtacattatatattgggtaaatactattttggaccctctgttttacaaaagttaccaattggaccctgtgtttgttaa

SEQ ID NO: 312598 - DNA, 2187 bp, Cannabis indica
tttatttaaatcactattatgctttcaaattttaatgattatcactacattgaatgttattaattttaaaattaacatacgtgacttgacacaaaacatctatctactattaaaaaaattatatttaagtttttttaaaatgaagaaataaaaataaatatttattattattgtcacaataatatcataaaaggttgttacaatatattagtcaaaaattaatacttaacaatgataattaccattgatgcatatataatataataaaatcgtgataccattatcataagattaatcaattaataataagactgttaatttaaattaatatatttgtatataaaaacacaaatatatttcttatagttaaaaaatatacaattttttataaattaagttttttttttttttaatatttttttcacatataataatgtatatgttgttgtaacagtactaacttcttactcttgaatcttcaatataagaaagagtcaactacaatttaaaaggtaatggaatggtcatatggtaacaaattttaaaggcttaattacatcacttaaaattatatttaatatataaaatgttagttaatgtacaagttgcaatgtgccttaatattatttttactcaatgaagtaaaagaaacgtaatcaatagcaacactttaagaaactagggaagacgtttcacaatatgattgcctggttctaaagaaaagattttattgtttaataaaaatgttagaaaaagaatgaggcaatatgaggaaacattattggcgatcactcttttgcactattatatggaataaaatgttggttgagaggtatataccatagtactttatttataacaagcaaattgctttacttattttattgattaaaatggtgattagggtcatcaaccattaagggaaagattaaaaaaataaaaaagggatccccatttttctacaaaagcccccatctcttattattatattatttagttaattgtttatgtttatattttattatttacagagaagaataatgtgataaagctaatgaggtcattagaaagtggagttatggtttagattttgaagatgtcatggcccatggggactgtaaaggaggctagtgcctagtggtgatccattagatttccactgtatatattttattgatatgtcattcaaccattggagaggtttattcaatatcaaccctaaaatcaatcttttttgcagcacaatcaaagtggggtcaatttgaaacctttctctttttcttctaaaacctcattagtcataactgagaaataaagcattgatttttttttttggtaaataaagcatgaatttgattcatgctctatctcctcaatttgttcttgtacaactaagtgttcaaattttgcttaatttcagcttattttcaagtcaatatggctgatgttattgtacattatgtatataaatttatatgtttctatgcacacgtggatatgagatcatctctcactaatatacgacaatttgggatatgaaccaaagccccttcgatccattgtttatttatttcatttttccttcttgatttgtacacgaaagaaagagagagggggaaaatctaatataatcccgaaaaaattggacttataacgtacaacatttaagattacttaaacggttgaactgtttttttgaaattaaaggaagctttattaataaactttttttcatgattacatcacaaatatcaggagtaaattcattactcctaatgacacgattagctactcaagatgaagctcgagcaattgcatgagcaacaccattgtcagatcgtttaataaataaaataaacacatcattgacatctttcaataacgtcttacaatctgaaattacacttccaaaataggaaaacataggaagtggactacgaagagcttgaaccacaataagacaatctgtttcaatggtaacccgatgccaacccttcctctttagccaacttaaagccgctctcacgcccatagcctctgctaattttggagtcatggtaccttgtttgcagcaagaaatggcttccaaagcatggcccgatgcatccctagcaatacaagcaaagctatacctgttagcataaaaaaaaaaaaaaacgagctacatctatgttgattttaacttcc

SEQ ID NO: 312599 - DNA, 973 bp, Cannabis indica
aagaaaaagtaataataataataataataatataaagctaaggttgaaaagtcatgtatttagatagactcacacgagctcacgcactattaatctcacaaataaataaacaaaataatatatacatatattaaaggaaaagaatggaaagataacttttctttaacttggtatggaaaagaagctgaacgcaaatgttaatagaaaaatacagtatcaaaaaatggagatagaaacgcaaacctggaaatcaacaatatatatttatatataaagagttctttctttgttgttgagctgaagtcgagcctgagaaagagagaaagaaatttgaggagggtttttggttggttgggtttgagtaatgtgtttttatgtgtgaagatgaagaatatgaagcttcagtggtggtcccacccactcacctaatagtaatagtactggcccccacttcaacttagtaagctccaatttcaaatcttcccaacattttcataataatgtgtatcaattgtctcactctccctttccctctctccatatatctaccttttttggtttctttagttttgttactaaaagctctcacttcctgtacattctattcttctctacttctcttctataaattactactgtttgtcccaacgcaacggaacgcacaccaccacaaccaattaatattatttatatattttgctgaaaccaattaatcatatttcaatacattatttcttagaatcataaaaataaaaacgtaagcgtaattcttcgttgacaactaaggcttaattttaaaatatgtgcaaaagtcacggggattcgatttatgattgaaaatttgaagtgcactgctcaagatatggaagcaaaatgaatagagtaatttgtcttataaatatttaaatttaatttttaattataaataaatagtattctaaaaaaaaaattataaataaatagttaagtttaa

SEQ ID NO: 312600 - DNA, 1324 bp, Cannabis indica
acactcccaatgatcttccacacttggagagcgggttagcatgcgtatcccaggcccagggaaagtctaggaggtgcatgattacacctcaagatgtcctgggtagtctgtctcctctggtgaagtgtgggggcatttgaggatctctaaagcgagaactcagatttctatcgggataagcatgtcgcaaggactccctaactggtttataatgtctcgagttgcttcctgttgatgtgactccagggatgtagctacaccggcgacaaggatggcactaagaactgtgctaaaaatggcatgttcctaccaacaataccataaccaggcctcactggtaacccagtagacgccgatggtactgatggtctcctttcagtaggcgtcatcacaggatccttttccgaaaaaattcaccacctggagacaaggcatgagaagtggttgtcaaaagacaaatctgaccttcacaccagcactggtgtcggagtctctagctggatagagctgttgcatttgacgaccctttctgagttagccatcgtaactgcatcagatcatggctcctttgtctggccctagtgcctctcgcactgctctgtatgtgcgtagcgaaacagcgaaggatctgagcctgaggacatcggcggttggtcttaccctcagggagtcggctggccagatctaagcttttaaggatgaattttagtgcagtaggtgttttaagatcgcgtgcgttcacttttgtcactcttgagtagactgaggcatcaagtctctttctaggcaacactttcgatttgcacctttttggccttcggccgaacctcgacaagtcatcaggaggtctaccttcttttcttgcatagaccttattccagacggtcttgcaccggtagccgtcgtgcatatttctttctttagctctcaatgaaagcaccaaattgtttaccgagttttttggcaaccaaatatttatagagcttaagaaattaatagaggcataatcaaagtaataataaatgagggatttttacgtggttcaggcgttaaatattcttattccatgagtctattttattaggctctttggccggtgactgtttatacaaatacaggaaggatagacttttactccaatccactgtgtttctcttgaagaagaggaagcttagtaggaatattttggagttaataatgagttacaacaatgtgttttatagagaatcagtcttcggttttaaggtgaagagccgaaggaggaaaagagagaactcaagccttggaatcccctgccttgtgtgtcttcgggggtatttatagg

SEQ ID NO: 312601 - DNA, 1511 bp, Cannabis indica
caaagatggatataagaataataatataaagagagaatgttagataagaatcatcttcccatggctagtagattagtttctgcaccttgtaataatatccattatgaaccagccaatctttttttttttaactaattttgccatacgtacttattcttggtttggcttcccataatggaatatattctgtaatttgtcgagggaccattcatcattataatgtactgtacattgcgatcataatacacgtccttatagtaaagcaaaaaaaaaaaaaacagattgagaagaagttgaaagtgtattaacatctgtgtaacattgtgtatttcgtttggtacgttagagatgtattatattaaataataaataatattatgtttggataaaataatctattgtattaattatacaatcaaaatttttaatacaattatatgttgtattatttaatttataacaaatggtccatattatagcttgaattataatatttacaaaggattcggggtcaataataatctccgacacccaaactcgagacctagactcgaacttgaacctaaacccaacacccagacctggaccctagacccaggacccagaccagtacccgtatccgggacccgaatccgaacccgagactcggactcgagacccgaacttaaacccaagacccgcacccggactcagaaccgcacctaactccaaactcgcatccggactccagacctaagcccagactccgaacgtcaaacgcatatcacaattaataaagaatatatattatttttgtgaacacttatattaagcattatttgtctaacactaccacaaatgtaacttaccttgtctagaaaatagttagtaatatagttattatattaaatcaggtaacgagacttaataaataattatattattatcgatataacctcttaggtgatttttaacacatttctctccaaaacactatatatctatatacggtacgtagatgagtgggttgacccaggagaaaaaaagtggaaaaaaggtatatagtcaaataattattataaacggatcgaatgtccttatcaattgtgatcatacatgaatgatgtaaatatataatatatattcggaacatgattccataaatatatatactttcattttttagatgccatgatcctcttccaccttatacacacaaaaagtcaatgcattaatacatgatttccactcaagtctgatagagtcaatgactcaacatacaacaaacccttttgctttttattgactttgtatcatgaagcaatcacacacacatgtcacttgtcaagcatcacacactcacacacaattaaatttaaagtgttcataaaatagtcgattcattcagactaatccgcacgatctaatcaaatctaattcgcaaagtataaaaatttacacttgtacggattagattggattataaattggatgttgattgacatataaaaataactgatcaaatccaatcc

SEQ ID NO: 312602 - DNA, 1181 bp, Cannabis indica
gaattggcatttaagtggttaaattggaaaattagcattttcgagaaaatgagatgtataaatgataaaacagcaaaattgcaaaagtgggtccattatcctatccatggccggccacttatgtaggttatttatcatttatttttttattattttaatgccaaataaatctaacctaaccctaggtggtagactataaataggtagtgatggcttcaggaaaaagatgatgcatcttattccttcaaagaaaaactgagtgccttcttcctaaacctagccgccactctctcttcctcttcttcacttctgaaaaccgaaccctatagtgagtgagtgagtgcccacacacatcaagtggtacctcaatcatagtgtggaagattgtgaagaatccagattcaagagaaggatattcgggctcagatcttggtgatactgtgcgacagaaggaacaagggttagagatctgagtggaaggagacattatattctactgcaaccactgtaaggtttctcataatttatatgtgtttatttcatatcgttttagaagttcatatttagaatgttaaacaacatacttgttagtaaatctaagatcctggtaaaataattccaacataaagtacaatggtggagactcgaaaccacacacgtcagcctcgtccccccaagatcctcagaatcaaggggacaaagaagcagcctcaagagtaaacgtgggttctgaagagcgagacaaaacaaatgacgaggggtacgaagaaaaccaagaagggtatgatgcttatgatgatggtagctatatcgaattactcgcactaagaaaaaaagcgggtgatcatgagggcaaactagccgcgcaaaaggaataaaataggaggatgcaagagataatggtcgccatgcaaaaggccatggaaacggctggaattcacatgcatccctaggccatgcctccgggactagaggaaacataagaagagtcttcaccaagtacccaatggcctaagaacagggagccaatccccatatggtatccctcagaaggaaaccctaagagaaatcctacctcgttccccaaaaagtacaaaaaagcccaaggtctgtaaaaagtatgctttgatttctcgaaagggaaaggtccgcagaggggccgatgttgggttttgtgccct

SEQ ID NO: 312603 - DNA, 792 bp, Cannabis indica
acacgtcaatacttttgagaccctgatacaaacccaacctcgacataacccaaaccaacgacttcaacctagacctcggagctgaaccttgacactggccatggctcgacccagacatagactgggacccttacctcagttccgacctgcacccgatccatacccttgaccaggcctcgacctgaatcccttacctagacttagccctactccttgaacccgagccaaaacctggactaccaccccgactctagacccaaaccacagaactggactcgagcttagatttgaactcggggtaccccagaaccggaacccactcccgaactagacctcgagctaggaccacgacactgcacctcgaccttgaccttgacccaaaccgaaatccaaacctaaatcccaggactcgaccctgatccagacttgaacccagacatcgagcctaaattcgtgttggtttaatggtactaaattaggtacatagtgttaggctatttttagtctaagttctgggttgattttatagttgttttctctgtcaatgttatcttttggaatatttttacgcttgattttccttgtttcaaatccccgaggcattagagttcaaattctatcaattgttgaaaagacggggcaaactggagaaaaatctgttgaagctgacaaaagtgcttcagtagtcgcgaccaccacaatccatgatcgcgactacgaggtttggcagaaagcatgatgtttggttttttgcctatggtcgcgactaggctttatgtagtcgcgactatg

SEQ ID NO: 312604 - DNA, 1299 bp, Cannabis indica
aacaataacctcatcctgatttgggagttgttcagcattgacttgtcatcatgcttactccatttgtcattgagcttgggagtccgtcgggcatgctatgtttggttgtaggtatgctcgatctgttaggggtgttgcttgtcagatttttgactggaatcaatcatgttctatgagcaaaggtgactatcttattcacctctcaactatttacacaaagtcagaaatggagaagatcatttgcatgctttggcctatttggactaagagaaaccgagttattcatggaggtgttgctaaaccaactaatcaacttacaaactttgtagtaacttatttggagaatttctagaatgtcatagttaacttttatcctgatgttagtgccactccaaacctctcaccaccagcaccatttcaaaatccatgactgccaccaacactagtgcaagttccatggcagctgccagttctgggaataaatatattgaacgtcgatgctgctttggatgctaacaagaatataactggcattggtgctattgtctgtgttgagaatcatggagttccatcttacaaccaattggtgataagtggagcaacttacgtttttatatatgactcaatacaatgtccacaatagtagtcagggatgcaactggttgtgttgtggctactctttcgaagcttattgttggaaattttgcatcacacgaagtagagacaaaggccatcttccatagtttgatttgcatcctccaattgtaattgccgattaaacaaatagaggcggacgctttgatggtttcaaatgctttaaaaaaacatctttctgtactttcttttttttttttaagatttaattgtagatattttaagtcttttatttttttctctagagttgttgttactcatgtcaaacgttgtgtcaatatagttacggtttggctcaatatgttttcaaattggatgaaaattatgttcggttgaaatttatttctccacctatatactctttgttcaaaatgactgacaatattaattaatttatgacaataaaatatttctctcattaaaaaaaaactgtaaaatagttttctttagataaaaactgtaaattagttgagtgggttagtgcatgtttgacatcataactaaaaaactgttttttgtttttaaaaatagaaaactgttttttgaaaacaatttggcttgtttgacattgttttttaaaaacagttttcagaaaataaaattacaaaaaataagaattttgaaaacaacaaaatgttattttct

SEQ ID NO: 312605 - DNA, 626 bp, Cannabis indica
aaatgacagcacaccatatttttgtaaaaagaatgcaattaaagtactggagtgtaaattttcctataatttatatatacgaaacaaacagcaaaccgacgtcgtatggaacaagattgacttgctacctggctaccgttagtaatgatgcaaaagtcctagaacggcttctccgcacctctctctcttcattttacattatttctcagttttttcttacgaaagaaaatctataagaagcgaaggcatggacgagggttttgctggtgcgactgcgaattgggattttctaaatctcttctccagttctcacatttctgatcttcatcgacatctcgacggatcctgagcctttttccctacaaaatgttctcaattcagccccatttttttcaatcgatttcaattttactcacttaaatatttaggtttgtctcctatgttagagattaaagcccatgtgattctgctactacgatccacatgctttcataattttctgttatattctttgttatctgtttctttttattgtttttcaattttttattattggattttttcttttttaaaaaaaatatgtatatatatatatatatataaatatatattcgtctgagtactgt

SEQ ID NO: 312606 - DNA, 928 bp, Cannabis indica
tgaccgttttggcacgaaatttggtgggcagagttgatcctgacatgggcatgaaattaagaagttttaattagttggctcaagagtcaactgaagactcaccattttgaacgagctgaagtaaaatctaatagtttggtggttatatattgatgccaatgggagctctttccattatatttttcttcgaggattgcaaaactttatttggttctttcaattctgttttcttacattttgttaaccggtatgcaaattcagctacgtacacatttcctttttaaaaaattcttgatttttagccagggccgaaggggttctaaaaaaattcttcttttaaatttatatattttttatcaattttgaaaaaatttctatattttttttaaataagagcgcaaaaaattattttttcttatgatttattatatttcaaaagccggctctgttcttagctggtcgtgttttggaggaggcttggataccctctgaaatatggtctattcttacgaaatgttgtctattttagctattgctcttgattaatgaagataatttcattcaaataataataataattaataaactacattacacaattttttaaaataaaagtcaattcatattttcacatttcttcttattcaattaactttctgtatagagtaaatttatgtacatatatttttcttgtcaatatttatgttaacattattttttcgtagtttgtcggctagtaaatgaatccatatgcaaaactcaagtacaccagcatgttatcctcattaatattctttcacaggtcatcttaaccatagtatatagtgttaaaatttctacagattatgagctaacaaaacaacattaaatgctaatctttattactcataatcatcaaccaagattaatatttatttagagcatcaaa

SEQ ID NO: 312607 - DNA, 648 bp, Cannabis indica
aaactgaagaaaattacagttttacaaacattgggtatttatgccgctaaaaataaacattgggtttatgccgcttacaaacttaaaacgttgataatgccgctatttaccctatatattaaggatcttgacataacatatatataaaaatgacccccttggcgagtagatcacgaatatataacctgctagcccaattaagcactaacctcataaaaaaaagatactcccaaaggaaaatcctattacgaaaatgtagtgagttgacaaaaatgacttagttagtgatcgatatatttctcatgactctgattccaactgtaccaatcatttctcaaatggtcgtcgaagttggttgtaatattgactcaaagttttcaacatcaaaactttgcacgacttgtatgagtgcatctaagtttcaattgttacccaaagtgaggtgtgagatcaccatagcgcgcaacccagtgggtggtggatctaataagctttctcggtggtggtttgtgtggagtttttgaataataaaagaaaaagaacaagctgtcaagggagatagaagaaaaaagattcatttgactcatgtgatcagtcccactataaaataatatatatatatatataaatatgggtgactattcaatg

SEQ ID NO: 312608 - DNA, 575 bp, Cannabis indica
taatgcttgctggaaagagaagagaaggcgtttgagcttgaccttgacaatgcacgcgtccgacagtgcaagtgacagcaaatagcaggagaagtttgtgcccccactttcccatctcgacacgtgtatggtcactgttcacttacagacgccgttgccaaagcaacagtacttctcttcttcctgtccaatcatacgtcgacacgtaatcagaggagggtgatagctgacaagttattaacagcacagtaactttggaaagtggggaactgtagcaagaaaataaatgtatgttcttttcttttgtaactcaattctaacttctcattgaaacacgtgtttatctagtagttattcttcagacttgtgggaacaatattaattttttttaaaaaaaattagtatttaagatgatttgattgattttctttttatggcctttttttaaataaaaaaattgtagtagaaaaattaattaaatgtccttctattaaaattttaccttgcggcaatcaaaaaatgccttgcgtttcccatatggagtgttgcagtagttgatgatgtaaaatgaatac

SEQ ID NO: 312609 - DNA, 760 bp, Cannabis indica
acagcatgttttatctgcgaatccattctacacacaaacacacacacttgcttaatacaacatcttaaatctttccatctaattcacatccatcatatccttcaatataaaaaaacaacataataatcatatttataaaagtattttagggtacaaacatgccttaaatactagagattaacactacgcattgaaaaaagaaaaagtaaagcattcactgaatcattctcagcccaatgaacaagaaaattgctatgatgatacaacaaattatttcagcatataaatttacacttattaactaatgatatcaggaaaatatcaaataagaaaaagaataaacactgaaattgagatgtgcttttttatacaaaggtttcacattaacagtatgcaaattttgttcttcataattttaaatgacacctaatgcgattagttctactaagtctccactgttgaaataaagcaatagagattcatttttgcaaacaagataattaatagtcataagttcatgaaaaacgtcctaatccagcgtgaaaatcttggaaaacctgataatcccatctgagaataaatttcatacaactaccgtaattctaattcggaaaagagaaccagaaaaacagctaagaaatcccaaaacacatgtgtaagaaatctgataggtaaagctatttcaaaaattgaaatggtgaaataagatttacctcgtccgactatagttgtcttcgccgtcgacttagagaaagagagt

SEQ ID NO: 312610 - DNA, 1443 bp, Cannabis indica
agtgattttttttgtttttaaaattttgatttctaattataaaattgaaaagtaaaaacaattttataggatatgttttgaaaacaaatttcacttttctacttttaaaaacagagaacgattagaaaaagtgttatcaaatctcaccttaattttttaataataataatattaagctatgtttaatttttaattgatctacatcattaattttttgtatttaatggtcaatacctacgttattttagaaatataatttagcaataattaaatttaagtatttatttatgagtgtgaattaaacttaaaaatttatgtggtaaattatttttatttaaatatcgtttttattaaatgatttttattattattttagtggaataattattatattttaaaataaaaccaaaaacattctaattttaatgtaagatgagataagttttaataatttttttatatattttaaatttaatttcatttgggaggaaattatgtaaccacattgaatatagactaaatatatggtcacttattttgctaataaaattattttgtacaaagagctttaaaatggctctcaatccacctacatagtattagtttaataatttgactgttatcaaaatccacttgattagatctcagccattgatggaatcaagaaagaacagagaaagataagggaagaaaatagagtaagagagctgaaagaatctaaagaaaaatctattaaaccagcatgaatagatgccatatatacagatgaatgaagcttagtcaagcttccagactaaccgaagttagtgacacaagaacactcagtagtaactaataactatctgtcttcacacacacttaacgtacagctataataatatgctttgtattcagctccttgatccaattatttaggcatttaaacggttttaacatgttttgattaatgattattgactgattttgttggaggtttatacttctggagtccatagcttggaaattggattggactaaattggatcgtaccatttgattcaatgtttgattggttaatatcctatttacatgtgtaatcatcaactgtcgtttttttattgtttatctagttcaagttacagtttagtggcgtgaacatgattaagattaccttagctgaggtgttgaaaacaatgagacatacgttaaattcagttggagcttctaattctggacgttattacaaatactataatgttattgctgttgaaaatgggagcaactcgtttcttatttcttcaactttgatataatttaatcctttgcaaagccaaatacctaagctagaaagaaaataaatttggaattgttatctatagagtaatttgcgacataattaaagtttaattttcgattgtaaataaatactatgtttaatttttgccagtaataatacttaagtta

SEQ ID NO: 312611 - DNA, 1374 bp, Cannabis indica
ataatcagctcttatctaaactttttgttggttttttgtttttgtggtgctgttcttatcagctaaactttctataaattaaaaattaatcgacgtttaatttaatcagttatgtttgattttttttattataataaattataaataaaaaaacgacacatgtcaactttatctccatatagtgccaaaccataataataataataataataataataatggagtgttcttatcaattatgaatatttttattttttaaatttatatatataaaaagaatagttagatttttttataagttattcaacgtttcatttgaatttaatttaaagattgtctcttttaatgttggttattttttggtgttgtttgtttcttagatagcatttcagtattacattgctcaaaattttagctcttttggtaagattcaattgaacttatttgtgcagaatctcaattagagatgtttatttagattcactttctttagtatcaactattaccaaaagaatgtattttttaatgagctaggagtactgtgtgaggatgttatacaattataatttttatggccaaaatttttgggaataattttgtcccatgtagcttgcgattagaattctgcagcttatggtttagcaaaacatgtctttcggttagacgataagctaccctagttcgaggaggtgtcgctaccaattgttataaattctacctcacaaacttttctgcttattagaaaatggctaaaatttaggggtacgatttggtacatgtcaaagtctagagtgcacgatttgttatatgtcaaaatttggaggacatgatctagtatatgaaaagagaattagtaaaagacaccactggtgtctatcaccctccttagtatcatactgctatttgtgtaattaagtatcaataagaaaaataacttttaagaaatatcgataactaatagtgagataccatatataaaaggtgttagctattattggtgtccaataacaatggtctatagaaaatcatcacattaggcattcgttaataaaattgaatcaaattggatagaattttttgaatctaacaatctcaatagttcaaatagcacaatttaatacatgtcaaagttcagaagatacaatctgaatatatagaaaatcatcacaacattcattaataaaattaaactaaattaaataaaaaaaatttaaatctaataattttaataattcaccaaacaaaatttaatacatataaaaaatttcaggagcaaaacaaaaagaacacgtgtcaactatctatgtagagtgcattgtataccttaaaattaaagaaaaaaataaaaaagaatgatgtgtgagtgggtactat

SEQ ID NO: 312612 - DNA, 1612 bp, Cannabis indica
ctctaccatatggaatataagttagagccaaactacgtattttttaagggtgttttcactttatagtttggtagaaaaactcaaggttctattcaggcatagagaggtgttctagagtaaacacttatccattttatattgtgacatagggttgcatgtgaatttccatttagattgaccgacacacttgaatcaggaaacaaggtaagactagcatagaatgtatatgtatatgtgtatgtgtattatatgcatgttgtttatatgattcatatgctatcaacactagtatggtagcggtactgagtgcattgatacaatatattatgtttaagggtacaatttggtgttaccaacactaatacaattaggtatgtggtgcatgtggtacaacacttagtggtacttggggtaggattcaaactctaccaatactagtacagtagcggtacgtagtgaatgtggtatagaggttgtacctttgttaagaacgttcttaattatctgttaagccttgtgaatatgtgtatgagtgtctagatacaagttggtgatatattgtatgctttatgtttttcttactaagtctgtcgactcacagttattgcttgcatgtgtaggtaaaggaaatgctaaggctggacagtaatgagcccgtagctcgaggatgattgtacatgttaagatggtacgacttggagagtttggtctcgggacgacttggacttttgtgcagtcgttgtgcgacaaagttgtaaagttaatagtgatgctgctattataaaattggtacttgtagtagccttgatatggtggtgcgtgctcacttgggtaccgttcttgcttctgttgtatggctcctggaaggttgtcttgatcctgaagtggtcgaggctttggcgctttagaatatcatagtacaatatcattgctttgtgtatgataatatcatctttgaaatgcttgaatgttttgcaaaaagtggtgaacaaagattctctaattttttctttgaatcttgtgttagataaaattagtaatctttgtaatggttttaaaaatatttattttttgcattatcctaaaaattttaatgttatagctaacacccttaactaaagtcctcttacaatgtcttctaacactgttgggtagctaaattatttaaattgtattaaaaatttattaacagtacatgctactcaataatgtattcttgctcttatctttttatagtttcattattcttagtgttggtggtttcagattttttcctaaaaaagaaaatatgctttgaaattatatttagagatgagttatatcattaggcactgtccttttattgatatacgatagaactcgaaaaaaataaatcccaaccaataggacatgtcatttttgtgcattaaatacgaccgacatcatacaaaatttgaaagcaattagcagaaaaaaattgacagatcatccgaaaatagtaattatataatattaaaaaaataattaaatagagtattaaaaaataataatgaaaaggtattgcaagaatctcggaaagaaaagtaattttgttataaaataatataaatgttataaatattaataattatgt

SEQ ID NO: 312613 - DNA, 651 bp, Cannabis indica
agataaataaactgcttctaatttagaaatctaaggaggaagacttagttgatagtattgtactattaaattgcagtaattactataaatcaatcatgcacgcatatacttaattattatatattgttatcgtattctatattatatacaaataaatcttaaatttattgttaatttatcataaaatttttttatcatttctctattaatattatttataagaaaaacattattatgaggtactaaaatacctattatagtcttataattgattaatatttattttataatatttattaaaataaaataagtaacatccgatatatattaaattgtacactaataatattagacgtgtatctccaataatgatatttatatatcgtgacacattaaatataaatgtaaaaaaaaaaaatacaagctagcaaaaaatgtagtcatattatgataaataataattaagagtgtctatagcactaacgtgatatactattattggtttggtggaacgtagggccctctcgagtttgtacaatgccttataggcaatacttgaacaagaccatatgcaaaaattaaattagactttgacaaaattgttaatattaacaaaatttattgaaattttatttttcatataaattaatt

SEQ ID NO: 312614 - DNA, 903 bp, Cannabis indica
aaaaaaatattctttgaacataaaaatgtaaatattttacaaaaaaaaaatagtattccttacatttaacttttatcattagagttggtctaagttctagtagaaaaaataagtacttaatcttaatagtactaaaacaattagaaatagtaaattttagaacaaagaaaattccaactattagtacgagacttaattttgcaactatatgtagtacaagaattggaagtaaaaaaactctgacacacaccaaaaaaattaattacaggagtaaaatattaaaaatcgagaatttataaaaatagctaattgggaggatttagaacaatatattaatagttttgttttgtcttcaatgaaaatttgaaattagatggcaatgtatagtaataaaatgaatgttggactattatgtgtcctactcaactcatttgtatattaatgtggttttattataataatattaggtttttgtattttctggatgctcaaacaaaattaatttgtaatgcttattaatcaaactaatttaataattacatgttaaaagaaaagggtaaatattagagactattttataaatacacaaaaataaaaaaaaaattacaaaaaatacaattttatagaattttaaatatttttataatttttcttatttgatttacagaaaatacagtctttttatgttgtactctttttaatttattgttaattttttattatctgtatgttatttattgttgttgtttagatgttatttagatattattttcatattatttttatgtagttttcttattgttttcgtgttgtttttatggaaaaatgtaaaaatatatattaaaaaaaattaaacataaaaaatgtaattttttttaataaaatagtaccttatgtaattat

SEQ ID NO: 312615 - DNA, 1579 bp, Cannabis indica
aaatctagatcttagttaaatattcccaacaatttattgtgagcctgagatccctggccggcccccatgtcgctagttgtcgagatctggcagtttttgtcgtttgacctttgaggaaaagtctatcctccctctggaaagggaagatctttcctagttcctaagaactaggttgatccgcatatcgatagaccctccctaatctatcaacaaatcttccttgaagtggatctctgatgagatcctcacctcttctatcggttctctatttgaaccaccttattaaattgctggcctctttgttgcggcgatctaactctgcctggtgagagaaggatccgctcttggtcatctatccatctcaagaatttgcatctctgctgagtgagtgcatcgcaatcagtagtgtcaaggaatttgtgtctctgctgagcgaatatatcgcagtcagcagcacatggttcttgaagggattcatgtctctactaagcaaatatattgcggtcagcagtgtgtggttcttcaattaggcctgcatgatctacaactttttaaagtctacccaactcaagatcttctcccaagcctaagtgaagctgaccaatttttatatatattacaatatgtatattataaatagatatgagaatcattaacatattttaaactataattctatcatatactacaatattaaaataaaataataataataataacacaaaggaaagagagaaaaaaaattctcaccatatataatcagcctccaaatgaacattccctaaccaatattgtcaacttggacaaatctcacacgcaatcagcattccattaaagacttaagactgaagtttttatttttatttttgagggttgttacacatttgatgcaataataaagatattgtatgaacatgttgacatatttatatatgaacaaattttggggtataggatttgctttaaaccgtcattgtagaccagcatttcatttcagatgattttatttatttttttattatttttgttgggaactgatgaatagtgttcaaagattcatatctaacacaaaatcacaatagatcctatagagaatacgcccttcaatccccacatgttaggagatcaagaactagatatcacttcttgatactctaattagcttctcccaattaaatatatactttatataaaatgtgacactaaataattcctcattataaatcattatactttttaatacccacaagtgattcagtagtataagtataaatatgagaatgatggttgtttcaaacctttgaacaatctataatttataatacaataacaggaacatacaaaaaaaaattgcttaaatacacaaccagctaggatactcataatctgtagccatgactcatgatcaacatgggctaggtagctagctgttgatttgaattgattccatgtatatataatatactaaaaacaaattcaattgtagtgtataattatgcattgaatttaaatggtctaattatgtacagatgtacataataacaaaatgtagccaaaaaagaatgtactagatgtgact

SEQ ID NO: 312616 - DNA, 1186 bp, Cannabis indica
aaggaggagaagtgcacatgcttatctttcctaccaaaattcccaaagcaacgcattccgaccggccatggcaacatgtgtcaccaaaacttgaagcacctgaccaaccactcaagtaggctatcaagctcggccaacataaggccacttattgctcaagctagcatggcaataaaaggccaagctcacgccaacttcatggctaaatatacaagcatatctccccaaatatctcaaaatttgagagaaaagaaagagccagagaagaagcgagagcaggagcaagacaactcaacctagaagatgcattgaatacctgctcggtacaggcatggcccttaggacacctgtggggcaatggctgcatgaggtaataaaggtcaatttcaaagcttctaaaaatgaggctaaatatgaagctctgattgcgggcctcaagatagcacatgaagcacatgctgaatacctagacatacactatgactctcaagtagtcgtaggtcatgtcctaggtgaatacgcagcttaaaggcaaaaagatgatgacctatttgagctagatttaagacttattaagttagctcaaaatttataccaaaaagcaagtccccaaagatgacgcaacaaccagtgcactcacttgactggccagcaatgccttgacagccaagtcaaacttggtacccgtttagtttctaaaggaactgagcatctatatttcagaagaaatagacatgcttaaaaaccatccaacatggatgacacctatagcaacatacctcaaaacaaaaaccttattggaaagtaaggggaatagttgctcggtgtccaatctcgaacatcataatcacaaacatggtattccaataccacctctaagatgtcttaccaagaaagaagctaaacatatattgataggagtgcataaaggttgtacgacattcatgccgggggcaaagccaactgagtgtaggtgggatcgaactgcagcattgacacaacctccaaaaggctggccgaccatggccttagcaggttggccagccataggcttagcaacctagccggccattatctccataggttagctggccatagcctcatcaaattggccaagcgatgctccctcaacctggccagccacctggtatgtgcctgtaatgaccgctttagtaatttggattag

SEQ ID NO: 312617 - DNA, 1093 bp, Cannabis indica
gccactggccggaaaatgctgggtttcgccggagactaaggcgagagacagagaatggtggaaaatagcggcttacagtgagttgtgttgatactttcgtaagggtttaggctttacttgtttgggaatgtcatgtcgtattgtaattttattgtcgtatttttatacaatgcaaatttcacaataatttctttccaatttactatttaattttttcttttttatattttatattaaccatttaattatttttaaaatagtattatctatttaattaaatatatatgatatacaaattatctagcaacatagatataaagtgagtaagaacaacactcttattgaaaacaaataggaagttctaataaaatataagccattctcttaatgggacttcggtcatacaattaagcaactattaacaactaaactaaaaaaaaagttatcatttaattgactatgaatagccttacttcaggagaggatttgtttaagtcttacttcgaaagaaagtaagcacacattaatagctgaaagaaattcattacttggtgtgtttcagagatcaattagcaaggtagttaacaaagggttgcggcaaatcactagaaaaagtctaaatttatttaagttaattgcttttgtaatatttgatactatactaattgatttcattatctgggtgtgcccccgtagattaagagtgtttaaaagaatactgataccacgtataattctcttgtgtcaagttttttaaattcttcatttatttatttctagttctggtttgattctgcaaatttgtgttctgcaatgacaggattgcaatctattgctgcagactatttcaattgttgttttttttttttttgctgaaatttagtaaaattattggcatttgcaaaatatagtttttcaattagtattagagcgggacattaaactcttaatgtaatccttttaacattttcttgtatttttgcaatatattttcctttatagaaggaagttctattctttgtagtttgtccaccattccttaatgattataaataaccttattggaatgttagaatgttgggttttgtgccct

SEQ ID NO: 312618 - DNA, 742 bp, Cannabis indica
aaagagttttatttagggcataaaacccaacagcgtgagcgtgaaaaaacttagtattctggtcaccactttgaagccaatcgactcttgatctttggtgccaatatttctcctcttgtgcgagtaaatcatccagtatagactctgaattttgtagttcaatcatatcagccaaagtggctgctgcattatttagcagcgaaaccttcttttgcacctctaaaatttgttttttgaaattaccaaacttggatacatgccaccgttgaagtgcttctatgcaagaatgcagattgctcatgaaaagatcaatatcaccactggaagttgcagaccaggacacacgaattatagcagcagcttcgggttcctctagctacaatttttcaaatcgaaatcttgttcttcttgctggtttttcctgtactgaagtggtgtacaacacattgacagcaatggcccgatggtctgaagaaaaataatccaaatgtgaggttatcatgggtttaaaaaaggtactccataagtcatttgtaaaacaccagtccaaacgctccttgattgcattgatattgtgtctacccttaatccaagtataaggatccccctcaaatggtaactgagaaagagaacaagaatccaacacctcccggaaatcatccatttgtttctcattccttaaacctgttggaaattattttacgaggatcttagatctactcacaagtatgttgtttaaaca

SEQ ID NO: 312619 - DNA, 2192 bp, Cannabis indica
tgagaacccaacaggaagatattgctagtcgctgcaggcatttcttgcaagaaatcttcgaaggcaaacgctgatatttgcgagaagcagctgtgtcagaatcctccagcgtgtcctatattcctgtggaaaaacctttcttttttacccaacgtaacgattgcttttgaaccaggcgacttcgattttgaaattatgcctcctaaaccacgtacctcaaagactccccaggaccccaatggcacctttgaggctgagttgatagaatcgaaggtgcagtctctctcaggctacacgggcgagatgctaaagatctgcggaatcgagcttgggcaatcatgccaagttagataagtacgagagggtgagttcagttgtaacccccctgcacgcttcacaagcagtaactcagggaccaatggtgagactagtaccagtggttcgacgagtatgggcgcctggagcctttagcatatcactgtaggggccatgcttcctcttcgttactacttcaaggactatataaaacacatcggagttgccccattccatttgaatcccatctcttacaggatcctcgctagtttgaaagtcttatacaaaattctgaactggggttgtcccacaccagtggagattgagtacctttactcagttaaggtcgttccgtcaaggaagaatgccataaggggatttttctatctcagtactcattctagcgagcctaaaattattgtagacttgccaaataaagtatccttcaataacaacttcttctggatgtctggtctttcccccatcggcatcaccacatttcgtgaacttcgtaagtgattgttctcttcttgctcatttacatcaatctttgttttttatgaccaatgttttgtctgttttgacagctctattgacgaggcctactcctacccccgagatggttagtaggcacgggtgcctgttaactcttccctatggtcttcggtcatgtagcttccttttgagcgaggctaacctgcaatcggtgggccttctttctaatttggaatatacttgtgattacaaaatgcccaagtattcttcttggcaacagattaccgttctgcccgaggaccaagcctgagatcgattggctcaagcaaaataccttcaaaacactgcccctcgggaatccgctgaaggagcatcccgaggaaatcaatgtagttggtctcctactatagttagggctgaacgtaatacattagtaaccttccaagactcccgccttaatttttatatttagaattcccttctcgtggactgcattgctcataagtttcacagctggtatcctagattcgacgtccagagtaactgtaacgaggcatataatggtatagctgagtaatacggtactatggaagatagggtaggtcacatagatgagagctgggatttagaaccgatcaagccttttgatatattcaaaattacaggctgtagggattttagcggctattatggtccctctaccccttcatctagtgatagctcgccttctagtgactttggtaaatcccgtaggtggaaaattatattcctcccgttttcattggcctttttaataactataacaccttgtcttgttttgcatacatgggttatgaagatatcatggaccagaaggggaagaaaaggacaaccaaccctggagtccctactgctgccaaagtggatcctcttaagaggtaaaggaaaatcactggccgagcccatcaatctcgaggtttttgtcaacgagatccaagaacaagttcctcctccagtcgtttccgacgtcaatgctcctcgtcccgaggcaacctccgctactgcttcttcgagcaaggccattgagaccttgtcggccgcaacaggggaggctaggtttgaatttgcccaagcatatggagtcgcatgttggcgcaaacttcaaactcttcttccccttgatcgagatttcctaaatcttaggagtccaaaagagatgcttccaaggagcttggattgtcacttcatggtatgttggctttgttattataattatattattctttttatacctctttcatattcatctatttgcaattcttcaggcttcttttgcttcttttgcttccaatccactactctctgagcggcttgaatacttggagggcgaggtccacaagtta

SEQ ID NO: 312620 - DNA, 1731 bp, Cannabis indica
atttttcaatctgaatgacatcactaaaaattcgtagtgaccatatctggtctgaaatgcagtcttcgggatgtcttcctcctgaatcctcaactgatgataacccaaatgcaagtcaatcctagagaacactgtcttaccttgaagctgattgaataggtcatcaattctaggcaatggatacttgttcttgattgtcatcttattcaaatcccagtaattaatacacacccgaagggagccatcttttgttttcacaaataaaactagagctccccaaggtgatacactgggtcgagtaaatcctagatccagcattccctgaagttgtatttagcttcttgagttcagctggagccatcctgtttggtgcttttgaaacagtctttgccttaggtgccaagtcaattatgaaatctatctcttactgtggtggcaattctggtaacttctcgagaaaaacatcaaaaaaatctcttaccaccctgacatccttaggcccaaatgttttaggtctactaaagtcaatcacaactgttagaaatcctacacatccaatgtgtaataaatctttagcctttaaaactaaaatgattgggatttgagaaccctaaacggagttgacataaacaagtggaccttcgccctctgactgaaaaatcaccatctttcgtttaccgtcaatagtggccgaatacctagacaagaagtctatcccaagtataatattgaactttgttaaatccaactccactaggtcaaacacttaattccatattttcaattctaattggtatagacctaatccaccttttagagataaccgattctccactaggtagtagggttccaaatcctatcttaataaaatcacagggcctaccccattcattaattactcttaacgccacatataaatgtgtagccccatagtcaaatagtacattataataggagttgttgacaaaatctaacatgttaccaccgaaggactggcagtagcatctgcttgcataatggtaaacactcgaccaggtataggtttcgcctctttttttttctcttccttttccatctgagggcagtctttcttgaaatacctaaacatgtcacattgaaagcatgccttctgattacattctctgggatggtgtttcttgcaacgaggggactcaggataagaataaccctaacgtccacctctaccttggttcccacagaacctcttactctgtccaaaactaccagatgtttgaaaattcttcctcttttggtcaacattggtctcaccatcatccccaccatagccaaaagtaggaagggtggtggtcccacaaacacttggagtccctcggggctcctaaagaaattctactacgccctcagctcggagagccttttgaaccatcttagcgtaggttgttgtgtcatttattgtaatgaccagatcgtgtctagtattggcattcaaacccgccaagtatttttccttcttgctgaagtatgtgggtacaatacccaaaataagcttagtacgtcgatcaaacttcgtcgtatattatgttactaacatggtctctcctagaaccaattcaatgaaatctttcctcttagccctgcaaataacctcattataatatttggcattaaataaatcccaaaattcttcccaggtcatagtagtgacgtcttgggtgagggatactatctcccaccacacgagtacgtttt

SEQ ID NO: 312621 - DNA, 1117 bp, Cannabis indica
atttaatttacataatacttttgtcaacagttataaactgtcatttaaagtaacttttcccaacagctataaacctttatttgaagtgaattttctcaagagttatcaactgtcttttaaagttctacatttttatgacacccacatagtcaacgattttaggaatcgatgagaaatagtataaatgacagttatatattgttgggaaaagccaattttgttgtagtgaatgtttgaagccaaatgtgctatgcaactccttcaacaaggttcgaacaatgttacttcctactacactagacttaaatcattgtgggacatgattcaagaatatagacctattcctgtttgtaactacagagctatgaagatcattcaacaatatcaagaagaggatcgtgtccttgaatttcttgttggattgaataaatcttatagtttggctcgatctcaattgttgatgcatatcctctttctatcatcaacaaagcttttgcttctatcattcaagaggaaagacaatatggcatcattgttgtccatgttgatattgagaaacccatccctcctccaagtggtgagtttgtatgaggtgttcaatcacaaagataaaaactcatatgcactcattcattgtggtattactggatacaccatggccaaatgttacaggcttaatgggtatccacctagccataacttcatagcagtttttcagataagggaaatggttcgaattataccaagaactcacaagtagggttgttcatccgatccaatccgcacttttttggtcaaacaacatccaatccgcacttagtgcggatttcattttttggatccaatccaatccacacaatagctcaaatccaatccaatccgcaaaagtgcggattagatcggttactttggattggttactttttaatattaaattatttaatatttatgaaaaaatattttttttcacataactagcaacaaaataaaacaaattatagttattttatgtttccaacaacacattaaataaataaaataacaaataacaaattcaaaggaagaaaaaaattgtatatatataaaaaaaaagatatatttaattttattttaaatt

SEQ ID NO: 312622 - DNA, 1350 bp, Cannabis indica
tcattctgttcataacagcaaaatccatctaaagagagttgagagagcgaggaagcccgattacccacatcaaccagttttccttgcagatcaaagcttatgtggggttgaagctcaagaatcaatggctggaggtatttcgatccttattcatagtatatatatgtttgtttaattccgcattttatatacacatacatatgttttagtctatacaaataaatgtctaacataagtaacaaatgcccttaaaaaattggttgaaaaataggagaagagacatgagttggtaattatgtggaaaactaagggcactttgtaataatggtgtctataaaatccagccaccttccaatttgtccaatcccccaaaatttcatttcccactcagtctcatcaactcaataattaatagtcaaactcatcgatcaactctaaacattttattttaacctctgatttctatctttgaaattacttaatgacgactaccggattcgtaaaatgcagcaaaatccgtcacattgtccggctgaggcaaatgctacggaggtggcggaacaaggcgagaatatcagccaacaacaagacaccgtccgatgttccggcaggacacgtggcggtgtgtgtgggcagcagttgcaggagatttgtggttcgggcttcctacttgaaccacccagttttcaagaagcttcttcaccaagccgaggaagtttacggcttcagccaccatggcccactcgccatcccttgcgaagagtcactcttcgaagatattctccgatacatttcccgatctgagtcgtcggccaactccactagtcggttcctcaatctcgacgactttcaaaggtattgccacctccatctctggtccgattctaggccgttgcttcaaggaatattggcggagaaaaccatttggtgaataattaatattaataataaagccaacccattcttaactcacttgagttggctttattaaaactaataaagcttcgacgaatgctatggagatggcaaattgagtgggacagttatccacacagtcgtcccgggttcgaagaaacggtgatgaggaaaggatgccatcggacttttttttttttttttttgggctttcgttaagcggaggtacactacaaaagtacaaacaagaaagtgaaagaaaataataatcacaatgaccatcttagtcattttttttcttttgtaaattatgtaatttattgatttattaatgtaacaaaattgtagagaaattctaccttttttttcattattggagtgaggattcgagtaatttcactatattcttgtttgtataatatatatatattttta

SEQ ID NO: 312623 - DNA, 756 bp, Cannabis indica
agaagaatttcatggaacgacaaagaccatacgagtatttaagaaatgttgggattatgaaatgttcaagcaatataaaaggcacatagtacgcaaatgatactacaatccacttatgatttgatttatggacaatagtaagagtatgttcaagcgatcagaagcaattaagaaaaaaaaatctcaccactataccaaaagggttaattttggtcaagagaggtgtcatttctaggctagatagtgttggaagaaagaatgacatcatatctgtcaagtggggtgtagaaggtatagtaacgatgaacatagtaaggtttgtttgacatgatttgccaattatgtatatcgtatcctcatcccagcaacttggttgattaatatattatagattacatgattaacctatagttaaatagtcaatgataaataaaaaattaggctacctaacccatgttaggattgaacttgttttaaagggttactagtgcacttacgatattttagcacatgtatggtgtaaagtctttttttggcaagttagttgacaaaatatttttctttaatggtaagattgctttgcattcatacccgatttcttaccttgtatattcggtatttaatttctcttttctatgttaggaaagttgcacttttcaaatgcactttcctttgtttggaaacttcttgtaagagaagcaattctcttatggaaagttggatttttaaggaaactttgattattgcctttttctt

SEQ ID NO: 312624 - DNA, 647 bp, Cannabis indica
aactagattataacattatcgttatcattataatacatcttaacaactcacagtactttaaaatttataatttaccaaacactcagcccagcttttttccacagttttgctatagctgttttctctcacagcacagccacagctgctttttcccacagttgtgccaaactggccctatgtgttttttgcaacaaagatttactgtatttggagggttcgaatgttaattactgggaaaatagggcctgatctataaattgtacaatataaaaaaattaaattgtaagttttcaataggattaagtatactagtttgcaagggattaaacaagtggatatatattgggttctcttagatttgagtttgcttatttttttttttcagatatggtttgaccttttctttttttcaaatctaggtttggatttgtatcatggtgtttagggttgatttgaaatgattattattgcaaatgttgtggttgtgttagttgtggttggtagtggggtggtggcaatggtgatggaggtggtggtgttggtgaaggaagagagcgtgggaagagagagaatcattagcgagaaagaataaaataaaagaaaagaaaatttatttatttattttattaattttatatttttaattt

SEQ ID NO: 312625 - DNA, 444 bp, Cannabis indica
tcccgttttaagggggtgcattgtagaatcacccaaaaagtttagtcttattattataataaaaataatttacggtataaatatttaaatttaatttataattataactaaatacctaagtttaattttttgactctaataataatacataaattataagtacttaacttattaactggcaatattttgaaaaagtattgtgcgttacaacaccaaaatttggtgtacagtagaaccttcccaataataataataattgaatttatttagtgttgttagaaaaatgtttgcagaaaacatattggtgagatttttcttttttcaggggaacatattggtaacggtgaaaagttttaaaaatgcaataacaaatgtcatcatttgcttattttatccacataaataatttagggctcgtttggaacgccgtattaggtcgtattg

SEQ ID NO: 312626 - DNA, 1378 bp, Cannabis indica
attttgagattttacactataggtgacatgtcgcctagagagatatcacatggccaaatttcaacatgtatttctttttaacattttatgaatgttgtgcttagttttagcagctctcatctcataacttttatttatattttaaatattttgattgtaatcttcttagaacctttttgtattaagaaatattcaacaatttatatatgcacaaaatattgttcatataaccttatttatgcattaattattggaaattttttatttttattgtgttttggtaaatttacaaaaatatggtaaaacatataatttaggataactagataggtaaccagttacctctctaggataacaattactttatacttttaacttgtccataaattttaatttcttttttctttttgaattttttacataaactaaatttttggaaaagagacatattacacaaattgtgtaaaacctcgtgtaagtacttttacttaattattatattttgacgtattttgaagctatgatcaaaccatgttagataaaataaataaataaaaaacattatattctactttttatttcaatcaccaaataataattatgtaatacaaagtacaacttaaattattataaactataattgttaatttttattaataaaaaataatttaaaaaatggtattaagtaaagaaatcatgatatattttttaaataaatgatgtgtgaatatatagttttgaaatgagtattattattggagaatctatacacactattatcggtagctaatagggttccacacctatagacttaatattctatcctaacatggaaacaaaaattaagtggggactattaattaattactagttactaacattataattaatacagtttatatttatatatataataatatataacttagtctatgaaagtgacatccttttctaactaatatatatatatattgaagataataatgtcttatcatgatcttctcatacatgcatatacataaacttgtgaatatttaataattttcgtgtaaatatatagaaaaatgttaaaatactacccaaaaaaatacttttagtcacaataaaaaaaaatcactaattataaattattgtttctaattctatactataactaaaaaatctgcggctaaaaatattagtcacaaaaatcacaatttattgagtttttagtcacaatacttgttgtgattaaaattagtagcaacttgtatctaaattttatgttttagtcacaagtaatttttattgtgactaaaagttacatttagttacaaaaaaaattgtcactaaaaatagttttttattttttagtaatagcgtttggttgggaggaatg

SEQ ID NO: 312627 - DNA, 1080 bp, Cannabis indica
accaacgacaaacaaaaattgggaccttaggtattttcaccgtcaatttttgaggttgaggactaatcggcatcaacctcaagtttttggggacttttgccgccattatccctttaaattttgagtaatttaacttattacgcgttttatccatcaacaatatcactttagagctttgttaggtgagaacgaataatagttattaataattaaactctatataataatgatatgtaatatattaattgaattttttaacgttgcagttatcttattaattatagtacgtactttaacatgattttcttatagctgaagtacagaataattaaacttcaatgatcgttccaggaatcatactcaacctatacgccaagcctaatccaataaaaaataatataatatatttatataacatgtacattctctaaatattacagactaattatatattgaggaccatacaggagtcgactcttgactatggtcgtccaccaataatatatatatagttatttccatttatactactttacataatataatatgatcatgttgagctgccaagggactaaaatgaaaacttagtgttgcacatccatatttttcactaatttatacaacaattactttttgtaaagaaatcatgaaaagaaaaaacgtgcatatatatatatatatatgtatatgcatattttaatggcatcccaagtgagtttggcttataaatagaagagattacgtgccctcaaatatatatctcttctttgctataatatttctaataatttcgcttcataatactattatatctaattaattagtcaatgtatatattctttgtaatattactattatattaataattgattattgaatatgcaggaagcagtaaatgtgtctctgaagaatctaaattcttatccatttgttcgaaagggagttgaagagaaaaagatagcacttaggggtggatactatgattttgtagctagatctttcaagttatgggtgttagagattttataacaatggaagaaaatcaagatttattacaactctattgtaaaataatacaag

SEQ ID NO: 312628 - DNA, 1175 bp, Cannabis indica
aaagcaagaagtagttttaggtacagaactactaaaatgcatgttgtgtagcttgtcatactgacatgcttgacaaaaaggaagtgagttacatttagttttagaattgacactacagagaatatgtttcaagatccttggggaagcatggccaactcgatggtgccaaatttgagcttcagagaaggttccagcatggttattcttggtacagttgaaagcagcaggtatgtgaggtactcctttattgtaagtggttgaatttactctagcatgtgaaagattcaaatggtataagtcgtgtttaagatggccccgaagaagtacttggcctgtagtcttgtcctcagagatagactcactcatatttatagcccccactaaaaaaatattgtcttttaaaaaattaaatgtaaattttttaattcgataattatggatcaaaatagtagaaaagccctcataaaattaaataaatctagtaatattaattataatgtaggtacaaatattttttatgataaataaacccccacaaagtaaaaattcaaggtccgccactgttgtccttgatcacacatgcatcatagttaaaaagtaaagtgatattattatctattgttattttagagatgctcaatagattcttggtaatagttgcagcaagtaacacatcatttagtagtaatttcttatttggattagttgtaaaaatacatattggcccatatgagaaattgaaatttgagagccatgaccaaatattattttggctttgcctttgtaatcgtgtggtgttgagatactaaacatcaaaggtcatctggtggatttctccactgtcacatactagccattattttcaactggggtataagaattagaaaaaagaccttgtggattgtggccttgattctgagaattggaggagctaccttgagtgtctgtatcataactatgataacatttgtaagaaaaatagccaattgatgttgcctaatttgttacattgcggtcgcgatagtaaatgggttatgtcgtatccacagggaggtaaattaccactaaagattagtataaatgaattaaaattaaaataattgtgagtgaataggggtgatcagataaagagtttggtaaggtaaaaatatagttatgcaaatcctattttaata

SEQ ID NO: 312629 - DNA, 1618 bp, Cannabis indica
cacccattcaattttcacccccacttggccaaaaaagcaaggttcatctctttagttttccgaaacctaaaccccccaagaacttagggagacaaagtttatcccatgctcttaggtgaaggccatggttccctttctcaaaaccccaccaaaaatctcagaccaaaccgtctatcctattaacaaggcagttagagagtttagtggtctgcatggcatagataggcagagacaaacccacagacataataagtgtagcccggcccgccttggataaagtttttaccttccatccctgtaatttggaagtaagattgtccaggatgaagttgaagtcagcatccttttgtctatatttgaaaagggggaggccaggaacttaataacaccatccgaagaattaataccctaaatatccttgatacctcttctcatggaattcgtggtatttttgctgaagaagatagaggttttgagcttattaactttttggccggaccaatcgaaaaatttctcaaggaaattccagtaacttttaacttttctcaaattggcccgtcccaccaaaataagatcgtctacaaagaaaatatgggataggaccggcccacccctacttatcctaatgccttgtatattcccctttccaagggcctcctctaagactcttgataaaacttcaggatcacatatgaagagataggggaaagagggtcgccatgtcgaataccacagttgggcacaatcttaccaacctgacccccattaaggcatattttgagagtggtggtggatatacactgagaaatccaatggcgaaacttctgtgggaatccaaaatagtcaaggacacgatcaatgaatttccaactcaatctatcataggctttgacgagatctattttaattgtaaagtatccatccttgcctttttttcggttgaaagagtggataatctcttgcacaatcacattattatcttgaatattcctgcccgggacgaaagcagcctgagttggagttgggcagatgagagagggaaagataggtttaattctatttgcaactattttggaaatgactttgtacatcacattgtaaagagaaatgagcctgaaattattaggtcttttcgggtttaagcttttagggatgagcactacgttcctagtatttatacccttgtgcatattgccttgaacaaaacaatcagaaactgcatcacaaaaatcatctccaacagactcccaacagtgcttaaaaaagagcactgacatcccattcggccccggagccttatggttcctcatggcaaaaagagtagatcttatttcatcatgagaggggcataaaatgatcccctcgtggtcctcctgagagatcctcttatggaataactgagtccaatcaattacctgtccgcaatcagatcctgagaagatactcttgaagaagtctaagaattcaaggccaattaattctctatcattaatccaaacgttatctttgctcaaaatactttcaatggcatttctccttcctctgattgcaggcgagaggaaaaaaaatttagagcatttatcgccatccttcagccaagtgttgttgggttttatgc

SEQ ID NO: 312630 - DNA, 1408 bp, Cannabis indica
acgaaacccaataatttagccatttgatgatcataggtacgaaagtgatatctagggttttgactaaacaattagagctcgataaggacttgagagcttagattgttttttgaacaaagtttaatgacttgagagaggtatggactcaacttaattattagaattgattttaaagtgatgaatagcaacttttgacatattctaattttattgatttataaaatgttagaaaaattaaaaatttaatttgtatatttttttagactcccttaaaggcactgagtactaaatatatttttctacaattatctatgcatgttatgatttttgaattttatcaaattatagctagtgtaattttgctattcttgatgcctatatttggttttattgatgagagctatcttgtgcatattacttttcacgatctagtctttgagtcatcataagtagatcaggtgtgcacttacctgtaggtgtaagacctagaatctgtacaggacgtaaatttaatatgagccccagtatttggtggtttgcgactacccgatttaggatgtcgttttctataattggtattgagagctaggtgactagtggacggtgtgtcatacatttaaagtttgattttgtgattattttaaggtctttatttgtttttatatataatgataattatgagacactttttgtttctaaaagctaaccatgcaagagttttattaaactaacactactacaaaaaactattatttctgtcggtcctcaaaacactttttttcgaggaccgtcaccaataaaattgagtattttagaccgatgcctataattaaaaatatgagtcaattttaaacactcatataagtatagttaatgattttgttagttttgccaggttttataattggggtctccccgaggattttataccgtagagtaaccccctaacgtacacttcgttattctcacacgatgaccaaactccaaattcccaaatatttttctctccctccttcaacaaaaccccaaacaccaaacaccgacggcggccaaccaccacatcacctctctctctatctctctccatccatatccatccccctctcttgcctggccacaaccgagccaccaccaccactgagtgaaataggtatatatttatttatttatttatttgtttatttcagatttaattatttctttatttatatattattttgactgatgaagaaaataaaagtgatttttttatttttaaaattttaaaattttgattctcaatgaaaaaattaaaaagtaaaaatagttttaaaacatatttttagaattttttttttactttttaattagaaaatagaaaatttattaaaaatactagcatactcattctaatggcacgtttactata

SEQ ID NO: 312631 - DNA, 2021 bp, Cannabis indica
ttaaatcgggtcggatcagatcccatccagaaaaaaaattaggtggggctgatcggatctgatctaagatccaataagtatccgaatgtttcggatcagaggtgatccgtcgggtcggagctccaacccgctccaactaaatggatctttttgacatgcctataaatacatgatacacaaaatattaagtgggcctattatcaaagaattcaaagatggtcctcaactcactaaaagaaatatttttattttattaaaaaaattaaaaaaaaaacctacaatgcatcttaaaaaaaagtattttcgttctccatatgttttggcatttaagagaattttttattataattattgtcataatcgtatacattgtagttatttaagtctacctattaaattttcaaaaaaaaaatctaaataatttacagtctcgaaaataatatttaaatattttgtgactattttttcttattgtttgaactttattattgccaatataaactagtcgattttttttaaaaaaaaaattataagtaatcctaaataactacaaagtacataatcatgaaaaagaattagactaaaaaataatttaatgtcgaaaaagatatgaagtgtatgtattggagaacattgtctcatatgtattaaatgtaaaaatattaaggcatacataagaacatggggtactccacttattatattagtttcaaaatggaatctcatgtttctcaacatgttatcaaaaccatattcttagcgggctttcgatctacatctatccagatggttagccaactatatgagatccaaatggtgcaaatacgcttgagattcgaacaaaataagatctagatggtgcaaagatgcttgagattcgaataaaaataaaacgaacaaatgacacagcctatgataaagtaattcaagattagtgagtaaaaataatcatcatcttgagagaaatattagagaatattgttctgtataaattaaatgtaaaaatattaaaccataattaaaaacttaaattactctaatcattacctattaattttacaatagaagctcatatttcttaaggcaaacacctttttaaggattgtcaaaatgttaatttactagactttgattgaaattgtaaaatatatcaaacccacaacaattataagtatatgttcttgcaaattctttccacaacacaacttaaactaattcttacataaactacaactttaccataatgatacactgcttcctagcattgtcattggctattcttctatggctataaccaattaacattaaagctacaattataggtgtatgatcatctttagttgtgagtttaattggtaggaatattgactagagatatttataagtgtatatattaattaaccatacatgcatacatgtatttatgaagaaaggaaagtccctacaaaaggtcatatgggattttctttgagtagacatataaataggaaagaggaccccaattgaaatcaatgtgtcggtatgctattaaaatttgggttagagagtttgaaaagaatcaaacatacccacctagtcccaccttctattttatcaataatggacatggatatgactttccttctccatcaatattttgcttcaaacttatgtaattatgtcatttattgaagtcccaacataattactaattatcatcatgtcatccacttcttaccttgcttataacatcaatacatataatgttagattttagtaaaatttagtaaggtgtatggttacatatcaaaattaaatagcaatgagcaggtatatctcaagccaattgaggttctgagccaaaaaaaaaatctaattaaacttttgtatatgaatttttatgtttttttatatataggtgtaagaatttaaaatataatgttttgaaaatataattgggcatttcttcttaaaaaaaaaggatttttttgtttcatttttatacttcaaaacattttttttttttgtatatttacggaatt

SEQ ID NO: 312632 - DNA, 790 bp, Cannabis indica
actaccaacatcatcaatctgcacagatttttctttcccaatgtcctctaggttcttatccacaaagaaatcatccaaatgtagacacaacaactcctcctcaattggcaacaaattcttcactttaagctaacacaaatataaaataggaaaacaacattaaaaacacataatataaacaaaaaataacattaaaacatcataaaaaataataactgatagtgaaacattgaagatagaattcttgaaatccttaatagagggagaataatcattacactagttcagagttctaagaatatgatcatacaaatttgtacaatgaatgccatcaatgtacaaacaacattcattgaactaaacttgaaaaacataggtcaaacctctcaacctataaaaactaattttgtctccattatcacctttatgaattttaataagattctttccaatcgcacctctaactaaatcacgtgataaagaataagactctttgccccaagcatattcattaaacctccaactatcaataatatccagctctaagtcagaaaatttcttagtgtccgaatcacttaacacaaaatactgaaaaaactagagaacaacaactctcaagaaaagatcatcatcatccccaaacctttcctcacaactgttgtaaagaccgcttagttaatttggaaattagcagttaatcatgattaattatggaaattatttatagctatttaaataatttattatactgttgttattgaattcagagatgcatttttatgtcatgtag

SEQ ID NO: 312633 - DNA, 1018 bp, Cannabis indica
aataatattttattatgctattttcttaactttccgaaaagaaaatcataatcatattattttgtttacataaataggaaagataatcagaatgctttaatttgataaaattgttattattacaacatggaatcattttctgtttatagatttaaaggacataaaattaaaattaaaataaactaagttaggaaagagaaaaatatttcttataaaaatgggagtataacatttctctttattttctcaagtgtggacctcattacattctctttttctaaaatttagtaaacaattgtatgagaatcaatatcataccattgattcttatttcctttaagtaaacatgtcataagagtaatattatgtctataaatactatcttttattacaaattatatgtaataactaactaaattgcatatatatttttttttcattttttagggagggcgactgccccgcctcgcttttatgtggtccgccctacctggtcgttacgtgtcaagttattatctacgtgttattttcttattagtatatttgaattaatttttatataaaaaataaaaatttaatgacctggatcaatcaagtactgtcatgtggttattaacttaacacttaatgaccatgtacctatcgaagtttcaaaaatataacttagttattattatcgtcaaaaattaaatttaaatatttatctacaacaagaacataaacttagaatttataccgcaaattaatcttaattataaataatttggtttagcatctttaaattcaatatacattattataattacaaacaatattacaatcttttttaattttatttacaatttaacacagcaatatcaatagagatcaatggagagtaaaattttagggtaaataccattttagatttcgtattttgtaaaagttacagattggaccatttttttttgttaaatggacaaaatagattctgtattttctaaaatagtaaaaataagactctgagcttaatttttgt

SEQ ID NO: 312634 - DNA, 1165 bp, Cannabis indica
tcccttatctcattttaacattcagataactacctataaggtcagagcttctctctctagtttctctctctagaaattagagttttgacatgtagccttttctataatatcatctcttgattaataaaaactcaaagtagatgtagctctaatattgtcagaatacaaggagtgaactactataaattagatgtctctctcttataattacttaacaactattttattctcaccaatctagcgagcgggtgtggcttagaagtcttagtccacatttttgagtcaatgttagtgcttttattgagagccacaacttaagaaagttactagcaagatggttgaaacacgctccacaagtgttgacagaggaatcccaacatctggccaaacaactgggggtgcgccagttgatggagttggaactggagttactcctccgccctaggtgccaggaccatgcattggaaccggctccacaactcgtcctttaaggccagtaaacgctcccaagactggcaccaataaccagctcgcacatggggagcctcgtgtggagatcaatgaccttgaggaggtcgatactcaggttgcctagctcacccaaattgtggctgatctataatagcagctgcaagactctcttgacagccaacacgaacaatttcaacacttattcatggaaaactgtaggaacatcgaaagctgacaacttgagcaagaacagtagagagcttacatgtctcaacggattagagaaggttatcgatctggtcgtggaactactcctcgcaggggtctttttgagttggtgagagactcccggccgacagcctggtcacgtgggaaccaaggggaaacccttaatgcacagaacacaactaccacacctagtaactgtgcaagcactaagcagacaccaggcgtggagacctcctagatggaaagcacgtttgagcaagagctcgaaaggactcaagctcatgggcaccaaccaatgagccctccactagatgttgaatgatctcgcaacaccaagagagccaacatcactcctaggggcgttcactaagtatccgatccaatccagtccgcacgatccaatccaatccaatccaatccgcaaaatgcggatatccgcacttgcgcggattggattggattgaaa

SEQ ID NO: 312635 - DNA, 1259 bp, Cannabis indica
aaccacaaaatccatggtgacattctcctatttccactgaggaagagtcaaaggctgcaacaaccctgtaggtctttggtgtttagccttaatcagcttacaagtcaagcactgagatacacattctaccacatccttcttcatcccgtaccaccaataaaaggattttaagtcctgatacattttggtagtgccatgatgctgagaatagggagtggtatgagcttcttcgagaatctcatttcttagttccatactgttcagaacgcaaactctagttttgtatcacagcatcccattacctgacactgtgaagtctttagcttgaccaactaaaacttcttctcagatctttacaaactctgaatcagctagctgggcagctctaattctgtctaacaaatctgattgtagcatcaaattattaagttttcccacgataaactcaatactttatctgaccatgtcatctgctagctggggtaaaattataactatggtagatacttgcccgggacccttcctacttagggcatctgccactacattggccttcccaggatgataaaagattacacaatcataatccttaaccagctccaaccaccacctctgtctcatattcaaatctttctgagaaaagaaatatttaaggctcttatgatcggtgtaaatctcacacttttctccgtagagatagtgtcaccgaatccccaaggcaaaaaccatcacaataatctcttagtcatgagttgggtattgttgttcatacttcctcaattgacaagagacataaggaataaccctattagcttgtatcagaacacatcctagaccttgtctggatgcatcataaagtagaccacaaaattttcttgatctaacggtagtactagcactggggttgtaatcaaatgcttttttaactcttgaaaacttgcttcacacttgtctgtccctaaaaattgttgattcttcttatttaactccgttaagggcgttgaaatcttagaaaacccctcaacaaaccggcaataataactagccaaacctaaaaaacttctaatttctatgactatttcttgaacttagcattgagcttatgttctcgtaattgtagtaaaaccattcgtaggtgctgctcatgctccatttctaactgagagtacacaaggatatcattgataaacactataactgttaggctaaaattagtctaagttttgggttatattatcggttagttttcactctttgtt

SEQ ID NO: 312636 - DNA, 534 bp, Cannabis indica
acttttccacttttaaaaacagaaaactgattaaaaaagtattaccaaacgccacctaagttattcataatgttttgaaacaccattacgatccataactacaatataatttataagaattcaaggaataaaagcattttaaatgagtatatgttggatcattaccctattcttaatttttgacaaattcaccattaaaaaaattgagctcataactgtaattttttttaaaaaaattatttgacctagatagatctctaatatcaattcgatccatttcacaaactacatagtccagattaaggtaaatagcggaataagtacccaaaattttaagtttgtaagcggcataaactcaatgtttatttttagcggcataagtacccaatgtttgtaaaactgtaatttttcttcaattttgtcagtacagactccgttttaacatttgaaagtaactaatactacatgtttatgtctagatccaatgatcaagaatctaaaccttatatgtggcatatttaagaaaataacaga

SEQ ID NO: 312637 - DNA, 902 bp, Cannabis indica
tcagagccgaattgagtttgttccgaaagagtctttcgttgcgtttcttagagtgatcgtgtgtggtttagtactacagagcttgcacgatggatgaccttcaagtggttggcaaaattaggaaacttaacaactaaattacaacatgtggttgatgcacatgggggcatatctacaaggccaagacttgtggcatatcgttggcggcaatgaagtcacacaaccagaggaggcaaccgctttgaagaaatagaagattaaagcggacaaagccatgttagcaatttggaccacaatcaaagatgaaatgttagagtacatcaggtcggcgaaaacactgaaggaagtgtgggatacttttgcatcattattcaccaagaagaatgatacaagattgcagcttctggagaacgagcttctctcaaataggtagtgcgacacaaaaattaactaatacttcatcaagataaaatctctttgtcgtgaaatctttgcattggactctactattggtatgttagatattagaattagtagatttattattcatgaattaaggctagaatttagaacttttattgctgcaatacaaggttggccaagccaaccatctcttgttaaaatagaaaacttgttagctgaccaagaagcgttagctaagcaaacatttggagtcttattaaagagtgatgaagaagcactctttagtggtgataagaaaggtcgatctcgaccacatgctagcaaacaatttaagaaaaatgataacaaggatagtcatcatagaagctcccagatctggggagctcaaaagaaaaacaaccagcgtggccaatcaaagaataataataaagttgatgggaaatgatatagctgtaaaaagtatggttacatggctagaa

SEQ ID NO: 312638 - DNA, 1193 bp, Cannabis indica
aaaccattgccttgaagcttgttgtaacccatacaaggatttcttgagtttacaaactggattgacaggtagagtctcctccttaggactgtacccctcgggtaaagtcatataaacctcctcatgcaaatccccatgaaggaatgcattattgacatcaagttgttgaagatgccaatgatgcattgctgcaagagctaagattagcttaacagaaactaactttgcaacaggagcaaatgtttctgtataatctattccttcttgctgagtatagcccttggccaccaatcttgctttaaacctttcaactgtgccatctgaatttaatttgattttataaacccacttgcatccaatcgggtgttttcctgcaggtaatgtaacaatgatccatgtatggttttcttcaagagcaatgatctcatgatccatagcttgtaaccatttgggatcagttgctgcttgctgatatgtggtgggtttaaaaaggctcgaaacagcaagaagaaaagctttgaaggcaggagagagcttgttgtaagtgagtgtagttgagagagggtgagatgtagatgtttttggctgggaagaagtggatgcctgagctaaagagcagtggtaatcctgtaaataggatggtggtttgattactcgattggatcgagtaacaggggtagaggtggagacatcatgtgaaggattggtactttttgaagcctctggtgtgacagacgaaggaagaaaattatcagaaaaaaatgaatgtgggagaatggtacagaagtacccgaagtataaggaaaggttgtctcataaaactgaacatccctagacatgaatatccgattggtatgaaggtcaagtaaccgataggccttcataccattgggatatccaagaaaaacacaagcaatggctctaggagagaatttgtttctatgactagggagtgttgaagcataggctaaacaaccaaaaacctttagatgagagtaagtgggaggctgtttatgcagcagctcatagggagatttatgatgcaaatttggggaaggggttcgatttatgatgtaggcagcagtacttatgcaatgattccaataacagagagggatgtgggactgagaaagaagagcccgacctacattaagtaggtgttggtgctttctttcaacaactgaattttgttg

SEQ ID NO: 312639 - DNA, 1080 bp, Cannabis indica
ctttcaacaactgtaattttgttgaggacgctacaacacatgagtagaaatgttgtatgcctagagagtaaaggtgggaaattgtaactctttagcattatcagatctgaggcttttgacttgggtattgaattgagttttaaccatgttaaaaaaatttggaatggcctattgagcatcagatttttgttaatgaggtgaatccaagtatacctagagcaatcatctactatggtaatgaaatacttataaccttctgtggttaaagtattaaaaggtccccaaatatcaacatgtatgagatcaaaacatttcttggaaatgttatgattagaaataaatggtagctttctttgtttggcataatgacaaatagagcaatgaaataaggaatcaaaaagagactacaaacaggttgtggtctatattctctaatctgatcccaaagagacttgaggcgtgtgaaataagttgtgacagaattggaaccttgtattaaattctgcatagtctttttagcttcaaaaatccttggggcatttctttcataaaatcgatcatgtagttcttcccaaatctcagcaacattctcatggtacatgatgctgtctgcgatttcacttgatatggcatgaagaatccaggagatcactgtgctattgcatctgcaccaagcatcatactcctcttgatcttcatcaggttgaggcaattttccattcacaaacttgatcttgtttcgagcaactagagcaatcatcatcgatctcctccatgtactataattctcacttcctgtgagaatctttggaactaaaacagctccaggattgtcaccgtttgacagaaaataaggatttgaaagatcgttcgcattcgtcgacttcgaattctcaccaagaacagagaactgatttgaatcattgtcgtctcgagtgcttcgagtttgagttttttcttcttgcgccatgaacaatcaaagaaacgaaggaagaagaagaacaccaaaaaagaaatcgacaataccacacttcaatggtggctctgataccatttcagcttgaacaccattagagaaaa

SEQ ID NO: 312640 - DNA, 1114 bp, Cannabis indica
tatttattttagcgaaagactaagccgaaagtttccaaaaactgatcggaccgtaggatcgttccaaaacacgccgtaattaggagggtgttttataaaatcttctattattatctatttatttatttaaaaaaatagttctaatcattttgatttagtttatataataggaatgtagataattttaaaaaaggaaataacgggactatactcattataaaaatctaaaaaataaggttcttacaaaaaaaagaaactgctacttgttactgttaacaatactctcactaactctgttaattttattgtgcaaacttaaataaaataaaattaaatgatgtggcataattatattagttagacataccatgggataccagacttggacaagggatcttgattcaatatataagaaaactttttttttttaatttattgaacaacaagtttgactaagccagtcatctgtctcgcatgcttataaaggatatagaaggaaactgtttttttttttaatttattgttgatgaataatataacctttttaaatatacaccaaaaagtaagtataaactgacatacatacagacaaaatcattatataagattctaaaaaatatatacgaaaacccttattattgaaactctttaatttgttataactaaaaattatatatatattttataaatgaacatgcacatattagtgaaagttttttttttagcatagacttggcatgcattcatgattctataacattaataatgatacattagtaattaataatgaaaatcaccatacataaaaaattataactctaaattaaatgcaccatgtaatgtagctagttattgcacttatataaggcatactattatactaacatgaagattggttctcaccaaatcatttgcacacttagaatcatacccaccaaatagaaaaaaaaaaatagaaaactctaaggtcccagaccatggaaatgtcactactacaaaaagtatcattcccgtcggttttcaagtgtcatttaaagaatttacgtcggttttttaaaccgacgtatataccgtagacgcaaatagttttttattagcgtcatttttgaaacga

SEQ ID NO: 312641 - DNA, 2730 bp, Cannabis indica
gtggtacaacacttagtaattctcgggagtacagttagggctctaccaacacaagtacagagttggtactttagtgcatttggtatagtagtcgtactacccttaagaacgttcttaatcatttggtgagcttcgttgttaagctcagggcagcttaatcataaagctggcagcgtgttacttttatatatttcttgcatatcttactgagtctgttgactcatcagtttgctaccttgtgtaggtaaaggaaaagcaaagctggaggaacagtgaggtggaactcggcatgattgtacatatcgcggcagtgcaacctggagggtttcggtttattagtattttggagtctgtattttgaggatgcttgtccgctaaattttaaaaaaaatatatatgtatatgtacatattagtaaaatacttttaactagtattttgatactcgggatcccgatccatatgattattaatatattaattattaaaattagatttcggattttattattataaaatacgggcgttacagtttaggtcccccaacctcaaatattttacattaatttttaattcccaacctcttaaaataaacctaaaatacaatggtatagtggtccttccaaagctttctcgagagacaacttgatagtccaaaacccaaaatatagcctaaaaattacattttttttctcttttggaggtatatctattcttacaaaatcaaaatatacaaggaataaaataataaactaaagatgatcatgctgagaaaatcaagatttatttattattattatacttacgcatgcctactttatgttgcaaatggcagacactatatatatatatatagttatatatatatactctgcaactgcatatatatgcattatttgcatgcatgtttcatacttcaaatcatgagcagaacactactattatatacaatatctctacatataatatgttcccagctttctaatatactactgtacttccaacatatatactatagcaattgtgatcatttttcttttcctctatgaactttttacatgtaataaatcgcacccttaatttttgtaaaactatttttttttttaaataaagtaaatcaatattagacagataaatctgctaatacaatggactgaagagcaagagaaacatcactctctaaaaaaagatgacttgaccaataacaagcactacgtgccatatagtgcgcgactttattagcaaatcgtttaacataaccaatattggaaacattatttaaagaaaataaaataatctgacaatcttgaacaaacaaatcaaaaaaagaaggcatagagaccgagctaagaatggcttgaacaactaaaatgcagtccgtctcaactatcacatttgacttgttattcatctttatccaactaagcgcccctttgacacttagaatttctgcaatttcggggtggcaacttacggtagaaacagttgaaaacgcctcgagaatctgaccatcacagcgcgtgctacgaaaccagtaccaacctcatttgtgtcttcaaaaacagcctctcacaattatcttcaaactattaagatcgttggatttaagaattttcgttcaattttactaatggatgcttgatgtaaataaaaactcaagtaataatttgatacatatcaaatgtttggggaacatgatttagtatatggataattactacattaatataattgaatggagttagataaaaattcttcaatctaacaattttaatagttcagaaaacacgatttgatacatgtattttaatgttcagagggtacgacttgaaagatggataattactaaattagtaaaactgaaagaaattatagaagtctttaaattattcaacaatgttaatagtctgtgaagaatttttaacgacttataaaatttagaaaggcacgatttaatacatgtcattcggagtacaaaaatttaattagcctaaaaataatgtgtttagtccattgcttaggttgacgtgatttgtaaattattcaaactaaactatttgagactagactaaatgaatttagtgtcaatagttggttaatttggatcatttataattttttgattcggtcacggttttaatatttttcacagtcgttcaaaccaaaccaaattacttaatttatatatatatatacatatttaatattaatattagggaataatcttaattataaactttaaaaagaaaagaataattatgaaatataaactataatttcaaaccaaattaatccgtgaattcatgtgaaaaaataataatatatatatttactatgatacatcaattataaagtatttacatattcttctttagtatgaaattaagaaagtaaaagcacttatttattcacataatcacacacatatcaattaaatgaaagagctacttttaggaaagaatcaatgaagttacaaaaaaagatataattttgtaatatttttgttacatatattgttctttctagtatatatagtttggtataattgttacaaatctatggtaataattccaattaatctatatataaatacataaacatgtatcgagctacttaatcaaaagcttagtttaatcattctcattaaagaaggaaaaagagtgacaaaactaagagaaaattagtgtattcatcatagaaaatgaatggctgtgaaatttaatctagcaat

SEQ ID NO: 312642 - DNA, 1454 bp, Cannabis indica
ttggtcacgaactgcataacactcatctcaccatctttaagggatatgttttctacaatgatagttgaatcagtgaggtatgctgttgagtttgtacatgtgatcaaatacttgggttccaagtaacagttttccccactgccgaacgggaacggtatttcaacatcaccacatctgtccaggcagctacttgtgttagtagtttggctattgggaatgagaaacgctatgatgatgataatgataatgattatcttcattatgaataaagaagaaaatattgacaatgaaaataatttaagttatgcatatgtttgtctctataaattctgtttccgcgttcaaataagtctaggtataggaactagaatagggtatattatagttaggtaattagtctttatcaatgagaattataatactccatatttgtaaataatctaagcccctttgtctttggattagaggtagacatatatgaaaatgaaagaaaatgagactcagtcctgttctatttagtaagaagaaaaaaaatgtgactcattgcgatcgtctaatgaggaaaggcattattcaagaaagcatgtttagtcaaacgagagaaataaaatggtaagtcacgaagttgaagttgaattgtttaatggcctcgcccggccggcccttacaggaacgctgctgctgtatgaccaccaatatctgactttcatagaatagtttgggatatattgctcactttattttgtagagcattgctatcaatcaatgtgcctaacatcataccaatggcgtgttgtaagtagttggtagtattttatattatttattaaatcaaaatgtggaggactcgatattgaattgcacccacctatacagtgcttggtacctcagtatttttctagtttaaaccaatcatttttatataaaatatgtcacagttgttgaaaaggactcactttataagtgttatttaagtttgtgtgtaatttatttgttaacatatcattatttattattattttttttatgaaatatgaggctaaatcccattaggttttaatttatatacccttaactctttttttttttgtttagtaatattcacttaattttatttatgtttgtaaatttaaggcattatttaaattttattagaactgtttaccgagatttttgaagacaaaataaaatataatataaattgaagaataaacaatcaatagagggtgtgcataaatcagtccaatccaatgagaaccgaccgatccaattacaactgaccgtcaaacattggatatccaattgtgattggatcggattggatgttatttttaaatatccaattgaatcagatcggatggtggatgcggtgtctaaaaatccaatacattcaacatccaatcaaattaattagtattttcatttagtttgaatgagtacttagattttatatt

SEQ ID NO: 312643 - DNA, 1168 bp, Cannabis indica
tgtgtagtctcatacctacacagtcttagattcattacacttgaccttccccaggcggtgtgggattacacaacctatctggtatttttccttacagatcacgggaactaactatcacaaatattgggaatttttacctaggttgtatttgtaattcataacatgataataaattgccattgtccatttgttaattgaataggatgaggaataattggaaaattctattacgggttaataggaatgatgatttataatttatctgcttaattgtttactcattgttaaaattctaagttttattttttttcattattaattgtattgctagcatttcattatcatttatatgtaattatatttttcatgttacacaaaatctaaaattttatttaatcagagactaaagattaattgactagtaattggtaagttagtcttcgtgggatgatacttagtcttaccaagaatttattactgaaagaaatatgtatacttgcgtagcataaatttgcaacaacaacccacctaaaatatcattcttgactaatatacaaatcctactctttttgaccattaattcataactatcaacccacatttattgatatttattcaactattttttgcaaaataatcatagccacgaatattcaaagctttaaaagagattaagcttttccttaatgtctcacgctagtcagtattctcataacaccaccaaacattttcaccttaatagtttatattttaacaactttagagctaaaattattgtccatcaaacagtacatccatcatataccttataagtatcacaagactccttatatggatttatgtggaatgaacaagtagaattcaaaacccaagagtacaaaaaaaaaaaaatcataagctatgacagagagaacatcaatcactttcaaaatcttcaccaaaacattagtggaatctaatgtgtctttgcattcttgatttctcattcctttaataagttatttggtcaattcttcacatctcttcctaacatgtatttttttatgacactagtagcattccatttctctttaagaatgtgaatggggtgattttctcttctgtctgttagactttttatttgggtttacattaaattttattggttttattaaaacttgggttgatt

SEQ ID NO: 312644 - DNA, 1446 bp, Cannabis indica
atgtataaatagttgtcatgatagtacattatcacatatgaataaattatattatattgtgtattatgtcaattattatattaatataccttggagaagataattaatatattatatgttaatttttttttaaaaaaaaaaaaagttgtcacatatcacattataattattaaatattttatgtaattaaatctatacaaaaaaaaatatttaatattttatataaaaaatattatttaattaaggtgtcacattattattatttaaatgttaaatactaaactttttatattaaaatgtttttaggctagctaaattgttcttgataactacaaaaataaatctgtacttgataattacaaatttatcatatctttttggtaaaacaaaaatatctataactaagaaataataaatcacaagttaaaaaaaatgatatatgtaatcatgttactctatgcactaaaaaaaactatattattattattatatagtgtgaacacatatagatttatttattgatttgtttaggattttattaaaataatttttattaatttagccaataaacctgaaacaaccacgagtaattatgactaaattattttacctaaactagattaatattacgtgcacatatatttttataactgtaaattttattctagacgaacttaacctcaataatatcagtaatataaaatagataagaaaaaaatacgatcagtatataaataagacgttttaaccataagtgagcatttcaattttaaattatcatttaataaatagaagagcgtgttaatcgtttttgtaaattatagtgttatactcatttttcgaagcaataatgatcaactcgaataatgtcaaacatgccatggctaatctattcgaaattgataaatatgagcattgctattgggtaccagtggtgcctaacacccttaagacgtgtcaccttgcgattggctaacaatatactctctaaaaattattatattaaattatatgagacacgatatttagttagaccaatagcgattttgacgtacataagaggatacttggtaccactagtgtcttttagcatttttctgataattatacatacgtaattatggagcaaataaatgtagctcaatgttagtgatcatccaacaaagatcgtaatgtttataaacttatctagataatcccaaatcaagaccgaattgttcaaaatatataatatatagtttgagagatattctactaattaactcgataaataatctagtaagtgatcataattataagagaaatattaaagggcatcagtggtgtccagtatcctcctatatgtcaatatcggttttgatctaattaagtattggctcccggccggctataatggtgtgcaaggtgggttactgcatgtaacgccctaatgctaaggcacgctac

SEQ ID NO: 312645 - DNA, 902 bp, Cannabis indica
tttgagcaccgaaaaatatgggccctaggcacgggcctagcccacctatgcctagggccggccctgcttatgacgtaattgccaattttcgtgtaattactaggatagttacatatgggtaattgcttatagtaaaatagtaagcaaatgtactaacaaacatgtttttagaatttgaaactccaatatctttttctctttttttagagaaaaaacagaaatatttattaaaaagtaaattagataaaattcattatataaaaatataactcataaagcaaaatcaacaatactaggcaataggcataccaaataaaaaaaatcaaacaacaacctcaattaagggtctaataagcctatagcgatcaagtactaaaatgtgaaaaatactaaatttctatcaaatgaacattacgagagaatcgacctgttaataattattaactaataatctttcaataaaaattaagacataacaacctcattatttagatcataaataaagaaaataatatgaccaactatgttgtaatgctcaatcacaaaagattagagcacaaaataaagggccaatagacatatatgaatgacacaatgagaaataataacacccaaataacttaagccaatcgataaatcattgactacccaatagagattaagatcttcttcgtgcttcaaatcaatcaataataatctctcgacatttatcttggcttcgtccctactctttcacccaaggaacgaatgagggcttctaattgatcgatgaaaaaaaattacgtaataaaccaaaaattacaaatatacaaaacacaaaattttttttatcttttaacgctttgtaactattttatttacaaaaatacattttcagtaaaataataaactattttttagtt

SEQ ID NO: 312646 - DNA, 1348 bp, Cannabis indica
gtctaacattctcaggtccaaactatcaagatgagcatgtccttcaaaactgattctccattcccatttttccaaagaaactacccaaaactgagcatgcacgatctttgaaaaggcaactcaataggttggttcggataggacagggtattgattgcaatggtggagtcagattgaaagattaccacattccaagatttttccaccccaattcaacaactcgaataatggctttgatttcagcaagagtatgatccacacaatagatttagcaacacaaaatcccaagcacttgttcatgacagtcacaagcaataatagccaaagaagagtgagaagtacctacatcaatatcagaactgagaagtacccaaactagaggaggaggatgccatgagtacaacaaaggggagtccataacctccgatacctcagcttgacgagccttaattgatttttccaactccaaaggagttctacatgaattttgtttaagggccttatttctttccatttaaattgagtcaaagatgataaaatagttttgaagaaactcattaaagtttccattggaaaatgttcctacattacgccattgagaatacaaagaactaagccacgagctccaatcaaccaaagggaacgaagatgcatgaaaacgtgtagttgcattcccaaaaaaaaatgagttgcattctcctccatagatttacacaacaaaaaatttctatcatggattgggagaatccaagccaatctagctcttgttgtaagcatatcaaaaatattttgccaccatagaactttgaatctctcctaaatattaattttctagattagaagccttgtatcactatcaattcatgtacaagcgtttgttggctttaagagcttcataaatgatcttattgtaagaaagctgtaaagaccgcttagtttaatttggaaattagtagatagttagggtttaattatgaaaattatttattgatatttaaataattatttatgttgatttatttgaattcagaatgcatttttatgtcatatagtgaaatttcataattttgtatttttggtgcccgacaacttagaacgcggtgtatggctcagtagaatcacaatttaatattttagtatagcggggcagtttatttagacgttgggaatgttgggattggtcgggaatttagaatttcccaaaatacccttagtaccccttttatgttattttagtgtggaggggcaaaatggttattttgtcccattgatattttgtcctttagtggacttagttgcattttgttttcagcttgtattatctatgtttgttgaaattaattcaagt

SEQ ID NO: 312647 - DNA, 1547 bp, Cannabis indica
tttgcatgtccactacaaggggatcgattgtgcggatagatcacatgattggaatcttcatcactgaaagttatgattggatcctccttgtgcgactgcttggactttctctcttctacatccaaaacttcatctttctgctcgtactaagacttcaagcatgtctttcccttgcgtttctagaatctccagcaatatgacgggccccctacgataacttgcaagcatatgtccacaggtggaggtattaagtagtttaagttattttctgtctaagcgaccctttgatcttgattggtctttacatacctttgtgtgtgcgtattgttttttctttatgagaaattcaatctcttctttcagattcttgcactcattaatatcgtggtcttagtccctgtgaaagccgcaatacttggactaatcccttttacttatatacttcttccttggtggaggtcttttgtacgacactacggactctattgctgtaaggatggtctttatctcctcgattaagatagtaaaggcagtaaactttaggtccttcttacgaggatgttgatgttcaggactattgttaaactttcccttcttaccattcctgtgattatttccaccatttgaccttttttcgctctggctatttccagcttggcttaaagtgtgttgaattgacgtaccagtagtagtaggaatttggctaatctatttttggcttgcaacatctactcttcgagcagttgtttgaactgcctcttctagctttataaatctacctgccctgtccaaaaattttatcacagatactactgttagcctcttgatatctttccataaatccctaaatggtaaaattcctccgagtatggctgctagtctttcttctgtggtcaagcccttgtagcctcggtcataaacctactgatataatatccgagagattcatcaggcagttgtttaactctaaacaagtcctccaagtgaatagggagttgcctggaagatgagaattgtgcatggaattctgatatgaaagtgtccatgaatcaaaactttcccagtgttagcttgaaataccactaatgggtggcttttgccaatgtagctagaaaaactctacaacatacatcttcgtgcattgcctgtaagtccatctgcatttcaaagtacttgatgtgggataaaggatcctctttacccgtatatactttctgtgttgtcatttttaacttgggggacaaatggagtgcatttatacaagcagtgaatggtgaaccttgtgcttggtcgagttctagggcggtgagtgttgcgaaaattattaattactgcgcaagtgcacgcaatcaagtagtatactcacgcaagtgaggtcgaaccacagggaattggattaattactactaaactatacttataattctatttggcaaatcaaaagtatttatgattgaaaaaaggaagaaaaaaattcaagaaacttaaagaaacaagcgaatattaatcaagatgagagattagggagacgaatcctgttgttaagt

SEQ ID NO: 312648 - DNA, 755 bp, Cannabis indica
cttctttgtctattatttacagttatttttagtattatttaattatcaatttaagcttatttattagttaacgaaaatttgagttaagaattatatttttttgttcgtactagaaattaatttcaagttagttatattaaaaaaattgacgaaaatcgagtttagagtctattttttactatttagaaaaatataaaatttgaattatcatttaacaaaataaaagattcattctataaattttgtaaaatacaaaatttaaaatagtatatttaccctaataatattggaagacttgactctctaaactctaatgcatgcatggagcagaaaagttatattgtaaaattaataattgagataattaattagggcacatcaagttgaacaagttgcaattagttggactatttattgggataaatatatagataaggtttccccacagataaaatatattatgtatgatataccatataattatctaaaagttattaatatatttaataaattcataataattaaataaataaaaattaaatttaaaattatcttgctgggacaatgacatatgtcatgttaatttttttttggttggatttcgttgtcataaatagacaagtattgtgtgtagattgtttggttggttaaaagtttgagaaaatgaaaggagtgtttcagtaaacttcttatttattttagcatctaaaagaattttttagtatatttttttttgtaatatccgctaactctga

SEQ ID NO: 312649 - DNA, 1072 bp, Cannabis indica
ttagttagttacgacatatatttataataaaaaatgatatttataaatataatatattagctttgttgtaatgattaagctaaattgcatatatgataaatttcaagggttcaacttctactatgaacacttttttcttctttttaattttacttttatccatgccttacagaaaaaaaattacatccttctcactttaaattttgaatctgtcattgcttagttcattacctaaagtttatgaatattttgtaagcactatcttgtggaaaggatgctcgacaatgttagagttaagggtgctttaaaaaaaatatttttactaaatattaaataacttaatattaaaaaataatcaatccaaagtaattaatttaatctgcattttcacatattgaattggatctaaaatataaaatctacaattaatgggaatcgaatgcatattagcaaattagtacggatggaattagataaactctagcgtttggttgggaggaatgaaaatataggaataggaatgagaatgagaattggaataggaatagaatggaataaaatttaaaatacataaaagaattgataaaaaaaattattaaattttttcaaatcttgcattggaatgttctttccttctattttaaaatggaatagtcattccaccaaaatgatagaaaggccattccatcgtaatggtattccaatggttttaataaatgcaaccaaacaaaagaatggaatgaaaattgtttcctttctattccatcttattttattacttccaactaaacgccaacttttatttgtaaatgtaatgggtatttgactcatgtcaggggtcgggtgtatgttaaatttggaagtaactgtgtaattactaggtagggtaattactagagtagtaactacacaatttagtaattgcactatattttaaaatgcaagatgtgtttggatatgaggtggtaattacatatgaattcttaatattttatttggcaaaatagttagtaattacataggaaaataatattttttaaaagttaatgtttaatatggaaagtttttagta

SEQ ID NO: 312650 - DNA, 939 bp, Cannabis indica
attttcatgcaaactctaacacgtagatatacgggtaataataaggcggctctgtgtactgattaatttacagtttttattttttattatttttatcagtagttttaaaaataaataataaatttgtttatgaataacaatcatttaatttaatgatctgcaccagaaattaaataattagttgatgttaccgttttggcaagttgtcaacactctagtagctcccttataattaagttatatataaatatacatattatttaaatctaaatgaaatgtgctttatttatttatttatttttgagttgcagagtagctgaagagaagtactgaaacaaaaagattttgttttatgtttattttcttaaaatgaaaactgttaagtgtgatttgtttttttttttatgtaattcttgaaaatgtttccattaaaatattgttagaataaatttggtcaattacgtattaaacatagcgcatctaatttattgaattatagagtatttaagccattttcattatttgagttttgacgtgcatatatatttttatatatattattttcgatatgtattatttcccctaaaacaaaacatataaactatttcgctaattaaaaaatgtatttctctaaaaatatctaaactattttttattgcattaacaagcgttgaagagttctagatatagacatcaacgttgaatgtataaaaactagaagattgcaatacaagggacgtttcagtatattaaaaaagaagttggagaaattataattattttttagatatatatttatgatgtagtatattataaattataattatttgagtcattctaataattttatttttagtttaaaataaaattcagtctctcaattataagtatatgtaaacagtgacgaagccagaaatttagttgagtgagggcttgaat

SEQ ID NO: 312651 - DNA, 1103 bp, Cannabis indica
ttgttataaacaaaaatatacataaacaaacaatagcaagaaaaaaaaaataaaaaaaatataaacttaataataaaccctaaatagcaaaaaatatgcaaataagtgaaaaaaaaaataaatagagaacatacaaaaatgtctgtaaaattaaaattaaaattcagaactaattgaaactccctctcctatagatgttggcctgaccaactggtttccctcaccggcaggctagattatgtgcaacactgatgtttagaaacgacaaaggggttattgtgggcatccacactatccacatctgccaccacgaccccctggctggggaaattgctaccctctgctggggcgctgaagttgctacctctgaaggtttcctcaatgtcatcttccaatgcaattcaacaaatgcggtggctacaattcaacagaaatcaaaacacatctctaacttgcaccacaacattcaggatttggtaacaagattctctaatctaaccaacaatctcaatctttgggaggctagttggatttctagaaaattcaattgtgtggcccataacgtggccaaatgggcattgcgatccaattactttgggaacatctatttgtccaattttgacagctccctgttcgatggttaggcggatggctgtagcagctttttggcttctttttgttctcttttacttaattctatttgtgtttcttagcatttaaaatttccctgtagtttgttcggatttgtttccttttcttattgttgttgttttagttgctctgttgaggcacctcttataaaaaaaaatataaaaaaaataattaaaatgtatcttagtttgatacaaatataaaagattaataattttttaagaaatggggttagaattataaggagttcattcattaattaattttaatgcatcgtatttatgtgttgaagctaatttaatttttccattagtcttatcttttgacatggttctttagtcttgtcttttgacatggtttttagtcttttccttttagtttttctggttcgagtcttgtcttttggcatgggtttctaactcagaatcatcatggtgttatggtgaagcatt

SEQ ID NO: 312652 - DNA, 3651 bp, Cannabis indica
aagtatttttgttttaaaataatgagatctcattctttattttattttctataaattagtttattgtttttattataaatggttttaaacggactagcaactgtgacgtctcgggaaatcggggtgttacataattcccagcttgaatctatgtgacctgctttatccaacattgttatatacttttccgtaatcccatagaataagctattacaactaatttgaacatgaaactgtgggtaccaactatcaaacctatgggatatgcgatctatgaggagagggttccaagtgaaaaaattataccgactatctcggaaagatactaaggtaatatgttcggccctaagcactataggtgaccacccacattgattacctcgggatgctctatctacctgaggagggactctcatgagatattgtgcgcgagccacgaggtcttcactttccacttcgtctaggatggggaccttttgccatgaagtatacttgggtattttgtaatcacaagtatattcgtctgaagtaaggaggccaacattcttcaagttctgctcatttagaaagaaatctgcagctcacaacccatatggcaaactctgcaggtttttgtgatgctcggctatctctggcgtagggattagtctccgaggaaccgctgcaaatagataaaagttcagtaagcagccttaaaattataagtaaatttttttatatgttgttttacgaggaagagaacttacgtatagtgtgaaaggcagttgtgtttattgaagatagacccgtcgtccagaagaagtcttctttaaaatctgtcttgttgagcaatctaactatgatcttgcgatcaccagtataagtcccaagatagtagaaacctcacgtagtgtttttcctcgcgggaactgctttgacagagtaaaagcaggctatctccaaaggagtagggcactgccagcgtaagatatggtatagaaccttgaggttcgcaaggatcctgtatgagatagggttcaactggaatggtgcaaccccgatgtagttgcagtactccttaaagtagtccctaaggggaagggccgccctagcctagatatgttcgaggctccaagcttaaacacctgaggagttactcgtgttgggtccaccacactcctcgtattttacttttttggggggaaaacagctgaattccctaggtaccacagaccttataatgcaccattttcactgtttaatgccgcaggaattcaggacaccaacgacgtaggccccaatggacctaaccttggactccataagttctgcctcaaaagtaacattggggtcctatggggtctttgatttgagagccttaggagacatgatttcaaactcaaggtcacatggttcaaaagcaacaatgacttagggtaaaaatattggtcttacgagtggaatagaagttagtattgtgggttcaggataggccgcgtctcgcaagacacgacgctttcccttggaaatttcttataggaattgcctataatggctggcagtctcttcttggctcgacttaatcagatggtctctagatctggcatcatttacttctattttggattgaggttcaaaatttttgggtttatatggagaggctagatgtttaggatattctaattctaaaaattctggagaataaacttctgaaccagattgggacatttctacaaaataaaaacaatcttaatttgtggatgaaatttattaaaccagattcttaaggaatatgacaaaccttaattatgtctaaaccctaaacatcacccagaaataatgaaacctaattgttaaaccgaatgaagtgacgaaatgcaagatgatcataacccaaaaaaggggaaggaaaacggatgaggtacttactgtgtgaagtcgaaaaactgggtgtcagagaaatctgcaagtggagacgtgatggccggcgagatgagtttttcgaacaccaggagttgaagagcaagtccgagtaaattcccaggaagaatgttaaagataaggatggcatgcacggattagggaagcttgagtgaaaagtttcagaaagcttaagtttttgaagaagacaaaaatagtagaaaaatggattcttactgttttatactccaaatttaacaaccatcagatcataatataaaagaactaatggatgaaaatagaagagaagtggaaatgatggttcattaatgctattgatgtgcattggaaccataaagttgccaaaatcaaaggcatgcataatttcaaaatgaattatgacaaaaataccctcaatgattatgtaaaaagcaccttttattaaaaagggactttgtaagtggcaattgttatacccaaaatttaggtggcactttagaggatgacatgtgttaaccttggagaatatgaatcaacaaatataattgcatctatatttgaaagatattaaagtggaataactcattagatgcgaaaataataatgcacatatgtaactcgctgacagtatagtcttgagcgagacaaagatgtacaaactattgattcacgtattgacgagaaaccatttttcatcagaaggatattggtaatgcatagcgaggcactcacctcgcgatatacgattagcgagacacccatctcgctataggaaggcatactcctggtaccttcactaatcagctccaaaaatattttaatgagatccactgctccgtcgagttagctctcttagatagaagctgacattcaaatgatgttggctgctgtagctcaccttgtcaccaagaactgcgattgtcagatggagtgttatgtcttcaactgtagaaacgacggcattacattatcaatctcggaaagacataggaaaagctccaactcgctgtcaaggttattgttgttattccagtgagatgccttagcaagatacaccttgaagcgtgatcaaaaccacgtccgcattggcccgttaaaaatggataaatcatagctgtgtaatttttaaataataatcacatttattctatgtgggacgtaattaaatcccataattttagggaaatattattgtgcgatatgaatctgattgtaattaattgtcaacctatattactataaataggggcagaatgtactgaaaaacggatgaaaaattcttgcgagaaaaaatcctagttttgtatcagaaaaatctaataagataaactcgtggaatatgcaaaattttaattgcaaaataaaaacttagtgtgatctttacattattcttcttatttttaatttctattatttctgtgcttatcctattaagaaaataggctgatatcgttaacaaaaatctgcgttaacagtaaccatcttcataacatcacattgcctaatcagacaagtcgatgcttaaataagataatcctgcattgcattgcctaattaggcaagcccgtgccatagcctgacacccatatattgcataactgcatcacctaatcaggtgagcatgtgccaaaaaccctacacccacatatcatataattgcatcacctaatcaggtgagcccgtgccacaacttgacactaatatatcgtatcgcctaattagacgagcccgtacctacgcccgatacttatc

SEQ ID NO: 312653 - DNA, 1713 bp, Cannabis indica
ttttacatatcaatcaatattcaatctcactaggttgtacggtttttaaattttttaatctaatccaattcgtacaagtgcaaatatccgcactttgtgaatttgattggattggatcgtgtagactaaattggatcagatattttatgaatatccctaatcgagccagtcccaaggagtgagatctaacacccacacgaaccatgcactaccaaaacccaccataacgggagcttcgttgtcgcacagagagatgttgggttcccggacgccaccaacccagattcgggtgacgacgcccatgagagcataagaaaccctagaaaaaactagaaagagaaaagaagaaaaaccctattagagagaggaaaacacactcttcatctttataaatgcatatgatttttagaaaaatatttgaaaatttaaaaattataattataaaatacactagggtatatcataattacaaagcttactttttttttatatcacgattttataaattgtaacaatacaatatttttgtaaccgaagattatacaattttttttgtaataggtgaagtttttatacaatttttaatcacatgttacacatttataaatgatattcacaaactaaaccgaaaatggttagagattataaaattgttacaaattattatccatatatctgtaatttattactttaaataagttatatttttttaaaaaatatattaaaaatataattttttttaatttgtgcttatttaatttgtaatatctatactatatatataaaatatagctatgtaacagaattcttggttgatcaattgtttacttttatttaatgggaatttaatggccatggcgaccacaggatctgacttgtcgggagtgtccttttctctagcaccacctttagcaagttatcctgatgataatctttcagtgtgtactaaggatcatcttttgaggtctcttgaggatcgtcgtcagcatcattagaactgtttttttctgagtcaccatctccaaatgcaggagcgtttagatctgtatctttgccaacttaattcttttgatgggtagttacctcattctgatcttatgcatctcctgtcttggtttaagatcaatgaagtgaagaccaaatttgttacgggtcagtaccatgactactgtgatctttagatagtatcactgtttccttcagctctcaatgaaagtaccaaaatatttatcgagattttcaaaaaatcaattataaataattagaactaaagaaataaataatttaaagagaaaaagtaagaacaacacacaaaattttacgtagttgggtaacgagtcttagtccacgagtcgatattattacataactaaaaatagaaaagttgttgggaatacaatgagcgtaagttttctatttttcctgagcaattcttgcaagagaattatttaacccttagtctaaaggattcattaggtatctatagtgttaagagtattacacttaatttttctttttctctctaatgaggagtttacattgaattatataattgggatcatttcacaaatacacaaaaaaaaaaaaaaaaaaataacaaaaatacagtttcacggaattttaaatatttttacaatttttttaattttaatatttacagaaaatacagtcttttatgttgtactcttgttaatttgttgttgattatttgtt

SEQ ID NO: 312654 - DNA, 789 bp, Cannabis indica
atacttgtgagtagatctaagttcctggtaaaataatttccaacacgggcgcccaagccctacccactatagcagttgctggccatgagtagctacctagaataggattagccaaccaaggccacttccccaacctaggagtggctagccatagcctaaaccaaggcttagggctggccgggctcgagcataccctttctagcggtatggctagtaaaactgtggccaattcaaggcttcagcccatcaaagatgggccaatctgtgaggcccctatagcatcagatcccctatagttggactagataagagacatgatgaagggcctagctggatagatcaaggggttcaccattctggacatacataaattccttgcccttgcccatgttcaagatgacagtatggaagatgtatacttgacaagaggactcattggcacacatgaagtactttaagatggaacttgatctctagaagattactggtcatgtgcagtgttggatcttcgaaaaacccctgtcaaaaatagctcagtaatggtacttcaagctggctcaaggaacactcaattctcagaatgaattttctttagaattctacacacaattcgcatcctcaaaactgataccatcatagctggaagacattgtcgaggttaaacaacgacaaggagaacctttaaagaattacatccaatgaatcatgctgaggccaccaaggtaaaaggcctaacagaagaaggtcagtatacggtcatactaggggacatcctgttgggttttatgc

SEQ ID NO: 312655 - DNA, 1505 bp, Cannabis indica
tcatatactgtaccaatgcactcagcactaataactgtactagtgttggtagtatatgaatcacataaactgcatgcatataatacatctacacatatacatatacatattttatactaatcttaccttatcaaccctccgcgtgtccatatttatgagttaacggaagtggtagtaacggtgtaagagaattgtaatattaggtatttttgcctccaaaaataaacattaggtatttaagtgtataaaatctaaaacattaagcatttaatacctaaatatatatttaggtattaaatctcacaatctcaatcttaatagtttaaatatataattttaataaatctaaacagtacatagaccatatttaatacatattaaatctccgggcagatggagtatacggtgattactgttttctctaattgtgagcgggtaattcttcctgtcaatagcagggccccttgtttcaatgagtttgatattgttgttaatgatattaattatattaggaattctttcagtagcatatccttgtcatttttgtaatagatcaaagaattatgttgctcattttttagcaaaacgagtgttagatttagatgaggctcgggtatggtggacggacttatccactgatttagcttgataccttttaatggaatctctctctttcaaaaaaaaaaaaaaaataaataacttatataattactaaccaataaattgattcttcctttgttaaaataaatgatacatctttaattatttctttgttccctctttttatggaaaggacgagcgtcttggccggtgctgatttcctgctctgttttttaaattataagtttgactaatcttgagtttggagaatgaaatcaatctctttatttcttttttaaaaaagaataatagtcatagaagatgcaatggcaatctacattatcttatctacattagtaattgggtcaaaattaacgtaacatccacatttaaggctttgattttgctgtcctacttagtttattatactttatccatacaaaatgaataatcaaatatatatataaaaaaaaaaaaagtacgtagaaagaacgcgtaagtgaatttttattttttttttcttaaaagaaaagtagatgagttactaaaagagtgaaggaaatctcaaagtagagaacgtagtgtggtacagccttacaggtgtaatttcgttgttgaaatggctcaccaacaaacaactgtcgtttgatggtgctcccttaatcccactcactccaagtgttgtttgttcttaaaccttgggttaatatatataccaactaaattaaacaatttagcacgaaataaaaaaacttagaaagtatagaaaacgacatacaccaccacctacgccacttatatgaaactgaagtaaaatggaaaaaaatagggaatgaaagatattaatactaaataaatcattaatgttagaatttggaggtgtgtaaatgtatatgttaaacttt

SEQ ID NO: 312656 - DNA, 763 bp, Cannabis indica
ttttggctttttgttttgttttttggttttgatttaatatttttttttcgtctgttgatttttggttgtgttagtaaaaatagtacaattacttaaaaaaatatgaataattataaattctacttaaaccgtattttcgaaccaaaccaaattgttcttaatggtttggtttggtttgaaaattttattggtctggtttggtttccaaaattcaaaaaaccgctatactggttcagttctaaaaaatataaaaatccgaaccaaaccaatccttaaacacccctaagatcagtagcaatatcaatatgagctttcttaatattaaagtcaacaaaaatatcattaattagtatgaattttaattttggaacacctcgggttgtaattaccgtagcactccaaattaatttgaatttactctcttaaattatcttagtgaacaaagccaaggccggccagagggtggggcagccagggctgccccaggacccataatttttgggcccggaaaaatttaaactaatatatatatatatatatatacgcatataaaaactttaatatatataaatacttaattccgtaaatcgcatgaaaatcttatggcacatatggtaattgaggtgttctatggatgaagaaattgttggttcgatcttttttaccttgatttttatattttaaaaagttatatatgttattctttcatttcaaagtcctaacaaaaaaaaattataaagataattaataataatttaatgtt

SEQ ID NO: 312657 - DNA, 1099 bp, Cannabis indica
ttttgtgaattaaaaaaattaaaaaataaaaagtgttaccaaacggcaccttaatgtattaattttttaataatattgttaacattgctacctttatgtggtgttagatactacaaatactataattggatccatatacactagaagcaagcggagcaatccctaaataattaagaaaaaaatatctatatattttaattaattacgatatatatttatagtaaaagataatattaataagtttataatattaactctcatataattattaagttaaatagtttataagatagagattaatatagtttaaactctacgattatttttttctttttaagtttcgttttggcccttaccttacaaaaaattaaaattacacccttcactttaaattttaagtacgtcattaattatctaatagcaatgttcacatatatatatcttaatctaaaataaactacatattttctctggaaattaatgaatgataataaaaatataattatttatttaggcatgggccatatgaaaaggtgtccgaccatgcatgcctgtcttttgttagatagaatgtatttattagtatctgaatttgtgtttaactataataaagtcgatgtttttcaagaatcatcaaataaagaaagaaaaaaattagaaaaaatgctaaacagaaactcagtagtagttcatcatcattctcatcaataaaacttcttatagctagtttgttagaattgtggaaatgtatatggtatatattgaaaaagtagaatatggtaaagacatgagtaataatttatgaattatatatatatatatattgttatattttcacttagtaatatgatcagattttttaaaattccctttaaaatagtagttataattttacttactaattttggacagtttgatcataagtgatatttttgacttatagtggctcttttcggctcaagtttggtctagacatgtgcctagtatctacctaatccaaaaatccaaaataaattttcttcttttaaaattacatatatattttttttttactaattttactaaaataccatatatatattattttttttttaaaatt

SEQ ID NO: 312658 - DNA, 1694 bp, Cannabis indica
gtccatgtacacgtcacgtggactaaaataagaatgataatatatatatagggatatgattttgtcccgttattatactttcacggaatgtaatccgtgatgtacaacagccgtcagatgagggagttatttgatctgacggttgagattgatctaggggtaattagggttaaaaagtagaaacgtactctaacaatcatttaatgtaccttgagacccatctaatgtaccacggaatacattccgtgaaagtacatcgcgggacaaaatcgtatcccaatatatatatattcacgagggttcttattttttttttttgcaattattatttattatagaagttatttaattttttaaatatgtatgtaagaattatttttcaaccagagtcaaagattgacctttaactaagattgacctttaactacctgaattatgcatattacctttctatcacggcctggagatggtaaactatattagtattcttcccaaaaaaaaataaaaaataaacccctatattagtaaaaatagtgttaattcttaccttcaccaataaattaaatattaaatttggatgatcagtctacgcacagcacaagttgttgtaaattaaaaataagataatcataattattataatatattatatattattacaacatcataaaatgacaaggtacattactgagagactccattcaagtggctcatgttgaccttgttttgtaactcccatgctctactttagcctttatggtaaaacaaaacattgtcagataaagtttggctttggggtttgagaaacctaattatattattgtcttgttcaataagtacacaaacaaatttcatataatatatttatagcctaattaacttttttaactttttacagaataacatgatgggcaatcttagtctcagatactgccactgctcactgtgttccacgtcttaagctgctcaatttactgttttttatttttattttagtttatttttaatataagtccttaaattatataaattttagtaatttagttgctaaatattatttttttgcaatttagtttccaaattttattttttgataaattaattttcaaactatataaattttattaatctcgaactttatttcttaataaattagtccccaaactcttgtttttttagcaatattaagtctccactcttaaatatatatatatttttatttattttatatactttaattttttgtgttaaattcaaataattttatctttttaattttaatattttgataaaaaattattattttaatatttttattttaatttattattattataatttgataatgataatgataataatactatcaaaaatttaataaaagatattaataatactcaaaggtacaagttagaatttgaaagtgtgataaacaatcaagctaatacaataaatattgtaatttttattactgataggtataataatttatagtgattaatttaattaaatgactcaaattaattcttgaaaacttaaacataattaataattttttatttataattagttctaaatattactaattagctttaactaacaaaactctacacctaactgttgggttttgtgccctaagtaaaaccctttacaatctgattagttatcaatataagaaatttgaagtgatttat

SEQ ID NO: 312659 - DNA, 1836 bp, Cannabis indica
agtatttaagtgtataaaatcttaaacattaagtatatataccgcaatttacccttaaaaaaaatggattgtatcattatcatgaataaactcaaatatgtgacaatcaatttatatacttatataaagcaaaatcttgaagagatgatgtggcgtactatcatctttatttttttaatttatctattttaataggatttttacactagaatctcatattattctactttttccaataaataataaaataacttctcataattattaattatttttgtataaccttttaaataaaatgtaaaaaaattacattaaaataattaaaaaaaattataaaaaggggttgagctcgatcaaagcgcagcttaatttcctagtatcataataaaataaaatgtagagtaacaaaggtcttagaaaaattctaaaataatattaataatgaagaaaggtaaaacgaaaaagaaaaaacaaagagttattgacaacacttcatattttattcacttaactaaattattgttacatgtattgcatgtatacttggttatatttttattttttatatttgttatgtatattttttaaaaaaattttataattaaaagaaactaagtaattttttaattttgtatttttttaaaaaatatttaaagatataaaaatttaaggaaaataataaataaagtttaagaatattaaagttgaatgtactcctaatattgaaaataaataaaaaaaaaaataatattataaataatatattaatatttatatatatttaaattaatttagtacctaaatctttattttgacgtcggtaaattgtattgcgcacgcatgaacaccggtaacacttcacctgccaaattaaaaaaagcgcactaactttcaatggcacataattgtaccgacaaaaatttttagtgatcttttagccaacaattaacaacggtgggtcactttttgcttgcaaagaaaattatcggtgcgaagtagttttgctgatgaaaattcgtaaatgcaccaacaaaacctgttttaccgaccaagtatttgcggtataagaattaccagcatttatgcgtcgacaaaagtttactggcgcatttgcgccgggaaaagccttctttcttgtagtgaattagctaaaaacttaatcatctcatggttgagatcaactgatatataatcaactaagtgatgttgaatcgaaaaagatataacaataagtttattctctttttcactattaatatcggtccagtttgatgtaaattaactctatacatttgatccttgttgaccaagtgatcataatatataatttatattttcttattaataataataataattgttgactgaggttttcggcaaccaatataataatatataagaaagctgtaagaagtttaatgcatgagatgagccttagtccacgagtctttagtattaatgagagtatttattacagagaatattcttggtgacttttctatttagttcttatgaaacccagaattctcgacccctgccttaatgtgtttgaggggtatttatagtgtttttcctggggtaatccctagaattgtcccatatatatttctgtgtaacttcagtaggggtatgcattcctagcccatgcaaaataagaaatgcatggtctgttccctaggtattttagggattagataaatatactcatttatccctttcttgactgatatgattcctataaagtagccgtcagtaggcttattaatcatagcgtaatagctgcagaagggggttacgccgtcagactttaatatttatggcagtaacaatacgcct

SEQ ID NO: 312660 - DNA, 1461 bp, Cannabis indica
gtaagaagtatatcatcaacataaacaattaaagttgcaatctttccattagttgaatgtcgggtgaataaggtatggtcagcttgtgcttgtatatagccttgtttcttcaccacttgagtgaacctttcaaaccaagctcgcggtgactgtttcaagccataaagagccttttccaacctgcacactttgttttcaaacttatgttcaaagccaggtggtgggagcatgtacacttcttcctccaatcttccatttaagaaagcattcttcacatcaaactgtctcaaaggccaatctaaattagctgcaatagacaacaagatttgaacaatattaagtttggctactggagcaaaggtctcagtgtaatcaataccataggtttgtgtaaaccctttggcaaccaaccgagctttgtacctctctagagtgccatctccattgaatttgggcgtaaaaacccacttacagccaactattggagcacctttgggtagatcttcaactctccatgtctgatttttctccaaagcactcatttcctcaagaacagccttcttctactctggaacatttagggcttcctgtatattatttggaatctgaacatttgacacattggtggtgaaagtgataaaagaagatgaaagttttgagttagagacaacaagagacatgggatatttgacacatgatcgttttcctttcctaatagctatgggaagatcagattcaggactacgattagaagaaatagaagaattacctgattcattttctgatcttggttcagattcttggcatggctggacagtggtgacttcagttctttgatgaggaagccttcgtgtataaacacggccaaacttggtcccattctgctcattgcatactgtttgttgctgagatttattttgtaaaccattttctacctcacaaatatttttttcagcattttcaccaccattttgttcagtatttttggaattatttacttccagactttccctactgctaccaatctcttcaatctgcctttcattatgtcctaaatcatagcctaaaaaattcaggtctaatgtatgatcattaaaaacatttttggcaatatttttgaggttgtaatgaggattaaatctattatttgttattccaaaatccaaatctttaacttgattctccccctcaagatgatgattaaaaaatgggatgttttcaaaaaaatttacatccatggttacaaaagttttttgaagcgtaggatcaaaacatttgtaccctttttggtttgaagcaacaccaataaaaacacacttttttgctctagggtcgagtttactagcatttttaagtggattttttataaaaacagtacatccaaaattttttataggcatgtcagaaaacaaacgagatttaggaaagtagtttttaagaacagatatgggcgttttgaag

SEQ ID NO: 312661 - DNA, 1476 bp, Cannabis indica
ttacatagttttttttgttgattttatgttgttttcgtgttattttttggaaaaaccgtaaaaaatgtaaaaaaaaattatttttttgaacgtacaaataattattttacaaaaaaaaatggtactttatgtaattaatgaataaatagaattgtatttaagcaacaaaaaaaaaaaaaggaaatagaattgtataagaatttataaaattttaggataaacagcaataatataaatatttaaaaaagaaaaactataatgaaaaattataaggtgttactaatgtggtatttaataattagttatttaattttttttttgtcttttctgttttttttatgaattatttttgtactaatttttttataaatgatttttgtattatttttgttacgtggtactttaaggtgcttaatactatattgattcacaatatttagttattatttttttaaatcatattaaattaaaatttgtggaaattaatattactatgcactaataacaatatgttactttttgtggttctttttgtataatgtgttttaatattttcgttattagtacatatatttattaaattctattataattttaattttttattaatattatatataagtttgtaagagcatattttaatgggatgtgtaaaaattgtattatatttagagaaaaaaaaataatttgtgatatatttgaattaatttttagtattatgctttaatgcataattgtaaaacttaatggttgtttaatttgatttctattgagaatcggggtgaggttccttcataaaaaatgttcagtatgatatttttaggtaccctgtaaaatttggtgaggtttggcttagaattgaatgagttatcgaagttctaaaattgaacagtggagtttcaaaccgtccaatttatgctggaatgggagggtctgtttttaaaatggaccgttcgttttgagtcttataccggaacgtcgattgagtgttttctcgatatgtagggtatttctatgctgtctatcgatatgaaaacttttagttttgaatttaagtcaccaaaagtattaaggcaacacttattgatttttttttttggaattgtgacgtatgtatttccactcaggttaattagaacacttgaaatcaaaattaaggtaagactagtataacataaatacatatgtacatgtttatagttgtcaaatgtatgacatatcagttagaacgatagttggtgtatatatgattgcatcttgatatcgtgaatatatgtgttgggaaatttgaaaagtatgaaccaattctaccaacactagtacgcagagtactaagtatatgtggtattatagttggttatacttctaaaagtatgaagtagtgctacctagggctgtacaaaaaaatttgtaaaccgcctaaaccgaataacccgcccaaaccgaaccgaaaaaaccgataaaaattacaaaccg

SEQ ID NO: 312662 - DNA, 1226 bp, Cannabis indica
actatctgtacggccaaggttgatttttttcctaatagtttattcttttttaattcatgtaattcaaccctaagccctagttgaaacactatataaggaacatgatactctcactcatccaattaatgttaacctgactattcaaccaaacctagatgagagagttccttctatagagatttcgccccttcattattcttcaccatattcgaaagccttagtgatgagtgacgtgcccacacatagcaagtcaagtactcaataatagtcattacattctgattcaaccaatgtaaggttttctttttcttaaccttatgtgtttatttcattgttttagagaattcatatgtaggatgttaatcaacatacttgttagtaaatctagatcctggtaaaatatttccaacaaggactcctagcaatgatgttagataccacctagtagtgggatatatgcataggactcctaaataatttcttccacacatgatcttagatcccatgatacaatctcttattttatttccccacaaaacaaggaagatcaaggtacttctcgtgacaagtaacaacaagcacaccaacacaatcagtcaagctatctttatcaaccacactgacattcaagctaaaacactgtacagatttggagaagttaactttatgcccataggcttttccgtaagcattcaaaatcttcatacagctttcatccacaaccaaagtagcatcaatgaaaaacgagctatcatccaaaaaaaaagttttcaagtgtcaggaccatgtcatccacaaggtaatccttagagggggccctctatactagctttatgaactatagagaacaaaccctcttcactaataaggaagaggaaaagagaaacaggatcccattgatgatgaccctgggtaggagtcacatctagggctaaaaatcggtccggttcactaggtatcaggttcacagttttgggttaacaaaaataacacccatacatgcccattcaatggctaggttggacgaatcgatgagtcagtggatcacgagttgtgggttgggtaggttggcaagttttaattttggcttttatataatatctaatatcatatataagtatatatattatagggttatattaaaaaaccccaaaaatatctctaaaaaaagaacaaacaaaagaaagacacacagacagaaagaaagaaaaaagatagagaagtta

SEQ ID NO: 312663 - DNA, 1566 bp, Cannabis indica
ttctattcttatatttttattcctcccaactaaacgtcacataagagcaaatgttacctcaagcttcctccacaccttgcatcagttcaaacaagaattaaaaactaagaaaaagaggaagatttggtctgaaaacccttgtcctcctgttggtttctaggtgccaatagagaaaagaaagagagaagttgatgatgtattgatttttttgtacaatgcttatctttctaatttattttattattttaaaacctaattacaattggtataaaagaagaactaagctggattaaaactcaaccataacggaatgtggagctagagtaagctagtcgaaattcattacttttgatttttttttttagggttattgtagaggattgtcgtgaacttcttgcatctttaaacaatattttcttattttttattaaacgatctgctaatatggttccttataatcttgttagagcatcttgttattttccagatgagtgttcaacaggagtgatattcccgttgaggtacagtcttatcttttggggaatttgacaacttaataaaagttctatatttgctttttaaaaaatagcgacaaaaatattttatcttatatgtaatattctgaaagcttaattatgtttaataaaacatatttcattaaatatggagtattatgtgtatctaggacatatatagggccgaccatgagttaaaatgggcctagctcgcctatacctaaggccggccctggacatatatgagtaagattactaagctaattatgtgatgtttagagatttaataagaataaataaataagcgtaaacatcaattacggaaattttattagaatatatgagtattatacatgtcatttatgaaataaaatatttttaagttcggcagttgtgaaaccctagtttgttgggaaaaaatatcacgacgataatagtttgagatttagttatgccaggaataattggtgttgtttaaatcggtgtgatttcagaataattggttatgaccactttacccctaaccttaaagatttcttagaagttaaataaagaataaataaatcttttgcttaagttttattgattttgtccttaagtgaatttctaaaaattccttacctgacttcttgggtagaattactttaatcaaattccgatcgtctataccagtaaaattgtccgacttaaccatcactaattttttttttgagagtttcgagcgactatgccataaccaaacacccaactcaatcacggtaaatgaccaccaattttttttaataattatatctataataattgcaaatgttaacaagattttgccacaaatatcccaaatataaataataaattatcctccttaacaaaaataaataaataaataaggatttttttctttatttttacacttcattttttatatatttttacgaaaatccccataacaactaacagcccacataaacttatccatccttacaaaataaacaaataaataatcttggaattttccaagtaaaaaaaaaaaccatttccattgtaaaaaaaa

SEQ ID NO: 312664 - DNA, 674 bp, Cannabis indica
tatgaaacaattttccccctctcatgtacaacctctccttgtgaaatcaacacactatttcctgatattgtacttcctacaaataaatcagtacaacaggctgttcaaatctctcagcctacgactatacctgcaccatcatctagtgccaacaaaccatctgatgcacctaaaccagctgctgcaaatcagcatgctggtgcaaaaaaaccagtcgatactgctacaaaaattggtgcatttcaccacaaaatattgcatcctgtcctagcatccacacccgcacctcaaactggtgcacaacaacaacctggtgcacatccacttgttgcaccagcaccacaatctggtgcaaatcaacatgttgcatcaagcaacttcaatgacattacacaacttgctgatccaggcaccaagagtctcaacccacctgcctatataccagcaatcccatcacactgctcaccagttcctggtattaaaaataccacagaacatgcaaccgtgtcaatcaacaatcccacaacagcctctcatatatctgaaagtgcatctggttttcctacacctttgccttcagtatcctccccaaaaaattcagttcctcactccatcacaagagttggccgaactgtcacaaaaccaaaaaaattgacagattacatctgtcatgc

SEQ ID NO: 312665 - DNA, 939 bp, Cannabis indica
attggtactacctatatcaacaaccttgtaaaaacaccaaagactatcggtaaaggaactccgttggatacggttatggaggaagtcacctctcatgcagccgacgcgcatgtggaaaataatggagaaggcacagctactactgagaaccaagagaggaacaccgagaatgatgcagagggccacggtgatggccaaaatgtagaggattatgaagaggacgatgatgattactactataaagatggatattataaagatggtcgttattatgagcatgaccctagtctagtgcgagtaatcgcacagttggaggctacaaaggcagccctagaagagcaacaaaggcttactgctcggatgaaagaaaccatggagaaactttggagcaagtttgatggtttggctgggacggatggagaaccatctgtagaagcagtgattgaagggcgagcccgtgagcaaactgatgctggaacttcaaaccatcgcatggataagggtaggggcaaggtgaatgaacctctatagaaatttacgcctaagcctccacgtagagatgcacccttagtcagacaaccctcgaggacgcagaaggccatctggtgcttttgagcctggacacccctctaacccttgaggcaaaatcataccgaagggaccagccgcaaagcttcccaaacctaggagacgagtagatcctcctagtgattctgtcaatcaagacgggaggattcttgtcagccattctggagacagttggtccacggtagaactacggtggcagttggacgctaaatacgagaggtacaagaataagaatgggaggccacgtgtggtgacctaagaaatcatctgagtgacaagatgaggggacgtgatctcccaaaaagtgataccaagaggttagaaaaacaaattgctgccttgactaagttg

SEQ ID NO: 312666 - DNA, 1608 bp, Cannabis indica
gtgacctaagaaatcagagtgaaagatgaggggacgtgatctcccaaaaagtgataccaagaggttagaaaaacaaattgctgccttgactaagttggtaaaaaagcatagtggatcattgttagattctgaggatgaagacccagaaccctgtgtcgggagaatcacgaagactccactctcagaaaactttaagatgccccacatcaaattacatgaggggaaaaatgatctgcgagcacatctagccaaatataataagatgatgtaagtttcctacattagtgatgattctaagtgtttatgtttttccctgactctaaccaagtccgcaaaagactggtcgaagtggttagctccgagatcgatcaacagctagacggatttacagtcggtgttctacaaataatttattgtcgcgcgcgagaagaacatggaagtcagtttcttaaccaatgtcaagcaacaacctaacgaaagtctgaaggctttcattcaaagaatgatggaggcagccgccaaaaccaagatcagtgatgatttgaagttgatggccctctaatcgggactagttgtagtttccttgttatgaggagagatgcagagaaagagagctgagaccttaagcgaattcatggctaaggcacagggcataatcaaccttgaggatgcctacattcaggcctttagagtccctcctgcaccaactccgactacggctgctccgagtttcgcatccgaaactcctgtccaatctttgttccttctaggacctcagttctctctgaccgtctacagacctactgcattcggtctcatccctatgcagacccatttctctgggtatgaggtggcatagattggatgcagcgtggctcccagacaatctaaagctgaggtcctggattctagtgtaggacattcgcggggtaagaggggaggtaagaatcacagtcgtaatgatctagtaaggaaaccgataaaggagtacgatctgaactacatcgagtacataagtctaatagatactcaagagaatatttataaggcgatgtgtaacataattaattatcagaagcccctgtccatgtcaaatggcaggaggaacatatgcgatcaaaacaagcaatggtgtaccacagagagaagggccacaccacgaatgaatgtgaatatttgaaagatgagattgaaatgttggtctgagcggggcatctgaggtagtgggtccgcatcccgaatatttatcccaaacagggggcagtctaggggcacatggtgcttcccgaacagcagggtgctgtaaatcctcaacaaggggttgggcatcctcaagctcccggaacatcattacttgctcttcctacaccaccagctccagctggggtggctttgcttgctctaggactaggaactccatatcctcttgtaattgctctcccgcctatagatggacatgtcgcgaaaaattcgggtggaccccatcttgccgaaagtacccgtaatgcacagaagagatatctacaggaggtggaggagggagaaatgtgtgcactagtacaatctcccgcacaatgttcaagaatgatgaatctgttgggttttatg

SEQ ID NO: 312667 - DNA, 2203 bp, Cannabis indica
ggggattcgggtccgggtctggttgtaattcaaaagattgattaaaaaaaaactgtttaaaaaaatattgaaagtgatttttttttgtttttaaaattttgatttctaattataaaattaaaaagtaaaaacagttttatagaacatgtttttgaaaaatattttcacttttttatttttaaaaacagaaaactgattaaaaaatgttaccaaacgccacctagataaatcaaaatggtagctttagagtatgtatacgtgtagagtagattgtaaatttaagagaaagagaaggtacccatgctgcctcatactatagggaggtgtaatatctcttcaatataatatagtatctcatttattttattttattaaaatctattaaaaaactgttaatcaattatatgctagtttcctatgcttgaagaaaaaagtgagttgcctttatgacattaattggatattgtatatgttatgattaaacgataattagtaacaaaaggttagagaaaaaaaaaaaagaaaaacaataataaaaaagttatgttttcaggcatgatgatcaataggatcgtccgtgatagggttgtggacagagaaagcagtaggtgtggggtttggtttgggtcccaaaccatagagtgtgtgtgagccgtttctgctacactatctatcatccaaaaacagtaatgactatgagagtgcatgtgccaccacaacaagccatattgatacagttaaataaattcagttagtcttctgttataactgtcaattgtttattagttaacaagtcctctgtttttggtttctctgtaaaactatctctataaataaaggtttcaactcttaagcttgtaacttttacaagcttatgagttctttgtattcattgactaaatacttgtattgataagtttgcatggtatcaggaagccatcgacgaaagtcattaatggatccttcaataattgacaacccacctcgcacctctgctcagcttcaatggccaccaccaccacctccaactgctcctactcagacctggaatccctttcagaactccctgaattcatctcttactgtcagacttgacagatccaacttcttggcatggaaatcgtaagtaattcctacaatgattggtcacggacttgatgatgttcttctcactggaattcctccaccaactcaactcgttaatggtgctgtcaaccctgagtttctggtctggcgacgaaaagaccaacttcttcttagttggctacgctcttccatgtctgaaatggttcttggctccctggctcattacaacacttcattttcagcatggaaagcattggagcaacgctttgcctctcagcccaaagcaagattattacagatcaaatcacaactttctacaattcagaaaggtaatctctccatttctgattactatgacaaagttaaggttcttgcagattctttatccacagttggacatcccatggaggaaagtgatttgatcatgcatcttcttaatggcctaggccctgagtatatccagttgttgtccatgtcacaaccttggtggataatctctccttcgaatccatacaatcccttctcttgactcaagaaagtcgtcttgaacgacattacactgtcagtgatccttcctccaaaccaatggccaatctctctacaaattcatcaatatttggatttggaatgcctcactcacaatctactggttataatggttgtggatatggatcaggcgaacccaatcgacccacaggaaggtatcttggttgaggaatcgcacccttcagacttctctgtcaagtctgcttcaaaatatggcacacagctgctgtgtgtcattacaggtttgacaagtcttttgtcactccgaaacctggtgactctcatgcatatctaacagaacttgacgaagaagatcccctcacctatagctctcccatgattcaagagtttgctcatgatcccgactggtatgctgacactggtgccaacaaacatgtagctactggtatggaaaaatcttgattatgaaattccctatcatggtaggattctcttgctgtaggagatggcaagaaactccacatttctcacataggtaaccattctttaccctcttcttccactcatgttcaattaaaatcaattcttatagttcctcaaataacaaaaa

SEQ ID NO: 312668 - DNA, 1338 bp, Cannabis indica
cattccatctctgtcaataatcagcatatatatttttatatataaatattataaggttattagacaatgtgctaagacctaagaggtggttaataagaaattgtccaagaatggtttttttattgaggagacaacagtccaaattgaaatcgaattatgcttttgcattaattattttatacactatttcatattgtaattgaaaaatatagattccatgagaagggaaggacacatgcagtaacagtattataaagatcatgaaaaattgtttagaaagccatgcaggtgtgcttaaaattatcctatctgtcagcaccagtgtatattttttttttcttttattgcaaagcaaagcacttatttgcatgtgtttgtgtgcacgtccatctctgaactctatctgattctcagaccttaggacacttaaatacaggcatatatactaactacctaatttctagttgtctgatacttaaaacaccatttatctacaaacacttggcatccaaaccaaatcggatgtatcccacataaaaatcaactgcctttgtggaaaaaagccaattgggtgtaaatgttgacttttttttttttttggattcaacttctctctctcaaatcagcttcttcataaattcctctcctctttctcattattgggttttcaatgctttgggttagggtttgagtaaaatttctctcatttttttgagtttgggtttggtttttcttgacccccaaaaatgactaagtgtaatatttggagtcattagtgttatgcttgaaagtttgccaagatgagcttcatgcatcaaggggagctcctcctctcatcaaggggacctccacgcatagggtgctcctcgcatgttaaggggaactccacgcatgagatgctcctcgtatgctaaggggagctctacgcatgaaatgctcctcgcatcctaaggggagctccacgcatgggatgctcctcgcatgctgaggggaagtccacgcatggggtgctcctcacatgccaaggggagctccacgcatgccaaggggagctccacacatgagctactatgcatgccaaggggagctccatgcatgagctgctctacgcatgccaaggggaagatatcgaggctagataggtctaagatgggaatcgcaaacgagatagtgactacacaatgcatattgatataggagacaaggttcattctatctgaggtacaagtaaaaagagacaattttagtgtaacttaggatgtctgatatactataccacctgagatactacagtattaggtgtgaaagttacttgacctcctatgattttggggatgg

SEQ ID NO: 312669 - DNA, 663 bp, Cannabis indica
tgaatagtcttatgcgagataaaaatatacaaatttttgccttgtgtctcgatgagaaaccatgtaacttcaggggtgacaagacgaggcactaacctcaattacgtggatgagatatattatctgtgaagacacttaacatataatgcacagtataccaactaagtataacagatgggtgaaccaaagcaagtgatagcgaggcgtccacctcgccataagaagagatgcacgcgaaaaagataatctcgccaccagaaacagcggttgtcagattcaaagtaaaagcgacgagacttgcattatcaaccttggaaagaaatatgacaaactccagcttgctatcaagattgactctactctattcccagcgagacattccaatacgatatggtttacaacatatttaatacacgttcattttgactcagtaaaaacgggatattcacatttgtatgatattcagataataaccgcatttacttaatgtgatatgtaatcagatcccatgattttaggggataatcgttgtaaaaagatcactcaaccttgtaattaactgcctactatgtgattataaatagtggcaagttagatcaaaaaaaggggacggaaaaaatcataagaaaaaaaggccctgaaaagctatcagaaatctaataa

SEQ ID NO: 312670 - DNA, 1898 bp, Cannabis indica
  modified_base (1020)..(1020): a, c, t, g, unknown or other
  modified_base (1101)..(1101): a, c, t, g, unknown or other
gatttattagggcacaaaacccaacactcactacatgttccctaaccctagcatcgttcaactctaatttggaggtgggtttcaaaggggtatatttatatgggatgggtgattctgtaagaaactcaaattccaactcttctaaagataaattcctgaaccatagtgggacagtgctgcaagcacaaagcagtcccaatccttggagagaaatttatcaaacccgaaggtggtgagctggagattctaaaaagacctacatattgcctgaaccctagtgtggacctaaatacagtttaaccctaaaactaccaaaaccaaatgagattgcaatgatacaaacaaagtaagcagcaattaaacacaatgtaacaagcatgtaaatgagaataacaacttactgtttgaagttagggcttagggcaatgactagttattccgtctacaaatcttcgaatgtagtaaggatcgctttgagaagacgaagtcgaaggaaacttttagaaaaaatgtcaaagacagggatggcatgcaaatcctcaaacgaactcgatggtgattcttagtaaaaaagctaaagaattgtttagacattctaaaatgtcagagataatgcaaaggtggttccttttttcttactttatactcatgatatcgactttgtcggatcaagaaaatgtttaatcctacggatagaattcaaagtggaagtggaaaagatggtcatttattgctgatgtacctcgaaactgtacaaccgccaaaattagaggacatgcgtcttttcaaaagggatcatgacgaaattactctttgtaatcattaaaaagtactttttactagaaaagaactttttaagcggcaattggtatacctgaaattcggcgagcacatcagagaaagacacgtgttgggctgggaagaataatcataattacacttgaaatggaataactcgttggaaagcataattagtagggtatgtttacaactagtctaactgaacagtcttatgtgagntaaatgccttatgcctcgatgagaaaccatgtaattcaggtgtacaaggcgaggcactaacctcgtcacgtggaagagatntagcgacaatggaaatacttagtgtatagtgcacattatacaaactggcatgcacgcgaaaaagatcatattgtcaccaaaaactagtagttgtcagaattaaagtaaaagcattatcaacctttgaaagacaaatgacgagcttaagctcgccatcaaggtttactcgactccattaccagcaagacattccgagacaataaggcttaccatatatctttaatacacgttcgttttggcccagtaaaagcgggatattcacagctgtgtgaaatttaaataaaaaccgtatttacttaacgtgatatgtaatccgatcccataatttcaggggataatcgttgtaaaaagattacattcaactttgtaaataaattataaatagtggcaagtaagaccaaaagggggacgaaaaaaatcataccagagaggccctaaaaaagttatcaaaaatctgaataagattgactcgtggactatgtaaaattttaattgcaaatcctcgtaaaaaatcctatgttttcatactttgcattttacagcttttttttttatgtgtgagattgtcactgttaggctcaaatttgtttaacaaaaatctgcgttaacaattatatacataaaatattgttaatataattaaaaatgttaattgactgttaataatttaaagaatttttaaaaacactagttaataaaatataaaaggtaagtgttgaccgaggttttcagcaactattaaaatataattataataatgagctgtaagaaagtgagatgaagactttttacgtggt

SEQ ID NO: 312671 - DNA, 1490 bp, Cannabis indica
cagaagccttcatgaatttctctgatgatttcattttcttctgtaggaagaacacagcgaagtaggggcattgaataccctcttctatatagtttgctttcaatcattgtgtagcgaggcactgaatacaatagttttcgcacctcgtttttgtcatttggaagttctctgtcaagtaaatagttaataatacgtgtggtccatgttagagagctatctattgtctcgatgccttcagtttcacatatagttggctcgttcaacatctctaccagagctagattcaattcatccaggtcattctgcaaggccagttttgctaaggcatttggagttttgttctctctgaattttttcaattttaaagtaatcaaatctttccaagttcttccgaactttctctacatacttggccatttttaagcctttggcttggtattcctcgaggacctggttaacgatcagttgcgaataactatgacaaatgagatttttgactttcaatgactctggtatctttaagtcgacgatcaaggcttcatattcagcctcgttattggatgtgtcaaattggaatctcagagcatagtgaaacttaaagccttctggcgatattaatattacccctacacctgaaccctgttcattggatgcgccatccacatataacttcccgattttcgcgtctcgctgaccaggtttttgccctcttctcgcactataactgtactaatcacgtcttctgagatggctatatagagaaacaacgtctctccagttttggtttcgccaaaactagaagcgttgctagatgccttttaatgttttgaaaggcctcttcgcactcttttgtccactcaactttttgttgctcccaatatattgaagaacgacacacacttatcagttgacttcgaaatgaacatgttaagtgcagccattcttcctgtcagggcctgtacttccttaggccttgtcggtgatggcatgcctattaatgccttgattttttcacgatttgcctcaatacccttcacgttaactataaatctccaaaactttcctgaggagacaccgaaggaatattttttagggtttagcttcatgttatactttttaaatattttaaagcattcggcgaggtctgaggtatgatccttactttttatcgattttaccaacatatcatcaacataaacctccatgttccgccctattttatttgcgaacatttcatttaccagtcgctgatacgttaccctagcgttcttcagttcgaacggcatgactttataacaataaagtcccatgtttgttacgaagcttgaatgttcttgatctggggtgtacatttttatcttgttatatccagagtatgcagccataaatgacataagctcgtgcccagcagttgcatgcattaactggtcaatcttggtaactgggaaacaatcctttggacacgccttattcaaatcagagaagtcaat

SEQ ID NO: 312672 - DNA, 849 bp, Cannabis indica
aatactatgaaaatcagaaacactaacttaatagaatgcaatcttttgaccactagaagagagtccgtctcaatgtagtgaatagctatattcatgtattttagtcattgcaaactaaacataagagtcagttcttttttaacttcagatttgaaacaaccaggatatgatcttgacattgcagcaattgcagcaactacttgaccatgagagtcatgtaaaattgctccgaaacccgatttgtgattaatagcatcaacatcagcaattattgttattgttatctttatttttatttaattatttatttatttctaatgaaagttgaaaaggaccttcatatatgcaatcatgtttgtaaggaaagaaatatatatttatataatcaacaaccatagaaagatcatgtacaaataatggacactgtgatgacagactaaaatgtaggaaatttagtctttttccaattttgccctacaccaacattaaaataaattagtaaaccaaggtcactttcgacctttgccaattcctaacttttcaaagtcagcaaggtcaatacgacctcgttttggctttggcaaaacccaaagaatcgagaaccttcccaatcactttgtctcagccttaggttttcctcgaaaccctagcagagagtttctctctgagaaactcaaagccaaccctcaaacaacccagaaatcccagatcaaacacaaacacaagatcagatctgactagatctgatctatccccaaacacacacacaaacagaaagaaattagggttagaaaacaccagatttttcccgaagttcaccaaataaattggctacgtctccgttgagct

SEQ ID NO: 312673 - DNA, 669 bp, Cannabis indica
tagggaaaaaagatagaagactagaaacatccatgataatatcgttaaaaacagaggaagctacagttggggtacatattgcatttttaactcgaagtgcatctgtctcaataagaagatgaggaaattgaaaaatttagagcaaaatgcacaccatgaaacatagcaagagcttccatttcgtggggatcaaagctgcccaacagttttttggagaaagccgcaacaaccaaaccagaacagtcctgtataatagctcccaaaccagtagtagtcgtagttcgttctactgtcgcatttacattgagtttgaaaacacctgaagggggaggtttccatggaactttgtgactattcgaagcagatggattgaagcagttttttactgttgttgcaaccagagcttgaaaaggctgctggtatttcgaaagagctgatctgtaattcagcaaatagttatcagcaaaggatgacaactccctagccttcttagctttgtgcccatgaattactcggttccttttcgtacaattgaccatagcgtgcatattatttgctccattttagccttggagtgaatactcgaaagatgaaccaagttaatcccctttatgcatttgatgaggtctttataccaatcaaaagttgaaaccagaattttctccatac

SEQ ID NO: 312674 - DNA, 904 bp, Cannabis indica
cataattattcctaatttgaaagaactgattaagttactaactgattttgtatatgctcttaaaaatgaaaaaaatgttaaagatattatataattaagtattagatcttatataatttaatataataatttttagtgagtataagataataatacgattatttttttaagatatctaatcataatgctaaaaaaaaagtctaataattaggtcaaaaggaaaaataaaccattaaaggcaattagaagtgattggactggcttttgatgatattggctcatctatgtagaataatattattgcttattttctactattaatatgttgaaagaaggtaaaccttgttcaatcatgtacttgccattctaatcaaagcaaaaaaagtccaataattaggttattatatataaatgtagatagtatatgtaatttgagtggttcatcagtagaaagtgtgattttaatttttattataaggaaaatagaaagtgtgatttggggttatcacacaccactaaaatgattagtaatagtttaatttttttagttgttatttttaaacaatttactttagctttcaaaaatgaatagaaaacaatccatctttatatataatatatgtatatacgtaaataatttgcagtataaatatacttaaattttaattttcggttacaaataaatatctaaatttaattttctgtagaaataatacttaaattatatttctgtaacttagtacctaaccgtaaaatgtcaagtcactatctacatgtcatttttttcttgatatatttaaactatcttttaaaaaaataaaataaaataactgaaccaattagagattactacatgacaatttacttaatacttaatatctacgtactgtgacagtcagtagtc

SEQ ID NO: 312675 - DNA, 1416 bp, Cannabis indica
gaatgatcttgtcaaaaccactatgaacaagatgcaaaggccatagatatataagaatgtggttgtggtcttttgatgacttaggtctagttacaagataaataacgggaatagaaagcttatccactatcagaaacctttggtgaagggaatgtgaagcttggatcgtgaaaatggtgcaaaaatctcaggacttaaagaaatgtgggggtcgacctctagagaaaaggtggagctttcaaaattttatttttctagagagagaatgaaatgtggaaagtgaagagtggttttctcccataagcttatatagcttctgtgggatcacctttttacttgccatgtaatgttcaactaaaaagcatgtagaagagcaatgcagttaacttactacaacaagtgaggtcagacagtcaagagcaattaatcatgggctaaatatgttgcaagatttacccagttaaggctacatcagttctaactaagctggaaggttcctatccacatagacatccacacaagaactttggggacaaatgttatcccgatttttacccacatgatgtggaatgtctacgtggccaacatcaatgccacgtggcagtataactaaccagcaagaaggtcgagtcacctattaatcactacaaccaacgataagtccaaatactcaagtgggatgatgaagtgatgaactagccacctcaaaaggggtgggcgaccacccctagctggccctatggccagcataggccagccaggttttggacatctcatggcttgccagcatgcatcttgtagatgtatggccgaccagcttttggcctggcaagtttttggtgcatagcttcacacgtggatagcaagacaaactatggattcagccttaatagcccataaaaattgaggaattatatatattttaagggatattttagtcatttgtattttactaattaaatatgtaaataatatattattttacctatttcttagggatttgaagggtttaagctctcctatataaattgccttactcaaaccctaaaagcctaagtctgaagtgcaagttagaagctctaagtcattaagtcaaaaacccaagctctaagtctgagaactcatctctcgctcacacacccactgctatactcatacttgagatttgtcaactctcattccaacattgttacctttagagaggtacttcagatcccatcactatagtgatttgtgtagtattatatctcgttatcaatacagctaaaaggagaataggtcattacatgctaactaagggggccaaacctctatattgttcttaattatgtaatacgtggcaagtatcaacgttaaatacaacttcgcttttgattagccaaatctgaggtcaacaatatgttggaaatattttac

SEQ ID NO: 312676 - DNA, 1867 bp, Cannabis indica
caaagtaaaaactaaaatccaatggtgcatcattataaaatgcatcccatgacttattagccaccaattaataatttatttatttttaccaattaattattgattaaggggaggtgtgaaaaaaagattctcagctgtaatcattcatatgacatgtgagttttcccccgaaaatgatatgatattttattcaattattctatgtttgaaaatgttattggcatgaatttttttagacacactaaacaaatgtcacttttaccagcactaatcgttattgcgctggtgaaagttacttttagcagcgcattttacaaactgcgttagtaaagaggtcaaagttttaccagcgtacatttgcagtggctacaatctaacttttactagcgcatttacgcactggaaaagttatttttgccagcgtttttcattttatgctggcaaaagttttaatacctacgttgatttgtcaacccccttttgccaacacatcacaagtaaattctattttaccagcgcaataacaacttttgccagcacaaaaatgtgctggcaaaagtgacatttcttgtagtgacatactagcatattctcgacagaagtagatacgtggcctcagtccccgatgaaaacgaatggcgtgtcagtataatggccctcatagagagccaatttgcatgatttaacttgcgagaagatgcgactgggagaaggatctaatcgcatactatatatgcctggcatggtcaaaaagataagcgggatcgagagaagtaagtactgatcatgcatatcaattatatgcgatgatcaagtaagtctctcccgctacaagtaaagactacttctttatacaagtatggtccaaatgattggtgttcgatgactcgttaaggactcaaatgttttaagtcgtcaacatgtggaatatccaaatacacgatcaagggtggttgcaaacattcatgaattaaaaatgaataggctcgaaggcttattatgcgagtataacaccacagagcctgtgagctcacgtgtttggaatatgaatggacaaattgagacttaataaatcgcacatgttgtaattaagatgaatagacgaattgttcttacatttattctttaaacgtttctactcattaaattgtataattattgtaataacgatccttcttgactgaccggtggtataatctcaacagacatctgctttctatataaaaatgtgatccaaatctaataaactaaaccaaaactattattaaaagtagactaattaaacataccaaattatgactgaattactataattcttggtagcccaaaactttgagtactcataattttaagtgagtactcaaataattacaagtgagtattcttgtacttgtcctttttggtgttgtccaaaattttcagacaacagttataaattactagtgaaatacatgtcataatttattgatgtaatagagttgaaaatatgtatacaatacatgttataatttattaaattaattatgtgtataggatttgatgataagtcatctctaatttgtggaagtgagggattgaaattttctgtccaactcctccatccaactcttccaaattaattaaaactagtcatattataatttaatactaattaattgattaaactaagtaaacaaaacaaaatatcattttaaatggagtgggtggttaataaatcaagattctcaatctaatttttaaatgttaaaaggtatcagtgatgcttattacctttatatatatatatcattatcttggtctaattaagtatcgagtctcatctagtttcataatttttagagagtattactagccaatcgcaagacaa

SEQ ID NO: 312677 - DNA, 1755 bp, Cannabis indica
ggaggggaaattcttatctaaagcaggtgaagagttgttattaaaaactgttgctcagtctttgccaagctatgctatgaatgtcttcttgttacctctcaaaatcgttaatgaaatggaacaattaatgtgtaaatattggtggaagtattcctcaaagaataataaaggaattcattagaaaagttaggataagttaacggttcataaatcaaaaggagggatggggtttagaaatcttcatgattttaatctctctttattgagtaagcaaggatggaggttactttgtaggcctcatacgcttattgggcgaatgtttcaagcaagatactatgtggggaaggatttcttgaatgcagaattgggaagtaattccagttttatttggcgaagtatttatgaaacaaaggagctggttcgaatgggggcacgtcagtgtgtgggagatggatctcaaactaatattgtttcggacccttggttaccatgtgataaaaatccaaggatcagttagaatcatcctgcacttttgaatcaaaatgttgttgctcttatggtcactgatagtttggtctgggatgttgacttggtgcatgatttggttaacaacagagatactcaactcatattaagtattccttaaattcaagtcgaattgatgatgtttggtactggtcttttgagaacttagggaacttttcaatgaagagtatgtatagacatttgcaattgagaaaagaggatgatttgcagctgtcggggtctgacttctagagtaaactgtggcgccttaaggttcctccgaaggtaaaagatttactttggagagctgcctcgaattgtcttctaacaaaggttcagttgcagttgcgccttaaacatgttaatgtcgactctaaatgtcctttgtgtctctggaacagtgagactatattgcatcgactggtggaatgctcttttgctcggtcttgctgggaaagaacgggaattggagttaatttggactatgctggaacttttacatgaaggttggatgctagctttaaaaagtttgagggggaaaatagaaatatcatagccatgacttgttgggctatatgaaaagtaaagaatgattgtgtttggaaagagaagagtgctaatgtggcaactatctttcttttagccaaaagcatgctggaaaaatggcctacgacacaagataaatttcaacattcaactgctgcatttttgacagcagatgatggtgctgaagtatggcagaaacaagtagtacgagaggtaaaaatcaatgttgatgtagctcttttctcagatcctaacatgtacagctttgcatgtgttgcaagagatgaaccctgccatgttttggaagcgatttcttgttgtaaacagggcaatgttgcccctgaattagctgaggctatcgggttacaattgaaactgattgtcttaccgtggttcaagcgctttgcagcccactttctatgttttcttattttggaagtgtaatatcagatagtaagactttgtggaatgatgtcaataatgtgtctattttatttgttaaacgatctgctaacggtgttgctcatgcgattgttagagcttcatgttgggtcattgatcgtgtcattattagtgatgagtttactcctgctattggtgatgtaatcatgaaagaagtttgttaataaagcttcctttaattttttttttaaaaattaattttgtttattaattctataatta

SEQ ID NO: 312678 - DNA, 708 bp, Cannabis indica
aagttctattctgaacttcttctttctttctcttcgatcagcgcttctctactgatcattcttcttttcacccatggagaccgataaccaagctgaaagtcaagaaacggacgacaatggaggacatgccactgtcgaggaaggaattactcccatggtgcagaacagtcgtactttgcagaggaatcctcttgaagacccttcaaatccctactacctgcatcatggagacaatccaggtaatattcttgtttcacaacctttaattggacaagaacattacatgtcttggagctgtgccatgcaactggccatatctgtcaaaaacaaaatcggattcctttatggaaccattcctaaaccccttccctctaatcttgtcatgtataatgcttggtatagaaacaacaacattgtcatctcttggatcttaaactctgtttctaaagatatctcctctagtcctttatatgatgagtcggctgctggcatttgggatgatctaaaggttagatttcatcagaaaaatggtcctcacatatacaacttgaggaaaaatctaatgaaccttaagcaagaaagtcagtcgatcagcatgtattttactaggttgaaaactgtttgggaacaactttcaaattataggcctaattgtgtttgtaatggatgtacatgtggtggtgtgaaaaagattcaagaacactacca

SEQ ID NO: 312679 - DNA, 2206 bp, Cannabis indica
ttttggtaaaaccaaacaaacacaattgcacgatgattataaacaaagaatgaaattcattaaggatagcaaaagcattcaaacccgggattaaaggccacccggtcagctagctgttcgaaaaatgaaaaatatattccaagtttaaagaccgcttgggcggtcaccttatcttaaaagaaagccttatggccgaacaaataaaaaaaagatagtgaaaagaagcatttaaatggctagagttctaagctccttgtatgggtcaactgggtcagaaggagccgtaggatcgttagtctgagcagaaggaaattcaacactttgattagtgggagaggtggaagtgatcgcctcggattccccgtaggccgcctgagcagtgcagtagtcgagaaacatgtctttggaatcgcccaagtaatcaatatttgccttccaaaagtcataaaatatctcgagaccagctgtctctagggcattcacattccctttgagcctcgccacttcggacttctgttgctcagcctctaacttatgcttctcaacttcggctccaagctcctcctccctgactttattctcctcctccaacctgtgaaaatgaattcagagaccctctctttcctcttgaaggctggtcacttccttagataaagaggtaatattggcttctagctgctcggtagatggcgtgtcctgcagctcctttgtcagctcagccactttgttctcagcagtcacgagcttcttattaacctctcccagctctatgaggacagccccaagttgaacccgggcttcctcgtcgtctttcttcaccaagtccacttccgtctgcattatgttggaaatggcaaggttcttagcaacagctgacttagctcgggaataagcataagccatcttcaggccagtttgtacagagagaggacattaaaattgaactaattaaagaagaacaaaatgaaattgctagaaagacttaccctcaacagctccttcaggactcctcccataactagctgtagagacaggtcgttgtccgccccagctagctgctcgttcacctcaaggaccgaccgattcacataatgggtgagcatttctctgcctcttttggtctctgggtgcagtactggaggtggatcaggggccttaatctgttcaaaaactgcttctgactagctcgaatccgcccttcgcctgttcaggcctatcggagctacctgctcgggaatctttggacttagtcatttttgaagcagtagggtccatgacagtttgttccttagaaaggtcaatgaccacttcaacgagtgccatttctctggacggggtcatctcactgcctttggacttcttggtcagagaagataagcctgtgcttcctcccgctctcttcctcaaggcctcaagcttttttttgagacatgtctgcacggaataaaaatattgtagttagaaaaaagcataagagatatgaaggcatgataatcaagttaaacacaagatggagtaccctacactttcgcaggggcatttgcctgaacaagtactgatggggcatcatcatccaacaaatcttcctgctcctccaagagggccttcccctttccttccacaggggtggatggccgagcaggtagaccgggctccctgatcacgattgtatatttgatgggcctttgcctagtagggagggtcttcttccccttaagcggcctttcctgctttcctgagcctcttcttcctgctcagaatagtcttgagcatatttttcggctctggctcctcccttcaacttcgcctcgcgcttaagctaaataagctccttctcctgctcagaatactcatgagcatgttgcttggccccttcacctcccttcaacttagcctcacgctttagttgagtgagctccttctcctgctcagctcctttagcctggccagcactggactttttcttcctccccttcacagggtcagggatgaagtctactggataaagcccgtactccacaaagttggcctccaaggtcaacaaagtgatattccgagcaacatccagcagttggacaatcctctgaactctgtccctaagaggcattgtaaggggtggacggtaatatatcgggatctcctgaaatcgagtataagtggtgcccatcccttccacaaaataatactcgtcaacaaaaccctcgag

SEQ ID NO: 312680 - DNA, 1712 bp, Cannabis indica
aatatataaattttattttttaatactataaattatttaaaattatctaaatatttatgtatgatgttaaattagaaaattgaccataaactaaaaaaatggataacatccctttcggaattgagactattttattatttatttgatcctcgtttgccaaaggtaagcttaacctgaaagagattagtaattaagaattttgctttcagtctttgtcatcagaaaactgttgtgtcagcatctttaaacgaataggatttctccacgtgtcagtgttaagttataactggatagaactgtgggaccctatgtactttcattatctttttctcatcattcgtagcagtggattgccactattttgatttgatttttcaggaaacaatttcaaagctatttaaagaatacaccaaaaaggagtgtaaaactttaccactatgaaagggaagaaaaataacacctctttcaaaatatctatatataaatccttcatatataattcattctaaattagatttcaccttcattacaaaatatatttttaggaataaacaaaatagacaaatgatcaaatcagatatgggtaaaggcccactttatcacattatagaccataatttttgacttataatataacctataattttaaagatttgtaattttatggtccacaatgtagtaaggtaggcttttacctacaaccaatttagtcatttatttatgaagaaattacattgtatatccaatttactttatttgttttaatttttacatttatttctatattctttaagatatacccacttttatagatgatttttctattatatttcgtaagttaatgtaaatcatgtgctatacttaagtaaatgacaatagtatattaggcaactcaatcataaaagttgatagattttaataagatagaatataaatgtatttttgattaataaataaaaaaaagaggtattcatcaatttatccctttatttattttgtccatttctaaaaatatgaatgctttattagaaaaaaggaacacttcaaatgactttattgacactagaacttaagtcctgcctttctttacagggaagagatggacaatgtggtttggttagttggaaattatgaaaatgagaaagaaatatgaccaaaattaaagtcatatcatatcagcattactattacaaagtattattgctctttagttgaaatgttggaattaattttatatgtaatttgtggtgggagctttccaaaaccacatctatgttttttttttttttaatatcaacatgatgtcaaaataaagtcacaatatttgccatgtaattaaatgattatatatattatataaagttgagtaaatgtatatatattaataaacaaatatacttgtttcaagaaaaaaaaaacaaatatataaattaaagtgtagaacacaccaaaaagtagatattagaggaagagattttaatataaatagttagatacaagcatataaagagtaatatatatatttatatgagaaaatcattacaaaaattaaaaaggcagctgctccaaggaccttatttgaggtcggagctggtgacaggatattaggataatgtatgttttaaagataattgatttaataatataacatttaattatgggctattttcaaaaatatgggaaaattattaaggttatgataaatatggcat

SEQ ID NO: 312681 - DNA, 1422 bp, Cannabis indica
gacttatttatagtcattgcaaaactcaatctaattgggaattgcgttcgtttgaatggaaaactactattttcatccacatttggcaggaatggtattcttggaataaacactcttttttcgatatggtatcccatggaaatttcaacatctatgacattttggtctaatgtcctacatattaaacgtgttccattacataaacctttagaaggattaatgttactaagcagcatgatgggacaattctttttgagttttaattcatgtgagggaagtcttccattaccgattgctcagtattatctaccgcctcatccctactgtaatagaggtggacttctcctgggaaccgtccaattaacaacgaatttatgtcattgacaaagatgttctttggtgttattattgcacgattcatcatggtagacacattttctggatattgctgaatattgtggaaaacattttctatcaagatatttaaagaactgatgtcatcattgtatggtacaagcatttcatttggaatttcgatgttgtcattgattgtgtggtggcatgccattgcccactgacaacacatagtccaaaaataacggatccaacctggctctcatattttgaattagtcgaaatttagtcaaggtaggccacatgtatgaataaaccaagctggaatgtatctgctcttgtctcgttcctttttgtaccacaggtaaaacctgtcaaaaatctcctccaaaaacaattaccttttcgtcaaatggtaaggttgtatcgttgatgtcttgtagtattttatctaacacttctatgtgctgctttcgagtcatttgggcctcgtcccatataattaattttgctgcacaaagtagttttgcaagtgcactctatttgctgacacatcatgtgctttttccatcgacattgagtgggagcttaaaacgtgagtgagttgtacgacctccaggcataatagatgttgccactagaggtgagcataaaatctagaaaactgaaaaaattgttcaaaccgacctaccaaacatcgttggaaccgaaactgacaaaaccgaaaaaccgaaaaaactactaacagttaaaactgccatagaatggtcggtttttttctaggtaataaaccgaccgaaagaactgaaaccgaccgttatacatatttattaatttattaagttttttttgtatgtattatagttactaataatatataaaaaataatatattaatttttttattaatattaaagttaaaataataagataattagttttgaacaattaatttgtatgtttgtagtcgtaaaatgtagaataatgtatttatagaataaattggatcatttttttttaaaaaaaaagttcggtttgggcggttcaaactgaccaaattgaggttcaa

SEQ ID NO: 312682 - DNA, 3667 bp, Cannabis indica
tagaagttcaatattaggttgttaactcaacatacttgtgagtagatctaagttcctggtaaaatatatttccaacaactgcctctaatctcgtttgcaagctgcataaatcgatttacggtttaaaacaatcttcgcgacaatggtataccaagctttcagacgctcttctcatggaaggcttccaacaatctcaagccgattatactttattcactaaagggacaggaaatagcttcattgccctattggtttatgtcaacgacatcatcatagcaggccccaaaaatgctctattgcaccaactacaagcttcacttcacaatcaattcaaattgaaggccctgggaccagtaaaatattttcttggtttcgaaatcgcatgatcatctgaaggcattttcttatctcagagaaaataaactttacagcttctcactgacactggttttgcaggtagcaaacctgctaaaactcccatggatccaagaacaaaacttaatgacagtgaaggcacacctctagatgacccctctgcctatcgtcaacttgttggccgtttattgtacctcacattgtctaggcccgatatcacctatactgtaaatgccctgagccaatttatgtcagcccctcgcactcctcacatgcaggctattcaccacttacttcagtacctcaagaggtgccctagacaaggcttactttacaactctacttcatcattacaccttcggggattctcagactcggactgggcttcctgacctacaacacgatcaacatcaggtttttgcctcttcataggagactgtttgatatcctagaaaaccaagaaataaacaacaatttctcgcagttctgctgaaacagagtacagagcactcgctgctgctagcagtgaagttacatgggtccaatacttgcttaacgacttacaaattcctcaaaaggctcctgcattcatctattgtgataatcagtccgccattcacatcgccaaccaccccacttttcacgaacgcaccaaacacatcgtattagactgccatttcatacgcgaaaagataaaggcctctgcaattcgactcattcctgtcaatactaacttccagatgctttcaataaacgtcttccatccacaattcttgcttctcatatccgtaagatgtctgtatatgacatatccagtccatcttaaggggggaatattagaattataacagaattagtctactgccatctgctactgatagtttgttactgacagtttgttagttatagtttttaccgttatttcagttagtctattctgttacattagctatcttttagctgatatggtttttgtctaaatgtcggttacttcctgtatatatattggtgttcttcttcaattgtaatcaagtagattgtattttctcttcatttagtaaataaagattttcctttttctctctttcgtgttatatacatatagatatatagatatacagatagatgtgactatttaacggaatttttggtttaacagtgatgttaggttttctacgttaactttgacagaatatctcaattacttaagagaatattgttttattaattttataatattgttatatatatatatttaaaaataaaaattatgtagatattttatataaaaaaattaattttattatatatatatttaatcataaaaaaagatatttatatataatcaaatctatatctttatcttttatacattaaaagtaattatctaacgattatttttttgtttaacagtttttttcttggtctaacgattcttttgtaacaatttcctattttttagaaaaagtaaacaaaacattaatcgcttcactcaacgtttttaaaaaaaaaaaagaacaatttggttttcaattgccattccaaattaagggcatttgaaatcttaaaatgcttggttttaaaaactgtgcccacgatttggtttccagtctccatttccaatcgaggcattctaaatctcactaatgcctgtagatttaagaagaatgatttgatttcaatcaccgtattcactatgcccttgatttggttctcaatggccattcccaatcaaggcatcaaaaatctcactgcctcctggttttagaatctatgccttaatctcagtaggaatcttctccaggttattatcttacaaaattgaaagttcgcatttttcttgtaattgctgcatcattagactttctttaactttgtagttttgaaatagtctgttgcagttcagctaagtttgacattttggcacacaaaaaatcatcatgaagcctccatttttaaatcttacaaagtacattcttactgttcaagtcatgctaatactaaaatattttttcttgttattttgtgcttatgtttttttgtaactatgattattatgataaatagttgtttggatttccgtaatttagaatttggctgaacattaggttattttgtattattttagatgtgatttctatcccaaaaaccaacgagaacgttctttacgataccaagggtcggtttcgccttcactcactcaagaatcatgagattggtttctgcaaattgaatgagttccatacattagttattttcttgatttagattttaagcttgtatctcttttactgttctgcgaagatacactgatgttatcacattaaacaagtaataaaattaaatctgcttctttattgataattgaatagaaaagattacattgaaatatatttttatttaaggcacaaagccaaacatattattactaacaacaatataaattaagaaaatcactatagtaatgaatctaagggaattgctatgtatataatattttttattttttttatttttatacaagttgttttcattttgaggttatgctgtttctattttatgggtatgctgttttcattttataaaagttatttccattttgaggttatgatgtttctatttgtataaatgaataaaaagtgagttataaaagtataaatgtgaaagcaccataatattatcccatattttttcattaataattacttatcatgttagaaaaataatttcttttttattaaaatgatttggttgtaggcagtgtttggggctggttggtgttggccttcggtttctagttgtattcgttggttgattaatgaatttttttttgataaaaaaataggtaaatagtggcataagtacccaaagttttaagtttgtaagtggcataatcccaatgtttatttttatgagtaatttgtggcacaacccccccaattatcaatttactttcaaaaaaccatccaacctatattttggtgggaaaatcctccaaagtactgttccatttacatttttaagttgtcgtctgtccagcctcgttaagtcttaatttttccaacgtggcaatgacaggtcactaaaaaattatcctacgtgaccatattattttaaaaaataaaaattaaaatgagaaattaaaataaaaataaaaactttaagagtaatttgcggcaaaattcctccaactatcaattttacttgcaaaaaaatatccaaccttaaagtgttttggattattttttgcaagtaaattgatagttggtgaggttttgccgcaaatgactct

SEQ ID NO: 312683 - DNA, 652 bp, Cannabis indica
acatcaatacatctcttctagggtacaccttagaatttccaaaacgataatgagagaaagcataattgtagcatatatgtgtcgtccttgagaaaaattacgtagaatgtacaatatttagtgagtcagttttgagttattccattcttcttccttgattggaacgatatagatatatatctaagaaggaaataataaatatttcaacattgagtcgtcaggatggccgagtggtctaaggcgccagactcaagttctggtcttcgaaagagggcgtgggttcaaatcccacttctgacattatttttcttcattttctttgcacaatcttctcatatattattctatttatatatttttattttagcggttgtttgtttgcctgcaatgtacaatcattatatagtcacacccccacatcatgagcttgttttagctcttcctaattgcctgatttagggcaattgtactcttgcttatattagatctcgttagtgataagagaaaaacttttgaagcattattattttgtttctaaaacatcatgctcacatgtgagaaggctacccatataccatatattaatcttaacatcatttcatcttttttttatgagataattacaccacgtactgaaatttttaattttttt

SEQ ID NO: 312684 - DNA, 1443 bp, Cannabis indica
gcgatattgtgcagtttctaattcagtgttggtgtaaatatagggttcaaggttgagagtttttaggctgtgcgggtttacgtgaggaagggtttgggtcatgtgagttcaaaggttgaggatttgggtaattataggaagatataaggtttgtgtgatatcaggttggggtgtgtgtttctttgagggttggggtgtgcaattctttaagggtgggggtgtgcgattggttatctttgtgaggggttggaggagttctgttttggcttcgattgttaccaattatggcttctagaagttgtcggttggaggattagaggagaagtatgcccatgttcaattggatggtgaggaggagtgtggggtagagtttgataatgtgtttgaggaggaacaacttgtggatgatcgatggtgtattgttgggtgatttttgaatgcacgtgctattatttttatgccacgaggcatacaatggcaggactttagaaacatgtgaaaggaagtatgttaaggaattagggttgaatctatttttaattcaattttatcatgaacttgatctcaagtatgcggttgatggaagtccgtggacgtttaatcaacactaatttttgtttggccgagttcctaaaggggaggacccgaaggctgtggtgctagataggttggatccttgggatcgatttcatagttttcgtttgggttttacgattgaaagtgtgatttaagctgatgcggattacattggtacttttgttgattcaaattcatagaataattctggcatttggcatgaatatataagagtctgtgtgactgttaatattgatgaataactcttgaaacgacaaatgaagatgagacagaaaggtggagaatggtttcagactgattttaaatatgagtttgttccaatattttactttgcatgtggtattattagccattgtaataatttttttcataaattttttgatatgccaataaaggaggttgtgaaatcgtatggtaagcagatgtgtgttcaaccaaagaagcaaaattacctattgcactcttaatatctttagtcaagtcgggagttggctgaatcgatttaggatagctttcttgagaacgatgtcgtaccagttgatgattgttgatattaagacactataaaatgaaagtttttagcgatagaatatcataaaatcaatcacatgaatcaagggagggtagtcaagaataatctcactaagggtattattattgcaaataacactcctaattttgtgagaagtaatgagctggcaaatagaggagttggtgtcaaagccggccctgaaaaaatgagagcctaagatgatataaaatttcggatcccttaataaataaattaaaaaattaacctaaaaaattatatgctacatttcataacataaaaataaaaaaatatat

SEQ ID NO: 312685 - DNA, 1803 bp, Cannabis indica
aaataccatattcatatacagatttgctaaaatgcagatacaatgatttacctcttctaacgcgaatctagaacaactaactaggcaatgtaggccatttgatcatcggtggagcatggttacttgtcattcggcttacatggtgcggcagttccacccgataatttcaatcaatggtggacacaaagtggtgtaggttcgttgcttggagcggtgcgaggtttggtttcagacaatcctagtttaggctactattggttacatttcgaaaaaacacaccagttccgaaccaagaactgaatatttttgcaagttttgatggttgataccaacttactagcacattctacaaaattagtcctgcattactatcaagtgatacattcagctagtgatatttttcaattttagttacaatacagttagtttatagcattcttttgggctgttgcataagcctattatctacagtggtttttacaaaaatattgaattttgagcaagaatttataattttactcacacggatttttttttataaaaatactgtctttttataaaacaaccgtaaaataacaaaacagaacaattaaaacaacagtagaacaataaaaaataaccgtagaacaaccgtcaaaacttaacacaatacatagtataaaacttacacaatatttttaaaaataagcaaaacatttttgaaaaatgttccaccccatagtaaaaaagaaaaaagttaaaaatttcaatatatagtgtaaaaattccttatctatacaagggctaataccttcttttgtacattatatggaaacataaactaaataaagatatttttttccttaatatggtatcagtacacatttaggatttccacctctcctcttctgtcttctcctttaaagctttcatccatgaggaagacgtgcagctcattgtcttcaaagaccttcagctccatcacgcttgtcggatcaaagagaaagaatcctctgcctgcatacgattctctgggccttcataacccccttcttccgccagccaaaatgttctcctcaactaaaactcttatttgatcctctcaagaatatcacaatccatacttcctaggctctagtgatcatccaggttttcttttatcaactactcttctcataggtcaagaacactaccaatcttgaaagagagctgctctgatttccattggtgtgaagaataagactccattcatcgatggatctcttctttgtccacttactaatgatctaattttatgttattggctttgttgcaacaatatggttatggcatggatactccagtctgtttcaaaggagatttccgccagtattatgtttcaatattgtgctgtgaaaatgtggaatgaccttgctaagcgtttcaatcaacgaagtagcactcgaaatcttccaactaaaaactactcttcacattattacacaaggagacaaagatgtcaatgcctattttaccacactcaaagctctctgggatgaactcaatgagttccaaccatacactccctgcacatgtggttgtacttgtggcgttatgaagaagctcgtcgattactttgcttgtgatcagatcctttaatttttcacaggactcaatgagtcgtacgctgcaatcagggcttaaattcttgtaatacctagattaaaatagtatttaattttttttcttttctcttgagatattaattgtgtgaggataattatctcatttatctatgttgttagtgttaggttttatgccctaaataaaactccgtttcaatgt

SEQ ID NO: 312686 - DNA, 2054 bp, Cannabis indica
attaacataaataactgctaatttccaaattaactaagcgggctttacaattagcattaattattgatattttatgcttatgcatggttttatattgtggaaccagtttttagaaattgggcattagagttgtaaattctcaattttggagattttattaaactctaagtgtattatttatgtcatatgtgaaatctataatttttatactttttgcttagtaatgatgggaagtacgctggatggtcaatagagtcacatgggtgaatttagaactttcatttagtggagtactcataaaatgatatttggattatcggggataagcagagttatggtattggaccattttgcccctaagccatttaattatttaaggttaaggtagaagggcaattttggtattttgcttggtgagacaagtggctaactccacttttgctagctagcccttaaagagtaaaaggtaaatactaattatctttaattaaggaaaaatgaaggaataacaaaaaaaaaagacaaaattagaaaaacccaattcttgttatctctctcatgcttcggcttaaccgaaaactaagggagaacctaggcattttcatcttgttcaaagtgttctagcataattctagaagtacatcaaagttataaccctagtccatcatctctgtaagtttgaaagcttctttttgggtttattatgcttttgttggagttaagttctatttagttagggttttgattgatgatgtttctgcagcttagtaatgttgttttatgttggtttaagttaattttgttgtttgattttggagttgagcaagtttgagtttaagaactcaaacctagctcaacaatggtgatttttaaatttttgtatgttttgaggttttgttgcttagaattggttcattttgatgctatttggttgttttgagtttggggttgttttgagcatgtttggaggctctttgtttttctgtagtgaaaaacgacatgccgtttttgcagaaatgttcttccgtttttactagtgcataactacaaaaatggctcgtcgtttttataaaaatggtctgccatttattaggaagttttctcgtttagtcatttttcttatgtttcctcaatgtttagagtttttccatgctatttatcgataggaaaacttctagttttgagtttagatctctagaaaggtcttagaaaattgtttacccattttacgtgatttgacatagggcctccgttcagcgcataaatttctatttaagtcgatcgacaaaattgaattcagattcgaggtaagactagcatagagtacatatatgtatatttgtatgtgtattatatgtatgttgtttatgtgattcatatgctaccaacactagtacgatagcgatacttagtgcattggtacaacgtcatatgatgtttaaaggacaatccagtgttaccaacactattatggttaggtacgtagtgcatgtggtaaaatactcagtggtactcggggtacagttcagccctaccaatgctagtacagcagcagtacgtagtgcatgtggtacagaggtcgtaccttcgttatgaatgttctaaatcatttgttaagccttgtggatagttgtatgggcacctagatacaagtcagtgatagattgtatattatatgattttcttactgagtctgtcgactcacaaatattgtttgcatgtgtaagtagaggaaaggctaaggctgagcaacaatgagtctagagttcgaggatgattgtacatgtcaagatagtacgacttggagagttgagtctcgagacgacttgggctaattttgtagacgatgcgtaacaaagttgtaaagtttattttgataatgtaaaaaaatttaaaaagcggaatcctgacctttttttatggttatatgtaaatgtttataaaagtttatagttaatcaaaagttttaattgatcatgatttttgaaaaaactctttgattagcaaagtagtgcactataattaaaaagtcactgtagcgtacctaatcatta

SEQ ID NO: 312687 - DNA, 2368 bp, Cannabis indica
acattttatatgaccaacaataaacacttgttgtctgatttcagggaatccaaaggtgaaaaatttgtcttgggaagcaatcaatcatgccaaattgaaggatcagatgctataagttttaagatatttgatggggttgtaaggtctttgacaagggtcaagtatgtacctaatcttgctagaattttgatctctattagtgtacttgatgacttaggtattgtgagcaagattgaaacaggaactatgaagttgagcaaaggttccatgaccattattaaaggtagaaaacataaatgtctgtactacttgcaagaagaactagtttcaaaatgccacaacacaacagtacactcaccagaggatcaaaaggcaataccacggcacgtgagattaggctatatcactgagaaatgattgcaaatcatgagtgaccaaaacttgctatgcaaagataaggttagtaaggttgacttctatgaatattgtgtccttgggaagcatcataggcttaagttcaaaactggaactcacaagacaaaaaagatccttgagtatataccctcatatctatggggtcctgagaaaactcctacacatgatgggagtgcctattttctatctctagtagatgatcattcatggaaagtatgggtttatttacccaaattgaaaaatgatgctttcaataaattttttgaatggaaaatcctcatggaaaatttaactaatttgagacttaagaatctgagaactgacaatagcttggagttttataatgatgagtttagcatgtattgtgcaaaggtgtaaattatagacacagaactgttaggttgacaccccaacaaaatagagatgtagaaagaatgaacagaacattgacggacaaagtcagaggcctcttaatgcaagctagactgccaaaataattttgggaagaagtagtgttaacagcagcatacctagtcaacaaattctcatgtagtgccattaaccttaaaatgtcagaaaaagtctagtctggtaagcccttagatctgtctaacttaagggtgtttgggtgtgcaatatatgcacaccaaagtgtgggaaagctagagcctatagcattgaagtgtgtgttcctaggataccctaagagaaccaaaggctacaggttgtgggtaagggagaaaacctggtttgaaaactatgcttagtataaatgggatttaaagaagatatatttccttgtgttactaactccaattctagtgcaggtttcaattctgaaattaaccatgtaggtaacacaacgaattttcaaaccagactagatcatggttcagaaccacaaggacctgacctagttcaagttgaatcagtttaggtggagcaaacttagaaagaataagaccgagcaaaaattgaagtgacaaatgatgacactggtcaagtgaaacctaatgaagacaaaccagaacctcgaagaccttgcagattatcaactcacaagagatagggccaagagatctccaaagccaaaccagaagtttaactacagtgcttgggaagagataataacatatgttttaacatacgttgctggcttggacaaagcagaacccgaatcttataaaaaagcactaacaagaattgatttcaagaaacggttgtaggccatgaatgaagagatgagatcattattgaagaataaaacatggatactagtatatggctccgatatcatttgttggttattagggttcatatcaaaatcgcaattaaagtaaacaaaataggatttaataaaaataaataaatctaatatgaactataaaaagcaatttggataataaaatgcaagttttagcaatctttcgtattttactcaaaaacaaatttaatgatttaattaaatgctacaatataaagtattttcacgggaaaaatatatataaaagaaattttaatgagcagaagttcataatttgtataaaagattgcatataaatgcatatgtgatattaatttttatttattaaaaatatagactagtagaatagaaaatactttccataaatagtttaatggagcacatagaattaattattattgatatttttatacaaattacttaaaattatattatttttatctatcaatagaaacaaagacacatggaacgggttacttactctcttaacggtcaaagtgaatcctttcattccgaattaaagaattcggaatgaatcaaatctccccaagtaggattcgaacctacgaccaatcggttaacagccgaccgctctaccactgagctactgaggaacaacaggaggttagctctcataaagttcaattcccgttctcaacacatgaccca

SEQ ID NO: 312688 - DNA, 1735 bp, Cannabis indica
tagcaatgtaggactatctaacagtatttctcctgaccaacaaacttcttaatccaactctaaagcatattttgccaaaccatgtgcaacatggttagcatttctcctaacatgagaaacaattgctttaaggaaaaaggacgaaagacaacgaacatctaaaatcaaatttgagaaacaggccggacaaattgtagatgtaacaatcaaagcattaaagactataagcgcatccatttcaatattggtgatttctaattactgttacagcgcccaattaaggctatggaatagtacttttacttccatttcatctgagcaaaaacatccttggactggctttgaaagagcaacaacaacaaggccttggtgatcccaaacaatggcacccacacccaaagttttcgatgtagagttcatggctgcatcaacgttaagcttcaggcccgcatcattaggaggctgccatggaatgtcttggttgtctggtttcctactagtatgagaagcagcatgtaaggtggtaatagcaccagttcgctattgttgctgccttgtagaagcatgaaatttttccaaataacccttagcaaaagcagttgtacacttcccttatgtgattgtaccatgttaggctatttttagcctatgtatcgggtcacaattagagtcatttttcgattttttttggacagaattacgcttgttttctatattttcaagtttcccgtagctgttggacgttcaaggcttcaaaagtgcaataaaagacaagttgagccaagaaaaatgcaaaaatcaagattcggttcacttatggccgcggcagatttatttacgaccgctgctaagatttggcagagaggttactttcgagctggggtcagtagccgcagcaagctactccaccgccgcggccaagtcagcactcgccgcagtgagggaacccatggccgtggcgagattccgtacaagtgagggcaaattcatcttttgaatcctggaacgagagataaaaaaaaaactgcgagtagaagcctagatgaggcgatttttagacctagaaggcagtcaagagcggcgagaggagcaaagtggcgacccagattcattccaccaacaatttctttcttccttcctttttcatttccttatgttttaggaataattatggatttgaacataagctaaactctcatttagggaagatgatgaatgttgtttaaagttttccctagttattgttatttgccattcatgttcattctgattgtgaaaatattgtgttatttccatgtttacgcttgatcaccttttgcatgttctatgatctcaattcgaaatctgaaaagtgagaattgaaaatgctaaactttggataatctaggtttatgtgaaacgaaagtatttgcatgacttatgtgacaatttagattattacttaatgctgatttcatatgattctaattaagagattaattagggagcatgtgatctagaacctagaagatctgaaaagagctaggttaatttgaataatctgtcattcacaacaggaattgggctagtaattagacattaacaattgggtaaacatatcaacaggattctcttccctatcttctcatcttaattaattcctatttgtctacttaagcttcttgaatttttattctattctaatcttgaaaaatattggtttgccaaatagaatcataaatttagtctagtggta

SEQ ID NO: 312689 - DNA, 938 bp, Cannabis indica
acctgcgttgttgaagccgccaaagagcttcaacaacgttgtccttacaataaaggagccgttgtatggtacgacaattgcctcttgaagtactcagacgaaaacttctttggtcaaatcgataacagtaacaggttttacatgtggaacgttcaagacgtggataacgctgagtcgtttaatcccaaggtgaaggaactgctgagtggtttgtcgtataaagcttcaagaacttcaaagttgtatgccacgggagacatggatcttgggtcgggtcccgacccaaagctttatgggttggttcagtgtactcgggaccttaatgggatggattgtcaaaagtgtcttgatgatgcaataagcaaccttccaaactgttgtactggaaaaagaggaggtcgtgttgttggtggtagttgctatgtgagatatgagctttactctattgttgatgcttaattagtttattattaaggttaacctattaagttttataatcacaccatattatgtattggtttaataaatatataattaagtattaattagtacctagctgttttcatcatcttgatcattctctaagttagaccttcattcattagtccaaacaccctatgaaaattttgaaagaaaacaaatataattttaaagattttttttaattaagaattctatttttaattgaaataaactttaatatataaagtttagaaaaattatgaatatatgtatataaaaaatagaaaaaggttcataaatataaaatttacagaaaaaatcttcctccatttttgttatgtaaaagcatcttcaaaatagtgatctattactaaaactagaagaaagttatatgcaaagcacgtataaagcacgtatacttaattttatactagatactttttaatttaattaaaaatgatacaataaataatcat

SEQ ID NO: 312690 - DNA, 835 bp, Cannabis indica
acaacaacaatggtgccttcaacgttggcactatcgctgttcctaattctggaggaggaacaacccttgttgatgccattatagaaggagtagggcgtactaatgtgactcccctcgacctatttccttaatactcatgccatgctagagaagcctcaacactgacagctactattggatagtttccactaatcacgcttgccatcgcctcttagataatttgatttattataacttgagacccttgtagcttctttgactactagctcatctccattcatattaaagtctattctctaaagagcatcttcattaaaatgctgctcacagcactttataaagaatgggacttctgtgtcagggaatgttgaccagttgaacgactgtgctcctccattagatgaccaagcacggtagataacatcaaaacataagccatcataaaaagtgacatcagcaacaaccttgtcctctcgtttaatcccttgctctctcagatgtttaacttgatcctcaagcatgagcagcagctaaagttttcttatcaagtgctagacaagaagaattttcaacctttgaagctttcttccgagcaacagccgggttttttacaagctactctctcaggctttggcactctcagccacttctcagagaccgaccatacttttctctagaggatcagtgtcttcctttaagacagccacccaatcttctgcagaaacaacacgctcaacctgggcactagatgtgggcgctgggatgtcaacttgggcgttgggcctagagaaaccttcagtaaaacgaccatcatcactcaatattaatctaattg

SEQ ID NO: 312691 - DNA, 1529 bp, Cannabis indica
taaacctagtaacatgatagggcctatccaaatcaatttgacttgtgtgagcctatatatttgcttataagcttagatgcataaaggaagtccatttatttctaaacatttaaatggactaggttgctagaataaaatagaaaaaattacgctagagaacctcaatatcaatttatttacggatttgttgttagctatttaaataccattgtattttagatatatttgtgatacgtataccgaagtaaaaatgatgaagctattttttttgtttttgtcctaggcgtatacatgttattatcttcctgacaagcttttcattttcctcataagcttccactaatattttttcttactctcttttttcttttttacattcacactactaaatttttatatttaaaaaaatatttctctttcatatttctttttcataagtttaaaatattttttttcggctatactgataattgtttggtctcaaaaattatactatttcgatctactctttaaaatgatcattttaatatgtgagaagcatattttttttcattatcagcaaatatgactaaaataaaaaataaccttttagtttttttttttcgttaaccaataagcattttttttttatttttgaaaagataagtattgttttccaattaaatttattttataatttaattttgatggacttctaatataatttacaaggaaaccacataatatcttaaatatcacatacgaactatattaaaatatatatttatatatactaattttgctaataaacttatagtatctttttttatactttagtataacttatttgtttcttaattatgtttaaaattagtaaacgttgtttaaaaaatgtaacaccaaaatatttcaaacaacaaaataatataatataacttaaaaatctaaaaatgaaataataattttaaagttaactatgaagaaagtaaccaaatatatttaaagataaaattatcttgaaataaagcttttctttttcaaaataataataataacaacaacaacaacaacaataataataataataataataataataataataataataataattttgatatgtaggaagaatctctatagtttttaaccatgttcgaaaaaaaggcaaccaacattaaaattatttttttttgtttcttttttataacattttaacaaaaatcataaaacaagtacattataaatataaagtttttcgttctgttatttataaaagttacaatatggtattctaataaaaaatttagttaataaaacaattttgatatgttaataaaattactaaataatatcttatagataataaaattagttatattatcaaaattactatatatatactaacttttctaataaaatatatggtaagtgtttataatttattgataatttttgaagataataaaattattgctgataaaaaaagtatcttaaaaatcattaaaaaaaaaaagaaaaaaacagaaaaagagaaaaaaaagaaaaaa

SEQ ID NO: 312692 - DNA, 898 bp, Cannabis indica
tttggggggattgataatccgactgctgacagcttcaacatcttacttccatttgccaaaatcattcagcccaacatgcaataagagcagggaacgtactcaaccaaagtcttcccgagagaaatacgcttgagttcttccttcaaaagctaagatcaagagtgaacccgtagataagaagcacattcgaccaaaattttccaaatcgaaaagacacatctgaatccctttttatacatctccactagcttcgcgtagagtttggcccaacgagttgcataaaaggttagaatgagaagctgacaaggaccaaagtaagaaaaatgtctaagtctaaggcaatcgcagacaatgctctcgtgatttgactttgtgaaaaaattagacccgaaagaggatcgcgaaagaccgtgtttcatggagaggggccacctcctggccatctccaaacaaggaaatttccaggtagcgagccaaaagcacaagcacagcctcaagaaaagaagggtcaaactaaaaagcggttcttggattgaccaagagacaattaaggctaaagggaaaaaggttgaaacactggccgttggaaccaagtgcttcagtaaacacaaccagcccctagatagtatatcgcaaagaatcttcaagaaaggaacatcaaaaaggaagatcatattccattactaaaagccccctgcggctagggcaaagtttaaactgtctctgcggctaaaaaagtataactaagagggggatatacaagaaaaacaaacaaaacaaacaaattttgaaatgggtcggccagaggttcatgattggacattgcctgacgaagaggatgggcctgccccaaacatccactctaccgtctctgtgtaaagtgttggaaattatttta

SEQ ID NO: 312693 - DNA, 1521 bp, Cannabis indica
ttaaaaaaatatataatataattaataaaaaatactcattatattaatatatattgtataaaaaaatagactcatattatataaaaaataatataatatatattatgtcctaacaaatcacaaaatcccatttaaaaatatataatatatattaaaaaaaagacatataacaattgaattgtatctctagaaaatgctagaagagctcattagtattttaaaattagtatgtaaagtctataaatatgtaacggatagttattattatatatcaatcaagaaaataaaattttaattcaattgaaagattaacactctcgaagaatatagtgcgttttaatattaagagatttttccataataagtaataagtcattttcgagataggagaaatctcccaatattgaactaaaattttatttttccaacctatatctaatatatagactttacacactaattacaaattactaataaacccctttatcattttcttagtctaacatctcccctaaaaaaatatttaaataaaaataaaaaataaattataattaaattattacaaaggataatttttattaaaataaaaattatatatatttttaatatatagtactactataggtaaacacgcgacactaaatcattactgtcattaaaattacacatgcatatacatatttcaagaaaaaaaaaagttacataaataaatataaatttatatataaataaatatattttgaatatccatatatatatatatataaattaattggtggtgcagaagaacatgccaaagttggttccactaatctagattagtttaatgagtaatgcaaatcataattaagattagtacaagaaattaataatataatattaattaattataagaatataagaaatataataattaatttgaaaaagcaaaaaaaatagctttttcatagagatcaaccaatgaacacacaacacaccaaacatttaatacggcgctaaagaaataaagcatcataaaaagtatatatgctttacaataatattacttaattaattctataattatatatttatataaaataaaaaatgcgatgagtgacttctagacttttcgagttttaattaggtcaatcgatcgggtatgatcaccgatcggattagttttgtgaaaaatatacctccaatcggatatcaaatcccgacatggaattaattactatacagaacttggttcgatcgctataaatagaaggcataagacttcatttttattaacttctaaaagctcatattttatagtgcactttctttacttcctctttacttccttaattaatacgagaaactcaattaactcaaaagtttatctaatcttgagtattaattttttgatgataaaaacattaattttattactatttattagaatataacgaaatatgccataaatatattttattgttataaaataatataaaataatataaagtagatgagaagaaagaagaagaagatgaagag

SEQ ID NO: 312694 - DNA, 620 bp, Cannabis indica
attagacaaaagtctttaaatctgacaatctcaataattcagggggcattttgaacgaccttaaaagttcagggggtatgatttggtatatgtcaaagttcaggggcaaaaatcctaatttttttatttagaataatttttaattattagatgtcaaagttaaatcaagcgcctaaactatatactaaattatattaaataccaaataaaatggtaaatattattttgggtcatgtgttataaaaattattaattaaacttctgttttgttaaatgacaattcagacactacgttttttaaaatggtacaaatacaaaatagaccttgaattaaattttatcagagtctaatctgtaacttttataaaatacagaatttaaaaataaatggttaatttgtttttctaaaaaaaatagttgagttttcaatatagagaatactgatagacatttatatatataaactgtaatgtatatgtttaagtattaagtgcggaattaatcaaacatatatacactatgaaaaaggatcgaaatacctccagccattgaatcttgagcttcaaacccacataagctttgatctgcaaaggaaattgactaccatgggtaatcgggct

SEQ ID NO: 312695 - DNA, 544 bp, Cannabis indica
tcaagataaaatcaatctaaatatgaaaaagatatgttagacaagaacttggggtttacactttgtaaatattataatacaagctactacagaccctttgttatgtattaaataatataacaaacattgtattaaaaattttggtcgtaataattaatacaatacatgctttatctaaacataatgttatttattatttaatacaatacgacctttatacggcgtaccaaacaagccttaagattattataataatataatttattaattataatatatacatatggaacacttctcaataagtaatatccattgatggttactaaattagttataaatattaaaccatgagattttgatccagcggataatataaggaaaatttgaatttctatgcttaatttaactacttaattaaaaaaatatatctttttttatactatatcaaaaatatgtttgtatacaaaatatttaaacatacttttagagaaatcttatcttaagttgttcatatcatcttacaattgttcaacctccataaatt

SEQ ID NO: 312696 - DNA, 676 bp, Cannabis indica
aactaaagcaagcactaacaaccacccccatcttggcaatgcctaatttcaaagccccattcttcattgaaacagatgcttctagtgctggcattggtgctgttttaagtcaagaaggaagacccattgccttcatgagtaaagctttgagtactgctaaacaaacctggtctatttatgctaaagaaatgctagcaattatggaggcaattcgcacttggcgaccgtatctcttgggtcagaaattctatattcagactgatcaaagaagtctaaaatattttttagatcagcgtgttgctactcctcaacaacaaaagtgggtggccaaactcttggggtatgattatgaaattatttataggccaggacgtgaaaattcagtcgctgatgccttgtctcgacgagttgacagtcctattctgaacccattgtttgtctcacacatgtcaatatgggatgacattagaaaggcatcaacaactgatacctttctgcagagtttagtccagcgagctaccaatgagcctcaaggaaactttttattaaaaaatggtttgtgcttttataaaaatcgagtggtggttcctactgccatgcgtgaccaacttcttgaagagtttcacaataacaagatggctgggcattctggagtcttacgtacttacaagcgact

SEQ ID NO: 312697 - DNA, 1252 bp, Cannabis indica
tttacttaaaaaagctaattttttttttttaattttgggcccccggaaagtgtgggccctaggcacgggcctagcccgcctatgcctagggccggccctgatgatcggttttaatggtctttgagggcacttgatgcctccacttacttattcatataatatatataatttcttctactttaatttatggtaggccatcactcttctaataaacccttatcaaccaaagctcctttgttaattaatatcaccttttgcactgtatttgcttaatatttataattatattgtacaagtatatatattcgaagaaaagaaaataattataattaaaaaaaacatgtataatttggtatctaattctagctaggatattccaatctatatacacatccgctttattaattaattaatataaaattctctcaccaaaaaatatatggaagaaacgatgttgaatttgtatgaaaaatatatttaatgaattatgagaattattaattgagctaaaattagtaattttttgaggatatatataaaagtgatattgtcccatattaaatactccagaaaattagcatgcatgctcgtattatctgagctagtaactatgacttggattcttttttatttctttttttttttttccttttcatcttttccaataaagataattattatcgtatattttatctgttatgtgccgttcttatttttgcttaataaattaaaagtatatatatatagtacttgatagtacattaattgttcgattttaattaattcgatcgtataaatatatattatgcaaaaataatcacatgatgtgataaaatactctatcgatatttttagatagaaactatatacagtagaacctctatttaagaatactctatttaagaataacctctaatttgtataaaaaaatgaaatctcaatttgggccagttataaataagaataacctctatattgtaattagttatacattttttaagtcccgtattaataaaatatacctctatataagaatacttagatcttaaataaatatatacatatattttataaatttacttatgtaaaattaataattttatttcaaattatagtacatgtataaatattatatgtactcgaaaataattttaatataatataatattaagaattgtttattggtatttttgttacattgatattttttgatattttgatttttttttttcaagtgtaactctatttagtt

SEQ ID NO: 312698 - DNA, 678 bp, Cannabis indica
ttttggcccaaaatgtgttatttttctttttctgattgaagatagtaaaatcttgtgtataacaaccccaaatatctatagtttcagtttcttgttgtgtattgcttaatttttcttttattttgttacatcaaatggtcaattttagagggagaatagtgttcttcggtgtgtgtgaatgagtatttttgctacatatcaatagttttatatattttgtattacatttacatttttataccatagaaaaaaaatcacatcattttcttgttagaaaataaaatataaactcagaatattaatatatattaggacttacatctttgtggtagaatgtaatatcattaatttggatggttacaatttgacccttgttaaaaaataatacttacaaacgattttttagtttatattacataattaaataaaatacttatttaagataatggaataagtctagaagaaacagaaaaaaaattgtaaataaaataggatcagtcgtcaatatatatagaacgataatatccccacgtacacttatacagtaattaaataattagacttattaatttataaattacaaacataatacttgttgggttttatgccctaaataaaactcatttcaatataatcagatttacttataaatatagatcagaaataacatttaatgtt

SEQ ID NO: 312699 - DNA, 682 bp, Cannabis indica
tttttctgttttttttcccaagaattataatcaaatagagtaagtggtatattgacacaaatattatatttttagtttatgagtaatttgtgacgtaaatacttaattttaactttcaattacaaataaatatctaagtttaatttttgacggtaataatacttaagttatatttttggaacttccgtagttacctgatcgttaagtttaatttctgatttagcttcatattgaattttctcaattttacaaagtaccctgcgaggtctttgttgggttttgtgcccttaataaaactctatttcaatgtaatctttatcatttaattatcaataaagagacagaagtattttcatcacttatttagtgtgtcatttggttcatattatcatttacatgtttctttgatttataaattcatccaaacccttatcacattaatattcttgtttattgtgttgtcagcacagtggaaagtaatcaagattgtgtgattaaatatatattcctagatttatcaaatcacagggtttaactgatatgataatctacaacatagtttacttgcaccttggataagtgctatgtcttttctagggcattggttaaagtaaagcttgggttggatgcatggagtatgcattgaaaaggaccgatattaaacttggattagatatgataa

SEQ ID NO: 312700 - DNA, 3989 bp, Cannabis indica
aaatcaaagaacatgtatactcctgagattgaaccttagcatgtctggattaagatcttttgatataagatcaaccagtgatattgacttagaaagatacaacgatatgattataatatctttaccaagatcaatatctgtctcagtccaatgtatactccatacattcgaaactagtatactttgccaatattttggaaagaacataacacttatccaaggtgtaagtacacttcatcgctgattattacattagtataaatccagtgcactgatgaatcagggacattgtcttttgaagcatataatcacaatcatattccactgtgttgacatcactgtaattgtgaataactatatgttctggacttaatagatttttttatatattaaaccataaacatagaaaactacatgtaaacataaatgacttctaatcttatattgataacaaatcagattagattgaaatgggttttattttaggacataaaaatcccaacagttccatcgaggtctgataatcggtaagtcgcactaccaactttttcagcgattaggtacggtccctcccaattatcaccaaaaactccatgttctgagtttcgtgtgtttggcatgacctttcacagaattaaatcacctactgcaagacttcgttctttgaccttgagttgaaataacaagttgttcgttgtagataggctggatttttcaaatgagcctgatagcgcttctcttctagaagatcgagctataacaactgattttctatagaactgctgatgttaaaaacatctctccttagagatctttctccaacctcgactggcaccatggcttcgcacccataagagagcgagaagggggtttcaccagtcgtggatcgaggagttgtattatacgaccacagaacttggggaagttcttctggccatgtcccttttcgttcttcaagtttacctttgatggtatgctcaactattttgttaattgcttctatttgcccattactctgtggatatgcgactgctgtaaaagcttttttaatccccaattcatcccatagttggcgcatctccttacagtcaaattgtttaccattgttagaaattaacttataagggataccaaacctgcagatgatggcgctctagataaactcgtgcaatttggcagttgttatagtcgcaagaggcttggcttcagcccattttgtgaagtaagcgacaaggactacagcgtattttacccctccttttccttttggcaattcttcaattaaatctacgccccatacgcaaagggccagggactagtgatgaaatttaattggctcggtggcttgtgtacataagtagctattcgctgacacttgtcgcatcttttggcaaagctagctgcatctgctcgcaacgttggcctgtaatatccctacctcatgatctttaaagcaagggagttgccaccagcatcattaccgcagattctaccatgtacctcttggagtatataatcgcactcagtcccatcgatacagttgagtaacggctgactaaagcttctgcgatagagcttgtcatcataaatgacataccgagtggctcgatatcgtagttttttggcttcagttttatctttaggaagcattcctgttttcaagtagttaattattggggtcatctatgtgactttgttgactgtatcaacttccatcatctcttctcattttattgttgggtgaattaatacatctataggaattacatcgactaattcagcttctcttatcgaggccaatcgggctagagcatctacatgagatgattttcatcattatcatccgcttggggatgattttcaccatgtttcttatatttatcgaattttccttctctgattagttcctcaatctcgtcctacaagaaccagcattccaaagtggtatggccgatgtccttgtaatatttatagaacttttttggatcccttttgtcggggttacctctgatcgagggaggttttctaaaaactacattcttttcctcaatcgcgtagatatgatcgtgagggactgccagttccatatagttgacgaagggtggtcctcattttctctttggggatgtttctttctttgagggggacttggccaacttcagacttcgctgcctctgagggcttcgtcttctcgggcttcttcctctagagttctttactttaggacttcgagatcatgaccgtggtacaggtgactcgcgcttatccttccctttttctagctcagccagagagttttcaattctcttatgtgtctcagccatcgcaaagaattccaccagcgattctgctcttcaagcctgtaactctttccaaaagtcggttcttggcaagacacctataatcaacatacaaactaacgaagactcgggggccttctcgactttagttacttcagcattaaaatgtttaaaataatcctacaatgactcaccgacctcctgcttgatgttagtaaaagttgtgtaaggcggtttatgtgtcattgtggcttggaaatgggtcaggagcaaatccacgaaggtttcccaagtcgatatggacgcctcaggcaactggctaaaccaatcttgagcattgtcctccaaggttgtcgcaaggatgcttgctaactgcggtacctggtctacttccataattgtattaaactttttctaaataatctatgggattagtagtacctttatatttcagcaactcagatagtctaaatcccttaggcaatcaagcttttcgcacttctgtggtgaagggagaagtcccacgaagcttgtaaataggctttctctgctactcaattatttttattgcttgcagtaaaatgctctgatcaacaccccctagcatgataaatttgttctgagtcgttgtaggtgcactagcaatcgcagctatattcgctgggattactacctcggtagtcacaactagtgcgttaggcaggttgacaacatttgctaggttattgtcgttgtttatgccttgatcgcccaattagggatcacgaggctctttatagtttcagggcgtctgggaccgcgccctagaaactgtgttgaggttttcacgaagatctcctccgtgaacctaataccttcctcctggcggtgtttccacagagccagacctggtatagacactagaagtacgactttgtgaggatgaagaacgagattcaacatcgtctacctcattatggagttgagccctactgcgagggttgcgtcgctttgggtcctcctcttgtagcacttcccggttggagtttcgtgcgacttggtccctctgtgttggctgattcaagtcaagtccctcttatcagttgctacgttccctgcgagtgcggttagttcgtcgcctagtattcattacctgagggttctctgagtgtgtggtcagtactcgtggaggacatcaggtcctgacccttccattgatctcagtcgaaaaagcctgcatttggtcttataaggcagtatattgggttgtggtcaattggatgataccttcaaatacccggcatgtctgaaaggcaggaactgccccatagtggtcgccgatgtagacgtttctctggcatgaatggcggttttagggaataaattgagaggagtaatgggtgttcgtcccactcctccgttgatggtgtcaacatgttgggattttatgccctaaataaaacccattataatacaatctgatttgttatcaatagaagattagaagtcatttatctttacatgtagttttcatgtttatggtttaatgtgtacaaatctgttaagtccagaacatatagttattcacaattacagtgatgtcaacacagtggcatgtaattgtgattatatgcttcaaaaggtaatgtcccttgattcatcagtgcactagatttacactgatgtgataatcagcgataaagtatactt

SEQ ID NO: 312701 - DNA, 1033 bp, Cannabis indica
tataaataaaatctaacattgttcacatttatgatttgataacaatatttttttcttcttagtttatccatatatgtaaaggtaatcttgaacttcaaaagagtttcacttaggggtgtttatctgatctaattcatactattttgttcatagtacattcaatctgtagtaagtatggatttcatattttagatccaattcaatccgcatatcaactaaaattcaatccagtccaatttgcaaaagtacaaattggatcgattattttgaattggttactttttaatattaaattatttaatatttattaaaaaaattcacataattaataataaaataaaataaattattattatatatctccaacaataatttaaaataaataaaataaaaaataaaaaaaattaaagtaaaaaaaaataaattatatgtataaagaaatgttgaattttgtttaagattatattttccttgtaaatatgcatggaatatacatttgatctactatattttgaattacatttgtatattagatttttaaattattattttttacattaaaatattaattgtatatataattcttttttaaatatatatataaatatgtgtggattaaataggatcagttacttttatatgtcaatcaatattcaattcgcacaagtgcagatattaaatttttcaatccaattcaattcgcactttgcggattagattaaattagatcgtgcgaattggactgaattaattattttatgaacactcataatttcattctttttctttatttaatgtatcaaggaatttggtctactaattgaggacagctgaatgtgatttacaaaatattttagaaagaattattataaagagattattgtgtgaaaataaacataataataagaaataaggtggggtagggtatggttgtttgtgtgaaaataaacataataataagaaataaggtaggattattatattgtataagttgtaactcatgtattgatcacacattattagtgtaataaaa

SEQ ID NO: 312702 - DNA, 2457 bp, Cannabis indica
ttgtaaccttaagagagctatattagatcccacctatagcaatttaaatagtattctctcttggtatcaatacatacaactaaaagaggagtaggtcattacccgctaactaagggggttgaacctctataaaatccttgtgttcatttacttttgagttttaattgtgtaacacgtggcaagcatcagtttataaatatgatcctactgtcggttggccaatttttgaggtcaatagtttggtgctttcattgagagcgagttggtatcataactgatcaaacgccatggttaacatgaggagaactccagttgcaccatctgcatcatcggaccttcctcaagaccccctgactgtagatcctgatgtccatgttccaactactactggaattcccatgaactctgtagatgtggtcaatcctgccaccacgacagccacctcgaattcggtcactacagctagccaaaatgacataaacatcctggtgtatctgaacaggtggcccttgcctccgagggaggaccctccactggcgcctcccactgaaggaaggacccttggggaacagcccccaagaataacaattggatctcatctatagtactatgctagagagacaggaccaggaatttgtgagcctgctattagcgagccccatgtggacttgggagaagatctcgagttggctagacttagagaggtcgtctgccaaatcggcctaactaaagaaccatgcgctgctgattacgatgtattcactcagtagagacgtgaattcctgagatagatagatagatgaccaagagtacatacttcaatctcactaagcggagtcggatctccgcaatagagaagtcaatgacctaataaggaggttcaataagagaacaaatggacgaggccaggatctcatcagagatccacttcaaggaggactagttgatagattagggagggtctatcagcaagttgaccatcccgattcttcaggaaccaggacagaccttcctttactcgagggaggacaggccttgccacaaaggtataatggcgagaacaaccagatctcgttaaccaacagtctagggggctggccagggatctcaggctcaacaatagcccccatcaaccaacctttggccggccagccacctacaggagtacctctggccggccagaagagtacactccctcccagaggggagtgagccactcaaacgccaatcttcaaaagactgggaccaggagtgggtgaaaacacccaaagtgacaacttgagaagtgaaattgatcacttcaaatatctagatccacctaattccagtaatcggtgtgatatacctcttctcaacacaccggcaacatcggccaattgggaaatcacgagcggccaaaccttgccaagtatagggttggccggccatgggcaattgtctagcataagcctggccaactagagccagcatcccttcctaggagtagccggccaaggctaacaacacaataaagggctggccgacctccaccatacaccctccaaaagtatggccatccagaccctagcaaactcgaccctacagccactccaaggaggaccggttagtcaagtctctgcaacaatggatccttcggtgcgagcacagttggaccaaataagtgacatggttaagggcatggctggtccaaaaccttcagaccttgagctagacaggccaagggaatcaccattcacggcatacataaatgtcttgcccttgcccaagtttaagatgtcggtatggaagatgtatacgaggcgagaagacccacttcacattaaatacttcgagatgtagattgatatctagaagattactggttacgtgcgatgttgcatattcccggcaaccttgttaagaacaactcaacaatggtatttgaagcttgccccaggaggattcaatttctggaatgagtttttccgagaattctacacacaattctcatcctgaaagcttataccatcatagctagaagaccttgtcaaagtaaaacaatgacaaggagaacctttgaaggattacgtccagtggttcatggcaaaggccaccaaggtcaaaagccttacggaagaaagccagtatacgaccatattggggggcatcctcccatcgagcggcttctggaaagacatccgaaggatctcaactaacaacacgaaggagtttctggatagagctgatgactttatcaaactcaaagaagctgtttgacaagccgaaatagggcaagtcaacaacaagcagtcacaaggcatcctgtagccccatgacttgctaggtaccagcaactctacccaaccctccagtgggaagaacactaggagcaagttgtaagaacagaatatgtccatatgataaagaagtcagtacaaaaagatcactagaagagctactgttggaatatgttttacc

SEQ ID NO: 312703 - DNA, 2009 bp, Cannabis indica
caaaaatcagtaaacaataaagaacacaaggttttaaagatgttcggccgctttagttcggtaatagcctactccccttaaattgtattgacttgagaacaaagaacacattgtttcctctctcaaagctctcacaatgatatctctgagtattttttcttagatctctctctaaagcaatcatttcgatcccttttacaatgaagttagatcactatttatagggctaaatgcatgaggaaaggtttcccttttgcttaaaatatctataattggtaagaacatatattacatatttagatacataaaatgagagattgagacagcttgcgtatctctctgatacgatcccatgattgtagggattgcctttgtgcttgagcttcacgatgtcaactctgaagtaattaagtcttgatacacgactcagattcactctttacttgggtcatctacccttgctctgctcggtcaaccagactttgtgcgtgcaaatgtgttgcttggagtgtgttcaaaacattcctccagccaagtgtaaagaacgatagacacgtgtcattagtacatagtcatagtgtaaaaaatgggataatatttgccccaagtctacacaggacttctgaagtcgcacgtggacttcactcagtttgaatttgtgcttgaacgggtggcacgtgttcaatgcgactgttagtgattcgatgtgattctgaccaaaggtctcttcaatattcggctcataaatgttgattgattcgtatctcaaaatcttccaaagatttgcacacttttgatagttgctcttcagatacttgattacccaacgtttacttttggggggaaatcgaggcatttaaatttcaaaacgattaaacttcctcactaatttgcttatgaataggacagaaagtcctaataaaccacttttagtattctctttcttcacgatctcagagcaagaacacctttttctctcaaatccttcgaggaatttccaaaaagtgccgatcagtgtcatccaaacagccccgaagctttgaataatgagtaagttcttcatctttttcctctttaacatttaaatatgtgactttctgggtttccactataaaaaatttgatagttcttgaacttgttctagaaaaaccgtacaaaatctaggtttaggtttatgagattttgattgtgcgtaaccatatgacttagctgtaatcacattctgactttaatttcacgatattcggtttcagttgcccatttggggtttagtgaagattaacctttaagatgaagttttgaaactctgggctataaacctaaaccatgcaaaatttccctttttaatccttcgatcggacctggtaggtatattttatttgtttttgttcgatatctcggccaaatactcatctagtgtcctaccttttgtagatgaaccctggtgagttttggggaggagaacatcgtatcgactagaatcttctccaattttcgtacaaggatcaacctcctctttatgctagtccgtcctcatcaagttacggtctttccaattcgagttttgaggactaggaggtaagtagcgaatgcacaccttccccagaacccaaggtgcaacaccatttctatctcgacttaattgcgggtgcaggttacggacacttcatctgggagctcaagaaggggtagagacgatatttgccgtctagctggacatacatcgtccgaccaaatatagttgatactatatccgtggaccgaccaagtcctactgccgttggtatacctatagccaactttgtcgtgaccgttgctagacacaccaatcaaacaccgtctagggataggatgatagcgcgcactaaatagacaatgcggagaattgcttcaactgatcctcacgtggctcggcttgccacgatgccgagcgctgaacaggcctggcctgctactgaggaggaagataatgaaggggacattgaagtccaagaggtggaggatcaggg

SEQ ID NO: 312704 - DNA, 934 bp, Cannabis indica
aatcatagtgtgtaagactgtagagattccaaacaacaagaaggagaatcagtatcaaaggaaggagagaaagagatccaggttcagaacttggtgatgctctgctacagaaaggaatcaagggctagaaatctgaacggaatgagtcattatattccgctgcactcaatgtaaggtttactaaactttatatgtgtttatttcattgttttaaaattaatattaggatgttaatgaaacatacttgctagtaaatctagatcctggtaaaatatttccaacaacttaggcacagagagccgccttcagaataaaacaacttaagaagattgtttgcattgcgagatgaataagcatagttagcataaccgtttacagataaaaacaaagagtagttatgcaattattttattattatcccatgtgatgtaaatatgaaacgtgggactaatatccacgtttcatgaatggttacaaggataagatcccaagagaataactatcaccttaagactcctataaatggggacaaaatctaaggaataaaggacgaccaatttgagggaaaaaatagaatcatataaatattttcttatattctgtatatgatttataaaaaatcccagaataagatggactcatagagtatgaagaattaacttcaaaatcacgttaacaatcttcttattatttattatagttatttatttaattctagagtttatttattactaaggctcatttattggctaacaaaaatctacgttaatagtttgacgctttcattgagaggcttttaagaaaaaactcagaaaaatgccctctctgaaatatatttgaaccttccatccatggtagacggtactaggggtgaaaatcggtcggttatggtcggtttttaaaattttataaccgaccgttcggttacggtttt

SEQ ID NO: 312705 - DNA, 2201 bp, Cannabis indica
cagcccctgttttgattgattctgctcatcttctcatgtgaagtcaccagaattaatggtggttctctttctggttgatattcgtttcggctgcgttggattactgcgtagctgcacgatggttgcgcaatggttacgtgagagttgcccaggaagcatggatcctgggttaaagtgtgtaagtggtatttgtgtaatttttttttattttgggctgtatatttgtttatttggccagttggaagtatttttgtaacattgttactttttttggtttaaaattgaaaaaaaccctaatttaaaattacaaaaattcacacaactattttataatatttttatcctcttatttttttaattaatggattcacaaaattctccaaattctttaacacaaccccacaaaattcaaatttagaaatttagaaatgtgttagagtttgtcgagatttttagaaactaattataaagtaaataaacttaagaaagaagtaaattaaagaaaaaaagattagattttacgtggttcgagtgttaataaactctaatccacgagtggatattattgagctacaaaagcttctaaatatttcttacaagtatttttgcgctaattgaagaaccctaattctcaattcttctcctcaaaatttaacttccaaccctttgcatgaaggggtaatattctaattataggggagaactaggtatgggcatactcagacccgatatggtctaaaggtatcaactaggtcttttgatgggataaaatacaatagttattgactttagggcatttgagtaaggcccaattcacgaggtgaggattgtttgtgaccatttaagtgtgttaggtgtaacgtcctaacaataggaacgccacgtaatgtgactaatcatacactaatctttctaatccgagatatactagagctaagagcggaatttaaagtttaaaatacagaataaaataataacttgtaataattaaactttatgataaatccaaaaagagtatattttttattccaggatcccgtaaaatatttttaaaatattacaagtcattaatacgccgacctaagcggcaaaagtggagattacaacaattcccctggaagacccaaccctcgtggtctaacttggcctgaacatgtataatgcaccgcaaaagccctcaatctcatggcaactcaacaaccgacttaccctttcctggacaatagagcattcgtgagccaaggctcaacaagacagtataaacaacaatatgaatagcaattataatcatttaagtgttgatgccactgcatctatagtctatttgacatagacctacatgttacgctcacacgtctattaacaataagaccttagaatggtttatctcggttctgaatatcgagtttaacctagttatgctttaaccgcataactctttatatcaatatatataacacattattgcattcacattcacatacattctagagtaataaccctagaccgcataatagctaaactaagggtaataaccctagtcttggtttcccgcataaatatacaaaataatatacatgagtgccactgtgctaatctctatgcactaattcactgccttacctggtaatccaagtatgtggagattccaaatccatgagtgttcctgagcaagcatcgataatcctagtcagacattcctgagatttcacaaatagaattaatcccaaatttattttaatacatatacataatatgaactccaatcatacactaacacatagagcccaaaacgagctttctaatgatatcaagaatgtctaaaacggagtttggagtcaaaagttatggcaaaaacaagaaaacaaaaaattggggaaaataaggctctcgctgcagtggccccaagcccttgccgcaacggctccaacctgctggagcttcgtcgcggtgagccttgctgtggccgcagcaacgacccctgattccacacaaaaattccaacttttcatgctttagaatcttacacaaatcacaccaaaaattcatccagttaccaagcataaaccaagatttgctcttcacataccaaatctaacataggtataaattgagctcaacaagtagctcaaaacaaaaaaaccacaaacacatcctagcatactgttgggttttgtgccctaaataaaacccattacaat

SEQ ID NO: 312706 - DNA, 1211 bp, Cannabis indica
acgtgcctaattgttagggcgttagaaatggcttcttgatagttgaatacttctatggatgggattagctatcgatgtcgttatcaagtcacgcagtgttgggagccccctttgagtgtttgcttggtggtccacaatttagttattcttccttttgtcctctctggcgacaagaggttgatgtcatcttactatgatggtcggctagttttcatctaagtgaaatctattttttctaatatgatgggaatgtcttgacatctaaaaaatgatagtgaattgtttaggaactaatgtagctagagcttgtcgttcccacagacggcgctaaactgttgatggtaagaattcgttaagtaaattttatttagaaaatcaaatacaaaaggggtgaagatgaaaagcttaagagaaactcatactgttaatggagaaaaatagtgttctattgaatctctaaaatcccttacaaatgattatttttcaaccccttcttcaatggaagataaaggtatttatagggaactctaatggctccaccatacaagtggtccccaaaattaggagacaaaattacttttgtacatgaagatcatcatctcaaatgggtagtggtgaggtggttttcgggtgtcagttggtactctaagtgagacaaatagtgtctctactacttgtactcgtcgtacaaccgctacttcctcagaggcgtgcgtgctttaatgacctcatcttttgttgtaagttcccttggcatccctctctttatagcttacgctcatgatgccaatataacacttaagaaatttagctaagtgatgggtctttgagaggtgagtcttgctgtttaaacttagtaggaacttcctcctcaatttcctttggtggtcactccattgtagcatatatactctaagtatgattgctcccttgtttggagtaggtggtattaggtggtgattaggagagtgattgagtaaggaaacaagggagagtgaggagtagggagagagagatggcgagaagagggaatgaaaacaaggagagagggaatggagtggggagctccgatgtgggcagtatggcacgggaagctcctcatgtgaggagcttaacccgtgccttggctcctcctcatgttggctctccctcttgtgtggtgtctagcctaagtagttggcctcttattttcttgctcatacactaataaa

SEQ ID NO: 312707 - DNA, 1733 bp, Cannabis indica
ccgacccaaaactaaacgggttggcattttttaaaccaattgctattcggcccaacattaaaggggctatttcggcccaaaattaggttgggtcggccgatttggtcggcccatcgggctaaatgctcagccctaccctgaactgattttttatcaaaataaaagttagtaataatccgatctaaaaggtgttattacaaaactatttctcttttttgtatctgttcgagttaggaattgtcttcaagttagttatattaaaaaaaaaagttgtcaaaaattaagctcagggtcctatttttgccattttagaaaatatagggtctattttgtcatttaacaaaacagatggtccaattggtaacttttgcaagacagatagtccaaaatggtatttaccctttttattcttacataaaaagagagtacttaagttattttatttttattttatttaatatttgtgatgtaattttcattaaatagtttatccaatgtattttatgttgggttttgtgttttaaataaaaccaatataaatataatagatttattaaataattaaagaaatcttaatatgttgaatgattcacatgaattatttcatagttatatgtttaatgtataaattctattaaattcaaaacatatgaatattcatgattatagtgttgtcaacacagtcaaatatctatgtttcaaagtttaagtctcataatttattagtatactggattaagactgacatgataatcaacaataaagtatacttacaccttggataagtattatgccctttctagggcattgggaaagtatgctagtatcgaatgtatggagtatacatcggattggaccgatattgaaccttgataagatatcataaatataacgttatatctttctaagtaaatatcactggttgatcttaggtcaatagatcttaatcctgagatggttaggttcgatctgaattgtattttttatgttcttagagttgttcgtgaaagataaccaatagtttggacgaatacttacatcttgggaacatgatagtataattgagtgggagcgctaatcatagatatggaatctgtagcttctataagtatttagaagtgaaacaatgatttctttctagcttgacttaatagagataaataattgagatctcatttcaataattatattagtttactgatatatcattcgtagtaactaagtattttaaggataaaatacattgacgggtagaacaacgaatttgtccctattcgatgtagatcatctatagaggatctttcacgatttagattagaatgatggaaattcatagcgtatctatatcttggtacatatagagagcgttctatataattaatagtacaattctgaatctatagtggcgcaaggaggaattaataagctagagaatttacttggtaaattctagttctacttattggaagcttgattatataggcccatggtccccacattagttgagataatactgtttgcagactcagttaattggttttaagtaatcaattataattctaaaattagactatgtcttatttatgaattttcacttagcaggggcttaattgtaaaaataaaaaagagattttaggatttatttgttaatttaaagactttgttaagtctaattaataaataaaataaatggaaattttatttggtaattaattatatgttgacctcgtttt

SEQ ID NO: 312708 - DNA, 2106 bp, Cannabis indica
aattatgtttgactaaaagtttatcactaaaagtggcttttttggagggaaaaatggggagtatatttctctttattttctccttaatttgtgtaagctgcactactttcttattttctaaaatttaataaataattgtatgagaatcaatacaatgttattgattcctattttcttttaaataaacatgtcatgtacaataaattaagagtaagcttaatgcgaaagaagagaatattaataggagtattgttattggacagtactttttataagtgatgttttatagttatgtgatattttttaaaaattattttttttaaattatgttggatcaaatacttaatcatatgatacaatataatactaagcactattaaaatcataggagaatgtgatcgaaattcgagggtagtcgtactactactagtcaatgacggctttcctcttcgttgaaaattcaggtgacattttaattagtttcacctttacaaatacgaattcccaaaatgcaattatatggtcaattgaattcaatatatatttgaccactacttctaacttcttaataataataccaataccaataccaataccaataccaatgcctacttcaattcaattcaaattcttatctaattattctctcaagtcggtagagactttgacactcaatcgatcacattgcgcgttgtcgcaaaataaataaataaataaagaactcacaataaagaacttaaagagtattttagttttacaatttaaaaactcttttcatttttcataaatagaaaataatttttaaaaattaacagaaattgtttggctaaattttttaaaaattaaattttaaaaaactaaaaaacaaaaaatatcaaaaatactattttcaattttcaaaaacaattttttttatttaacatattatattttccatttttattcacaaacggaacctagacccagaaccagaagcgaatctagatcccaaccccagacccagaccctggactccgactaaaactcgaaccttgaccttaatacccccgaacagcggatgcagactccagaccctagatcccaaacctcgatcccaacccgaacttagacttggacacaaacccgaacccaaatcccgaccccagacctcgaacctcgtcctggaccccgaaccccagcctggactcgaacccagatcctggaccccgactagggtctagttttgggtcggggtctggggtttgggtctagatctggatttagggtctggggtatggtgtcgaggtccgagtctggggttcaggttcagggtccggtgtccgagtccaagtccgggtctggatccaggtcttgggccagggtcttggttcggtcaggtttggggtaggatgggttcatgtcatggtatggtgtagaatattaattttttttagtaaaatataaaaatagttttaaaatatttgtaccaaacaccattaaattttttaaatgacaaaaaattattttttattttgacttttgaacacaattctgaacactgaaaatacagctaaataacctctaaatgttattggatgattttaatagtaacacaaaataatacgagcacaatttattatgaattgaatacaggtttaatgaagtacttaggggctgtttagaatggattaatgtgaggggaggaaatgtgatctcattaattaccctgtttgttatgtagttttagattttttaagtcatttaatatttttactatagtattccaactactctaaaaaggtgtaatgttaatcccttaaaaaatgtgaaatttaaacattacatcagttatttaaatgtttgatgagaatttttattaaataaaaatttaaataaaacaaaatattaagattatttattttaaaaggaaaaatatgtcgtttataaaaaaaaacatataataattatttacgcttattcttactataataattttacataaataaatataaaaatactatatagaaaaatatatgtaaaccatttttcattttagttaatcacaaatataatgaaattaaatttattaattaataaataaatatatttttttaaaaataataattt

SEQ ID NO: 312709 - DNA, 784 bp, Cannabis indica
tccttaattttaacaatctcaataattcaaggggaatttttaacggcaaaaaaaattcaaggagcatgattaggtacacatattaaatttcagaggccaaaaatattaattaaccttttatttaagtaaaattgaatgtattcgaagctcgattagttaagtgtatagcacattaaacaataatataacttcgagtttcaaactctttttcaatatttttttaaaaatatttctaaaagttagaattccaaaattcaaaatttaaatggccaaaacactcatatattctcagccctccctacactagtactatatcattaatttcagtaaattaatgaatctgagtctgaccaaaaaataataattgaaattataaagttgggttcagcactttgtgtggctactgttacatttgtaatttaaaatgcatggtactaccttgtagcagagcagtagtaacattttagccacatgatcatactctctctaagcaaagcaagtagcatcctcatgaactactagccacatgaatgttttacccatataggatttgacagctggcttcatatcaaaattataaatatatgttttttatgcaaatcaagtgaggttaaaatgtttatggtacttatatgtagtagttactaagtcaacttatgatagagttttgaactagataaatgctactttaatatatttaatatgtgttatatctattttttgtagtaattaaataaataaatgagattatatgacacatgtataatgtaaagtccttttttgg

SEQ ID NO: 312710 - DNA, 1130 bp, Cannabis indica
aaaaaaaaaaaaaaaatcatactgcaaatgtgaaattttaaacattatatcataccaaacaatgctttactctctgtttcctattaagtgttttcgtattattcgaaatttgtgtttttaatcctaattaattatttaaacaaaattatttgagacttaaataaataaaccaagaattgactaacaaaaaaaaatcaaggatggatactggatcaattttggactgtttataattctataatccttatataatttatatatgttattctaaatgtagtttgtcctagcttgtaagtactttcttttttctatctcttttttttttgtctttttttttaagaataaatgtacaaagtactcttaaagtgatatttggttcaccgtaatgctaatgaataagttcattacattgtttgctttttccttttaacttttgtaatccattacaatgtaatggttattactttgagcattgtaatgataattacataccaaaactaatgtaatcccattacaattacactccattacaaagaaaaataatattttaataaaaatatagtaaaaaatatcaaaagtctatattaccttttttttgaatattttataatttaaaaataaaagtaatagggttattttggtcaatataaatttcattccattacattctcgtaccaaacaaaacataacaattctgattacaatgttcattccaactacaaaccaaacattgtaaacaattcatattaccattcttcttccattacattaccattactattactattaccattacattacaccaaaccaaacaccacctaagttaaaaaaattaaaaaaattagaatttcatttataattacacgaagttgtctttttttccagcaagcctgctggctttctctgggcacaggtggggctttttaatttttactactgcaattagtattgtctttgtgacatggttttgaatgttatagtcttgttagtgtgacatagttttattttgttgttgtttcttctttgttctttgatagctcgtcatcaaatcgttgttagtagttgggaatagcaagttctctacgattaaagaggttgttagtgttgagaatcatggggttccatctcaa

SEQ ID NO: 312711 - DNA, 2131 bp, Cannabis indica
gcgatttgaacgatctcacctcttaaattttgtttaatcatcacaagtactttccttagtgaaaagtacaagttgttcatcccttagtgcatgttctaaatccgtacatcccagaactataagtaagttcattttccaatcattaaaatcaatctcattaagcaaaagaatataattaatattagcatttattgacgcaacacattaatatcaagtctttgggtagcaacattaattgtaagtggtactcttggtataacaatcgaacattgacaataaaactgtgtcaaacaataaattaatctttggactaacatattgttcacacaaaatactttataattgtcacatatttatctccacatatatagttaaaatctagcgaaatattcacttacatttgggttagtcaatatatgcatcaattacaaacacacaactatcttgatattttaaataaattaatctacacaaaagaagtcactttggcgacatattgttcaaattaatttatttaaaatattagacacataaagaaaactaacgccaaaatttaaatttaattatttcaaccaaaatatatatataataattgtgaatacatgaaattatctatatattccagagagcagggccgaccctgagtaataatggcccaacttttttttttttaaatgtgtgttttatctaaaatgaaatatgggtattattgggcctctttttacaaaatttttcaaaaatactatttttttaatgcaaaaaaatatactgtataaaaatttagggaattacccgatatactgttttttgatttttttttttcaaattttcggtttgggtttctaaagtggttgcaacgctaattgtaataggggtttctatacgattttttgttgcgatttaggttgcagcgccagttgtaataagagtttctatgtaaaattctgtaaaaatgcaaaaaaaaaaataatatattttgaagtgtaaaaataataaaaaaaaaaaagaaaacctaaaaattttaggccctaagtttgagtgggccctacgcacgagcctagcccgccttaacccaagaccgaacctgtcagagagtcacacaagacttacatcgaatacattttacttataactttcacaagatacaaatcatgtcaattatatattttttaaaaaaaataaaaaactaaacttacattaccatataaaacatatgaaaaataacttatagatatcaaatcatacagtcttaagagaataggcacatcatcataatatacataataatgtcaaataaaatactatatatttagaaataaatcataaatatgtgttcctaatacataaataatttgcctccttatataatacgcataataaattgtacctcaaaagtaatttttttagagagcaaagatctgtaaccaaagaaaagcaaacaaaagagatcggttacaagagatcttcaagagaaggaacacaggttgttccatacaatctcttcgtccgttccaagagcaactcgagctagattgtgagcgtgagagttcgcggatctggggagaaagcggattgaggcacctggaaaaaatgacgaagaggagacaatacttgcaatatatcctgagagagccgaacggtcaaaggattttttctgaatcttaagaacttgattctggcagtcggagacaatagtgctaagaggaaatcaggctgcctgacaccatagtaaagcacgctggagggcttcagcttctgtgaaaattggaggaagaccagaggaagatgatgctgaaaaaccagcaatgatctgaccattgaaatcagtgactacgacaccataaccatgcttgttggagctggaacaaatagccacatccacattaagctgaaacataccacaggggcgctgcagattggtactgccagaatgagggtgtgtagacagagtgttgattttcaattgagcttccctgtaatcctgctagtaatttaaaactgaagcttccaaatccaagtcaaaacaattgtgatcagtgaaaatgaccttattcctgctattccaaattgccaataaaaaacccaggaaaagagtgaacttatccttgtcaaaatgttcaaaaccacgaag

SEQ ID NO: 312712 - DNA, 622 bp, Cannabis indica
ggataaaaacccccgcggaaaaacacagccagaaatagaactagaagaacgagctaaaaagttagctgtctggttcccggaccatttaacaaaactaattaaaaataggaaataaaagagaggattgcataagagcaacacaatccgaaatcaaaagccccaccagagacaacaactgcttcttttgttgcacgacttgtaccagcaccagcagcgagtccgacttcacaaccgcttcttcttcttaatatattttaaaatgtaattaaatatattaagaattaattttataaaataaaataggttttatactatattggagcttatatatatagatgtgtgtcactttgataacattaatgcattattgtgtttgtttggtatattgttgaatttgataaaatatcacctaatgaaagaagcattttgatgattttgacctatacttatgtgtagttattaaggtaaatactattttaaactttgtattttgtaaaagttataaattaaaaactctattttgttaaatgataaaataaactatatattttttaaaattgtacaaataggaccctgaactgattttttgtcaaaataaaacttaataataatctaatttaga

SEQ ID NO: 312713 - DNA, 4593 bp, Cannabis indica
gggtgaatttttgactgttcatgagacttgaaggttggggtccgtttttacgattcaaagttcgtttaaatataacgaaaccattgcttcgtggtaagatgattactctacccaaagttcgagatgaattttgggttgaattccgttatgaacgtctccctgattattgcatggaatgtggtattattggtcacttataccagaaatgtccacagtttttggaaaatcttgacaatggtattgaaccagagttggcctatggacctatgctgaatggttctgcattaccatcttcatcttatgatcgttatcgatctgatttttccaaaggaaatgcgtggcccttgctcactcgtctggctagaaactctctaactgctacaattccacagatccattctcgtcctgctgctcatccaccacagttactgactggggagtcttctaattctcaagtgttaccctctactgctactgctactgatcacgtttccactacagcatcatcatctagagttcaaccttttttctcacctgctttacttggacaatcttcattgatttcctctggtatggtccaaacatcagcaaaactttcatctttcccatctggtgtggaaaatacaattaccaatgctcctacaacatataattcagttgcacatctctcggatgtatacactcctgatgttggcaatttttttgcacctaactcagtatccacttttaatcaccctgttgccacttaccccccaatgacatctcccacttctcaatctcattaccctgctctgaccgtgcctttctcctctcccttatattcaacctcccaacctattgttaatcccaccactggtctccaatcaactactcagtcaagttttgatcaggaaaatatacacccaaatcgtcagtttaaacgccacaacgactccaaatctttgagacaatttcttaaacgatgtcggggtaaccatgttcctcaagcttctcctttgtcagttgaagtggactctatccattcagtttcagatgcttcttcagattctgatgagatcattgacaatgtagcggtgattgctatgcaatcccgctcttcatcatgaaactcttaagctggaatgcacggggtttggggaacccgagtgcgttccgtcgtcttagattgcttatttctgagcaatctcctcaggtgttgtttcttatggaaactaagttgtgtgatggtgctctttctcgttttaaaaatagtttgaattattgtaatggtctagaagttcctcgggttgggttgaagggtggtattatgttattgtggcaagatggtgtggatgtaactttgttatcaatgaatacaaatcactttgattgttatgtgttgtttgaggatggccctcgttggcatttttctgctatttatggttttcctgaaagtataaataaaaagcatacttgggctttaatgaagacttgctgatgtttctccacttgatccatggctcttaattggggatcttaatgaaattttctctgctgaacataaaagttgtggccctcttcgacatgataaccaaatgcaagcatttcgtacaactttggaccaatgttttttgaatgccttaccagctgttggtgatgattttacttgggctaagaatagaaaaaatcctactgctttgaaggagagacttgattggtgttttattaatcgtgtgtggaaggacaatttgttaaacccaatattgactcatttggattattttggttcggatcatagagtcctaagtgtggatataactttctctcaacaacacaatcctgttataaggaagaaatctcgttttcgctttgagaagatctggttgaaagatgaagagtgtgctgatataatttccaactgctggttttctgcagatcttactgatccaacggctggtttggtatcacgtttgcagcagtgtgcctctcatttgcaagagtggcactataggaaatatggtaagatgaagaagaatatttctcatgctcaaaaacgtgtgaaccggctgaactctgctgcaacagcgtcacaaaatcactctcaggaggttcaatcggctgagaaaattttggaggagttgttggccaatgaagaacaatattggcaacaaagatctcgggttgagtggctgcaatcgggagatagaaacaccaaattctttcattcaaaagcctccgcgaggcaatctaataatcgaattaaagaactggtggatgctgatggcaatgttaccacttcaaaggagggtatttctcatattgttgctgattattttactcgactctttactgcttcggaagaggaccattgggctctatcccatgttttgtctacaattccaacaactatttcagttcagcaaaatgagtttttgttacatgacttcactgcttcggatgtgttggctgctctgaatacaatgggttctgataaaagtcctggtttggatggcatgtcagcaatgttttatcaacattattggcatattgtgggtgattcggtgactaaggtgatcctgaatgtcttaaatcatggagaaagtccagctgccttcaacaacacgttaatcactttgattccgaaaattaaaaaaccaaaagagatgaaagattttcgcccaattagtctatgcaatgtcctttacaagattatttcaaagatgctggcgttgcgtttcaaagaagttcttcattcggttatctcggagactcaaagtgcttttctttctaatagattgatcacggacaatatacttgtggcttttgagttggtgcatagtctcaaacaccgaaagcgaggatctaaaggttatgcagcactcaaattggatatgagcaaagcatttgacagagttgaatggtcttttttggctgcagtaatgggcaagatgggattcaacatacgatggattaatttgattatgacatgccttctcacaaactctttctcttttgttattaatggagaagtttcaggttcagttatacctcaaagaggccttcgtcagggagatcccctctcactgtatctctttcttatttgttcagagggactatctaggctgctcaaatatgaagaaaacattggtcggctacaaggattggcagtttctcgtcattcgcctacaatttctcacttgttgtttgcggatgacagtcttttgttttgtcaagcaaatgacagatcttgtggagctattaaaagagctcttgatatttatcatcgagcttcggggcaagaattgaatactgaaaaatcggtgatgtctttttcacccaatactccaatggtcgttcaaaaactctttccaacaaattttgggcatgccaatttgcgaatgtcatgaaacttatttgggcttacctgcttatagtgaacgtgacaaatctcaattgtttagccatataaaagagaagatatggaagcttatgcatgcttggaatgataagatttttttcaataggaggtaaagaggtattattgaaagctgttgtccaatcgattcccacctatgctatgagttgttttcgtctatcaaaaaagttttgtaatgaagttgaggctatgatggcgagattttggtggggatcttccacagacaacaagaaaattcattggaagaagtggaaatttctttgcaagtctaagggtgatggtggtatgggttttagatcttttgtgcattttaatcaagctttactggctaaacaagcttggcgtatttttcaacaaccaaatagcttgctaagtcgtgttttaaaaggtcgttattaccctcatactgaatttatgacagcttcagcaaatggtctgggttctttgacttggcagggaatagtttggggtagggaattgttagcaaaaggattaaggttgaaagtgggtactggcctgtctattgcttgtggtacagattcatggattccaggccatcataacttcaaagctttttgttattatggtccatcttcaaatcatgtctcggattacattacagcagatagagagtggaatattgcccttttgcaaactgacttttcaccaccagatgttgatcgtattcttaccattcccttatcttacaatgctgttcaagataggtggatttggcatcatgatgtatcgggtgattattcagtaagtacaggatatcattttgcaagctctttggaagaaagagaactctctactggttctaatacacagaatacttggtggaagactttttggagctataatttgcctgctaaggtcaaaatatttggttggcgagtgatacaatcttcaatacctgttgctaaatccctgtttcataagaaagtcctaacttcagcaacctgttctttgtgtcaaaccgcatgggaaacaataggacatgctttgttttcgtgctgtcatgctaaagaagtctggaagttatctggtttttctttcaactttcatagtgcacatcgaatgcaggatggggattatttgatgtatctctcctctctgcatactaaattggagatggaaagaattttgtgtgtcatgtggtttatatggtctgatcg

SEQ ID NO: 312714 - DNA, 521 bp, Cannabis indica
tggtaaaataatttctaacatcctactccacgggaccatgcctagagaatgaaatttattatatgaatctcaagtgattacaaaaccaaattgacttataaaaataaagactccctctttaaatttggcgcaactgttgtaatctattcttttaattaaatttctgaagtgtcgagacttttaactcccttgaaatcgtagtaattgcacacctcatcctgaagagtgactcacatgcaatcttcctcccaaagggtgtccaacttgaaatcttcctctcgaagagtgactcatttgcaatcttcatcccaaagagtaactaacttttagtcttcctcgcaaagagtagctgacttgcacttttcctccccaaaaaagactcacaaacaagatttctcctgaagcttgatgaacaatatccaaggtgttcaacctgcacaatttcaacataagcaatacagaataacacattaataaaatactaagtaacttgttggactcaagttcttcacacaacaaag

SEQ ID NO: 312715 - DNA, 916 bp, Cannabis indica
ttttttttgatagcgttattctttaaagttacattattattcttataaaattttaaaaattatgaatagtttaccgtactgaaaatagagtcttgatattttaatttactatgcgcgttcaaaaatgtattttcagtaccataaattattcgaaaatttttaaaaatttatagagatgatgttgtaagcataacgaacatcactatgaaataaatttttttaaaaaaatatttcagtatgttttcgagtacgaaaattaactaagaagttatagtaattaactgtaagagactcattgacttatattagaaagtagctagagacaattataagctatatattattgagatattaatttatataattaatgagtcattagttttatatttaggatatctaaatccctattaaacatattcaatgtttaataatactattattgtatgagaaagaataatattgatattatatgtaggataatattatatatatataaatatttatgcatgtgagcttcgtcgtcaccttccttttgaaatttaaaatttgagcactgctaatattaatgttgtcctatcggtcatgctgtgcagcctttgaaattaaggtagtgtttcacattattcactaaaataataatagaagcaattaattaatatatagaatttaaataagtaatatatattaggtttaattatatcctcttaggaactcgtggtttttatacgggtaagtcacttaagttgttttataaggtgattagtcgtcctacaagctaatatgagtgtttctagggtgatttttttttattaatcatacattttttttttggaaaaattgattttttaaaagaacatcacaattactctcgacactccaatattcaaaaaaaaaaaaaaaaaactaaaaaagttat

SEQ ID NO: 312716 - DNA, 1183 bp, Cannabis indica
ttcaaagtgtaaaaataatttttgtttgcgttaaagtataatttttttttttttaattttggtcaattatgtaaaattttctatttttttttattgttgttgaaaattgaagtgtaataattgtacgatcagtaatttttattattaacaataatataggtattatttaggaggtgtttggtaacatttttattttttaatttttcaatcacaaaaataaaataaatttgtgtttttaaaattttgttttttaaaaaaattaacatgtgttctatagcctacttttttttttattattttaaaaatagaaaacaaaagtgtgttctatatctttatttttattttttgattttatttaagttggggttggggtcgtggtctgagttcgaaattgaggccgaggtcgattcctaaggtctaggttgggattggagtccaaaatattgattaagaaaaagaaaaactgtttaaaaaaaatttaaaagtgatttgtttttgttttcaaaaattttaaaattttgattctcaaataaaaaattgaaaagtgaaaatagttttatagaacatatttttgaaaaatatttttacttttctaattaagaaaatagaaaactaattaaaaaaatattaccaaatgcacctttaattttaaaaattattttttatagaaggaaacccccaaagacgacctttcaagcaaaaaacttaaagagaaggtggaggggagactgaatagattaattcacctcatgtaaaatgagatcatagatacaaaaaggataatcaagccaccacgccttactaataacttatgataaggcatagttagctaaggtatgggcaacaaaaaaatgtctagaacagaaagaaacacttgtaaagttaaattcagaaaaataatgtctgaaatctgttaaaactaaacccaacgaagtagccaaagaaacctggttagtaaacttcaataacacattcaaacaatcagattcaaaaagtacatcctaaaagcccaatagatggcattgaatggtagtattttttaaagctaaagctttcaccatttcaagagagaaattacccgaaatgtgcctgttagaatattagctgtatattagttgtaaaaaaattaggataacttgcatttagtaatttcctaatttgtaattagtagtttcccatttag

SEQ ID NO: 312717 - DNA, 2213 bp, Cannabis indica
agcaacgagctgcagagtacgtttaaaaagcacgcaacacgcctatgctagttagggtgttacaaggaagaggaagagatgatctagcagcatctctaccatgggtggtctaagccaccttggccctcagacgacttgaaggttcatcagaaggtccactagtaagagctctcaacctagaagacatatttgctaaaagaaagtagcaaaatcagaataaaagtcacaaacattcaatgtaagacaagaatgtaaaagatggtgctatcaagtatcaaataccatcatatcttctagtatctgaattgtcctctcggactgtccatcagtctgaggaaggaaagctgtactgaattttaatttggtacccatagcccgctgtaaactctgctagaatttagaagtaaactttagatctctatttgaaacgtagactttggtacatcatgaaatcttactatctccttgacgtacgaatctgcatattgatcaactataaaggttgttttaactggtagaaaatgcacaaacttcgtgaatcgatctatcacaacccaaattgaatcaaacaaacccgtggttctaggtaatacaacaataaagtccatcctgatatcttcccacttccacttaggtagtgttaaaggcttcaacaaacctgccgatctctaatgttcagctttgatatgctaataggttaggcatcgcgataccagttctaccacattcttcttcatctcgccccaccagaagtagggtttaagatcttaatacatcttggtggtgccaagatgcaaggagtatggagtggtatgagcctcttcaagaatttcgtttctaagttccgcactacttggaacacaaaccctggtctttaacaatagtatcccactatctgacactgtaaatctctaatttgaccagctgaaaccttttccctgatctccactaattctggatcagttaactgagcagctttaaatgtaacatatcagattgtagcgtcaagttatgtaatttacctacaacaaactcgatgcttgatctgaccatgtcctccgctaactgaggtgaaatcttaatcatactagttacctacccgtgccccttcctgctcaaggtatcagccactacattggccttcctaggattgtaagggatttcacagccataatccttaaccaactcttaccaacgcctctgtcttacattcaaatcatttcgagtaaaaaaatatttgaggctcttatggtcaatataaatttcacatctctctccgtagagataatgctgccaactcttcaaagcaaaaactacctcagcaagttctaggtcatgagttgggtaccgctgctcatattctttcaattgacaagaggcataggcaataacccagtcgacatgcatcagtacacaccccagaccctgtctggattcatcaataaactacaaacttctctttatcagaaggtagggctaacactggagctgtgattaatctctgtttcagctcctgaaaacttgctccacacaaaatgttgattctttttagtaagctgagttaagggtgttgaacttttagagaacttttctacgaaccaatggtactaactagttagacccaagaaacttctaacctctgcaactgttttcaatctcgggcaatccttgacgagttctatcttccctgtatccactttcattccctcattactgacaatgtgtccaagaaaggacacctgagataaccaaaacttgcactttgaatttggcatacaacttgtgttcttgaagtcactgtagaaccatccaaagacgttgctcatgctccttttctaatttgagagtacagagggatgttgtcgataaatactataacacacatatcgaggaaatccttgaataccctattcataagatccataaaagatgcgagagcattggttagtccaaaagacataaccagaaattcataatgcccatacctagtgcggaaagccgtttttagaatgtcctcctctcggattctcaactgatgatagcccgattgaagatcaatctttgaaaagactgttttccgcttgaggttgaattctcaattctttaagttctgctggagccattctgaaaggggcctttaaaactggttctgctccaggtgccaaatcaataactaaatcaatttccctctgcggtggtaaacctggaagttc

SEQ ID NO: 312718 - DNA, 495 bp, Cannabis indica
tacctacgtagggaacttttgttgagtcctaccatagtcttgccctatataaatatatatatctttataaatgtaatcttatttatgtcaagaagacttaagcaaaaagaacatgattttccgagggtatttgctaaaagaatatggtcaatcaccaaacagttcaataatatatacaataatcactatcatacataagactcaactcagtcaacgaacagttcaatactcaatgcaaagacactataatgtgactataaacgaacatcatgagtgctaagacgaacataatatatatcattgatttgaccatgttcttttagcaaatacaatatatatctttgatttgaccatgttcttttaaaaaatcataagtaataattacaatctctacatgcgaatattttcttaggtacaatatcttcatttaaaagcagtaagtaattataagtagtaagcagtatcttcatttaaaagtagtaagtagtaccatat

SEQ ID NO: 312719 - DNA, 1342 bp, Cannabis indica
aaaaaaaagtataaaagttattttgagcgtgtaacagtataaaagaaagaaaatgggaaaacacagtaaactgtgtaaatttccttttatatatatacatatttgattcggtcaaaaccgagtcttacatgtactttcctcgagttcttgtatgtctcatttttttgtggatgatttatgtcttttatctattgtacactttgttttgattgatatgatagtgttgataaaagttcaattttttttatctatagagatagaaaaggttgttgattgttcaaaaacaagtgaataataattgccaaaactaccaaaatgtaacttcaaaaaatattccaccttatagctatagagtacctcatatatttggatgttgtgttagttttttcttttatatgatatttgtaacgagttatttatccattgttaaacttttgtattgctctagaattgggctatagctcatgctttggctaaatgtacttttcaaaccatatatctctagtattttgtttggcagtgagacttttattgttgtatcttatggccgataactttattcaatgatatttatagttcttccttttatgagagtttaaactactttctctaaaataaaaaaagtatgatatatatatatctagatattacaaactgaggtataagtaaacaaggtaactaataagcaggtagtactttatgacttataaatagtatgaggtctttttcaaggtaataaatggctcaggccgcgaaaaataattaggtcacactacaagaaaaggcatttttaccggcgcagttcgtcaaatgcgccggtaaaggttgtcgagataaaacaaaatctgaaatcccacttccatttaggctttacttttgccggcgcattattgcgccggtaaaagtctggttttaccggcgcaatactgaatatgcgccggtaaaagttaccaaatgaagcgccaacaggcgcgagaagtttgccgcctttcatttcatttattgtggcgcttgtttacttttaccggcgcataattgcgccggtaaaagtctcaaaaaaagagagggaaacttcccgcgtggatttccttggtaggtgggaatacttttaccggcgcaccattgcgccggtaaaagtgttaaaggaaacgtgtggattttgatgtgataagtgagaatacttttagcggcgcaattgtgcgccggtaaaagtatttattgcgccggtaaaagtatttacttaaacgctcgtttttggctacttaggtcagattttaaaaacacttttaccggcgcaattggatgcgccggtaaaagtatatatatgaatcaggagcacgaa

SEQ ID NO: 312720 - DNA, 764 bp, Cannabis indica
tctaacaactagaaacttatcccattaattacataacttccatatgtaataactcacatattatcaattgtgatccttaagttacaatctattttcagatttgtaactcattatatgttacaattttatgtgtattattatactatatatgatataatataacctccaacacataatatatattaatctcatattaatatataatttgtcacatttaaatattttaatctatattatattatatcaaataatataacaattccttggaataaagcaggctatgcgcttattccaaattctataaagaaggaaatcattgcctccttgctgttatgtgtcttaaagaaagtgtttttcatgtttataacacattgacatgtgccaataaccatcatcttgcattggtagctgtggagctatttcgtattttgctaccttcttatttgaccatgcttggattttttgaacgcacagacatagacttctctgttgccccttatgctgggaaaatacgtagtgctccttttgaggtagtttttgatggtgacgttccaacagggatatctaggtgtgttccttttaaactgaatttcattttataatgattaattgtgttttttacttacctattttatctaggaatgtcaatttgggccattttcgcggcccgggtcgggcccccggcccgacgggccaactgtggcccgaattattcgggctcttatcgggcttctggcccgacccggcccggtttcaaatattaa

SEQ ID NO: 312721 - DNA, 966 bp, Cannabis indica
gatcttgggttaattgttaatttatcttacataccgaagattattagttaccctttgttggcgcaaaaactcgccggcaaagctcaattttcttgtagtgtcctattgattcattaaataaaattattcttgatttaaagaatattgatattaaaatcaaagatgaagacaaagctattgtagttcttaactccttgccccacttaaaaattatgaccactttatcgatacaatgatgtataggaaggagactttaactcttgaggaagtttagaacgccctaatgaccaaagaattgaaaagaaaataagagttaaaagaagaatctaatggtgatggcctgtatgttcaaaaaaaaaatattaaagaagggaaattataatcaacatggaagctctaaagatcaagtaaagtaatgatatcaaatgtcaagataagaaggtgtttcattttaagcaagatcatctcaagagatattgtctgtactaaaagaatacaatcaaagacatgtcataacagatgtggtctgattgtaaaggaagtgaggactataatgtacaggtagtttcaaaggggtacaatagtgatggttggatatgaattctaggtgttcttttcacatgtgtcttgatagaagtcaatttcatgagtaccagaaactagagggtagtacagtaagacttggtgatgatcgagtatgtcctatatattgttggatcaggaaccatgtgatggagggacaattgtagagttgaaacatgtgagacatgttcctgagatcaagaggaacttaatatttgtggcaatattggatcaagagggttacttggtcagaatttaaaatggaatcatgaaagtggctaagtgtgctatgatagtcatgaaaggtacaaaggtgaatggttttaggctaattaggagttttgcctcctaaactttaacatgtaccaaatcatgctccatgaa

SEQ ID NO: 312722 - DNA, 1532 bp, Cannabis indica
gaaggagaaaagaagatccagattcagatcttgattatgatctgctacagaaaggaatcaagggctagagatctgaatggagcgtgaggcagctgcagccagggcggcataggggaataatactcaaaatccacctgaccctggagtgagaagaccatgaggcaggccttgtggctcacaaaccaggaggcaggaaattgttcaagaaaaccctcaaaatgctcaggttggacgacctggggaaactgaggaaccccctgaaaacaagcaacccgaggaaactgaggttccccctgaaaacccaaatgatcagctagaaccatctcatagaaatgagaatatgaggcgaccaaaaactagggaacagaaaattcctcgtggagacgtggaaaatcctaggacacaacctaggggatgaaggtcgccagtgaggaaccaccagcgttcttcccaaatccatagggaaggggctcgtacaaatcccagtaggggaaacacgacgaaccatgcccaagggggaagaacagggcgtgaagaagcgagtgtaatctcaggccgcacaagaaccgatagtcggtcaacgcaaggaggagaaagtactcgtcgcaacaatgatcaagaaagcacaggtacaagtaagactgcaagtcactcaaggacgaggtccatgagtaggatgaggaccatgaccaggacgaggtccgtaggtaggacaaactccatgagtaactacattaatatattttaaaaaaaaaatactattactaaaaaaaataatatatagaataactcctttaagaaataataatgtatttttctttcatagaaaaaaatatttatagaaaaatacattaagaaattatattattagagttatcatttttttaaataactattcactttatttattaatgaggtgttagttgagtgacatatgcttaatatgtgcttcccagtgagtctaatatctcttccattttttttttaaaaaaagataaatttaataaaatacttttccaatttatataatgtacatgatattccataataaatagtttaaatcttcaaaagtcaacttaatcaatggctaataaaatatcactatcctacggggacaaatgaagtattcctattgtagaattttcctaagttttattatactatttctattgtaagataagagttacaacacaaaccgactaaacccaacccaacccatgaaacaaaaagcagagttgagttatacaataaatccgatataaatgggttgaaatttaacaggccaaacttattaggctggcccactaatatagcttcaacctgaccaacccaacccataaggccaactccagttcggcgtgacccatgagaagctgtcaaacgataagctacgggtggagtggtattatgcattggagaactttaaatggacaactacaaatccttggcaggagcaattgtagtatctgtccttttttatttttatttttttagaaaataataacagtaaaaaactaacaaaaatattatat

SEQ ID NO: 312723 - DNA, 1119 bp, Cannabis indica
tatttgttaggtccaatatgtgaatgtccaacccaacgccccctaattattgtattgttggaacttaattttttttttatatttattttcatgccttatgatatttttgacaagtgttgctcaaactttgttgtattagtgatagtttaattatttggtgatagtaaaaccgcagaaaccccaaaaatcggaccgcaccattttttgcggtgcagttttttagttttgcagtgcaggtgcagtttgagaaattagaaaaactgtatgtacgagttgatttgaaaaaattgtcaaaaaatacatcacccgcaccgcgaacacccctaactttaaatattcgttattttctgttgaagtatgttcgccactctagctaactactcactgttcttttcgtgagtgttcttactttacatgaatactcacctattttggtgttaacttaattcctctgacaacaacactcctcgtatatcagaccaaaacagatggccaacagtacaacactactggcctagttaggctatctccaatggtaaaacttaaatttagtgttaaattaacaccaaaaagttactattttagcaccaattttttttccaattccaaccacaacactaaaaattacaccaaattttacattctttattattctattattttattaatataagaaaaatattttaatattaattaaatctaataaattatattaataaatattatttaatcattaaaaactaaaaaaaaataaccgcgatctagtgccccactattaatagtaggacactgtagatccccataaatatagagtaacaattacagtcccattggagtaaaaaaaacgaaaatttcacactatatataagaaaattatgctgttgggttggagatgcccttgtatctggtgaattcggccacattatttcactcataaatatttcaataagtaaaataaatatccatacctgtttttgtatagtattattaatcttaatacatttgcctattgcacacggcaaagtaaaagcattgtcacatatttcgtaaacaataataaatcagatatatataatatgtcttgtatctcttttttttgaatttaaaagcgttttataa

SEQ ID NO: 312724 - DNA, 2126 bp, Cannabis indica
ttttgagactggaacccccatgcacacttgaccataaactcacttattcctatttcaaccatacacttttacattctaacatggtatcatagtcatactaaaactctaacgagtaatcgatctaaaatccaaaaaaccagtaccaaaaaaaatacaaagccaaaagagtctcttgtaattcgaggatagtgagccaaaaagagccactgtgagccaaaagagccattgtgagtcaaaagagtcacttttgatggattcgtgcaagattggtgagcaaaattacccaccattttgagatggatgttaaagagtctcacattgataatatttggaaactaaataccatacatgagatgcatggactactcctcttattgccaattaattttgaaataaaaccccatacacctttccatacactcacttaatcttactttctaaaccacacacttccatattctaacaatttatatgcactatttataatgtcaatttacattttgtagtgtttttttttcttttgataaatattagtgtggtggctctcctgcatcaagtaaaaatcaatttaaaaaattcataagaacaatttatttattttaagtatgatggtatttatttatttttgaagaaaaggtctcaacaaccaaacactaagagcaacaagcactcgataaaagtggggctaaggatttattcaaatatagcttctgctattattaagttctgaatacaaataggattttttgaccaccaaattgtacttttttctattgtcaaagcaagtttggccaatgaatgggaaacgccattacaaaatctgttacaatacacaaagctaacatctctgagcctattacaaagactaaaaatatcatctaaaactagacccaaagaaataatagtaggaacattgtttataagtttaagcacaatattcaagcagtcagattcaataataaagttaccatactcaaaggaagtgcattgaatcaacgtgttgcgtatagccaaagcttcaattactttaggaataaaacaaccatctaaatgccaactggcgaatctatgataatttccaaattatcacgaatcgccatacccaagctactacaattgctcaaagcagtattaatggcatctgtattgacttttagaaagccaagtgatggaggtttctattttagcacggcctgtagagggggttgtcctaggtatcgacctgcgagaagggacgtccactgccaattgacagataatgagagccaccgccaaaacttatttgttgtgaaacattccaaggtaattgcatgcccaacgaacaataagtacatgagacaattcaacgttgatatggataattttattatgtttgaaccaaatcctccaaagaatcaccataacccctttgaaaggatatcaacaaacctatgaatgaaatcaaaaaaatccacataatgaacaagaagatctcccaacacaaattcacagaatttcctacaatgagacaacaaagaacaccctcaaagagcatgatgactagtttttcttctttcaatctacacaaaggacataatccatcgatcaacaaaccacgactagttagattaatgttagagggaagccaactatagaacgcttgctaagcaaaaagtctaacatttggtgattttttttttttggtctttatttatttatacatgtttcatgttatagcaattgttaacgcagattttcattaaccaaatttgagccttacgataatgattcaacacagaaaatataaaaagctatagaaaaagaaaatataaattctacatagtccacgagtcaatcttattcagatttctgagtatttcagggcctcttaagtaagagctttttcgtcccctttttgagattgtttgccactatttataattgcatagttccagttaattacaaagatgaccaaaacatgattacagtcattatcccttaaatcgtgggatctcattacatatcataaaatataaatgcggtgtatgattttaaaaatcatttagctgtgattttcccgcttttactgggtcagaaatatcgtgtatgaaacacatctttaatttttgaatctggagatgtctcga

SEQ ID NO: 312725 - DNA, 1890 bp, Cannabis indica
ggcataaaacccaacacatgaatggcgtagcagcaagcggttttgtgaagacatcagctacttgattgagggagtccacatatcgaatatctaactgctgagctaagactcgatctcgaaggaaatgcaagtcaatttcaatatgcttcgttcgggcatggtagacaggattggcagctaaagaactagctccaagattatcacaccagattataggacattatgaaagctgaagttggagttcttgtaatagagattgaagccaaattatttctgttgtagccaaagccagagatctgtactcagattcagtgcttgatctggctacaacagattgctttttgaacaccaactgagaagattgcctccgagaaagatacagtagcctgaagttgacttcctgtcattaacacaccttgcccaatctgcatcagtaaagccatgtaattccattcgagatataggagtgaaatggagtcccagatgtaaggtaccaggcagatatcttaatatccgtttgcaagcagcccaatgaatggtagtgggggctttaatgaattgacttagcctattgaccgcaaaggctatgtctggtcttgtgagagttaagtattgaagagccccgaggacacttctgtaaagtttgggatcagagagaagttctctagtggtgaggctgagtttggtgcttgaacacataggtgtagattgaggtttggcatcagtgagattggttttagcaagaaggtccttggtatacttcgactgagtgagatagatgcatgttgtgtccctgaaaacctcaaaaccaagaaaataattgatagaacccaactctttgagcccaaactgttgatttaacttgctgataatgtgttgaatataagtggaatcctggcctgtaattaatatttcatcgacataaaccagtagcaaaaccaagtggccattctgatgaagaaagaataggctggtgtcagctttcgaattggtgaagccccactttgagagagtgtgtttgagagtgtcaaactaggcccgtggtgcctgtttgagaccatatatagccttattgagtttgcatacatgatggggaaattcaggatcaataaagcctggtggctgctgcatgtaaaccacctcatttaactcaccattaagaaatgcattgttatctatctgctgtatgtcccaattgtaagtgatggtcagggagaaaatgagtcgaatagtacacggcttcacaatagggctatatgtcttgaagtaatctaggccatgtatctgttgaaaccctttagccacaagtcgggctttaaatttgtcaactgaaccatctttgttgtatttaactctataaacccacttgttgctgacaactgtcattccttctatgaaagggaccaagatccaagtgccctttctttttagagcatggaactcagtggtcatggcaccattccaatgaggagaagcaagagcttgctttaaagatgttggttctaactcatgaaaactgtgagcaagataagtttttggtttgtgaatgccattttggcacgagtaaccatgctgtgagtattgtgagggacagtggggttgggtaagatagctgaagtggaggactgagtgactatgagaggagattcagtgatgtcaggatgagaactgtgagatgtagaggtggaattgtgagtacgagtatgaagaggatatggtagggaagagctagtggtatgtgagagggaatgagagttttgatcagaattctgtaggggatagggtaaggaagagtttcttgatgaaagttgttgagaagtagagtgcgaggaaagagagtgagacatattattggatggcataggtgtggggttttgtgccctaaataaa

SEQ ID NO: 312726 - DNA, 855 bp, Cannabis indica
attttacttttattttgtgaattaaaaaattaaaaaacagaagtgttaccaaacggcaccataattatttatttgagaaatgttaacatattactgttgcttagtacatatttttggtatcatattattgatgtgatgtagttaagtatcaaatcttacataaattaaaataataaattttagaaaatattacaaatcaatggtaaaatatcacttaaaaaatatactgcccaatagcaatacaatatttatttatacataattggagtttgagctttaaaagttattttctcacaaacctcaagaaaataagagagagaaatttctcaaagcactactgtcatttacagcgatcatttatataagactatgagtgcttctctgtctctctctctgagatagaaagataataattaaagaagaagaagaaaaagaaaaagaaaaaaaaaaaaaaagtaggtggcccatccaaatctactatggctgaccaactatgaagatatatatgaacgaaaagaaaagaaaagaaataaaaaatacattcacttgagagtgaagaaaatatttatatataagtagattattctctgtctttggtcttcaaacacagtttttggttttttcatatttacaaaacccgaaacaaaacaagctgaaaacaaaaaaacacttagccagatctctctctccaccacccaaggaggttattaagtatataatttagactcaagatccctttattcaagtttgaactttcattcgttctccttttctttttcttttttttttctatctctgtcgttttgccttagagtcgtttggttttgttagatatatatgtgtgtagtatatata

SEQ ID NO: 312727 - DNA, 1643 bp, Cannabis indica
tcagattatgttgacaaaactcaagcaattgcagattcgcttgctgtagcaggttccccaattcttgatcaagatttaatcttgcaattactgaatggtctaggacccgaatatgatcccgttgtctccggcatcactgccagaagtgatgtactaacgtttgaggaggttcaagccttgttactttctcatgaaactcgacttgagcatcatagttcggtcaccgattccaccatgaaacttcaagctaatgttgcgtttacgggctctcgcaacccctcatatcgaccaactcagccaccacggtatggtggtagaaccaattttcgaactccgcatcaacataatcggcctctatgtcaattatgccttcgctatggacacacggcaccagtttgtcactaccgattcgacaaatcttgggtcacccccaaaccaggaacaaatggcccttcatcatctatccccaacaacactcctcgggcatacatggctgagcatgaattcgagtatgacccccaagcgtttgcatcatcttttattcctgactttggtgatgattcaggatggttcgtggatacgggagccacgaatcatgtgacaaatggccttgataatctcgactctgcagtcacctatcccggaaccgaaggtcttgctgttggagatggtaagaaattgctaatctctaatattggtttagcttctttacctacttacaattctcataatattagactcaattctgtccttcatgttcctgcaattaaaaagaatttggtgagtgtatctcaactaactaatgacaattgtgtgtttcttgaattccacaaaacatgttgctttgtcaaggacaagcaaacagggaaggtactactcaaggggacccttaaagatggcctatatgtgctagaacaagtctctcaagagtcaacaatggcaaagttgcagcagtatggagcgagtggttattgtcctactgctatgaattgtagtagtcatatttcattacacaatgtaatcaatgaccatccatgtaataccactcatatcaataaagacaaagttgatcctataaatgactatacacctactgttctgcaaactaataccaagaatcatgttaatatttggcatactaagttgggccacccttcacttcatgtcctagccaaaatattaccacatgttccccacactggcactattcatcaaatagacttttgtcatgcgtgccaacttggtaaaagtcacaagcagccattttctagtacaaataccaaagccacacagccccttgaacttgtccatactgatctatggggaccatctcacatcacatccaaagatggctatctttactacattcacttccttgatgactatagcagatacacatggatttatcctctcactcaaaaatctcaagcacttgacatgttcctcaaattcaaagcaatggttgaaaaacaatttaatcttcccatcaagaaagtacaagctgattggggtggggaatacaggccattttctagatttctcagtgatcagggcatacactttcaacatccatgtccaaaaaccagtgagcaaaatgggcgagccgaacgaaaacacagacatatcactgaaatgggacttac

SEQ ID NO: 312728 - DNA, 1195 bp, Cannabis indica
ggagtacaatatgcagtagtcgcggtgcattacttcatgaaatggacagaagtcgagcccttggcaattatagcatctaagaaattgttgaatttcataaaaagtttcttcgcagtggcacaccctcaaacaaatgggcatgtcaaagcagttagcaagacactcaaagacaccatgaaaaaatggcttaaagaggctaaagggaattggttggaggaactacttaaggtattgtggtcgtaccaaacaatgaaaagagcaacaagtgggaaaacaccattcgcggtggcttatggttatgaagtgatgctgcccgtagagttagaacctccatcccacatgagactgacctataattaagaagctaatcacaccctccttgcagaattacttgatgaaattgaagaaaaaagagcctcagtagacctaaagctagtagctcatcaacaaaaggtggctcgatacttcaacaagaaagtgaggtcaaggaaattctttatgggagatatggtccttagaagagttttcttaaacacaaaagacaacgcaactagcatgctcagacctaactggggaggagcatatcaagtaattgaagtcgtggattctggagcatgtaaacttggtcagtataatgaaaacatggaacttgttctagcaccaaggtattggaattgggaacatttgagaaaatactacgagtaagtgtacatggtttgatgacccccttaaaagtaaacgatgctcgaacatccacttttaagtagatggccttctgagcaggcctcgctcaaaggtttgaataaaacaactcgcactcaggtcatatgaccttctctaaagtatagtctagaaaaaataattattttatgttttaattagctaaacatcagttagatcatgcaatagcatttataattcaataaatgtaagttactacggtaacaaaatcattctgaccaataaatgaataaagatattaattatcattctaattgtgtcaattgtttttcttactatagcaagttatgaatttaccgttaaaatgtgtacaaagggtctgctcgaatccaatagccgaacagacaaaaatgaaacttgtgcaataaaagtgaccaagagtcataagtttgctcggtcacttgggggcaactattcctgtacaaagtattagtaaataacaagctcaaaaaaa

SEQ ID NO: 312729 - DNA, 1126 bp, Cannabis indica
gtaaaataatttccaacagatcccaccaaagtcatcagactgggaaagaatctgccttcggcagtgaaagaaaagattgtctccatagttaaggaaaacattgatgtattgccttggagttattatgacatgaccagaatcagtcctcgagtaatttttcatgcactaaacatagatcctaaggctgatccagtttgacagaagcatcgacccttggatccagtgagattggaaccggtgaatgcaaaagtagacaagttaaccaacattgatttccttagggaagctctatatcccatatggctagccaatccggtgttcgtcccaaatcctaatgggatatggcacacgtgtatagatttcacagatacaaacaaagcttgtccaaaagattttttttcacttatgttcattgatcagatggttgatgaaacatcggggtacaaactcttaagcttcatggatgcatactccgcttacaaccaaataaaaatgcacgtggctgagcaagagcatacaagatttaaaactgacaaaggcatctattactacaaggtcatgccctttggattaaagaacgttagacttatctaccaatgaatggttaacagatgttccagaatgtactacgaagaacatggaggtttatgccaatgacatgctggtgaaaccgtcgacttccatatacctcgcgtaccaccaacggaactgaggatgatgaccttaccttacccatttgctatatgggggattgatctgattggggaacttcccacaaggcgaggggaagcccaagtacacagtggtagcagttgatttcttcactaaatggatcgaggttgaacctcttgtctctatagcctacaagaaagccctcgactttgttgccaaaaacattgtctgcaggtttagaattccaatgaagatagagtccgataacaaagttcgatggagacttattcaatgaaaactgtgagaggaacaaaataattaagagcttctcgtcagtatctaggcctcacgcgaatggacaagtggaagttgttaaccaaaccatgaaggatactatcaagaagaagttagatgctgccagatgaactacctcaagtactctgggctcacataa

SEQ ID NO: 312730 - DNA, 557 bp, Cannabis indica
tttggacaatctttatttaaatctataaaatcaatgcaagtgcaccatgaaccattaggctttgaaactaagataggattggctaaccagtttaggtagaacgactcttttacgaagctgcatgcaagcaaacaatctacttcttgtttaagtgcttattacctcgcgagttccattttgtagtgcttctatcgtactcctcgcacatctggatctatgttcaagagattacacatgacctcaggtataattccaatcatatctaaatgcttccacgcgaagacatctagattttatttgagaaaggtcaccaacctttcttgctgttgtaaagttagtttagaaacaatttttagaactttggaattataaagagaattgattggtatctcaattgtttcttcagtagcttgtgcagtgtttgtataatcgaggtccctagggtccagatcgtgcttttcctcatgtggtatttcttctatggctaattaagattcttacccccctaaacctttgacatgtaccaaatcatgcccccctaaacttttaaagtcgtt

SEQ ID NO: 312731 - DNA, 975 bp, Cannabis indica
aatagaaaggtaaagaagaaatataagtatttatagagagaatctaaatcgtagttagtacacttttcattattattttttattttttttttttttttgtagtgtgttgtcagatgaggtcactaatatataaaggcattgagtgcggtcacttccatctttttctataatttttttagggtttttttgcattggtatccttaagagttatcaatattagcaaaatagtccttgaactattagtattagcaattaggcccttcagtttatagctattgtagcaattagaaatttatttatttgtggtcataattgtatatataaaaatatgtgttaggttattatataaataagttaaatttatatagtatattttgaaataaaatttataacttaagagaatagttgttataattttattatgtggaaactattgagacaatttctaatttgataaagggtcaaattagaaataataaataaatgattaattattatttttacaatcattaataaataagtattgatccccattttgcatggtattgtactatttcatattcttgaatccccatctaggaaaataaaggttccagagaaatttttgatctaaattggaaaatcataccattttaagacgattttataaattttggtatgcttctgttattcttttaattttattgttaaattttctcatcataaattaattaggactaaatttgagattatagtattctaacactaactacatagtaattgttttaattaagaaagtatataaattcacttctcatataattcattattagactgttatttatatatttatttttttgtctagactcttgaactttgctagattaatgttacagtagtgctatattcataaattatttaaattttaaagaattgagcataatgcaactataagggaattttcgcaactatttttatagtttagggagaattttt

SEQ ID NO: 312732 - DNA, 1285 bp, Cannabis indica
ttttttttttttttttctttgcttttgtttcagcgaaattgttttttctccgtgttctcgggattgaatgttgcgtttgatgttttctgtttgaattcattttgctagggtttttcttgagctacttttttttttcttcatattttcttgtttgggcatttgtgaggtgctattgcttgttaaagtctgtttcgcattggtctctctagggtttcagttgtgaatgttgtttcatctagtattcctccgcgttaaaattactattttttggttttcttgataagcaattaaagatttgacacttgtttatcttgtttgaatgcatgggtaaattttgttctttgtgcaggttgaagaggttcgttgtcgactcaacgttgatgttacttctgcccccgattcagagcctgcgcctgcaccaattgaatcttttgaagatatggttgaaccttgtgtctttagtctgttttttttttttggtgcttctttttattggtcaaggttgttgggttttaatgaaatttggattttgtgctttcagtgtctgcaccctagtataatgaaggatatagcttatcatgaatataccaggccaacttctattcaggctcaagcaatgccagttgccctcagtggtcgggatttattgggttgtgctgaaactggtagtggtaaaacagctgcatttgccattccaatgatacaggtatgtaaatataatgttcgatatgattgtaccttttgttacatttgtttcttacgaagttaaggttttagtgaagatactccattacattatatttaaaattttcttttcttttacagcattgcttggctcagtctcccgttcgtcgtggtgatgggcctctagcgctggtattagctccaactagagagcttgctcaacaaattgagaaggaggtattctagttgatttttagatggaggaaaccaactagatgtgtggtcctaattgtttttggcactccatatctatgaatgagatattagtaatatgtggtcataagtggctcaaaaattataactgcagttaaacttgtttggaatcatctgatgatagttgatgtttagagggagcaaaccaatgagctattaataagatgtggtaataattattaaaataactgctggtgcccactgtaattgtatagaaataattgagagaaatttctaatcttataattgcaattgaacctgtttagagtcactggtcatctaatcttatagcagcttatgtgagtagaaccgtttcaggtgtcttatt

SEQ ID NO: 312733 - DNA, 804 bp, Cannabis indica
ttttaaaaaaattaaagaaaataaaattgtatgtaaagtcaaagttgaaaatatgagcagagtgagtacagtttatttttatgggactcataattagtgatgaacaaaattaataacttgaacattaaaagaaaatataataaattatttagaataatttgtgaattaaagccacttgtttctctcttatccacatccgtttgtccgactctgggtgttgtaaaattgaatataacagtggactgaagcattactatgggctagctagtactattatttgtgcatcttaacatatcacataaattaataaaataaaataatataaaaaaaccactaataattacgaattgtcacatcctatttatatagtgatgcataatgttgtaattaataataaaaatttagaaaagacatggcaaattgaaaagcgggacttgtcgttaccatctcaaatttagtgttaaattaatacaaaaaactattattttaacactaattttttttaattccaaccacaacaccaaatattatattttttattattctataattttattcatataataaaaatattttaatactaaatatttattaaatccaataaaatatattaataaatattaaattttttaatttacaataaacattacattatttttttttactcttaaaacaccttaaattatattagtaaacacattatttgtggtgtggttttcgcggtttttttagtttcgcggtactggagtagtttggaaaattggaaaaactgcatgtgtgaattggtttaaaaaatggtcaaaa

SEQ ID NO: 312734 - DNA, 1352 bp, Cannabis indica
  modified_base (438)..(438): a, c, t, g, unknown or other
aaagccatcatcaccttgatcagtgagtactgaatcttccaaattcgatgcattcaattatatatcattaattaacacaaatttccactcaatataaataaaccccaccaattacaaactcaattcaactcataaaaatcaaatctttactctgttttttttcttcaaacatggaaagaaaagaagatcaagaagttaaatacagaggagtaagaaggcgtccatgggggaaattcgcagccgaaattcgagattctaatcgaaatggagctcgaatttggcttggaacttttgctacagctgaagaagctgctagagcttatgatagagcagctttttccatgagaggaccttttgctattcttaattttcctaatgactacccgaatctctctgttccttcttcggcctcggcctcaagttcttcttcttcttctntcctcttcttcttcttctgcgattcgaaactcggaaactcaacaaagagaagtgtttgaatttgaatatttggatgataagttattggatgagcttcttgattttgacaacaaaggaaatcaaagttaactatttttatttatttattttgtatttaattatataaatagtttatcttaattaacaaaaaaacagagcaataaatattaaaggagagaaaataatgacaacaaaattttgtaattatacctattattttggaaaattttgaataatttatatttttgatattataaattattcaaaatttatctaaaataagttaaaataacaccatattactttttttttcttcttgtttttagtattatataatttatgtgtaatgaaagaatgaagaactgtaatgtaaagtctctgacttttttttatttagatttttgagtaattttggtaatgattggttgaattgagttatatatataataagatatctttattgtaaaagagcttatattatgaaataaccaatcaaaaaacttaagcattttattaattaatcttagtttatataaatagttttgttgttttaaaaaacagagcataacttctcaaaaaaaaaaaaacagagcataaaagaggagtattataaaggcaaccttttactaaattaaactgttttagtcaaaataatatgacttcgttaatattattttatataaatttttgtaatagtaattcttatcacgtgatgattaactgtataatgttctaagattgaaaaacagtaaatgtaaagtgttttgactttttggataaaattggtatttgttggttgaattatttcataaaacgtccttattaattacaggatataatataaaaaatcaaaaaaaaaaaaacataagtatttt

SEQ ID NO: 312735 - DNA, 581 bp, Cannabis indica
tgactaaaaatcacatttaatcataaaaaatttatgtttaatgtaactgtttttatagtgcgtaaaaactgcaaaactctatttagacacgacatacataacacaacaattttattaaaataattgtttagcatgaattcaattgttaaaataattgtatattgcttccatcaaaaataaaaataaaagctaaaaaataaaagtatcgttataaagcaccaataatacttagcatcatctagagatggcgtcttgcaatttgtataacaatatttcataataattattatatcaaattatatgaactctatatttaattgtactaataacgatataacatattaaataatattaagtatcactaatattttttagcatttatcttaaaataatggatggacaattttggtacactctttatccaaaaacaggtaataaatgtaacaaaataactcttaggttaattataaactagaatattgtcctatttatatatatatgggtgcactcgtaatcgtaatggatattactcatgaatgggtaaaattagaaaattttaagtttttatgcttaatttttct

SEQ ID NO: 312736 - DNA, 1542 bp, Cannabis indica
aatgtatagtatattcctttcaaaattaaattagttaccgtttaaattaatgttaaaaaataaatatgaacggaataaacattaaagtatcaaacaatattttttaaaaaataaactcatatgtaaattctaaatttcaactacaatatttaaatgcaatcaaaattatcaactaaaaattctaaatttcaaaataaactatataaaatacaaattttaaatgtaaaatagtttaactattaaacgaaatttatatattatgttataagtaattttatcaaaaaaaatatgtaaatcggtttatttgggttatttgggcgggttagaataatatttaacccgctcaatatattcattgggcggtttgaatttttcataaagttattcggattgtattttttatcggtttcttcggtttggtttgggcagtttatctgggttgggcagtttattattttttttaacagccctaatcacaagggattaccctccccttaataaatactagcaaaaagtgtagaacttctaacacttttagctagaccatcaacaaaaaccaacgccatccgcttaacaaaggaaaaaaatacaagacttaaaacgcttagataactctaaaatagaaagagaaacattaagaaaatttcaattaggaacacattgccctttccccaacgcctgaacaacaacttttgaatttgaaaaactagaattttcgaacccctgcactgatttgcctaggataaaaaagcaaacgagactgaaactctttgaacgttataagcccaagatccatttgtaatattatacattaccataccacaaccaagccagcatctccttgataccacaatgcattaataagtaacaccaaatcaaaatcttccatcgagatcccaacatcaagaggttgaacctccgaagccgtagcagcaacctcaaaataatcgaataactcaacaaaattctgctgaatctgcttaagagagacgcccagattaacagccccacctttaaagaaaaatctattccttatactccaaacttcatcaaacatacacgccatgtacactgaaatagatgaacgaagattaacagggacaaacagcaaaatatttccaacaaactcaatcatatttgagcaaggaaaatttccaataagagaaaacaccctgaaaatcagagtgccctcgacacgctgcattccctagaggcaaaactctgtctcaaagccacacaatagataatacttgtccccaccaaaaggcagtttgtttctaataggaataccctcatttataatcctccagagcaccaatgccaagctccttaggttgatttcatttggcacaaaattatgtaagacatacaacaagtacatggaagtagggtgcatcaaacgagtttactagatccgagttttcgtatttcaggtgtgaggatgtgtatatgttaggctatttttagcctatgttttggatccaatttatgtgcatttttagctgtgttgggacggaattacgcttgttttctatgttttca

SEQ ID NO: 312737 - DNA, 867 bp, Cannabis indica
atttgggggttgaaagtgacctgcgaccatactttttttattgaataacactctttactatgcacactcacacaacaaacatccaatatttaagcactatttttatgcttcaccacccatttcacattccaattttcacaaattctatcaatgttttctcagggtcacttatgtgtatgtgtttttggactaagaaatagtttagggactcctcacttgtgtgttggtgtctttggacaccccattcccataaaatagtttttttcataggactagatactgtaaaaatctctggtctgttgcactgtcgtaccaaaaaggaaaatgcataacaaattacctgaagtctgattttatcatcttatataatttataattttaggaatttaataaaaaaaaatgaaaagtaaaattttcataaatcttgaaaaatcttccattacaatagaacgtaattcagaagacaaattaccctcctgaattacacaacctgaagagtaacaagagccacgcgtcaaacattgtgcgactttattagcagactgcttaacaaaacaaatagaaacattacaaagattaaataatggcatttcacaatccttattaaaaagaccgaattcagaaaacatatgcaaattattgttaatatagcttgaacacgcacaaggctatccgactccaagatgacattggaccattgatgttcagaaattcagctaaaaggcttcctttatatctactatctgaccgatttcaggaaggacaacaccttgtctacccctgttaaaagcttccttaaccctcccatatggcccctagccaaatagcccatgctaaatttgttagtaaattattttaccaggatct

SEQ ID NO: 312738 - DNA, 1020 bp, Cannabis indica
ctaaacaatcaagtgttacaaatttaacatacaaaaaaatctaataaaaatataataaatatttattgtatttttaatatttttattatataaataatttttaatatatataaatgtaattggattggatcggtttttaattggattttgagattgacatccaataaccgatccaatccaattagaatccaacttttaacatccaatccaatccaattgtaattggatatccaactttttataattggattggattggatcggttcggttcaattggatttgattggatgatgcccacccctagattaagcaactaaatcattgtaataatggtaaatacaatcaagaattagctaagatatttgacttggtgatttggacatccaaatatagtattttataacacttttctttggatatccataataattgccttattagaaaccttttcgaaaaatctagtgggacaaaaatataaatcaaggaaaaaagagtgcaatctgcatttactacccctcattttggcattcctaaagatattttaatcgacacattctgatcttgttaccatgtttttgaatattaatactggtaatcattttgtgaataagtctacaagattgacacttgattgaatgtgttggacactaatatagtcattctcttgaaaatcatgtgttaagaaaaaatttatgaaaaatatatttggttctatttccttcattatagctttagttgagcaatgcgtagaagttgctgcgtttttagcctttgaattgtctgctcttgactgtctgatctcatttgttgtagtaaactaactccttttacatgtctctttgttgaatatgtgtggaaagtgaagaaatggtcccacataaactatttaagttttttacgggaaactcttcttcacttctcacatttcactccctcactagaaagtaacttttgaagaagctcctccttcactctagagggccaaacccacatagcatcaatttcctaggatttttgtgc

SEQ ID NO: 312739 - DNA, 781 bp, Cannabis indica
ttttaaaatatatattaatttgtttctttctttcgtcattgattgcttggaaatgaagcactatcaaacaagtttaagaaaaatatggaaaccaaagctaaaatatgatatagatatatagatatacacatatacaaaacagatggtgaggtgagctgttgagttgagtgtggtgaatgaagctttagcttaggtctcggcttacttacttcttcttcttcatcttctttcctttttttctttgcctaactcaatgtaccactcacccaactttatccataacactttcctaaaatatttattagaggaataacatttaagggttgtttggttatatttagattgatttaatttaaagaagaatttatataataaactaaaatttttaaataaattattaaaaaataagttaatatgaattttttttaatttttttaaagatttttgtttataaaatatattttagtaaaataataaattgtttttttatattttatttataattatatggtgagattgattttcattgttttttaattgttttataatttatttatatttaatttatagtaatggttataagattgatttttttgttgtttttttagttatttttttactttttactagaaaaaatatatttttatatttttataattttataaatacatttttgtaaatacaaatttaaatagtaaaattgtaaataaaacttaaaatttttgaaaattctcctaattaatattagtgatatttaaattgaaaatattaaaaagagcac

SEQ ID NO: 312740 - DNA, 832 bp, Cannabis indica
ctcgaaccatggaacccagacctcggaccctggaccccggaccatggaatccaaacccggacctcagaacgtggaactcaaacccataccccgaaccgcggacctcgaacccggagcatggaacctagatcctggaccatgacctcgaccctagaccccgaacccgaaccccaaaccatggaacccaaacctaaacccccgacccggatctagacccaaaactggacctggaccggacccggagctcggacccaaacctggacccgaacccgaacccggactggacacagacccagaccctgaccccggatacagaaccagatccggatctcgacccaaaccttggcccagactcggaccctggatcctgaaccccagacccaaacccgaacccaagatttagactcggacctgacctgacccgaacctggaacctagaccccggatcctggcctgatcgagacccaaactttgactcggaccccgaaaccagactcaaaccccagcccaggtccggatcttggtccggggctgggtctgggtccgagtttgagtctaggtttgggttttgggtctgtgaccgaatttgggcctgtgggtttaagttcgagttcgggtctaggtccggagttggatgggttcatatcatggtatatgtaaaatattaatttttttagtaaagaaaatttaaaataattttaaaaaacttgagtcaaacattattaaaattttaaaataataaaaaattattttcagtccttaattttgaaaatacaattttaaaaattaaaaagtaaaaacgaaacatgtttttaaaaactaccaaccaatc

SEQ ID NO: 312741 - DNA, 1361 bp, Cannabis indica
ttctcgctaatggtatgcaaagttgagtagaactctcattcaacatggatttcatcattccaaatttgaccattccttgtttattcaacatacttcaggtatattcatagccttactcatctatgtcgatgatataattgttgccacaaacaacttgcacgagttagcacaattaaaagattccatcgatgctcaactcaaattcaaggaccttggagacttacgttttttcctaggccttaaagttgacagtactgacaaaggaataccagtaagccacagaccatttacactacaactcttgcaagatacaggataccttggtgtcaagcccgtgtccactcttgtggaaccaaatacaagactcagcagagacaatggagaacctctccctgatcctacatttatcgcagtcacataggcaaactcacatacattacaatttccagacctgacatcaactttgcggtgaacaagctcagccaatacatacaatatccacaacaaccacatttcaatgctgcctatagaaatcttcaatacttaaagggatcagtaggccaaggacttttcttccatgctacaactccaacactactgcaactctctgcttttgctaattccaattggggttcatgtcctgacactagaagatccatctccaaatattgcatttttctcggcgactcatttatttcttagaaataaaaaaagcaacacactatttctcgctcctctactgaagccgaatatagagtacttgccaatgtcacttgaacaacaatggctcactacaataatcaaagactttaatatccaagtaccaaaaccagctactattttctgtgataataaggcaacaattcacatatctaagaaccctattttccatgagcacatgaagcatgtcgaaattgactgccatatcataagggacaagataacaagtgaatttctcaaattaaatcatgttacaacaaagactaacttagcagatatcttcacaaaacaactcttcccttcgaaattcagcacaattatatccaagatgagtgttacaaacctttacactccaccttgaaggggcctattagagttagttaaaataatgttatagaaagttagctattgttagttattcaattaaatcagttagtcctctactgatgtatataaaatagctaccacttgtactgatacaattcaattcaatcaaatatacaatttacttttctctatttctactaatacaatgtaatttaatgtttatacgagcaaaacgcgtatctaagagcactcacaatagctaatgtaaaatagctacaactgttaaaaataagctaagagttaaaaaaaatgtc

SEQ ID NO: 312742 - DNA, 1718 bp, Cannabis indica
actatagtgtgttatatttcatactattgtaatgcttttggagactacaccacaaaactatcaagactagaagagttggaaattgagaaagagcttaatcttttgaataaaccaccaataaagactattaaggtaatattatatataattttattttatatactcttgtatatacatacatataaaatattattgtatgaaaataacatttttgcttataatttgacatgtgtatatatgcagagagaagatggagttatttacgattgtattgatttcttcaaacaacctgcatttgatcacccttcgttgaagaaccatacttaccattataaggttattataaatttgtgtgcatatatatcttattataatttatatatatatgaaattaatgcataaaatttatattattgttggtgcagattaaaccctcgtctcgtcctaatttaagtgaacataaagattcatctaaaataaaattaaaaggcttaaattgtccaattggaacggttcctattaggagaactacaaaagaagatcttatcaaatccaaattatttacaaaagtatatggttcactcactcttgaaaaaccaggtcttcatgtaagtttcttttatgtattttcctttatacaaaattttatgcttacttatcattttttattttaattttggtaagtaattatctatgtattattagtagggggaatgtctctactaacattttatccttgttattgaaagatgttagctaatgaagattgctttttctttaaaaaaaattgtgttttttataggttttatatgataatttttgttttcttttatcataatacaaattcaatatttaaactaaataataatatatttgtttagcatgctgtgcttcgaacaatatctgatcctaaaaggagatataatggaggtggggcagtaatgagtatttataaccctactgtggctggctcacaatatagctcatctcaaatgactattaaaaatggacctgattccatacaagttggatggacagtaagtaacacttatatttttttttattgttttgaataaattgcaattttaatacatgccacaaataatatattttcttcttatatttttaagtacaatatttgataaatagagtttgtcttttaatacatgctatattcttttaccttattttttttttcaaaaaattttgttattttaggttaatcctactttgtacggggacagtaaaactcatgcgttcacatttttacaagtaagttttcttctttccatccatgtaaaagttttatttatttatatatatttaatgttacaaatattttttttttctttacaggccggtggaaattcttgttttaacacacaatgtcctggctttgttattgttagtactgagatacctcttgactacacttttgaccaagtttctcaacgtggtgaaacaatatacgatacccaattttttatttatcgggttagtaataactagtttactatctaatttttacctacacaaaaatatattaaactttatgcaagtttgccctaaaaataagtgtgctaggcttatcaaattcaaaaaagactcatattttataattaatttttaatgatgccaatttataaaattatatgtaaaaaaataatataattactttgaaaaaagaaaaaaagaagtcttagaaccattttttttat

SEQ ID NO: 312743 - DNA, 1372 bp, Cannabis indica
agttagtgtagtgtttgagtatgagttaatattttttttcactaacatttatacataaggtcatgaatattttgctccacgtgctttacgataagattcactagtaaaagttaaaaaacaaaaaagtagtttagtatataataaaccgaaccatcaattatatcatccagaaaaaaatattttacattagtaatagctaatacttagtggtataatagtacttgtagttgtagtaatattaagactaacaataatgtatatatataagacttactttaatggacgaaacttgttggactcctttgaatctttcaattctttacagtaacgaataagaatgatcttagtgtgagtcattttatttttacttatatttgctaaagatggacctgaactgaatttattactatttatattagggatgcttttgtgtttgtaattgtagtttagaagatgtgaaatttaatgaaagtttcttcacttggaataacaagcaagaaggaaatgatagaaattttacagaacttgattgtgtgctagcaaatgctttgtgggtcaatctttacaacacagttgaagtcacttttttcctggaaagagactttgatcattgtcccatgttggttttagtttatccagaaattaataatactcgtagtgactgacaaatgtgaccggaactcccatgtttaatttggtttccaagctaaagaagataaaaattgggttaagagctcttattcaagatagaaaggggaatattgagacattggatagcatcgcgtaaagggagttgatttcggttcaagaagctcttcaaaaccaacatggtaatgaggagttattaaagaaggagaaagaggctagattgcgatgcaatgagactcaccagaactatctattcttcttaagtcaaaaagcgaagttaccttcgataaataatggtgatgacaacaccaaactttttcatgatagtatttggaaaagaagagttcaaaacaccatctactcaatcaaagatataagaggcaattaggtagaggagcaagataaagtaatacatgcctttcttgatttctaccaaactcttcctggtacaaggaatgctagtagaactaaggtgaacgagaagattgtgagagaatgggttgttattttagactttcaagtggccaaattgattgaagattatacaaaagctgatgttaagcatgcttttttctcaatcccagatgaaaaagctcttggccctaatagttttaatagtttcttctttaaagatacttgggatataaccgggaaggatgtttcgaatgcagttatctattttcttaactctgataagctgttgtagaaaattaacgctaccact

SEQ ID NO: 312744 - DNA, 2965 bp, Cannabis indica
tattcttgaaggacaccgatgagagagcatgtgcgtatattgcaggccctgcaccaaaccgctgggctagtttaacagttgatagtagcatttcagctggtgatggtgagttgttgcagcatcttatgtaaaactatcctttgggtgatgtacagatatttatgtggatagggtatatgcaggtgtgcaaccaaacactgaagaatcgcttactgaggctgagggttttgaaaaggatttgcgaagaaaacttcgtgggcatccacttttctttggtatcactatggggcttctggctgagattattaactcgaggtagtttttcctgcacatcaaacttaataagcacctgaaaaaggctcaacttcatgtatcaaatgcatgtatcagatacattttgccatttgtaactttgtaagctctataatattctttggtgattttgctcaggctgttcacagctgtacgtgattctctcggattgacatatgatgtagcatttgacttgaagttattcgataggctaaatcttggatggtatattatttccgtaacatctacgccaggaaaggtgaggactgaatttgctcttgtgtaatttgtattttgggcctctttgaaccacttcactcagtttgactgtaacatccttcaggttcacaaagctgttgatgcatgtaagaatgttctcagaggtttgcacagcaacaggattactcaaagggagttggacagagttagtttcttcattttttccccttcctttttatatatcaatttttataaatggatagcacatgaactaaggttattttgatcattgttttgcaaactacaggcgaaaagaacccttcttatgaggcatgaggctgaaatcaagtcgaatgtgtattggcttggactcttagcacacctacaagcctcttccgttccagggaaggtacaatattatggaaactctctcaagatcaacctaactaacctcccttggaaataagtgttacgatagttatatgtgatgtcattgtgtgtatctgaattttggtgcaggacatatcgtgcatcaaagatctaacattgttatatgaagctgctgaaattgaagatgtatacctgtcatatgatcagctgaaagtagatgaggattctttgtattcatgcattgggatagccggggctcatgatgatgaagaggatcgttagataaaggctttccgggagttggtctagttggacatggtttatcaactatgaaaaggcctactacttgagggcgctcctcccctttaagatgagagtttcattctccaagtaaagcgattgttaataattttcataattacattaaaatgatttgatgaatgttcataacttcatgccgagaacgagaccagtggcattgatgtgctggtatttgtgctaattttgggagtccattttcaggtttaaaggactggtatggcttcaccttgtcttgctgggacaatccaaaatatggcattgccatgacaacccaaagctagtttctttgcaataacactgatgcagattttttgcatccccgcatctactaataaggtaagtaccttacttgacatgcatgcatgaatgggattattgtaatccaatactcttgtgaatatatgcgcttaattgtgtttaaatcccacttatgtcaataagggtattttagttgttttggtctgctgaggatataatcatgataactgtgattttatttatatactaggactgttattgtgtagcattattgttggatacggtacaggtggatttcgtcaagcagtagcggtttcggctcaggcgaagttttggggtccattctggtataattgggattttatatgttcttgtatggtatttcccatttgggatggtcagtgttattgagtaaattatttatctatccttgaaattatatttagttaaataattctttaaggtcttttgaccagtaattttggtctactgcattaagtgctttatttatttcaagttagaaaaactgtattttatttatttcttttgaaaggactatcatccgtatcttacgaacagttacaaagtcctaatattaagagcagctacaaggtacttgctgcgagatgttgaatatttatcgaaataatatttcgaaaatgttgaaatctcacttcatcaagattgtgatccttatttagatgagatcacctcacaagttgagtcttgagtttttttcaacctgtctcacaatgcatttgttgcgagaatttagtatttatgtcacgtgatattcaattcgactttttcattaaatggtacaaaaatgaaaaaaatttcccctaagtcagtttttcatggtctacataaagctgacttattatatgttaccttcccattctttttagcacctttccaagcatttgttttataacatacgagttgggcatgttttgagtcatgtgtattacgagttgctcgtttgtgtttttcgtgattgatgcatggcagagtagttactacaacttaatgcattgagatatgtactatgactagatgcataggagtatgtactatgactagatgcatgagattatatactacgatcagaagcatgagagtgtgtatttcaaccagaagcatgggagtgtactacgaccaaaagcatgaaaacgtactacgagtagaagtatgggagtatgttgagccttctctcaaagtttcttttctcctgaccgataagtgtttatgggatcaggagaaactctcctcttggtttcgacctgaggatgaggagagtaaaaatatctctccccaatgtacggatatgttttagaaaggatctatgagcggatatttcaacactaaatatgcttattgagctttaaataaacatagattcacatccactactactatgtggaggaacatttggcttgcctcattactcgaaagattgaggtta

SEQ ID NO: 312745 - DNA, 1562 bp, Cannabis indica
actttggatcagcatagctcttttgtccattctttaaagcaaacctatgaactcgaatcttttctatggcctcactcgttccttaaaccgcatcaggtccaaggttcctccgttcactgacttcattccaataaatgggtaaacgatatttccttccataaagcattttgtatggtgccacatcaacaatactctaataattgtcattatataagactcaattagagggagatgcttatttcaggaaccctcaaaatctaatacacacgcccgtagtatatcctcagatatctaagtaattctcccagactgaccatcagcccgagggaaaaaaatctatactaaaatataacttggcactcattgctcgttgcaaactctctcagaattcggatgtaaactttaaatcttaatatgagacaattaattttggagcaccatagagttgaactatttccttgatatataaattagcacactaatccaccatatacgtaatccgccctgataaagaaactgtactaactttgtatatctatccctaattacccagatagaatcatagaaccctactattcttggtaatccaaccatgaagtctatggttacttcttcctatttccacttaagtatctttagaggttgaaatatttccactggtttctgacgctctgccttgacttgctgacaagttgaacatttgacacatacttcacaatgtcactcttcatacctggccaccagtacagggcctttacatcatgatacatcttagttgttctcgggtgtaaaaagtacggtgtagtatgagactcatctagaatcttctgtcagatttctttatcaaccagtacacaaaccctattttcatatcataggattccttcagacgaaattgaaaagtccttttccgacgcaaattcaagtctttctttgtacccctgtagctcagagtcaccttgctgggccgttttgattctttctaacagatcaaattgcaatgtgatattaaatagtcctcctatatgaactcaatcctcgctctgttcatattttcagccaactttggtgaaatttcttggacctctttgacttaaggcatccgctactaatttgctttcctataatggtagagaatcacgcagttataatcttaatgagtctatatttgtcataaagatatgatcaatttatatattaatattcttaaattgattctttaaattattgattagtgtgattttaattagttaggctattttaaagactattcatgcatttagagtcttttagagggcttttagcatattttggtggaaaatagtggaagtcggcgagcttggttttacaaggcagagcttaattgcaaattttaatgatcttagaagcagaattgaacttggagatccgcataaaagatttagatatcgttcttagctttccataacatcttgaatcgtccaattctgagcaatatcgagagagttatggccaaaatactatcagtcatcgcagtaggaaatttttcgaaaaaaataaataaaaaagatagcgaaaaaaaa

SEQ ID NO: 312746 - DNA, 719 bp, Cannabis indica
taaattttttatttacataaataatttttcagtaaaaaaatatatttttttatattttatagttatcgtaaaattgttatttttataattgatttatagttctattaatttttactttttttaattttttactaaataaaatttatttctgtaatttttaaaatttcacaagaataattttataaataaaaacttcagagtataaaattataaataaaatataacaaaaaatattttgaaaatttctttataatttatagttgctattcttttgtaaaggtaagaaatactattgttttaagctaattaatttgagcttttttagaaaaaaaaaaaaagaattggcttgtacagaatatcagaatattactggttcatttatcttttagcctgtaccatattatttaattatcaatgatattggtgattgctttaaaaaaaaatgttttagtcaaaaaattattctatacttttaaaaaaaaaaaaaattatagatattcttgagtggagagttatgtggtttttgtttgaatttggtggaatggaaataagaaaagataaaatggactgcttttgttagtttgatgcccgtgggccatgggccatggttcatggttcatggatatgaatatgaccatttcttaacagaatcagatccaaatcctatgtgagatacagcagccgatcctaattttgagacactgaaaattttcagacat

SEQ ID NO: 312747 - DNA, 681 bp, Cannabis indica
aaaataagaaaacctcaaataaatttttgatcttttgatttttaattgaaactttgtagtataaacttgactattccataaagagttattataagcctctcaaatattatagaccaaaatattataaacaataatatacacattttttctaaacttttactgtctacatcttttcacacatttcacacaatgctacaaatcgcttttatgcaaattgacctcaatctagttacaaagctccacgcattctctcttgctagacctacaatcaaaaaagagatgatggtgtgtttccctctccatagcacaagaaagacaatttgcatctaaaatgcaatcaaaattaagcaaatggtatctagttaggagacgattccagcaagctaacaacacaatgaacttatgttttggaacgatgaacctgctccaaataatggaaaccatttcctatcctccctactattcggccacaacttgagacatatgtttggaatactaaaattcaagtggctgaactcatgggtagctactttttttctaattaagttctttgtattcataattttcatccaataccaataaacactcgtaataagaccacctaccatactctttcacataaacaatattcatgttgagttttgtgccctaaataaaactcatgtcaatataatcagattt

SEQ ID NO: 312748 - DNA, 1210 bp, Cannabis indica
tattgacaaaatattaatatcctatcgataaacatgttgacaatctcaaaattctttcaacaaaaaaacacatagcatgtcttaaaaatgtcgacaatatgtcaataacctatcgacaaactcaaaactacacataataatcaagacaaaccaaattctgtcgataaataatcgataacatatcaacaaacatgcataatgacaatttaactgcgcaaacttaaaatcctatgaaatacaattgatatcctatagataacctttcaacaaatataaaacttctaaaaaattaaatgagcttcaagatagcaacactctgataagatataatcaatattcaatcaataatctattgataacattgtaaaaatattatttcaccacaacaagccacataatccacaatatccaaatctatgaaaaatctaaatctaaaaaatttctcttctaactttcatcaaatacctcacacaactctcattattggttgccgaaaatctcagtcaacacctaggatactttgaattaggtaaaaagtgactgaaaaatagagtgcacaaaaatcccgaatcgaattgacctttaatagatgacattaattaaactatgggcgatcggaacagaaaattaaaatctcatgacaatgaacattcaatctagaaattcatagaatacatacatagaaatcataaaaaattcatgcaagaaaagagaaaggagacttactgtttggcctagcgtttgaagaagaaatccctaagaaattggtccacacagcaaaagattcgagaaaaagcttcaagaactcgaataatggtactctcttttttgctctgaaagtttgaaaatgttaaagtttcaaatgggtttcctttgaggtatttatagccaaataagagagtgggaaaatttttttagggattaaattcaaaatgatcgtgttttctccccaaacgtccaaaggcctcacttcacatcaaaaattgcatgggaaagtgtgtatccgtcagacacatcccccaatgcatgccttccgaagtaaaagtcattatgacagaagatttgaaaggacgtaaggaaattatgcttcgggtaggaacgatgccttgctggacggaccaggtgaatgcatacacgtgtcgtctagtcatgcaaggattggagttgagaatgttggttttagtgccctaaataaaaccctttacaatct

SEQ ID NO: 312749 - DNA, 754 bp, Cannabis indica
ccttgaagagtcttcttaggaaccatctttcatgtgaaaaccatggtagcagtaacattataggctttacatctttctttagctcttaatgaaagtaccaaaatatatactgagattttcagaaactaaacattcgaactaaagaaataataaaatgtagaaataaagagattgaaattttttacgtggttcgagtgttaattaaccttagttcacgagtcagtctattagcctcttagggcatttttgatgtgtttacaatatttttggcaagaaaccctaataatgtactcttggtttctcttgaagaagatgaagaagaagagtaatattgatagtgttttagctatgtaggttgtgatctcccattcgtatgaaaatagaaggatatttataggctaagtggcaggtatggacatgcccatgacccacctagggtttctgctcaaagcacactaacggggtaaattacatgcaaaagagagctgactattgggtcccttggaaataattgtgtcggtgcatgctgcaactagataattgaggactatttgtactatatgaacacatgttgcttaaaagtttaacctttaaaagtagaggccacgtgtcacccaaagatttcacctttaaaagtataggtccataatatccatctatcaaaaaggtggaggtggtgtgcgcattaccatgcttggatgcaagagacaagatttgatcctgcgtcagaaaaagcataaccgtcacttggtga

SEQ ID NO: 312750 - DNA, 3855 bp, Cannabis indica
tcaataaactcagaccttggtttcacaaaggttctttcgtgataatatttgtattgtgtattagtgtattttgttaacgaaagtaattatgagttataatatattaggaagtattgagaaaggaatacaaatacaaatattttttaaaaaaatatatattttagatatattttcaaaatatttttgaaaataaaccaatacaagactaaataactcaagactattttaaatagcacttagaaaagataaattgtatttctaagccaatgtgggataaaaatttaaaatatatttcattcacatttttctacacaatactccaaactgttttgtgttgtctaattttgtattgggcttgcttaaagaagtcggctaaattgaataaggtatatatatattttacattaattatttgtttcaaaataattttgtttaatttatccttctaattatataaataatttcgtttcattttatagccaatttaatctcatgttttattatctgtgtaaattagaagtggtggatagtgagcacattcatgctatagagcaaaagtatggttctaaatccaacacaagatccattgcatgattgcggcattaagaaaacttcaattaatggattttagtttgagggaaagtggatagtggataaatgtcattttctcgacttattatgattataactttgtgcctatttatctaattttagaaattttaattttgttctcttagttaaatgatatgtgatgtaagaaaattattttgaaactttaggtatcattttttgtgaaataatttatcacacaagttagtgagtcaaattttgtacataaaaattttaagtatgaacttgtgaatcactatacaagactaaaaaatgtgaataaatctttatggagtcttgtcttgtgttccttgagtcttggagtctactttgggtcacttttgagaaatttgataaaattaccattttgtccttggagttaactttgcctttaaatgcttttaaatcttcacacatgtggtaaagtataagacaataagattagtgttgtctttagcaacataattagaatttaaagttgaacaacttgatactaaaactatacctttctaaacgaattattggatgataaaatctacatgaagtaactacttgagttacaggtggaaggaaaatgagctaaaatggtatgcaagctcaataggttattatatggcttgaaatagtctccaagataatgaaataaaatgtttgatacttatatgcaacaaatcaggtttgaacgatctgcctatgatcactgcttgtactataaaaatttggtgttatctacaactgtatttttattgctctatatggatgacttgctcatcatgtgcaatggccaatcagtgagaaaaacaatcaaagtcaagctcaagagagaatttgagatgaaaaggagctaggaccgattcaaaagatccttggagttttgagaaacaagaaagaaggaacaatgagctttaagcagtccagatacatcaagaaagtcattgagaaattcaacatggaagatgataagagtacatctataccatttggtggatagttcttcctgtcaaaggaacagtgtacgaccagtgcggaagaattgaaaaaaatgaagtatatgtaccctacgtcatagtcttaggatgcttaatgtatgtgatggtgagcaccagaccagacattgttcatgctctaagcattctaagtcagttcatgtccaatttggattagaaggccctcaaatagttattaaggtacttcaagggcacatgagatttggtcttacctatgagaaagctaaaggagaactggaattgaaagggttcatggatgctgattatgcgtctaacagagatactagaagatcaaccacaacctacatgtccatgacaaatcggaactgtatatgttgttatagtctatggttgctctttccaccacagaagtagaatttatggctaccaccaaagtgtcaagcaagctttatagtttcagggaatttcatatgaactgaaaaaactaaaagaaagtgactgtgtactcaaatagctagtcgtccatccatctttacaaaaactcaatttatcataaaaagaacaaacatatagatataaggctctaccgtattagagaaaagatagaataaggactagttgagttagaaaaggttagatcaaagataatcttgctgatgttgggactagagtcttaacagttagcaagtttaggcattgccttgacttgatcaatctcaaaaattatcatattgagatacatggaacaccaaccatgatggttgcatctttcttcatcagcatgacttttaatttgaaggaactaggtagaatttgtggtatagtttttcaaatgaaaaggtctcaaggtaagatttgtggaaagctagatgtcgtccagaaaggagttccaaatctctagcttgtccacccagaagaagtcttgtggaaagatagatgtctttcggaaaggagtttcggaagtctagcttgtctatctggaaggagtccttaggaaagctagtcgccatccggaaaggagtttcagaaggctagttgtttcctcctggaaagggtgccagataggctacttcagctggctttgggacatccttctgaaatgagcttcgtctgcttagaacatccttctatgaagtgtgcttcatattcaaagtgctcatgccgaagctaaagtggaattctctttacaatgaattagataattcggttaagccataactgacttaactacataattgttgcagccaccaccattgggatccagatcctaaatctataaataccaccatcaacaacagaagaatgggtgatgattttgagagctgaagtcgagataggattcaaagaaagattgagaggtagagagagagaggtacaaagaaaagagagattgagttttgtaagaagaagtttctgtagataaagaagcttcataggtaagactgttagagagataaacactttgagagaaaccaaatagagaatcttctcgactgtattgtacttgtattgttgctcgatcaataaagtaatttggtggtattccaaaactggagtagaggcatagatcatcgatttattagacttgaatcagtatacatcttagtattgattttatagttttcctgctttgctttgtttaatttatggttttatattctcttctactttgttattctctaattcttgatttgtgatattctgacatttacattgctaattgtttgttgattagaattttaagttagttttaattatgcacattagatgaatttttccacatataagagtattgtgtgttggtcatgtattttcttaaagaaagtaattataagctataatatattaagaaataacgagaatgaaaataaatttttatataattttccataaaataaattaatgaagtttaatcttcctgttacaataattaattaatatgatgtgtgtgtgtttttcttttcttcaaaatttcagttcatggatctctagctaggatgaaagcattgcacgaatatatcggtcttgtgtatcaatttttggtaaccctgacacaatttcttttatctcctacaacttaataattttttacaaaaatactaaatttttggtcaaagtttacaattttattgccacacaaatttttttacaaattaccgtctttttataaaataactgtaaaataacaaaatagaataattaaaaataacagtagaacaattaaaaaataactgtaaaacaacagtgaaaacttaacacagtacacactacacagtat

SEQ ID NO: 312751 - DNA, 2131 bp, Cannabis indica
gtaaagttccatatttcgtcccagaaggcctttgaacatccggttaaccattcttcgatacgttgcatcctgaagctagtgccttcttgatctgcaatgtgcatcttaatctgattatagccggcgtccaccatttggtcaatccggggtaaagggaagaaatatttcaggtaggctttgtttatatcagtaaagtctatggacactcgccatgtcccattaggcttgggtaccagtaccggattggctagccactccgaataatatacgacccggatcaggccattagccagtagcttgtccacttctttttccagagcctctgcctttactggatcaaggggcaccgattctgttgaactggcggcactttcggatggacgttcaggacatgggtaattacatgcagacttatgccggtcatatctccttggcaccacgcaaaaacatctgtggctgcccttagtgctttaactattttttctttttcttccggttctaggctctttcccagccggaggatcttggtagggtcgaggtcacacactcgtacttcctcaacgtcttccataggttctacaattttttcagaggatccaactcatcttcttctcccaactctggctcaatattctcacggaccattaacactgctaagtgggccgcgacattataacactgtttggcctcaccttggttacccctcacggtccccagtccggcctcctgggtggggaatttctggcacaggtgcgggatgaatgtaactgcaccaaaatctaccagggctggccggccaaggattgcattataggccgttgggcagtccaccaccacaaatgtgcagtacttaaaattactctagggtgtatcctggcacaatgtgacaagcaagctcacctttcccattgggatgagcgtggttccattgaatcccgtgagttgggaaccgctcagtgatagatctcgatccatgaggcctattgcggtgaaggcttctttaaacaacaaattcacggaactctcattgtcgatcaatattctagctacaatcttattggcaatgggagtctctatgaccaggggtcatggtgagggaaacgcaccagtcttgcgtcttcttccatgaaagtaattggctgatccatgactcggggccttttagctggaagctaagtgacttcccataccgtcatgtttaatggccccggcatagcgctttaattcttttcgagtggtccccccaatatggggcccacaaagatcatgaccactcttccgttaagtcttggtggcaggccaaggatttgctgaggggttggtcctcctgagggcgtagctggggccaacgctctgggtgcacttcctggtgtcccttggggcaatgggccccctgccagaactgggttgagatggggcaaccggttcttgatccactcatagacccagtcagatcaagttttcgatttcatctttcaaattttttcactcattggtactgtgtccaatgtcattgtggtattcgcatgttttgttgggatcccttcgtgaactatctctgtacagaggaggcggcctcctgtagtgcgtattctgcctcgtggcgaaatacacacgctcttgtgtgtccatcaggtccgtgtaatgggtatactggggagtataccctctcttttggtgcttgtccactgctcggttgctgccttgagaaggttcagttaggcttgcggcgggaacggagtgagacgggacttgtccgcttattcttgagggattcccatagtgcgaagatgcgggagccaaggcttggctctgattatatcgtggggtagcagagaactgtataccactcatttgtggagtagcctgaggtagggttcccgagatttgaactccgggtacatatccttccactccggttgggtagtatcctccgtataccactatttgggcttcttccaagttaatgtacttttggactctcttttggaaatcttggaggttagcagctccttcttattgtaattcgttccagaacggggttcctgtacagatcccagcttgaagaagtgcaagtttttgtccgtcatcaaatttcttggttttcaaggcctcttccttgaacctcttt

SEQ ID NO: 312752 - DNA, 750 bp, Cannabis indica
gctaaccctccaataagcatactggaaggttttgtcagaaggctttggaaagatgaagttgtcaaggttggtttgcttgccaaaggcattttcatcatcagattttagagcttggagtagagagataaggtgatgcagcaagggtatgtttttttttatcgaaagccaatggttatgaaaccctagagtccagtagatgattttactaaagaagaggtggcaaatgtaccaacatggatacaattaaaaggcatagacatcaagttctggggggagtcctcattgttcaaaatcgtgggccagctgggggaacctttactggttgataatgtaaccaagaatagagataaactacagtatccaaggattctaactcaggtaagtctatcacaagagtttcctgataaaattgcatttattgatgaatttaaccatgaagtggagttagatgttaaatatgagtggatgcccctagtgtgttataattgttctggaattgggcatagtattaaagattgcaggaagaaagaggagaaaaaggaaccaaggaaacaaatatgggtgccaaagcagaaagtaatagagaaggagaagcatgtagacgctgaagggttccagaaagtgagcaagggcaagagaattctgataaataagaattcataagggacagtagtgaagaatatgtttgagactcttggagaagaacctggaaatgagattaacacaggaggggagggagatccctcttcc

SEQ ID NO: 312753 - DNA, 914 bp, Cannabis indica
ataatttttttattaatttttttcatgtattttaaagtcatttgaataataaaaattaggctcaaatttactagttacttttcttttattttcaaaagatctcgaatgagaaaaaatattgaattcatcaaagaaatgttttctattataaagtgtgagcctacactatcttaaaatttattgttaagattaaatacatcatagtgtgtaaattgaaaaggtcccaatcattactcttattaaaatattttatttttagtcacaaacttaaatatatgtaattatttgtagttattagtaaatgatattgtaattaggcaagccacgttttgcatatgattaattagtaattttatataataattattaaattaaagtatgtgagatttaatatttaattatattaataataatataaaatttaatgataatacacgccaattaaatcttatcttcgagcgatgtgaatataattaacaacaatactagcccatactcttactagatgggatttgtcgaattcttgtaataatttgtcgcatttaataagaacattttaaatgtgcgttttttaataattttttgattgattttttattttttgaattagaaaggtgaaaaaatgtataaattatttcaacttttaatttttaaaataaaaatcagttttttttttttaaaaaaaaatcattttaaaaaaattatttaaacaatttctttctttataattataacttagaataatttgcggcgtaaatacttaagtttaattcttgattacagataaatacttgagtttaatttttgatgataatagtacttgttgactgaggttttcggcaactaataaaatattgaataattatcttttttaccccctgtacttatgacactatactattatgccccttaat

SEQ ID NO: 312754 - DNA, 673 bp, Cannabis indica
ttcctcaattattcataattatctagttagggttttgctaatccatttcttaattccgggtattacattagaggtcttcatcgtcccttttgctgtattcacaacgaaagaggccttcttcattcccttggttgtcttgacagtggaggaggtcttctacttccccttcgctgctagcacaacaaatgaggtctttttagcgaatgtaaatgatttgttgtaatattcgcatgctactctttggtttccaagaaaacggttgatactagctgctgtcgagaacttgacagagaggtagtagataggtgagatggctcataggtcgttgggtgttgaccttccaaggagatttaatgtcgaccactatgaaggtattcatagtgatgttttccacggtgcagttttgactgtgagttgtaatctgattttaccacagggagcgatgttggctcacttgaaacgatacatgagctgcttgcatggcttcggatctcttaggggaatgattcactctttttagggtttgtcttgattataatatttagtgtacgcttgatcattaaccactcacctttgtcgcccattatgttttgaaattttcatttgatattatctgagcctaattgctcttgcccccctgctttatatatctcagtaactggggtgaaaaact

SEQ ID NO: 312755 - DNA, 804 bp, Cannabis indica
atagactttaaaaagaggataaaaataaaaaggacaatataaaaagagtatagagtgtaatattttaaggttgccactattgaaaagaaagtgatttataggcccaaagcattgggggactcaattgtgggccaatattggtacaacccaaaaataacatttaatgggcagacaaagcctgtggtccattatttgtaaatctttatcacttgtcactaatatttttctacttccaaaattgtcccatcaaaaataaatagttcagtgcagatttggaaaattttggtgtttttctttttctccatatttatttacttttttttgggctcacattacaaaaattagttgttagaagctatagatcgacagaaaccattattgtgaaacttcattttacactaatttggggtcagctgtcataattcatagagcattgctattaggcaccagtggtgtctagcaccttctcgacatgtgacattgcgattggttagcgatacttcctaaaaactattataataaattatatgagactcgatacttaattgaaccaatacatataggagggtactaagcatcactggtgccctttagcatttctctaattcataatctaacaaatattatatatttaaggttggtaattggtgttgtctaattggtccctaacccgatcattgtacatttcacgtaaaaaatctaaatcctaactcaatttattgtatttacgtgtatatacttatattacacatatacgttgattaatatcacatatttgatctatataatatatatatagaaaaa

SEQ ID NO: 312756 - DNA, 947 bp, Cannabis indica
aaaaaattatctctaaaaataactaagtttttgtaatatgtgtcttatgtctttcatcacaaatgtcactatacaataaatattactaaaactaaattatagggacattttaaagtgttagtaaattataagtttagtgtggagagattcctaaaagaaatgaagacattttaattaaagatagagcttgtgatacaataaagagaaagtgcaaagaactgtgtttgtggatatatatgagagactaagacaacacttgaaaacaaaagagtcacaaacactacttaataaatatacagatctatataatattctctgcataacaaacagaaaagctcattttgatttaagaaagttttttcctaaattatttcatataatatatggtttttttttaattattatttcaaatggatccttaattaattcatgtacgatatatattgttattttttagagagtttttgataaatacataaaaacaacaaaaaaattacaataatataattgcatatattattttcatcttgtttttttattacttattttgagtagtttttttgttattttttatagaacaccgtagaaatataaaatataaagatatatatatttgaacgtacgtaaatatgtaaaaattttacaaaaaatataatattttgtataaatttctcttattttaatccaaacaattcgttgatcacttaaaatcacaaagataaatgatcatataaggtaattaataacctaaaagaaaaagtaattgccaaaaaaaactgacaaagaataaagaatataacattactttatatatagttttattaaaaaaaaatacataattcctattgatcgagtacgtgtaaaatgaacataaaaaagaaaaaggacatatacaaccaaaattaaagaattttttcttttacttttttcttttttcttttttcctt

SEQ ID NO: 312757 - DNA, 1049 bp, Cannabis indica
taattagcctaaaattatattattagttgtacgaatacacacatgctaaaattatattattagttatattaatatacacatgccacatgtacagaagtgtacacataagtaatccatgttggcagttaactgtgaaaaataaacgtcatcttaaatttgttaatagtttaatagtttggaggattataccactaaaatttaaacttggagggttaagtgcaagtgaaatgataattaagaaggtttagctacaaaaaactctatatattactttaaatataataaattatcaaaatattaaattaaataaatgactaaaatctatttaccaaaattttcaaaaaattattataaaatatttaagcttaataagacaacccaaaattttaagtgtttcatgcgttaatgaaccttaagatcatgttctatttataatgtagaatgcttgcggtaagatttaaaggtgtcagttagacccattgatggggtaaaatacaaaatatattgactttatgctaattaggtgaggcctgattcacgagataacgttcgtccgtaaaaggaggactggttgatgatgccacatgttgcaagctgatgtgttggtaccaagaatgtcagagaatatgacgttagacaaaaaggtggctgccttttggtggtgcacgcactccatatgcctgatgtgggagacaaacccctgacatggtgggaccctgtgtctcttcaattgcccgtgtctggattacccattgagagcatcaaggtaaatcttgatggaccattcgctttctgaaccatacaatctttcccgaagttgtgccttgactccaaaagtgggtggacatatctacttagctggacccacgaatggacatgttgtggttgatatcgggctttgaaaaatacacacgtcatttatccaaaaacgcggataacatttaccccaagccttctagaacgccctgactctcaggaatgccacgtgtgtgctttacaatcttattatcactaatctattaatttatggaaaagtgtggtttaattaa

SEQ ID NO: 312758 - DNA, 1056 bp, Cannabis indica
tctccttacgaattggttgtcagagctgtaaaaatcccaaaaaaggaaactttctaagctatctttgtgtgattgtgtacccaatcaatcgttgaaatctgggtttgaatttcaaatatatgattgaaaattaatcggaagattttattcatttttacataaaaatcccaaaaaaagaaactttccaagctatgatttttaacattcaatcgttgaaatctgggtttaaaatttcaaaaatatgatttttaaccttcaatttcaaacatagaaatagaaagaatgaatcaaattgtaaatggaaagaggttgagaagggaaatgttacctcaaactcaaaaaaaccaataccaaaaaatggcgccaattttctgttttttgtaccaataaacccagttcatatatatgtatatatatacggatgcgtaagacttacgcttcaatgatttatattaattaaaaataattattatatattttaaatcaaatgaatgattttaaatcaaagtatttgtacgagacaaaaataataggtgatgtttttcattctacaaaaatttgacacattagttaattataacattttttttcttttttgaaaatttacacattatacctaaaaatgaatttatcattttacagatttaaaaatataaaaataaagatggcgtgtaaatcaagcaaacatcattaatttaaaaccccaagaaaccgggttacacccgccaaatattatttttgaggaattctatttttttcaaaaaaaaaaagatttgaactttattattagaataaatataaacttaaataatttttaaaaattactcttaatatttatttaaaaaaatttcctcacattattttatgttaattttaatacttattttaattttattttcataattttttctaactcatttatatatttttcttgtttttttctaagaaaatttcatataatctttttatcataatatttaaatataatttttttttttgtttaatatatatatttttttaagaatatgaattgaaagaaaaaagttaaaaaaaaaa

SEQ ID NO: 312759 - DNA, 3680 bp, Cannabis indica
atgtttaaaaatcacgtaatactcctatgctagttagggtgttacattatgtctaatgtaacatcctaacatggcttcctaaaactattaaaaaaacacaaataaagggattaagaaatctttacagtggttgtagcggaatatattgtctccttccatttagttctctaactcttgatcctttctgtcgcagagtattgccaagaagtgaacctggatcttctcctccttcaaatgtgttcatcacagtcttccacaaaggcttgagtatcaccttgaatagtgtgggttgatactcaaacctttggaacaattttgatagagttatttcttaggaaattttgaaaaataatgagaagaagaagaagtgacattatctttttcaattctcttctcttttttatataggcattcatataaggctcagtttagatgagatagactaaaataaagacttgagatgatatctaactcataggaccgaatatgttatgggcttcagagttggactttttcaactttatttcaactaatgaaactaaagtgtctttttcaattttaccacttatctcatctaatcatttaaataccaattttgttaaataattgtcaaataatataaaatttaaatatatttattaattacacccacaaatggtactaattaataaataaatccctatttcttttttcttctaaaaactacctaaacttggtgaaaattctcaaataagatattgtctattttagaattctaattgacttattaaattaattagtcaagtctacaagatgatattatcccaaacaatatgagaactatgggcctatataactaagcttctaataagtagatctaaaaattatcaagtaaatttactatcttattaattcctcctcattataccataaatttggaattgcatacttaattacatagaatgctctgtataccaaatgtagatgcgttataaattttccattattttaatcacaacaatcattgatcctcaattgatgatttacattgagtagggacaaaattactgttttatcctacaatgtattttatccttaaaatacttagctacttgtaaatgatattttgggaaattgatataattaccaaaataaatactttatcatttatcgagttaagccaagctctaaggaatttatcattttacttctaaatagttatgaaagctacagattctatatctatgattagcgctctcactcaattgaactaccatgttcccaagatgtaagtattgggaaatcctacttgtaagctccatgaacaagtcaaaaaacacgtgaaatacagttgatctagaatctaaccatctcaggattgagaacaatgatctatgatcaactaagtgatattgacttagaaaagacataacggtaagtataaaaaaatttccactgttaatattggtctagtctgatgtatagctaatatatccgatcttagtttactttaccaatgccttggaagagacatttcactcggttaaaggtaagtaaaccttatcgttgattatcatatgagtgcaaatttagcacactgataaattatgggactaaataatttaaagcatataatcacaattacttttactatgatgacatcactataattgtgaataactataagtttaagatttaatagaacttatatataaaacatagaatcatgtataaacatatgaacaaagtatataacaaagtcaagatatgatttctggtctttattgaaagtagataaattacaatgaaattggattttatttaggacataaaatctcaacaaactctcacttgcattaatatgaaactaaaagtgcatttcaatttaatcttatatacttgatgtcctaatcaaatgtattactgggcattgtactaggatctgatagattgtattcagtatcaacctactctattatcacattttccttagtcataaaatctatgatttctagatgttttaatcctcttaggttacaagattttttactgtttggcaattgcatatgtgttatcatgaagtcgcattaggaaattattcaatgtttggaattatgccaaagtttgtatcaaactttcttaagtctgaataattcctaattgcctttagggaatccttattattcagcctaattggtagagttagagaatctagataggcttttacacttcttcaaaaatcacggctccacccccagagtaatcaccaattcttaagtagactttctagcattaacgcaactctaaaagtctaatttggtgtagcctaagggttttaaaataccacccttataactaacttatagtttctcttcttgcatttgaggatatgtttgagtatcttccaatattcctttatggattgaactaatactcacaactcgattaatgatcgcttagctttattttaagaattaggagatgattagggcttattgccaggaataggctttaaattattatttttgtaattgtggagatatatttaaattttaggtgtattaattatgttatatatgaaattttgtgttttttacattttatgcccagtaatagtagaatatcacgatttggccattagagtcaatttgaaacggtgtagtatcttagatttagtgagacaatttagttagacatttagaatgtatggagtatttggggttgtgatttcataccattttaccctagattatttagtttacttcatactgaagtaagggtaaaattgtcattttaccctagatgtttattatttattttgtgacttgacttgtggactaaggaaatttagttcttgttttgtttagtaagtatcgatatttactctaattgattatgatgagtttccttttaaagtttgatatcttattcattgtattttgattatttgttaatcttgaacgatttttttttttatcttaattggcctatttttggaaagtttcatggtttattttatttattttttaaaaaaaataagggaaaaagagttgggtggtttcctctttgttagtgggcaaggcagttaatttttgtttaaattggtttcctttttgctcctctttcatatctttattttaaccaattcatttgtcatttaaatctcaccatcttctcttttacccgatccctcttcgttggtttcttgtctctttgttcttcattttcttttttagaattttatggctaagacaaagaacttagggcatccaagcaaaatggtggattcaaaaattgctccctcaaatgcttcctccgtgccttcaaaatcgcctcctactgctgcaactgcttcaactccaggggattcatcgcctcctcagcatgaatcaaagaatgtggctatcaagaaagcttcttcttccattcccacttccagaaaaagggcacccaaaattgtggttggaaaattagtgagacccgtccgattgcccagatcttctaggttcgattcgaagtcttcatcttcgactgctaaggtatctccttctcatggctcttatcttggactaaattgtttcattctgaagaggtaaaaaacgtactcagaagcttatttttccttacttaacctataaagttctttcctctcagaaggatgtggtttattcccatgagatactcgagcctcccctcactgg

SEQ ID NO: 312760 - DNA, 1277 bp, Cannabis indica
agttttagaatgtataatgtgtggcttcttgatggaaaggattagattttggcctttgttgtgattcttgactctttgagtcataaagaacatggagcacatatttgagttttgaaaaaaactcacatttggattcaaaacaaaccttggctggccttggaggtcttgcttgagacttggtcggtcctaggactcaatcatgggagttggccagctctagggttgcaccctataaagctacccagttcatgcataggtttggtgaccctagtcggttcttgactgattcatgggaccctagctaacattttcaaggcttgggaaccttggccggtctgggccttggttccaaacgggtggctagctttctgtcttctttgactttggtaaaatcttgtcatggccttacaggcatatacaaccttagtctcatacgtggttcccttggaaactctatatgaaacttaaaggtgagtctattatagttgaatgttcaacttaagactcaacatttatccaatttgttaaacttgagacttgtactttgctagtaccgagccttgtacaatgaaattgtctggcaagcaccattgggtacggttgcccaaagttttgtctatggcttaaaacctgcaaggaaatcatctttttggcttggaacctgacaggaactctacctttgccttagcccagtatgtggttccaataagaactctgtccagttcttctttagttgtacagttcttgtagggcttggccttatgcgtttgaacaaattttttattcatattcagccttgaggctttcatgttcttgcttaatttcttctaaaataatgagctttaattttaaggatattcgatctccattgttggttctacaaggttcttattttaatgagattcatctctaatagatgttcattcattagcaatttaaaaccgtagaatcttgaaagattggtattattgtaaattttaatttttagtaataatcaccccaatagtgactattaagagtatggtttacaaagtatgaaacaatagtagaagctcatgaaatagaatgatcttgactcttgcctaaataggacaacgtcggattctcatttcgattgaataaaaggttgttaaaatggtatccattttagatgagctaactactacattcaatgaatgatatctttgactctcgcctaaacgagacactgatatcgatttattagaaaccttggaaattatttaagatgtgtttgttttgtattctcacatgtcttt

SEQ ID NO: 312761 - DNA, 1157 bp, Cannabis indica
agagtccatttcatcatctacggattcttgccaaagatccttatctaaagaagacaaaacttcttggaagttagcaagatcctcttctaaggcataagcacagaaatcaaaaccaaagtctttagctaaccttgctctcttacttattctaggttcaatttctaaatccatagtatgttcattactcctaattactggaagatttctagttgatgcgcccctactatttctcaatttaaatggaaatctacttttgaaaaaatccgtctcattagattttactatcacatgcgcattaagatcacagaacctataggctttgctattaacaacataccataaaaatacacattcataagctctacttcactactagaaaaatgggttttcccgacgtttttaaacagttgtttaaagtatttccgtcggtttctataattgtttcctatacgaccgtcgtaaaacgggcagaataagcgacgattcaaaaaagtcgccaatctgggtttcccgacggttgaaaatagtcgcctataactgggtattggcgacggtttataaccatgccctatactataggggacggtttaaaactgtcacctattgtatagggcacggttataaactgtctcctatacccagttataggtgacaattttaaactatgccttatagactagttacgttttttaattttttttagcgacggttttttttagtcattacatttgaaaaataggaaaaaaaaatagattttatgcaattttttgcctgcattaatttttaaattttgtacaaatctgtatagttacaataattaaactaatgctattatcatctaaatatatttaaaattatatatagtcacaataattgaacgaacgctaatatcatatatatttaaaaatctataattatattactgctagttatgataatctaaatataattacaaatctatgtagtaacgataaatctagatatataaacactcactaacacgacaactgttgttgctccactttcgctttcacgtaatgaatccaccgatcacgcataatattaatttcatcattagtgtacagagtagagaacctatcatgtcagtcaacagttgtactggatcttctacgatcatgaaactttcaatgaatttc

SEQ ID NO: 312762 - DNA, 1279 bp, Cannabis indica
aaaaaataaattaattaattgaaggatgttagaatatattagtaatttatttaaataattattatttaattcaagaatattatttaaaaataaatttatgaataatttaatacattctcaatattaatacactcatcaatttatcaccattagattaaatatctatgactataaatgcctactatagtgacaaaactaatctgcttaccataaacatattctatatatataatcaaactcattttataatatttaaaaaactattttgttttaaaaatttattaaaataattcgataaaattaacttatttacaatactatgataattaaaaaaaaaaataagaacaaaatacattatagtaacttattagactcgagtgacatatttaattttgttgattttaaaatttaattaattaaatagaaaaggaaaaagacattaaaaagtttatttcagtcatcttttccggtgaaattatttttttcaaaatgtcgtggtttaatgtaattttctctaataataacctaaattttggaaaatgggcattggcccaaagttagaaaaaggacacaaatggcattgatttttgaaaataccaccttatgtcttagtttcactaattggtgaatattagtggttttaacttttaaagctataattggacatatctcaccaataaaataattaaattagtgtgtgtaataagtggtatttttgcaaataaagcaacgaaatagatgcttgtgtcctaaacaaatgaacgatccttccttccaatccaacaccgatgctgaatagctacgttgaaattgtgatgacccaatgctaatcttggactccgcagagcccttaagttatcgtttgtaatgaaaccaattttgtgggctacgtgttattatgagatgttaggaaaggaattagctcaagttacacttaaaaaacgaggaaattacattgtatacccaccttactttacttattttaatttttatctctatttttatattctttaagatatacctacttttatagatgatgtctccgttagacttcttaagttaatgtaaattatatgctagacttaagtagagagtaggggtatattaggcaactcactcataaaagtgggtatattttaataaaatataatatgagggtatttttgattagtagatataaaaaataggctatttacaaaaatatgagaaaatgaagatatgttttgatatatatggcataaaaacttaattaccctaaatatggcatttttaaaaaaaa

SEQ ID NO: 312763 - DNA, 706 bp, Cannabis indica
agtcatcagtccatgaagcagccagagtgacgaactcgtgtataagagccattagtccgtgggtataaaggcccaatagaggcttgaagcggggacgttacacataaacacaaatctaatccgtttatatatgccaagggttgggcctctataccacttaagactagctcaaatgcctataagagggtatgtattggaagacctggattcgagtttcaagttatgcattgtaatatataaacgcttaaaaaaaaaatagaatctctatacatgcaataaatatttgtttttttaaagggggtttagactaattaatgtaatatttttattgatattctacatatatatgttcatgtcattcgtttttaacactgtaattgttctgaaaataccatagatcgtaatcttgctaaaattacttttatcttgaatcatacattaattgtgagtctttcacttgtttcttagatttttgcctgtttaatgagaaattcatttaattttgttttaaaaaataaattatgtaatattttctaattatagacctgatcgatttataataataaaagttaaataattcgtgttgtacgtagcatgaaaatacgtactcattattaatttcacttgctaatgcatgttatccgaataagaaattcttaggaagttttcatttttatgggttttaagttatatatatttacaaaaa

SEQ ID NO: 312764 - DNA, 1784 bp, Cannabis indica
aattttagagttccacagtttgttccacatagccggagctacattccctaaaggagctctccccaaggcttggatgaggtaggcagacttagttgaaaacactcccttaggatctcttgtccaaacccatctatccttaccctgacaatttggttttccaccctttaagatactaccaacagtttccctgtcaaagagatcattgagctttctggtgtcccagttcccatcgggtaaaagtagttcagccacaaattcaggctctcctcggggattatgattgggtttcgggaataaagtacacccatgggtgatccaagggtcgttccaaatgctagtatctctcccatccgcaattagtttacaagccccctttttcaagatttcttttgtacgcacaacatttctccagaaccaggagtcagaactcctacctgtacaatcaaagaactttctacccctcatatattttgcacttagcacctgacaacaaagggaccgattctcattgaggagatcccagccccatttggccaaaagggcttggttcatctctacggttttcctaaaccctaggccaccatgagatttcggaaggcataactgatcccaggctttaaggcagatacctcgatttccttgctcatgaccccaccaaaaatctctaaccatcccatcaattcgcaaggcaagtttttttgaaagcttggtcgtctgcatagtataaacaggtaaggcaagccctactgatttgatcaaagtagcacgacctgccttagataacgatttcaacttccacccatgcaatttcttaaccaggttatcaagaataaaattgaagtcagcatctttttggcgagttctaaacaacggaaggcccagataattgatattacccactgcacacttcagtcccagtgtctgcttgatcgcccttttcattccgttgctcgtgttaccgctgaagaagatggatgttttgagcttatttattctttgtccagaccaatcacaaaatttttccaaacactgccacatctttctagcttcatctaaactcgcccttcccaccaaaattagatcgtccgcaaagaacagatgagacaatcttggtccttctctgctcaacttgatacctttaataattccatcattcagggccttctggagaagtcgagaaagaatatcagctgcccaaataaaaatgtaaggagacagggggtctccttgtcgtattccacactctgggacaaaactactaatctttctaccattgaggagtagattgaaagaagtcgtagtgatgcactgacggatccacatacggaacttctcaggggctttgaagcttgaaagcacatgatcaacaaaagaccagcttaacttgtcataagcttttaccaggtcaattttaatcgcaaaaaaaccctcttttcctttctttctcttaaaggaatggataatctcttggattaaaacattattatcctgtatactccttcccggaacaaacgctgcttgggtagggcaaatcaatctcgggagcacaggtttaattctgttcgcaataattttggagattaccttatagataacattgcacagggaaattggcctaaattgggacaccaatttagggtttaccaacttagggatgagggttacattagtaacattaaaccctttgtgtaaatttcccgtctggaaaaagtcatccactgcatcacaaaagtcttttcccacaacattccagtagtgcttgaagaaaaggacagacataccat

SEQ ID NO: 312765 - DNA, 1225 bp, Cannabis indica
tactaagcgggctttacagaaagtctcttctttctattgaacacacaactttaactcctccttttgaacatcaattatagttcttcccatagccaagaatggtcttcccaaaatgatgggaatatttcatcttcctccatgtcaagtattaaaaaatcagcagggaagacaaacttaccaacctttaccaaaatatcttcaattataccccgaggattagtcaaagagcggtctgccatttgtagagtcactgttgtgggcttggattctcagtctttgaaacataaacatggacatcaagttaatactcgctcccagatcacatagagcttttgtttccattgaaccccctattgagcatggaatattgaaactacccagatctttaagcttgggtggtagtttcttttgcaggattgcactgcactccttagtaagtgccaccatctcaaactttccttttcttggatagaatatctttcacgaacttcaggtaagctggcattttttccaaggcctctcaaatggaatgttgatgtgcaatttcttaaatatttcaaggaatttgctgaattgcttgtccatgttattcttgaaaagcctttaaggatagggaattttgatatgatgatcaatgctggtaggaggtgaagtttctttttctgcaaaccttcaatagtctttttcttgtcttgagttggtgttggtgcttgttgatccttgtcctcttcaaccacttgtcgctctgcccttggtccctcatattcttttttcacttctcaaggaaattgcttgacattgctctttcagattaatctctgtagtactaggcaaattaccttgagtttggttggcaatttgagtagtcaactgccccatctgagtttccaagaccttaatggaagatttaatctctattatgaactgaaataacatatctgtctaaagattagaccctccattagaaccttattattgttaattctgttgttgactctgttgagattgatttctctattggtagaatccttgttgctgctgatttggaaactgtccttgaaaattctatcgatgacccccttggttgtaaccatagttgttgatctgatatttccaaatggcttgagcttgctccattggcaactattaacatccaccaaacaagtgtcaatgtatgagatcccccacatagctcataagtaacttgagcttgcttttcttgagc

SEQ ID NO: 312766 - DNA, 1224 bp, Cannabis indica
aggcttttatttaagtaaaatttaaatgtattataaacaataaatatttatagcttagttggttaaggtggatggcataaagtctaaggtcatgggttcaaatcccataacactcttcttttaattttttttatatatttttgagggccccaaaatttaattcgtcttgggcccatatattttcagggccggccctgctaattggattagatcgaatgtctacccctacttacatggatatagcatgtggatatatatatatatatttatatattttaacgtcaactctaaattccttttcagaaaaaaaaaaacgtcaactctaaattaataatttagaaaatatttatttttcattaatatattcgttatctatatttgaattttaaaatatgtgtaatttgtataataaaatcatgagaaattaaagtatggttatgtagatgagtttagcaaattattgcgagggctccactgctaattaatgaatgtcctactaagagttcctaaccacaaaatcttaaacatatttgtttgtcaaaacgtctctctatctcatctaagactaaagtggttcatgcatttgatggtttaattttcaaattattataataataagagaaattattaaaaatacatttttaatatttacttacaatttatgatttaaagtttccttttataaaaataggcttataaaattttaacattacaaaaatatacttttctcgacaaaaaataaaaaaaataactaaaaattaataagaaatcaatctcatgataactataaatcaaatataaataaactataaaataacaaaaaaataaatagaaaaacaacttgatgacactataatacagctatacataaattataaaacaaccaaacaacaatttattatttttattgagaaggtatttttgtatataaaaaagttcaaagcgtaaaaataaaaaaaaaaaaaaaaaaaaaaaacttaagtgttgaagtattttatagttttttaattttaatttatatgtaatttttttaataatattaatactactaataataataagagataggcataagatctgatttaattcactttgttataattgcacttttttttttacgtatattataagggataatttcacaaatacacaaaaataacaaaaatacggtttcacagaattttaaacatttttataatttttttgattttatttacataaaat

SEQ ID NO: 312767 - DNA, 1719 bp, Cannabis indica
acattccccaagggagccctttccaatgcttggaccaggtaagccgacttagttgagaacactccctttgaatcttttgtccaaacccatctatccttaccctgacggttaggtctaccaccctttaagatactagcaactgtttccttgtcaaagaggtcattcagttttcggatgtcccagttcccatccggaagaagtaattctgacacaagctcaggctccccctgcagattatgattgagtttagggaagaaatcactcccatggataatccagggatcattccaaatgtttgtatctctcccatcagcaataagtttacaagcccccttcttcaagatttcttttgtacggacaacattcctccagaaccaagagtcagaattcttaattgtacattcaaagaactttctgccccgaaggtatttagcactcagcacctgacaacataaggactgttcctcattagaagatcccaaccccatttggccaaaagggcttggttcatctctaaagattttctaaatcctaggccacctagagatttcggaagacacagatgatcccaggccttaaggcagatccctcgatttccttgctcatatccccaccaaaaatctcttaccattccgtcaattttagaggcaagttttttagagaatttggtcgtctgcatagcataaacaggcaatgctagcccaacagatttgatcaaagtagcacgtcctgcgttagataacgatttcaatttccacccatgtaatttctttatcagattatccagtataaaattgaagtcagcatctttttggcgatttcttaatagtgggagacccagatagttaacattacccattgcacaattcagtcctaaagcctgcttgatcgcccttttcatgccattgctcgtattaccgctgaagaagatggaagttttgagtttattaattctttgcccagaccaatcagagaatttttccaaacactgccataatcctttagcttcgtccaaattcgcccttcctaccaaaattagatcatccgcaaagaaaagatgggacaatctaggtccacctctgctcaaactgatacctttaatatcccttttaattagggcatcctgtaggagtcttgaaagaatatcagctgcccagatgaaaatgtaaggagatagtggatctccttgtcgtaagccacattccgggacaaagctactaatctttctgccatttagaagcaggttgaaagaagtcgtagttaggcattgtcggatccacagatggaacttctcaggagctctgaaacttaaaagaacatgatcaataaaagaccagcttaacttgtcatatgcttttaccaggtcaattttaatcgcaaaaaaaccttcttttcccttcttcctcttaaaggagtggataatttcctggattaaaacattattatcctgaatgctcctccctggaacaaaagcagcttgggtagggcagatcaatcttgggagcacaggtttaattctgtttgcaataattttggagataaccttataacaacattgcacaaggaaatcggcctaaattgggacactttcttagggttcgccaatttagggatgagggtcacattcgtaacattaaatcccctgtgtaaattgttaggttttatgccctaaataaaactccatttcaatgtaatctattttagtcaacatcaataaag

SEQ ID NO: 312768 - DNA, 1500 bp, Cannabis indica
tgcctttactaatccaaattactaaagcggtcattacaaacatgtactcctaaatatgttcgattcaaaacattattatgaagaaaacagataaaattaataaaatagacacatattgttacaggaaagcacaatctttgtaccttaccacaagaaataattttatataattgtctaattagtaacacaatactatgattattaacaaagacatttttttaggttttttttctttgcatgttttataaaactaacaacaatatctctaaagatatgaaacttgtttgttgtgatgaataaagttcccaaagacatgtcatgaatacattccaaaaggcacaatttgtaataattatttggaacaactaagtaatttaattttaaaagctaacaacaaagattcaaacccagtaaatgcacaataaaaatatttttaagggacaaatatgtacctttatagaaagaatatatataagaattagtatagtatattgtacattaaataaaaaaaatggattaagcagaaaccgtaacaacaaaaaacttagcagtgttttctcttataccaaaaattggaaattggtaagtttttgtttctttattctcttaaattagcataggcttaatattttgttgctcacaagagaaaacactactaaatggataaagcaaaaacttagcaacaaaaaaaggtgcatctttctgttcaagacttgcttaagcataaccctcacaatcacccacctccaccaccaaacaacaacaatctttattattaaaatttaataaatataataaacaaaaactcaaatacttatatatatcacccactattcataaacataaatatgcacttaaagacataccatgaaaactgtaatatcttaagattaagagaatggattaccaaaccctaactagttaactgtgtataattatggaattatattattatataatttattatatgtgaattattatgattatgaatgacatgttaagatctcgttggtgagctagggacattttagtaattttgacccaagtagggtaaaactatgaatttaatttaattatgtgcttatggactatattattatatagtgtgcctatctgtcctttttcaggtgtgttctgacaatttggcgcgttatagtcacaaccgggtatttcgggtcgaacggatttcggggccgaaatacaattttaggatgtttaattggcattttattttttatatgagaaatctgaaatttattatttgtgtatgaaatgtgaaaattatatttttgcccttatatacttaaaaatgggaatttggccttaagggcaatgtagtaattgtgttttttgcgttatgactcattaaaagggaaatattcagcaaaatgagattttatttctgcatttaactccagccctagcagccagcgtctctgtaatacccggaattaggaatggattagcaaaaccctaactagataattatgtataattgag

SEQ ID NO: 312769 - DNA, 1981 bp, Cannabis indica
gagtcatttgagaaaccaaaagccaaagagttagaaacagagtctccaaactttcttcccttgacagtgaggaagaggttaccacaacatctctttcaacatttttgctcattgagaaagcatcattttggcctcttgacagtttaaggtttggtgatgttgtttttcttgttggcatttgagagagtggtagtggggtggagaaaaccaacagaagtaaatattattgatggtgtgaaaatgcattggggacctaagggaatgcttgcagttattacagtggagggtggatttgtgggtaaaggatttttgtttgaaagataagtggcaaaggtgtttagaggtgatgattgagagccaagatcaggtaggtaaatgtgagaggtcagttatgggagaaatggtgcacgaggaggctattgttatgtgggcagaaggtgttttagtttattatgtgttgtgaggagaggtcttatcagtggctgaaatagtattgatagaagagatagtacacaaatgagaattagtggtaagggatcgtggagagaaaaatggtgcagatcgagtgttcctcgcagggttagtgttattggtagaatggtggaaatagctatgttaatggttggcagcaaaggtgaaataaatgcagtggttattgctattgagaacttggtattaaaagcatttggaagagggttactgagtagattggtactgatcgagtgggatccaaatgaaggttgttgtggaattgagtgttctccttcaaacagaggtcgtggttgggctataccccgcgcaagcaagccagggtgactaattgtgagagcgttgtaggcaagcctcgtgataaaaggccacgcattaccttcagagaaatctgcatggtatcgatcgtagctgtttgttgggagttttgcacctttgagccatggaccataagggaggtcatcatcatttctactatcaataagctccataaaagaaacacactactcaaaacatttgaagtaaaatttagggagtcttttatagctgtattcgatccaaaattcattcataatttttagtaagtgaatcattggtcctcggggtagtagtttaaggatagagagtttgactcaaacacacaaaaaaggaacacatccttcattagtagaatcttcaaagacttttatgaattctccaattgtgttgccaagagcctcagccaaagcagaagacctgctaaggaaaggcaagtggtaaatttgaatcgaaaaaggattgtagatcatatcttcctttgtgatattttacagagcacctggcgcatataaaatgattagatgattatggttccttgtaaagactcaacgtttatctcctgcacaaccaaatgcaatgtgaaatctgtctgttttgtagtcagtgattgtaacggaaagcgtcccttccagtgacccgatatttaatcatagaaacctgacctaaaagttgttttttcagtaagaacacgagccagtagcaaatggaccagtcatggtgcaggtgaagaatttggtacatcaggaagggttaatatcgaactctcctcatcagtgagggagagaatggaagtcagatggttcatgaaaggttccattagaaactggttacatgatagatgaggaaacatgataaaacagtcattgggattcagtggaggagacacgccaatgttggagaaaacatagggacaagaacacttatggaggaaaagattttgaaaataaacgaaaacaaaagggaagtagtagaagaagataattttttggaaaatgaagttaaacagttaaaaagaacataggtggtgtttggtttgatgtaatgtaatggtaatggtaatagtaatggtaatggaatggaataagaatggtaatagaaattgattaaaatatttagcttgtagttggaatgaatattgtaatcaaaattattgtgtttggtttggtatgagaat

SEQ ID NO: 312770 - DNA, 2244 bp, Cannabis indica
gaagtttgtgcaatataattattcttaagggagtacttaataagttatttgtttgataaaaagttctccatcacataacaaattaacaaatacatggacctcgtccacgtcacacaagaaattgaaggacaagggagagccatatagaaaagaatattatagtttgaggctgccatttccggtttagtttctcacagtggtcacatgcttaagaagcatttcgacaacatcctgagatattcttgaagcctcacttttcaggtgattgatcttagtctcggtttcttgttcaagtcgcttcacgttagcacctgaatctccactgctctgctcattaacaataatgaaaaggtttaaattttagaacaaaaagagaagtgatattctctttaagtaaaaccttaaaagaatttcacgactataaatgcatattactgagggaggaatatccctgctgattagtgaattaaagttcaaaatccaaacatacacaaggcatatagtcatattgttatcagttttagagactcaaaagatataaacttactgctgcaactttcttctggaaatcaagctccacttgggcacgatattcagcaatttccctctcagcctcttctttggcttgtttcagcctagccagttttgctacaaggtaaaataaattaataaggaaggagaagtggggaaaaactacattaacaagaaacagaacactgctataataaactataaaagtcatgtcactattccactttcttttccccaacacagagtaaacaaaaactacagttcgggatggagcagccatagaaaaatccacacatataagatttacacacgtctgtaaacaattcaagataccaatagcatcatcaacaagcacgcaagctatttagctaagaaaaaggaattaccacttcgggcagcattcacaatatgttgcgcttcttgctctgcagcaagcaattgttgaattccaccttgactcctgttggaagccattattcctggaaataaatcccacagcttcttattagaacaagatagataggattggtattaaaaaagaacaaaacccattgcataaccactctccaaatccttttacacggtaaagattaaatcttaaatcatgaaattatatgttctaatagcaactaactgtagaggccacgctatcaaaagatgactcgtctcagatattataacccatataaggtacttctcttttatgggatagcacaacctaaactaattccgataaaaaaaattcagtaaataaaatccataaaacaacatacaagaaaaaactaaactaatacattgtagtggcttctctctaatcttttcaagggcaaaatttgtttaacccattatcggaattgaataagagcaaactaaaaccacaaaacattaaagataacaaatttactagatcaattatccattccagtttcagattttagggatacaatcaattctaaatctagtgcagtaaattgaccgatctacaaagaagagtacagatcagaatacaacatttacaggaaccacaaaatcagaacttcgctccacttcacacacaaatcaccgatcacaattcaactaaattagttgatttttatacaaataataaaataaatcgggttcatagagcaaactaaattaagatcgaacagcagttattgaagtagaagatctgaattaacaataagcggaataacagtaaataaagaagcagaagaaaactccatagttatggaagtacttaccttgagtagtagacagagaggaaggagtgtttggacgaaagaagaagaggagagagatcgggagagaccttccttaggcttggtatttttttgatatttaactgcaaaataatttgccagcgaaggacgaataaagagtaaggatcttcagcctaagtatgggcttataggattcgggttttgggtctgcaccggttattgggctctttatatatgcacaaaaattgatgtgtctttctgaattatagtataactaggattttataaaacggattatgacatatatttttttagaaaaaaaaggatatattttataatttgcttaagatttttttataattttaaggtggaaaaattttatattttagttgttgcttaacttcttttttttttttttttttttgttatacgtaagatgtaatcgcacaaaacggactccgtagatcaatgaaaaataaagatcaacaga

SEQ ID NO: 312771 - DNA, 1398 bp, Cannabis indica
caggagcatcagttgttggaggagtttgaacgccaagagtccctttgattagggcggtcatcatatcttccattctagtcatctttgtgagcagtatctcgttaaattaatcttgacgagtcaatctgttttctgctaattgaagttgtttagccataatgatcacagggtttgattcttctctctaacatcgtcaccaacaattttgttttaaggattgtcttcaggtgtatctttgagtgtatcctgagaattatcttcagtgtcgtcataactactctctcaagatttcgcatcttcagttaagggatcatctcgattccgatcttcatcatggtgatctttatagcgactggtcacctcatgtggatcaccaaggtttcttgctttggtgctaggactagtaatgtaaagaccaaattttgttcgggtgagtatcatgattacttgaacgtaatcactagacggtatcactgcttctttcagttctcaatgaaagtaccaaaatatttaccgaaatttttagaaaactaattataaataatcagaactgaagaaataaataattaaaagagaaagagtaagaaagatacaaaaaagtttttatgtggttggggcgttaactagccttaatccacgagtcaatattatcatgtaagtttgagctagaaaagcttttggaaatacaatgaccataagttctcaactttttctgagctagtgttgaaagagaattcaacccttgatccgtaggatttatcgggtatttacagtatttagagaattacatttagtttctattttccctctattggtgagtttacactgaattacttaatttgggttgtctcgtgaaatccagcccacgagaggatgatttgctgactaggcaaaagagatacaactgaattagtcaaaactgtgtcctataattgtggacaattaatcgcgaattaattgcttgatctctattttaggaaatttttccttttagcttgatacgatcttctttcgagatttgagaagcagttattttcttatctgtgtgcaggaataaaaagaaaaactggactggtcttctaggaacacgctgcttgactcttccggcatcacggtactgggtcttcctctagaaacgagctgtcactggcagaaggtcttctggttatgaagctgaggtatgttcttggataaattgggcttgacccactttatcttctttggagacccactagtgggcctttgatgctaacctggattccacgtgtcctttattggaaatgcggataacatttagtgtctagtgaaacgtataagtttaaataattagagagtagccacaacatccttaattatataaaattatatataaagtgaatcaggatcacataatgaaca

SEQ ID NO: 312772 - DNA, 870 bp, Cannabis indica
caaaaacttgggggtaaatgttatccatatttatgagcatgtgacacgtgacatttagatgaaggaattagtctcataatttccctaataaaaatacccctatgatcctatcacagagaagcctcatagaactaggaacaagtcaagactaaagaatatacgaaagttcccttggccttgccttagcttcccggacgcagaaggcgtgttgcctctccaggatctagaggggtccaaacatggaagcctacccagttgatatccagaggggtactcgaggggcctaatgcgaatgtcgactgccttggagtgtcgcagacgtctacctttgatacaagccaggtcaccaagtgacagttatgccttttctgacacaggatctgatcttgtcccttacatcccagcataatagtgcgcacacctccactacttttttaacatacggatattacaaacctcttcttttaaaggtaaaagctttgggtgacatgtggtctctacttgtgaaggttaaatctttggatgacatgtgtccgccttgtacaaatggtccctaattgtccagctgcaacatgcacggggacaataatttctaagggacccattagtcaactcttaatttgcatgtaatttaccccaatagtgggcttttagcaaaaatcctaagcaggtcataggcatatccatactcgtcacttagcctataaatatcctttaattttcatacaaaggagagatcacgaccaacatagcgaaaactctgccaagttcactcttcgtcttcttcacgagaaacttaaagtacaaaattaggatttcctataaaaatattgtaaacacatcaaaaatgccctaagaggctaatagact

SEQ ID NO: 312773 - DNA, 1012 bp, Cannabis indica
acttgcatatctttctttggagaacagctaagttattgtttgttgttggagatcggacccttaaggaatattttttgacttacaattttattttcctatcttgtcgatttaaagctgacacttgatgatgcaagtaagaaaattgagtggtgtttaatgtttatccccttaatattagaagtatccccttattaatcttaaagtataaaaatagttaaaacattaattttattttcaaaattgagatggtgtttaatgtttatcttaaaatataaaaaaataattaaatattttattttcaaaactttcgatagtgtttctatttatttattaataaattttccaaatttctattatattttctattttttaaaaaatttaggcattaatatttttataaaattttcttttcatactttatattaattattttctaagtgatattttatttaataaaattatataaaaattaagtatataattaagtatacgtatggccatacgtgcaatcgcacgtaacttcggctagtatatatataaattgaaaacattttatataactcataaaaccattaattattagatattagataatatttattagtatttatcccaaaaattatatttattaattatttaagagagaaaagttagaggattgtaacttaatagagaagcaaaaggattgtaactgatatgttgttgtcattatttttcatgtttttttattttcacattttattttttatttatattttatttactctatccaaactaaacataaactctaattgtttcataaaattgtcactactacaaaacaaggctttagcttcccttttttgaacccattttataaaaagggaagctaaagggtctgaaaatacccgcctattgaaaatttacctttagaggcggtttttttataaaaaccgtaggtataaaattggggtatcacatttagaggcggtttggaaataaacgacatagggtttgattaaataaccctatg

SEQ ID NO: 312774 - DNA, 1075 bp, Cannabis indica
ccaactaatgtgtgagacttggacactctcccaagggcctaaactcaatttctgagaacataacttaccaattctccaagaaataactctattgtatatagtctaacccctcacagaccccacagctcagacagctcgcacgaaaggaaaacaccactaacacctaagctcacttcttgatttcattacatgttccttaattttgcttatctttttggatgaacgaattttactacttgcaccttacgtgtaggttttgttactaagtttaagcatgtaggaattccatatctgtaattatgacaaaatatttgactttagaaattaccttctaaaacttattcgactttagaaataactcatgaatttcatcctgatttgcttgatcttttgattttaaatttgacaaccaggtatggcgagttcctgttcttggtgatcaatgcggagaggcaaattcagttgatgttggcagtcaaccgaaagatttaagccttgctcttctttctcccgagcttgctttggttgcaactgattccggagttgtcatgcttcggggaacaaccattgtatcaactattaaccttggatttgctgtgacagcttctgcaatttcacctgatggaagtgaagccatcattggtggtcaggatggtaaacttcgtatatacgcaattgctggtgacacacttacagaagaggcgacccttgagaaacaccgtggcgctattactgttattcgttactctcctgatgtctcaatgtttgcatcagcagatgtgaaccgggaagctgttgtttgggatcgttcctctcgtgaggtaattaaattgtctctgttttctctagatggaaaacgtgttgccttatcttttctatctcttgccatgtactttcacttctacatgatgcatatttgcggtgttgatacttaatttataaaagctaattagaattttcacaattttgatatttatcaaatcatgttctttgaattttttaggccgttgaaaattcgtctcgaactattgaaattgttggattttaaaacttttatctaatttcatgcaatttt

SEQ ID NO: 312775 - DNA, 1455 bp, Cannabis indica
tgatggctcagtcaaatcacatctttgataaccttttatagtcagaaaattctctcttcagaaaactgagccttcccttttctctctatagccgaaatcattctctctcttttcctcttcataaatttcgaaccttagtgatagtgtaagttcccacacactacaagtggtaactcaatcatagattggaagactgtgaaggatcacacacacaaagagaaggacattcgggctgagatcttgataatactctgcgacagaaaggatacaagggttagagatctgagtggaaggagacattaattatgctgccatcaatgtaaggttttcttaactttatatgtgtttatttatcgttttagaaagttcatatttagggtgttaaacaacatacttgtgagtagatctaagatccttgtaaaatcaattcccacagtggtcgtggtcctggtcttggtccctgttcgggtcccaagtcctgggttcatgtctgtggtcttggtccgcgtttgggttcgtatccaagttccatttcatatttgggtcttagttttggttcaggtccaggtcctaggtcccagtctaggtcttggctttggtctgagtttgtgttcgaatttgggtttggttttgatcctatgtccaagtccttatttcgatcccagttagggtataggtttgggtctgggtcttggtctgtgttttgatctggggccgagtctgggtttggttcatgtttggggtctaggtctgagttcgagttttgtttagggtttagggtttaaggttaaagtttaggggtttaggatttagggtttaggaactagtgttttttggagtttaatgtttagggttttgagtttagtgtctagggtttgggttatagggtctggaaccgggtcgagtcttgggtttgggcttgggtctaggtccgagtctagatcccagtctgggtctgggactgggtctgagcctgagttttgttctcggtttgggtctgggttgggtgcggctccaggtccaagtcttggtcacggtcccggtcctgttccagtgtcctggtacggttctagttcaagttcttgctttgggtcccaagttcgggtcagggtcctggtcctggtccaagtttgggtcctattctgagtcccaaatcaagacaccgactatgagtcttgtccaagccttggttcctggatcccggttcaagatctggatcccaatcccgggtcttggtctattttcagtttaggttccaggtcccagtctgggtctaggtcagggaccgagactgcagtccagttctgggtctcggtcccagttaaggttcccgggtcatgttccatgttcgagtctgagtttgggtccaggtagggtgtaatgaccgttatacttagacatgggattagtgggacactacttagcactaattaatatgactatgtgattatttat

SEQ ID NO: 312776 - DNA, 1938 bp, Cannabis indica
ctcaatccatttgatgatggacgctagatttgcatcttctaaatattttgatgtcttaagtattgttcttatgaactactttttgttttgttagaattgttgagtggtactatacaaggttaaggttagtataaatagaaaagtcttgggaaaattgtagtaaactaagatttaaataattaaacaattagtaatgacaagcacaaatcacgaacaataatcgaaaaaaaacggggatgaacagagtatggaaaaaccagaaacaattaaagttgttaaacaataaaatcaacgccaagatatatactattttaagtccgatagatcgatgtgatctatggctctactccagttctggaacaccaccaaattctctttatttatttatttttaaaactcaaatcctctatattgattgagcaagaataggtacaatatagtcgatatcgattctctgattagttctcttaaagtgtgtcaaccctcacactctgacacaacaatcttcttcatcaataaaatattcttcttacaaaacctaaacccaatctctctcttttctctgtacctctcaatcttttctctctctaattctcaactcaatctgatcgtcattttttgaaatattaaaatgtttgtggtatttataggcttaagatcaagatcctaaaatcagtggttgcaagaagttaggttgttaagttagttaggcaatagctaacttaaccaactctcatctgagcaaggtctccacgtcagcctaaggaagagtgcatctgggagcgagtatgaggccttctggagtcacggtccaaggcacttgctaaggacctttccggataggaaagagccatgtggaatcgactatcgaggactaccttctaggatgaacagctagccatctggaactcctttttggaggaggactagcttttctgaagacctttcccgaaaagacaaaaaagccttccaagacctgcatctacaagtcaacaactttcttggaatgataatagcttcttagagaccttttcaatttggaggaactattccacaaattccacctagttacttcaaattaaatgtatgacgatgaagaaagaatgcaaccatcatgtttggtgttctaggaatctcagtatactaacttctaagattgatcaagttcaatttattaagaccttagtcccaacatcagcaagattatcttctattatgacctctaaatcaactagactttcttctatcttctctctaatccagtatagtcttatatctatatgtttgctctttttatgataaactgggttcttacagagatggatggatgacggactatccgaatacacagtcactatccctttgatttattttaattcataaagaatttgtcgaagccataatgcttccgtgaatgcttcctagttgccatgaattatgcttctatggtagaaagagtaaccatagactataattgggccttccagcttatacagttctgatttgtcaagaaaatataagaagtggttgattttgttggtatctctgtttgaggcataatcagcgtccacgaacccttttagatttaattctctaattttactttctcataagttagactataatcccaagttccccttaagtaccttaataacaatttgtgggccttctaatgttcaatacctggatcgtacatgaactggcttaggatgcttagagcatgagctatatccggtcttgtactcaccatcacatacattaaacatcccaagaccatagcatatggtacatcattcatttcatctttctccttcaaacatttagggcattaatcctttgaaaaaacaaactatatcctccaaatagaacatatgtaccatatgcatagtcatttttttatgatttcaaaataaaatcaagcaacaactatgttaattg

SEQ ID NO: 312777 - DNA, 1010 bp, Cannabis indica
aaactgttcatacaaatccaaactaacttaagaactttctaacataatcttaactaacttgatatattcttatatcaaatatagaaaatattagatttataatctctatattaatatcgaaactttcacttttattactattgtattggccattttaaatgatttttctttatttttggccactcgattcttagtcacaggctccattcctacttgtacctgtgaagttacacaatgttttcatatttattagttaaattaattaaattagatttgaatgtgaatttgtaattatgaagttaatatattgaaagggcaatttgagtgtggaatgaaagtacctagtttttttgttggttatattaatatgatgagtgatgagcataagaaataaagcccgtttgtataagtattactattaatagagtataagatggggacaaaactataacggatgccgttattgggttattatgagtgtactctttttccttttttgctattattattattactttatttttgtaatatggagattaggatgaagagaaagaaggagctatggtgggtatgtaataattacattagcacgtgcattgtgagtttgtgagcttttttatttttatttatatttattattattattattatgggatatggatttttataggttttcttttatggtggacctgagattgttgtttataggggcagcccacgctctggtcaggttggcacgtgggatggccactcactatgattgtggactactgcctctgccctttcgcctcttcatgggtacgtgggtcccttttctctttcttattcaaattttatcaaaatttatattgtaaactgccaaaaccctgttctggtattaaaataaaacaaccaagtttaatttttatttaccaaataatatttttaattatgtattttgtaaaaattagtaatttgatttttttgcttgttttttcaatttttttttataaaaaaaaagttgaaaggtg

SEQ ID NO: 312778 - DNA, 778 bp, Cannabis indica
atagaaaatcaaatttcccataccaaatcactatctattttgcaaagattattgattagattttttgttttattaattgacaaaataaactttgtatttcttaaattaaaaaatagacattgtattttctaaaatagtacaaataggattttgagctcaatactcgataattttttttaatataataacttaaagacaatttagcacgaacagaagtgaaaaacgtaacaattgttatcataacacatctatattaggttattattaagttttattttacaaaaaaatcaattcatgatactatttaatactatcttagaaaatataaggtctaatttgtcatttaataaaacagaaggtctaattattaatttttacaaagtataatgtgtgaatatttatcttttttttttaattattttgaacaattaagggcaccaatccacaaagggagagggatctattccatacaataaaacttattgttaagttataaaagagatgagggtttgccttcctcttctagtgaggtgttctcgatatggtggaggaaattctggggtttaaaaattccgcgaaaaattcttcaatttgcatggcgaggtttccataagattctaccatcgaatggtggcctatttcagcgtaaggttattcctcataacaactgtcatatttgtggttatgggggtggttcaaattcacgtgtaatttttggaaaatttacatggtatactaacttttgtcatttttttacaaaaatattgtcaggcggtat

SEQ ID NO: 312779 - DNA, 1535 bp, Cannabis indica
aagccattcaaaatcaccattattaacaagcttgaaacttcaaagcattcaaaccttcaagagatacccaaaaaattcagagcacaaacccagaatttaaaccacatttctcaaccctaaaatcatcgaaaacaacctatatgcaaaatcataatcccaaaaagcttaaacacacaataattactaatatttcccctcaactcaacaacatgcatccacaatctcaataacaccaaaaacatcaatgttaaaacttgaaaatcagaattcatagtaaaagaaaaagatcaaaagttattatctttaagtttcaaacacaagaatttacaccaaactacaccaaaattcaagcctttacacaacaatcaaatgaaattatcaaaagggagagggtgagagagggaggtcagctaagggataacaaaacccaaaaaatagtattagttttccaagaattgattgttgaataataaacttaattgactaaatgaccataatgcccccaaggcatatatatccatacgcaattaaaaagggttcactcacacttttatatcacaataattcaaatttttcatttatcatataaatttcataaataaatcccaaaaatatattgtgtgctctgaacccaaatcggcccaaaatacccagttatgactatactgcattgacttgtcaaacaatactttcaaatagacagaataaccatactatataataatatagtccataatcacattatatcataaaattacgattttacccttctcgagtcaaaattacaaaaatgcccctgacacaccaacgaggtcttaaaatgcaatacgccataatagttttacatattaatttatataatgatataattcctcattaatacataattaatctagttagaattgctaatctggttatttaaccttagaatattataattatcccgtccttgtagaaatttcgtcctaaaatttacttgaactccggatattttggatgcatatccttctcgagttctcaggtttcctcttcaactaaactattcctccataatactttgatcagtgcaattgtcttgtttctcaagactttctctcttctatctagtatctgcactggctgttcctcgtatgaaagatctagttgtagttccaatgcttcataactaagaacatggtactgatctgacatgtatttctgaagcattgaaacataaaacgcatcacgtaaagctgccagcgctgggggcatagccaatctatacgctacttgccctatcctcacaatgatttcaaagggtccaatgaacctcgggctaagctttcctctcttaccaaagcatttaatacatttcataggagatattagaagaaatgccatatctccaacctagaaatcaatatcccattgctttggatatgcatcacttttctgtctactctgagcagcgagcattcgcgctctgatttatcaactgcctcacttgtcctctaaacagcttcgaacccaagaactttctctcacctaattcatcc

SEQ ID NO: 312780 - DNA, 685 bp, Cannabis indica
atttttgtgaagatacttctctatatcagtgagtgggctgaaccgtagatgagaaatatgtttggcccaataactaaaaacgtaaatcttaaactcaaactggactaaatatttggggaaagatcatgataattcttcttgggaaaatttcatttttaccttttttttaaaggtaaaaaataaattacaaaaatgcgcatcagtttgtaacaatcctgtaacatcttgtaaatttgtaaatttcagtaaaaaaaaaactgtacttttacaaatttataaattttgtttataagaaaaagaatcatatttttgcaacttttcgattatagtaattttgtttttctaaatcttaatcattttcaaaataaaaaattccccaatcagtgcagatggacaatactattatcaagtctctttcatcgttttaaatttttaattttccttttgtcattttctcttttggcatgggattcaatatcatatatccatacgaatgtgaccacgaaacctaatccaaatatgttagggaaatttactaatctatacttaaattggatttagccatttaaactatgctaccttattttacatcatgcacaatatgctacaataaaatttttcatccaattttaccctaaaaaaaaaaaaaactaacactcaccaaacttcccatctctctctctct

SEQ ID NO: 312781 - DNA, 656 bp, Cannabis indica
cgtaaaaataagtaaaaaaaaaaaaaaaacaaattttgaagtgtaaaaataaaaaaatccttaaaaaataactaatttaatcataacaccttcatgtgagatggttactcccttaataattactaaatagttacgtgggaaatatttaatgggggatattgtttaatagttaatactaacataataataactaccgtttcactgagtcaaaggagatgagcacaagaataacaaagaattggtcagccgattaactctgatgtatccttgtcattgcaaatactatatttagcttaataatttgattattgaactaaagtctcatttttacaacgccaataaactatatcatgtaattgtaataataatatatgcattcaataactttcatagtttgagtcagctatagtagtttgaaaagtcatgacatggcgacctacagagtaattgaattaagtagaaaatattattttgagttatgtattttgtaaaagttatcaattagattttctgtttcgttaaatgataaaatggatcatgtatttttcaaaatggtacaaataggaccttgaactgatttttaatcaaaataaaatttaataaaaatccgatctaaatgtattatgacaaaactgtttatattttctatatttgtt

SEQ ID NO: 312782 - DNA, 1208 bp, Cannabis indica
ataattccaagacaattaggattctatgcaaaagttacaaggacgaaaagattaaataaggttacaatcacaatgcacaaaattacaagtaaataaaaaagagaaagggactagagtttcaattcaaaatacatgtaaatagaaaacaatacaaaagtatatatataagagagtatatatatatatatgagatatataataaaaaaatagaatatatatataaaagtgtatataatatttatatatatatataaattataagagagatataatatatatgtaaagaagtgtgtagaagagatgaagaaaataatatagtgaaaataatgaagagtagagatgaaaagaagaaccaaattgagtgatgaggaaggatcaccaaaagctttggacaagggttcaacatcttgtccaaaaaacttagggatttaatggaaatgcttctgggaattatcaagcttcaagaactctctagctttagtgttggaaaaaaagaagtgtttcaatggataaactataggaccttatatatagtggttaggaagaacctaatttgaaattcaaatctcactcaccaatggcatttactagtcgtgagagagctttagggatcagaaaaatattggttataaagtagaaaacattcttcattgattgcataacgttttacaatgtttctctcaaaaaagactcctggcaatatcacttggcaccaggcgacatgtagcctagagacatttatttagaaccttcaaaatacatcattgcactacttacgtagcccatagacactataggtgacatgtcgcccaaaacctttctttaattccattttggagtttcgaatctcctctctaagataaccctaaaaccaaaatttacatgtgaaattaatgttgattatatccatttctaacagctacaaactcatttcaattatcttcataatgtaattatgttctaaattacattttccaaaatttgattcatatgctacaaattctatttcagattgtgtatctcctccattttacaacttatgtgatgtgttacactaagtatgatgtaatttttgggacttatgccctgaaaagtctataaagacatttctgatcatcaataaagagctgaacatttcgacatatgcatgactattaaattattaatatttattattaaaataattaatatataaataatcagaaaat

SEQ ID NO: 312783 - DNA, 1865 bp, Cannabis indica
gtattctctacatatatatatagatatatttactaatatcgaggccgattctgagattgggtagggccttaaaaaaaaaatattaacctcctttatttaaaaattatctaatattttcacaaattactaaaaaaatatttgttttgggctccttgactagtatatatattcatatattatatatataatagttagtttatactgttttgattctaaatattaaagagttttatatgcatgcaatgcagggctattcaaaatacagtaacagggttcccaaggccactattgaatttgagttcatcagtatttgcaggagtaataaaggatgcatttgggagagagataacacctcccttcgatccttacagaaacagccttaactttcttatagcatcatatttagttccctatgttggactaactggctacgttggagcaaaccctaacctaatcaaacctacttccaagagtgtaagcttcaaaaatttcatttcattcatgtttatttactacttactaccacaaaaaagaaaatgagttaaatttggaacactcacgagagcactacgaacaatatcttttctctatcctttgaaatatatctcaaaaattttacttaattattttatatcaattttttaggttacaccatacatcaacttaattctctatctttcttctctacatcaacttctctatctttctatctattttaaaaaatgtgtttaaaggaactgatggagcttatttttatgtcattctctttaaatttttaaagaagataagagtttaaaggaattgttgtgagtgctctaatgataagttaaaatagctaaaaggtataaattagccgaaaatgtttaaaatatcactatatcaagtgaggtactatacccttgaacttttacctcgccattagcttaatgaatagttatgagtcaaaacgtattttttatttttctctctctctctctctcattatttaattaattttctttattttctttgtccctatttttgttttacataataaaagatatgcaaatatatgatatttatattatataaagaaagaagttgatgtattgtgtaaattaaaatataccagataaaacagaaaattaaaagttttgatgatgttgtaaagaatagagaagataaggtgatgaaagtactctaaaatcttacctgatgttttttgtatggtgttcattcagcttgtggctggtcttttgggtgtggaatcagggcaagacgctgtaattagagcattgttgtatgagcgtagggagatgagagtggagccttataatataactgtggcagagttcacaaatcgaatttctgagctaaggaacaggctgggacgaagtggtgtgaaagatgaagggcttgtagtaccaatatctctaggcgctgaaggaagagtttctggaaatgtactctctgcaaatcaagactcactttcgtatggaaggacaccggcggagatacttagaattgtgtatggaaatggtaatgaacgtgtgcctgggggtttctttcccagaggagcaaatggtcgtattgctaggtcttatatctagtttctaggtaaaatagtttctcatgagaaagtaattataattaaaacttggtacttttataaaaataaataaataaattaattaaataaacactctactttatagattgatgatacataaatcaactacaatgttttgattgtatatgtatcttccaaactgttagtgtgagttgaattataaagcaatatatagtgcaacattgtaaataaagccagagaacgtctgagtcacaataatatttatatattatgaaatattagtattatgtaatat

SEQ ID NO: 312784 - DNA, 1132 bp, Cannabis indica
tggtaaaattaattccaacagggctttacctttaatttgtaccaccacctttccttgatttcatgttaagaatcatagaaaatcaatgacaaaaacctgatctcctttggttttcttagggttgaactcaaggtgagagagaaaggatacacttagctttatctctaatttccccccttaatgaataattaagaattattttttattcctatttcttaaaatcagcttgattattctactaaaaccactaaagacaaaattcacttcttaagaaaaatggccaattttccccttgtttcccacttaagtaatcttaaagcctaagagtaaaataagtctattaccataatctcgcctaatctcgatatttccaatattcaatatacttagcccggccactagatgaaatgttctaaaccttactcatatgacacaattggctaaactgttgcatttctattgttactaaaaaaaattataaacatattaaattgcacatatattatgtataatacacttagaattcaataaatgtaaccctaacacctattttttgaaaatagggcctatttaataaataatcacatctatatataaatataaaggaatgcacaagacaatgtgaggtggcattctaagaattcatttctctatgttttcttttttgttatttttttgtatttcttaagaaactttgttaattttaactcaatacagtagaacctctatccaagaatacacttgggaccaaataaattatattctaattaagaggttataactcaatagagttacactagaaaaataaaattaaaaaactaaaaaatatcaatgtaataataataacaataaataatcattaatactatattatattaaaattattttagagtaaatataatgttcatacatgtattataatttgaaataaaattattaattttacataaataaatttacaaaatatatgtatatattttattaagatgtaattattcttatatagaggtatactttgttaatacgggacttaaaaaatgtataactaattacaatttagaggttattcttatttataactgacccgaattgggacttgattttcttataacaaattagaggttattcttga

SEQ ID NO: 312785 - DNA, 1124 bp, Cannabis indica
tagtaatattcacaatcagggccggccatgagctaagacgaaggaggcggccgccttaggcccccaccgctcagggcacatttcgaaaaaaaaattaaaatatagttcgtaataaaataaataataatacttttaatattaaatatgttttgtagcctagtggtaatttgattagtttaataactaaaatgttgagagttcaaatcccaataatatagggtcggccctgtccacaattaaaaaaaaaaagaaatcgtaaattaaaatttataatatgtaatgtacaatttatacagtacgtaaataagtgaacgagagggatcttttgctcccaacattaaaattaaaaattaaaaattatatataaaataatatttatttccttttcagatatatgcatttcacctgccctaaaaattatttttggccccctaaaattactctcttctttataatagaacagattatgagtttgcatataaataagaaataatgattatattaagcatcagattcacatatgtacatatatatatacatatatatatatatatatattaatttagccaatgaaaaaaaggaggtataggctaggtagttaagcatcacatgtgatttctttttgctttcttataattcatgtaacaactaattattattcttagctagctagctgctgctccatcaacttcattatccttattaataagttctaataatactcaaataatcaaatcaaaaagtggttcaaaaggaatttatttttggaactttcaatcaatcatcacccactaaacaaaaaagttttaaccctataacacatgatattagttatgccattgctatatgagtatttgtgtcgaaacatatcctcctctagtggggtcaagagcaaaattttaaaaataaatcttttatttaataagaaataaaataaaatttaaatcatttttgtagcaaaaatcttttaaggagccttataagctaatgttaaaaaaaattgttaaaaagtgttagtgcttctcttaaagcatcttcaagagtaggattgtaaaaagagagtatttcacaattacaccaaaacaataaaaaaattacaaaatccagtttcacggaattttaag

SEQ ID NO: 312786 - DNA, 840 bp, Cannabis indica
caatcttaccataaatagaaaaattattttgtcaactaacttgccaaaaaaggactttacagaatcgaacattctactcctatttttcattcataattttatcttttgactttagtaccctactctggaatggatatgtttggtgtgctaagttgcagataccaaatcttgcttatttctctgtggaattgtttgggtggctacttctcatgaaatattttctatacaaatctcttatctggagtgtcacgtgcaatcatactatctttatgcattgttcatgtgttgtggtactattgtcaagaatgttacagtaattcatagtatcttgggtttggcttgctagttgccttgccataatgttttgcagcaaatggatataatgatttaggaagacattatggatgtctctgttctggccaactttttggccttatgtgttatgttgaaaaataaacaacaaaaccttttaagatgtggaagatggccttctttcatttgggttagaaacaaatttttgtggccttacttatcggtcatcttcacaattttttattaattccttttgttctgtttctatcttcatttttatttttttctttgaaaatgcatgctaactattcgtagtttattttcctgcatgatgattctattgctgatgtgtttgtgtaagcatattggctgtggtgagtgaagcctagtttcatattagtatgtttcatctctaattagctgtggtacattttgatttttcactgtttagagcttctatgaattgataaataattttaatctatcataggaaatttcaattgcagccaatgtaccccagacaatacc

SEQ ID NO: 312787 - DNA, 1698 bp, Cannabis indica
gtattataaataattttaatggtaaagactggcacttttctggttattatggttctccttatgttgatcaaaaatctgttacatggatttacttaatcgattatttgatactgctcctcttttgccttggttagttatgggtgatttcaatgattatctgtctgttagtgataggaactcgcatctctccccccctctcatgctatgcattcttttcactcttttctgcatagattcaatcatactcctcttcatcatgttgggcctaaattcacttggcggcacggtttgatccttgaacgtctcgattggtgtacctcaaatcagctttgggctaatctgtatccgcaggctactctttttcatttaggtttctatggctctgatcaccgtgcccttaagatcttgcttcaggacccaaatttccacaatcttaactccactcggttccacttcaaaaatcattggcttaaggacccttcttttgtctccattgttaattcttcttgggccaaacctcggtccttctctttatcacccatgtaatcttttctggacagacaatctaattgcatctcggatattaggacttggagtaagtctcaacaccctcttcagattcaaatatctcgtattcaagcgaatcttcacagtctgttaaatgatactcagccgaccccccaatcttcctctcaagctgcttctctgcaatcgcaattggatggccttctcctcaaggaggaagtttattggaaacagcattctagagtggattggctgcgtgctggtgacaaaaatacaaatttttttcatcgctgtgcttctactcgcaaaaagaacaatctcattcggcaaattactcttcctgatggatccatctcccatgattctcctatcataatctccaaatttcttgaattttataattctctttttacttctcaaggtgtgtttgatatggcggttaactctctccttcaagggatctctaacaggctttcccctcagcaggttgcttaccttgaagaacctttcactgagaatgaggttaagcaagctttattttgcctttcgggcgataaggctcctggccctgatggtctcaattcttttttctacaaaagtaattggtccacccttggaaaagatttcaccagagctatgctccaaattctcaaccatcagggagatatttccctaatcaatgaaactatcattgttctcatccccaaaaagaaaaaccccaaacttgtccgtgattttagaccgattagtctttgtaatactctatacaaatgcctatccaaggttattgctaatcggttaaagcttgtccttcactccattatcagtatcaatcaaagtgctttccttaaggggcgccaaattactgataacattcttattgcaaatgaccttattcatgccattcattctagacgttcggggaagaaaggttgggcagctattaagcttgacatggaaaagacttttgatagggttgaatggcccttcctaaatcaattgctcactcatgtaggttttcctgcatcttttatctctcttataatgaatgcctgtctactgtcacttttcggctatccataaatggcacccttactaatccctttcattctacccgtggtattcgccaaggggatcctctatctccctatctctttctcttaattgctgagg

SEQ ID NO: 312788 - DNA, 1816 bp, Cannabis indica
atgccttcgatgatgtttttaaggatgtaacaattcggtagtggatggctcacaatttggtgataccggcaataatttaggtcatttgtcataccaaccttgttgggtcgtttaggctcggaaagtcgtattgctttagcctttaacaactcataaaaaatttggtcgacattatcatcgtcgaataaatactaaacttctttcctttcctcaagagttgatttattttgtggctcccgtgcctttcctttatctttattgttgccggtattgataaaagtggccatgaattctcccttctttaatggctttttgttttcgaatctcagtgagggttttccacccttttatcgagaaatttgtatttcaacattacaagccttcgagacaagctcattgaaagttttgggtttcgctatggacacaaaggttgccaccttagggttgggattttttgcacatattgaaactgttgcttgtcctgagaacctctccaaacattggaggttaagatttctccatcttgttatgaattcatttgcattttcactggcttgttgcttcgtttgcaccaggtcatatttacttatggtcttctttgaactcataaactgtgctagaaaggatttttgcatgtcatcccaggtatttatggatcctaggggtagctgagtgtaccaagtgtacgctgcttcttttagcgattgcacgaatcgtctaatcaatagtgcatctaattggtcagattcaccacatgcaaaagtaaaataagccaaatgcttatggagagaaccgttgattccatcgaacttttcaaacttttgtctaacatagtttggtagaaatgggatttggtcatagtaagtcttgtatggcttatgatatcccagaataggcatgcttgttgcagcctgatattcctgaacactctccatgataagagcctttaggtcctgctgaggttggactccagctagtggttgttgcacaccaagcgatgatggttgtgtattgcctacaggtcgtgctgaggatgaggaatgcttcccaatctcactctccttttgtctcatgttagcttcatgagataattatgttgagagtcgggctacttcttcatccctctcgcccaatagtctttgaagttcttggatcttttcactattattgattacctcagttactaacactggcataattttatcattgccaatggttagtgcttcaaattgagtaatgagatcagtagacatccccttactctattcgacaaagggagtgtcttctagagagtgttcagatgtacaagatccctcttcctgacctctttcaccaaaggggttcactgattcctaaataggaattgtatacatggtacgagctctcgatcgagttacaagtcctgtataggatgtaggcttaacatttgaagtgacccttgttggttggtatccctggaggaacatctagtcaccatgttctttcaggaacgggttagggtttgctttgggaacccttacattgtcacttctagccttctttgagaaggcaaaaggcttcctacacccctcatctaatcttagacgtaataaaaggtgttctttgttcttaacaaatgcaacctgttggccttaggggttgatagggattacgatcgtaggccagattggcacatcagttaccaattccctcatttcaagaggatttggtgagagtgacattttgttgggttttatgccctaaataaaattcatttcaatataatcagatttacttattaatataggtcagaaataacatttaatgttgcatggtt

SEQ ID NO: 312789 - DNA, 1180 bp, Cannabis indica
tttcttaagatgatcatcttttgcctaccaactaaaccagcaaatcataactgtaagctttaacttttccttattccacctgctagtagcctcttggaaccagttgccaaaagaccgttccacctcagaactaacaaaaaaaccagctatttccagcagcccaatgcaaaaggacaagaaataaggcagtgaaaaatagattcagttgaaagggaacataatggacataccaaagtgacatataacatgcttcgaatttagttggaaaaatattggtaaacaactagacaaggctctccatgccacatttaaaaccttcgatggtactctaatacaccgcaatctcttccaaaaaatgattattgacatccaatatcaactcttctttcaactcttgcagtaaactatatgcacttctaagaagtagttacttggagactcttgagaccaatgccatttatcacaagcatcagtagagaataagaaattatttaaaatcaaaccagcatctctattattaaaaacatcaacaatcacttcctcttcccattttctctcacccaccatcattaacaaatttattgtttaatccacaagaacttggttgaatgaagtaacatatgaattagataaattaggtaaccaatggtcttttagaacactaattctcaccaaatcttgagcttccaataagcttcgccaaatgaaacttgggtaagaacctatcgttcaactttaagaaaagatcccataggatagtaacaagacataaaaatttggccaaccaatgattgtggattgttttgaagcctccacccttgtttccccaaaagagaaatattgaaatctctaagatgacaaaaatttagatcccctgctccttagggacacacatatgatcccaactcatccaatgaatacccttggtatgattgttcgaggatcaccgccaaaatctacacatcatacttttccactcctcacacattcctttagtcagtaaaaagatgctcattgcatagttaggaagagattgtaataccaacaactccataattcaaaaaataaaaaataccaataaataataaacaataattaaatctagcaaaaagtacaaataattgtaataaatactttactttctaattacatcaaagtaaataaacaataattttatttt

SEQ ID NO: 312790 - DNA, 1265 bp, Cannabis indica
tctaaaggtaaattttcaataggggtattttcagctagcttctccttttataaaatgggttgaaaaaagggaagctaaagacccattttgtagtagtgacggtggagcagctgtcttcagaatgtccattagttttctttctgtcctggttgatagtatcactagggtggtttttctgcaccctgggcctaggtactctcatacattgcccttttagcatagttttgcctctgggagcagaagggcatccaggcttgaaagtaccagtggccttgtacgtcttagagggctggctgactagatttgtgtccttatgaggaggtttaggagcagattttgtgtgggctcacctaacatgcctttacctctatccttgtggggattcgaggtttcaatcttgattttccaaagagcacactcttcggccataacttccactaatgggttgtcgccagactctgccaggtcctcaaacatatcttggagacaataaattattctcttcatttttttcagtgagtttttcctgatttgctaactttgtctgagtagcttatagttctttagtcacttgcaacaaatttggatagtggtcatagtaataaccatctttgtagtaaccatctatcacataatcatcgtcatctacctcctcctccctgacttcagggttctggtcatcatcaatgccatcatgcaaattttcagcatcttctcctcgtagcatttgcggtacctccttctattacattgcctagctggagaccgagggcgagagagtccgtctcctcgataacagtatccagaggagttttcttgactccattcttctaagtgaacaccatggttgaggttgtacgacaactagcaaactttctttagctctcaatgaaagacctaaaatattcaccgagatttttcgaaaactaaataaatagagctttcgaaataaataaaatagtaaatgatgaaaagatggtttttacgtggttcaagcgttaaatattcctagtccacaagtcagttgtattgaccttacaggctagtatttggaaaatacaatatgtgtttatagtataaaccctagctctgcactccttttgtttctcttgaagaagaagaaagcttgtaagaatttttatagaggttctgctagtataaaatattgttcaccctttgtacataaaaaatgaggatattgataagcttatatgtggctaatggcattccctttacacaccttgggtgttggaaatattttacca

SEQ ID NO: 312791 - DNA, 1424 bp, Cannabis indica
aaaaattaatgatttttttatcttttttttaagcattatttcaaatttgattattttctatttctattcttattctcattcctatttttcttattctgaagttttattcctcccaaccaagcaactagtgtctatgtgaggaggaaataacttttaggacaaaagtccttaactttgttttaacctttgatagatcttcttctcttctttatattcacagagtgttatttattattattgtaaaaatttgtaatctcttcttcttcgtcccatataattttattgtaatactttttaaataatttgcggcttaaatacttaattttaactctcagttacaaataaatacataagtttaatttttgtcggtaataatacctaagttatatttttagaactctatcggtacctgactgttaaatgtcaaaaaataaaaattcatgacttggatcaatcaaagattgccacgtgacaatttatttaatatttaacaactaggtacttagagagttctataaatataactgaggtattattatcgctaaaaattaaacttaaatatttctttgcaactgaaaaagttaaacataaatatttatgccacaaattatattatttttttttatgtactttacatatgcccactacaataattaaaaacaaattaaaatatgatcaaatatcattcacaccattgattccatttcagtcaaaagccataacattaattcaatgaatagaaaaactatattttaaacatgccactagctggtggtgttagtagtgtccaacaacaataatataacataatgtaaggaaacacctctatcattgtgtaaatataagtagtatactatattgtgatcatcatatcaagaactaaacagaaatggagactcaagatcaaaagcttttgagtgtaaattatggcggttctctcccaatcaagtgtgttcaagatctcgcttcaaagaatcagaccgaaattccacctcgctatcttcggcctgaaactgagcttgatccagtttcagtcatagaatcattggagcttccaataattgatatgaccaaactaattggtgacaatcaacatcagtggcaccatgatgaattggcaaaacttcatttagcttgtaaagaatggggtttctttcaggtaaactcattaaacaaaagctattgtccaaagttctaagagttctatcattaaaatttgagggtaaataccattttatatcttgtgttttataaaagttacagattagattctctgttttggttaaatgataaaatatatcatatattttttaaaatagtaaaaatagctaggaccctgatctcaattttcgattttttttaatataaccaacttgaagataaatttctaacacgaacaggtatataaaatgtaaccagttttg

SEQ ID NO: 312792 - DNA, 1032 bp, Cannabis indica
cacttcaaccctatcgaacttaaagtttttttcacctcatacgctgactccaaaaaatagttttccattggtaaaatctcattaaaagaagatagaaattgactaaaacacttatcgcttactctattttgtgcctttatgttataaaatttcaccattattgatagtcgttatttttcatagccactaaataacgatctatttgcatctttaaccatggtatcaaatttttcaggatcataaatatactcttcttgagcatcatcaagcaattctttggatgatcatcacaatcattactttcaaattaatcatcaacccctcgcctacctaatggatatgggtcaccctttgattcaccatgccagtaccatttagtataacttttatcgattccacgacaaaatacatgatgtaatattttcttttgatatattaccacaatcgatacaatggtaccaaaattttttaggatccctacaattcttaggaaaaactctatttttttataaattcttcttaaaattgtggggtttctctcttctctttcatccatggtttatctattttaaaaataaaaacaaaattcctaacaaacaagatttaaaaaaacttaaaaattgctagtacaatcctaggcatgcttagtaattaaagtgtcggccctaaagtgaggcgagccaggtgtgcgcctcgggcccctgcacgctcagtgccccaaaattgtgaaaaaaaaattatcaataaataaatattttataataataatttacaattaaagttaattttatcttaagtcccatataccttaaaataaagacacaaaagtataaaaaatgtgcgaagacaattttatgggtagaggtagaaatttgacacgcggggatgaatgggaacctgtgggtaggactggacatctgattcaatctaacttttttttttctattacaatccaatccaattaataattggatttgaaaaatcatcatctaatctaatctaattagagctcaaaatccaatctaatccaat

SEQ ID NO: 312793 - DNA, 1367 bp, Cannabis indica
aaaaaatatgtgataaatatatttttataatttttattagctaatttattagatttggccattttcttaatttttttaaaaagtggacatttactaacttagttttcaaatttttgatcattttgcatctcaacccttagccttttatcttttatattttactttaaatttatattttctaattcatttttacggtaatttttttcttacatctttgttttttttttcttcttcttcctctgacttggttccttccaaaattgaaattgaacttgtaacacatatcgcaactctaaattattaacaaattatattgtaacctcacccccttttatcttcttcctatgagtcattctctcttctctttgtgattgttcaatggccaccacgtaaagtttctattgatttctaaaacgaaattgaagtgacagctaatatcgcaatccaaatcacaaccttaaactaccatcaaatcatatcgtaatctcagtcatgccctagttgcaatctaaattgcaagaccactatgtgaaatttttattaatctctgaaattgattttgtaattgatactttaacccaaattacaatcctaaattaccataaacacatattgtaatctttcaatcatgctctagtcgcaatctaaatcacaaccctaaatcaccatcaaaccatatgacaatctcatatatgcctcatcatacataatcaaaatcgcaacctttcttcttcctcctctcaagtcattcctcgtcattgtaattttacaaaataaatgacggtggttaattctgttagagttagttaattctctgctattggttgttactaactaactgttgtaactaactctatcttctcacttcataacatatataaactattgttgtgtagttgtaatgaatgagattcatctttgatcttcatcacctttgttgatctttgttctctttcctttttcttcttctttttctctctgttttgttcttcttcattcttttttcaatggctaaaagatctcacatggtatcagatagggctgtacagaaattttcgtaaaccgcccaacccgaacaacccgactaaaccaaaccgacaaaaccgaaaaaaaatacaaaccgacataacttgacaaaattctaaaccgcccaatgaacccgcccaagccgatttaacccgattttcagttttctttttatatatatatattatataatatataataatatataatatatattaaaaaaaacccaaaccctaaattgaatttagatttggaatattatgtatttaatgttattaatttttattttagttgaatctagaaaaaaaaaaaaaaaaaaaaaaacaaaaaaaaaaataacc

SEQ ID NO: 312794 - DNA, 1726 bp, Cannabis indica
tgtaagtcttaaccaaattatgaactactcagaccaacttgtcaattgaataggaagatgggtaattgcattaagtaaaataaagaatatctggtaatcataaatatcctcatttttctcattattatgtctctaattttaattatttattttattttatttacttatctctaatatttttattaatcaaatagaaacaaagaattaattgataatcagtcctcgtgggaatgattttctacattaacattatatatcttgattcgattgcgtatacttgcatactgaatttaccgaacactgtgttaacgtatttttgtgattttttatttcaaattttggtgtattatataaaaatttcataattcaatgtcttttagagagaaaacgaaaagaaataatatttatatgcaattcgattaaagtctattacatgaaaatatagctcatagagataaattaataaaaataggattaccaagtcgtctacagtacaatatgagaaaaccctaacaacaagctcagctaatggtccaataagccaacaacgatcagacatcagataaatgtgaaggatactaggtttccaaactaaatgaaaatctgagagagtccacctactaaaagctatttgagagagtctcaacttatagcacctggaacacctcagcagaatggtattgtagagagaaaagaccgaaccttgttagatatggttggatcgatgatgtgctactcaacacgtggcactgaacttttagggatatgcacttctagcggctacttacatttgaatgtagtaccctcaaagagcataatcaacactccaatggaattatagaataggaaaaaacccagtttgaaacatttttatatttggcattgtcctgcgcatgttcttaaatcaaagactgggaaacttgctcccagaactgaattgtgtttgttggtaagatattcagaggaaactcgaggtgcctatttctctagtcatcaagataataaagtatttatatcaacaaaagctacttttcttgaacatgactatatgaaaagtcacaaactacgcagtcaagtggttatttagaaaataaaaaatgagcagttttttgaaacatcgattttaacaccattagttaaatgaccgatagcgtttaccacagtttctgaagaggaaacctcgatacatcgtcgtagtgaaaaaattgtgagacaacatgtctgctatgaaaatgaagcacatgttctagtttttgacacaaacaaggacaatcaattgacttacaaagaagcaatggaagaccctaattcagagaagtggaacaatgccatagatcaagaaatagattccatgtgcactaataaagtcttggaatatgaacctccacctgaggacattacacccatagagtgtaagtggattttcaagaagaagagaaatgttgaagggaaggtagagatttttaaagctaggattgtagccaaaggctatacacagcgagaaggcatcgactatgacgaaaccttctattcacattcttctttccataactgccgcttatgactatgaaatatggaaaatagacgtcaagactttttcttctaaatggcgatcttaatgaagtcatttatatagaacaaccagaaggaaatgtgataccaggggaagattgaaaggtgtacaagtttctcaaatccatttatggattgaagcaagcctctagat

SEQ ID NO: 312795 - DNA, 1453 bp, Cannabis indica
cttgcatctttcatcaaaacagaccttgttttcacgccactggcaagtttagtaaataaaaatgaaacacgattagctcagctaaactgaagtttacactcactgcagagttaagtcataataggatagtagtgactcgaatgtggcagaatataaagtcgcattcccttcaatcatgaatctggatacagaacacttcgtacattaattcactttttcactataaatatcaggttgtctccatttatcttacacgagataatcaagtcccaccacagcattcttattctatgtcacagaatactattattgaaaacaaattaacaaaagttagtaagaacccaaaagaaacccacaagaactcactatgctgtattataacatatctcagcattctaggtctgcaaaatatagagttttctgtatccatctattattcactttgtaatatagaaatcattcaatgcagcaaaggaaaaaataatacataacaagaaggaaccttgtagaaggtaaatgtataataagaaaggaaaagaaaaagagggtcctgcataactcaattgactacaagaattgaaggctcacaggtcacagctacagcagcacaagtaattcacaattccaacaatgagtattctgactttcttacattatctttatcgtcaccaaaagaacatgtattgcagcatttgaaacaattgattgcaacataatatacacatgtaagattgattaccaggcggaatatacacaaatagtacattgccttgtgacgaagtacatacaactcattgttggtggtgatcactgacaactcaaacaacggcagtgcaaaatcacttaggattgcaaattaagagaacagagcactgaatgtttacccgctgatttatggtctccaagataaaaatgccattcaattaccattgactatcatctaaggccatcaatcaaattctccatttcccttcgcccaaacctccttccctgagaattagcatctttacatcttgccgcaaagtaaaaaacaagccaaacaaccatgaagtaaacttccacggtagactgaaaaagcttggcaaaagacttgccacaaacccgagccaaaacccacctcacaaatgacccacaaaatacagcttccaaacatttgatctggacagcttggttaaacatggtggatatcaaataacagccttctttaacaatttctctcccactcttcctcgaatcaactatggcaatccaagcatccacagcgaacacaaaagccacaaatgtatccaacaggaaccatgtaaacaaaaaccctgaaatctccttttcaaaaccacgaatccatggagacataacagagaatggcataagtttcaacctcacaaacagcttgaaaaatgaatactggtcttcaatttctccaaaataccacaaaccaagaagctgagtcaat

SEQ ID NO: 312796 - DNA, 2493 bp, Cannabis indica
gtccacgtgggtctgttatgttttaatggttggtataaattgttctaaagtcggttgaactattgtctataaatagttagtttcattctgtaaacgggtcagctagctaattgataatcttggttagttcagatttatcgttttgtattgtgtgtggtatcttgtatagtttgttgttgttttcaggtctgattgtatagctttgtgatggatatccatagcagaaagatcagagcttggtggtgctgagtttagactgaagagagttcagtgtcatcttcatcatcagatatgaagggattttagattgaagaaaagtgtcgaagaagaacttagctgctacacatggaatcttgtgtgtacaaccaggaatcttggttgttgttggtaatacattactaattattgtaaagattgtattaaattcctaattgtgaactagagattataatacgaatcttttaaattagtggatgctattaccctggttcggggaacccaagcactagttggctaagatttgttcttggtacagacgaagcttgtaagtcactgtgctcttttctgcttactctttaatcccaatcttgaatgatcaagttgaaattaatgaatctaatcttgagcaactcggtaaattgaatcatgaaattaggataagttgttctttgatttggtatctgagcttgaaatttttctaaaaattttgtgttagatcctagacttgtgtgattcttgattctgaagaagtcagttgatacgtgtttgagattagatctgttgatcctgttgccactaaccccctctgagttctttctcagacaactatagtacaggcgtctgtttttctcttctatctaggatgaaaatgtagggaaggtggatcaacctcgagacctctgatgttagagggtgctaactacccatactggaagaccaagatgcgtgcattcttgagagctgtggatgaaagagtctggatggcaatagaagaagggttgtttagaccgacaatgatggagaatttaatgattattcctaaacccatgagccaatggaccgctgatgaaatggaaagggctaacttcaactcaaaggccttatatgcactatttaatgttgtctccatgaaccagttaaaggtcatcgctaactgtgaaattgcaaaagaagcatgggagaagctaaaaataaaagatgagggaacaaatgctataaagaaatcaaggctgcgtgctttggctaaggcatttgagaatctgaccatggaggaagatgagacagttgcagaatttcatgcaaagttgtgtgatgccctgggaaaaacctactccaactcaaaactggttcgaaaagtgttgggagttctcccaagaagattcatgactatagtgacctccattgaagaaatgaggaacattgaggaacttgatctcaatgagctcattgggtccttgcagaattatgagttgtcactgtccagatggaagaaaacaaaaaaatagaaggattcagtcaaggataaatctgatgtgagtatcactctcattcatcaagaaaataagatatcggaacaagaggaaattaatggcattactgatgagactgttgccctgttaacgagaaattatgccaagttcttgaaaaataactacaagaaaaattttcctgttgataaagaaaatgctctcaagatgagcaaaggtgaaaacttcaaacaaggacaaccatttgctgatcaaaagaatcgaggaatcaagtgcagaatgtgacggatatggccatatccaagcagagtgcgcaaacactctcaaaaagaagaagacccttgctgcaacatggagtgacagtgaagaagaaaagaactcaactgccagtaagagcatggatgcggataagcaagtactagctttcatggcccaaagctgtcactcagttgagtctgaagatgatgcagtttccactacatcagaagcagacagcattggtagacaaaatgattatgaggagatgtttgcccaatgggagtacatgactaaacagatcagaggtctaaagagctccttggagcaagtggagactgaaaaaggcaagttagaggacacagttacgaatctcaacagacttcttgatgagaaggagaatgagatttataaactcactgctgatctgattagaactaagcaagcactgcaattcattctcccaggcacaactgctatcaatcagaccctacaacttcagattccgtatggtgatcgaacatcctttgattacaaaatgttgtataaacaaggcaacgatctgtctgttgagaattcactcacctcaactgtagatctaaccaaaaaggatgatgggaaaccacacatccttgccaccgttaatgaaccagatccctctaagaggactcaagttccatttggagccactaagctgaagtttgaagggagaaagattgtgttgggttttatgccctaaataaaactcttt

SEQ ID NO: 312797 - DNA, 1676 bp, Cannabis indica
aaaaaaaaaattataataatgcaattttttaaaaaaaattcaatcaaaattttcattaatagttaaactaaataataaaaataaagatatgacctctataataattataagttaagttaactatttaaaaaaacgtatttttgcatatgctaaaatgtttctttattaataacagtaaataaaaatacgattggaaagatctgcattaacataatggaaatttattgtagcaaaacgcatatttgcagtaacagaacagaaataacagtacagaagtaaaaacttgacataagaaaattatacgtaatatcagtgttcttattttaaacactcataattcacgaggtcacgctcagagaataaaatcaattagtaaagtctcaaacaattataaaatacaattgacttaaataagtttagaccctctctaaaaatttgccgcaatcctttgtaatttactttgacaatctaatttctgaacaccaccaaacagcgaaatttcttcatcttttgatgattggaagcacccgtagttgacaatatgtcaacctaggcgttggtgcctaaggcacttggtgctctgtgtgctcaaatttgaagttgctctgaatctaattttgttgcctcaaatatgtttgtgacatgtacaaagtttgatccatttgcactaagacggttccgaaaactaaaaccctatagccaggttgtcaacgttggttgctaggtgaaatcctaagcgcctaggttggcttctaagggtcagtttcgactccttttagtctccaagctttggacttggatttttcttgacttcattactcagagtactaaaggatggtgactaagaaacaacttggtgggatccaaataccaattttagagcctttaagtcaacctgggtgcagggctagggaccctttcccaagttgactgttatgactcgagtaacttaactctatgaatgtttttcttcttgccatgtgttaaacattgatgtccacattattagggctacttttcgtttatccaaaaattatttttatttctattaaatgaaagggtacttcagtcctatttgaaaatattttgactaaaatcaattttaaagtcttaattttaactttaattttacaaaaaataaagtctaaaagataacttttgaaaatataggatcaaaaatatagaatttaaaataatataacttttattataactaaaaatactttggtcatatttaaatatattttgaatgtaaaattttaattataattatttatacataacactcaatctattgtgtaattttaaatttttaggacataaatagataatttaaaatataatttctaaaatagtataaattctcataataatatgtaaataaaaataataatcatagtgtatagaggtgttcatctaatttaatttatactattttactcataatgtatcaatctgtgcccaaatttaatattttggatctaattttgtcaaaaatactaacagttagttagttattcgtgtgttagttaagtgttgtttttacagttacaagtttgttatatctgttacaaactctttgggtataagtgtgtaacgccctaaataattaggcacgctacccaaaaatgcttataaagccctaatcccctaaccgggattactaattaaaatag

SEQ ID NO: 312798 - DNA, 1023 bp, Cannabis indica
taggacataaaacccaacaactttcttggtctaataatcatcttttggctggccagcttgtgctcaaaccctggttggccatacaagctcctcttggccggcctatgtactccctttggccagccagacatggttgtacaacttcttgacaacttgctcaactcctcttgcttgttgcttgacgattctgccataccttgtaaagagactttgtcttgctattgacaaggttgtatttcacgtgttctcaatgttggcttatgtggacatgctatgtcaagtggacaaaatttaggataacacccctcctatattttcttggaaggtgggaaaatgattacaagaaagaatcagcaatattcactttcatagcaataatttgggttctataggtggctaatcatcttactagattgagatctgatttgttcattatatacctgtttattggaagataatgatatttcccaaaaattaaattcttaattcatgaaggaacattagcaatattattattactataaatgtgtacaaaaggaatgacagaatccctaaaatagaattccagaaaagaatctactttttccataatcagttacacaattcgttcctagttctttcatcaactacacacaaagctactcagaacattactctaggctaatatactatattacatgccttctctttgaaatgaatattttgttgtgaaattcagatgtatcgccttatacctggatctgcaccactttaggcatatagcaaagatgaaaaaatgattttggatacatggtaaaaccgtagggtaaacttgataagacttttccttacttgaaacagtgatgattctagtttgttaaagcatgtttatttcatagggattgaagtttttatgatccttgtttaggtgcacattattttttggagtacatgtgttgttttgatgttgtaccagttctacacccttttttattatcttgctgagcctgaagtgtaaaaacctatctaaagtctctaagtcta

SEQ ID NO: 312799 - DNA, 1146 bp, Cannabis indica
taattattatatattattattgtgctctatattatatacaattttatatattgagattattattttttctaacatgtggtatcatattgtcaattgtatatgatttagaacctattttattttacaattgattgatatatgttaattttctcaaattacttattaatttcgttattattttatgttgaatttttttattttttaatcataaaagtttaggggttttatttattatgaaattctctttttattgatatattatatgactaaaatagttgagtaaattaggagaattttaagattaaacttttaaggtttatgtatttttttataaaattaattttggaattttttattctattgattataaactaaaattgattgtgcaaatctcattcccgactaatttataatatctttacatgatttaattttcaaattggttgagataaatattataatcgagttgtttgtagttcttaaatttttggattatactcaactaaatttacctaattttatgcttttatacacaaaattaataacgtagatctcttagaaattgaatcctgatcaaaacccctcattgtcctgtccgttttgtcatgttttggctagatttttcgtcttcgacccgactagagaaaaacgagtcgtgcgacccagttttaggtccggttcaaggttgaagacaaccttctccagagttccccactcttggcagtgacgcgtgggggcgtgtgcggcgcctcctgttatctttttttgacattttttttttcagcgtgcttaaaatttaatttcttattttcatagtttttaattaatttctcgattctatttaataaatattattaatttaataataattgtacaattaaaaaataattaaaataattttttatgattttttaaaatctgtaaatcatagataattttctgagcttcttctcattctatttgacatagtcactctcttattttaatttatcttgactatgtaataaccaccaatactatttctttcacatctttccattatagttttaagattgtaaaacttgatcgtttgatgaaaaataatgtgttatattaaaaactttattttttgattatcgatatgttataagaaattaatatatatat

SEQ ID NO: 312800 - DNA, 895 bp, Cannabis indica
gaatcgttttatgaaagataattaattagtattttatcataaccaattggtctaaaaaaatgtacattatttgtaacttttttttaatttagttaatcaaaatatctatataatttacatttaaaagtatattcgtagaaagaattgggttgggctatctgctctcttcatcaggtgtcagtttctacttcatggatctaggatctcattagccttaaaacaaaccaagaaaaaattcatttttataggttttgttgtaagtttacaaaaatatctttttttttttctaaaaaaaaaatgttattttataagaaaaaaagaatgaggaaaacaatacgcgataatcaattacctatattgttttttttttttttctatttttttaatttcttttttcatgaaatgattttattgaaaaaaattatatttttgttcacattgtatacattcctttgtcattatcaaacaatcacttagcctctgtatggttaataatttttgtaattttcactaaaaaaaagagaatttttttttatagttttttaattaatattttgcaaatatataagcatttaacatttcgtttttcttttcaattttatataattttttttttttctttcataaatttgcaaatatatatttatataattgtgctatatattgataataattatgttggaggtttaatttttttttctgtttatttgtttatatattttttatctttgttcatttatttttttttttgttccttcaattaattaataacttttaaagagtctattacaacgtataatatacaaatttatattgcatagataactatacgtatttttcaattagtacatgtctttattcaatacaaagatctttatcatatagtgcgcgcgac

SEQ ID NO: 312801 - DNA, 939 bp, Cannabis indica
atttcctctggatcttgaattgtctctcgatctttaatttcctcttctatgttgtctttctcgagccattaaagcttcatcagatcttgattcttgctttgctgccttttgccaattcaattaagcatcccttgatctcagagttctcattatgtcttccaaagtgagagtgtccctactatacattataaaaatttccatttctttaaattggttaggcaaaccattaagaacaatcacaacttaatcttcttcatcaatggtttcctcatgttagtagagccaaaataattctattcacatcatctatattctgttcaaaataaatagtagcatttaatttgaaaccataaaatttcccttttaagaagatctatgtgacagtgacttggccatgtagagttgatcgagctagctccgaattcacgaacagttttctctccaataacttgtctcaacacattgtctacaatgttcattattattaaggttgagcttgcttcatcataatatcgatttcttttttcttggttgaattttccttttctgattcctcaatactttcttcaaatgctgaattaagtttttagtatattaattggccatcatcttctccttccatagactaaagtttcttgatccatcaaacctctcaagatcaaatcttgcagaagataaatccatgtttgaatggtacttgaatcttgacagcttgacaagattgagttctcctccttggaattcctaactctaatgccactgttgtattcatacaacacataactcaaataaaaaaatattcaaacaagttaataccaatcacatcaaaattaacaaacaagtaatcaaaactgaaaaataaacaaagattaaaaatggaaaaaaatgaagaatgagacacaagaatgtttatacaggttcctgttgggttttatgccc

SEQ ID NO: 312802 - DNA, 1160 bp, Cannabis indica
ggtttgatgtacacccctagtttgtagtagcatttttatttcagtgtattgagttacatgatagttaacttatactattaaaagtcatctaaatcaattgtaaaaaagatgtacttatggtatatggacaaaataatagtgcttattatagaaattttctatatatttaatatttatgtgtgtttagaaattattttgtgtgttcagagaaaagttatatatttaaccaattgaagaaaaaaaattgagacgacaataaaatcagaaagtttttttcttgaactttcacataatttagggaaaatattaaaaaaaaaattgaacatttaaatccttaatatcgttaaaataattttgcaaagaaataatatgaagtgcgctctcgtgattgttcttattttataaatttaatagataagtaaaatatcactaatttttttttataattaattaaagaaagaatgaatgctgccaagaatacattcaccaacgtgataaaaggaaaaatcacaataaaaaaatagtataaaactaaatactaacatgctctacaacacaacataacaccatacaaccaagctttttaactaatataaagcataaaaaaataccctcataggtgagagaaaaagtgattatctcacttaagaattttccattaaatatatattaatatatatactatttttttacctctaaagttaccattaatagagcatgacttgatagaatattgaattttggtaccaatagattcacaattgcgattgaagtgtgatacatgacttgataaagcattgaattagcttcaaaatgcaactggaattgcgtcaatcagttcaatattgagtgagttatgactgttttactaaagatagttcatgacccatcgcctaggttgaatccaacacccagtgttatagtgcggatttctcacctaagaatacgagagcagtctcgtataaaattgacatgtggatctagttctcgagggaaatatgacgtgttgattgatgactcccatagagttttcctcgcttgatctgaactcgtgagatgatgcgactgtgatagggatgcatcacatagtcaacagcagggtcggccctgacttttagttggccatagaaaaaaaaattattttgggcccttatttagaa

SEQ ID NO: 312803 - DNA, 939 bp, Cannabis indica
tgttgtaatttaggtgcccatacacccaagtataaagtattatgacacatccaacacgtacaagtcttgaacgttcttggcaagagtacaaataatgcatacccctttgaagctccactaacctctttaccgcatacactaaatacctttaacgttctagtgttggtaggattagctcgaacctcctacctctttaccatatccactcagtacgtctaacgtactagtatcggtagggttagttcgagtcactatcacatgcactcagtacctccaacgtactagtgttggtagaactagcttgagccactataccacatgcactcagttcctcaaatgtacaagtgttggtagaactagcttaattttcataatgcatgcatacaacatgtatatatgttcatcctttatactaatcttatgtcacttccgtaatcaggtgtgccaaccaacttgagtagaagtattactcaacaatttcaatgccctaagtcacaattatgcaaaataggtaagcgacctgctaagtcactttcagggacttaaacttagaaccagaagttttcttaaagataaatagcatggcaataccctaaatattgaagaaacacaaaaacctaggcactcaaaaaataccccaatcggttaactagatccccaaatggtccactgttttcggggtcctgcctagggaaacagttaaccgattctacagaaacgattaaccgtttacgtgtagaaaacccaaaactcaacttttctacttcagttctatcccatatcttgcaatactttccagaacacctaattacactataatgaacacaatttaaccaataaatacatcatcaaacctttgaaattaaaagtggcattgttgagtaagcttttgttgggttttatgccctaaataaaactccatttcaatgtaatctctat

SEQ ID NO: 312804 - DNA, 606 bp, Cannabis indica
tatgggttgttgtactatatataatacaataaagttgaaacattgtgggttattgttattttacacattatacatataaatattattgtataatttttttttctaacatgaacacggggaagtttgtccattattatgaaaagaatgcacaattcataattacatccaacgataataagaagaagaagaaattacatccaatgcataaagaaatctcctgaagacagctggattcgagatcaagatgagattgctaagtgttttttagacaacttcaaagaattatacaaagggcaaccaacccctctgaaccctgtcctaagtgaagttttccccaagcagcttgacgacaatgacaacctcctcctcaaaaccatcccggacgcctcagaagtaaaggcggcgatctttgaaatgggcaaggacaaggctccgggacccgatgggccgcctccaagtttgtacacgcatcactgggcaacggttaatgcggatcttgtagagatggtctccttcttcttcgtccacaaggagctgcctgcatacataaatgacacctcaattgtcttggtgccaaaaaaggaaaacccgactctaacaaaggat

SEQ ID NO: 312805 - DNA, 1155 bp, Cannabis indica
tcccgtaggccccatccccatgggaaaaatgtgcatccctacacatatttaattagtttattattataaactaatttaaaagtacacacacgtggcatccctaagggttagggcattacagattatttattgttattgttattacaatgacattttttgttgttttgatttttgttttttctagtgtagctttatttatttataacctcttaattataatataatttgcttggtcttaagtgtattcttagatagaggttctactgtatatccattgaagatgtcctcaaacatgggcagacccacatagaggcaaagaggggtacataaatctcaacgcatgagcaagaacaatttcttatgtgatagagatacacacaataaggctccagacatctgttcgcaactatatacaacaccctgacctcatgcctacttaccaacatccaatagctatgttagttcaaaacattgtctgaatgggacacactcctcacacaagagtgtgaaaatatttgcaataagagactcgtgggactcaatttccaagctaccgaaaacatggcaaacccattgcaacgttttacaatcatgctactcaggctacatgttaatccagacttatcatttatgacaagtgtcaaaatacataagtcgagtgagcactaacttgtcgtaataggaagccctaaagcaagacagctggaaaagcacctatttccataaactgattccaaatgccatttggccaaaacctaaagatgacgcaccatgggaatattatttgcccaaatacctctaaaaactagaagaatatatgaatcattgtaaaaaatactatgttgatgaaagcaagttcgactataataatccaattttccaagattcgcaatactcaaacactgtttttaactgcccattctcactcaatgatcttgatgaagaaatatgtagggggctggctatatctcaacctatcaacaacaaacttattgcatcaacaagtggcaacaagagaacaaattcttcatcagtgtggcatgaagatgatagtgacacaaatgagtacatgaacctcagtccctcacatgaacccattagaattagcttctctgagaaactttaatgagtgaattaaagaaactaataacatga

SEQ ID NO: 312806 - DNA, 2841 bp, Cannabis indica
ggcaacataatacaatctgataaaacaaaactcaaaattaatgcatgaaaaataaaaacaaggttaaaacaaatatttattacttggttcattaacaaagttgtaagtccattgttacctactccatgaacacataaataaaaagattgaatcctttattgatggtggcaaatgatcgatgattacaacaataagaagagagacttgctctctgctagtttgaggtgctcaggtgtgggagcaacagactatgatatggctatggggtgggttgtgacagggataagggagcaggttgttgtgcttgagggaaagaaatttaaattttgtacttataatacaaaagaataaagttgatatattttgtagctacagactgagattctataattataaaccaaaaaactagtaaaaaacaataatgtacgaaaaataaaaacacacggttttaacacgtaatatcaaaaattcttgtagattgttactagttcatggtatcgtggccagaaataaatttcattagttatatctcaaaaaaaacaaaatttttaacttatgcataaataggcttactcttactatatgtcacaagtttgatgtattccatcttgacaattaaacattatttcctaatctgagtggatgattctactcttagtaagtcgtacagaaagaattgattctcaggctcacaggcagaagttgtgatatcagagcagagtaagaatatatatccaaccagtttctatcaagcaggtagctcacatgcatcaatgagggaatgtcaattggtaatttcagagatatatcttgtatatctccaagcttgcaagtcacggcataatccctacattcatgggatggattcgcatcttcagagaagaaaaacaattagtctaagtttcctactttctttatcgtaattatgggaattaaactagttttttattttatttcttattgatttaggaaaattaatttcatgtaattaactcctgtaaataataaactcatctcactatttagggacactaattttatagagagagaatactcaagaaagaaatctcgatctaaaagtaaattactcagaaatcactgtaagagctttcgagaggaatcaaggcatctttgttcatcttctcaaaagttaatacaataaaaatagaagtaggctattaccaactataaggggtcaaacctctataaatctagtattttttttaaattttatattttttatattctattatttaattattcttaattgctttaatttaattcattgtttatttttttttaatacattttagtagtttttcttttgatactatttgctcacttattttacttatagtatcatgtaatatttagttcttataaaatacatacgatgcaaggtaaagatactaattccttcatcattgttcttgtttcatttctccacttctccactcatttgatgaaatatgcaattaaatactatttagtatcataaataattgaggtgtttgtttgtacatcttctaaaaacatattaacattgttaatattttattacttattgatttcttattaatcttagtatatatatcgtaaacaaactaatactatttagtatttaaaatagtatattatttataatttggtatccagaacaatttattaacactaaacaattaaaaaaaaattattcttattggtattatatatgcaattgatactaattagtatctataataacttgttgttagttggtattcaaataatttatattatctatataattgactactagcctaatatttttaattttttcttttaaagaactactagttggtatgcaaatcactaacccaccattaacatgagctaattatgtcctacattgtttactatacatatatatttaacaatatattacactttatgtgtgatagtctctctctcaagtttcgaaagtctgtttatgcgattgactgtttcttgcgtttgggtggttcacgttcccgattgttgagggttcaccggtgaagcttgttgtcgtctgtgtagtcgacggtgtaggttcgtctggcatgtgtgcaagtttctctccaggtttcgtttggttctgcgatcgactggttgttgcgttttttctggtttcttcgtttgtcgactgtttggctgcgtttgtcgcctgttttcgatcgtgactacgttgtgataggtttgttgcgattggattctcctattttttctgttttgtttgtgatttcactggtggttttctccaaagtctttgatcgtttttggtttctgcgtttgtgactgactgttgcggctgggttcttcttcgtgtttggtttgtgtcgactgtttatttttatttttctttctgggtgctgcgtattctctggaggcttttccttcaaggctgcgattgtttttcttctgcatttgtgattggactggtgcgcctggattggtttgtttgtttcttgcatctgtgactggattattttcacaacttttgtttgtcgtttttgcgtttgttttgtgtcgggtttgcctctgttttctgtctgttgcgttttatttggtggaacatggcgtcaagtagtcaagccatggaggacatggaacggagctatgggaatatagaattggaggatgaggagagttttgggattgagatagatgatgatgttgaggagacgactctggtggatgatcggtggtgcttggtggggagatttttgaatgctcgatcgttagactttgaagctatgaagcatactttggctgggttgtggaagcctgggaagggtcttttgtcaaggagttgggtccaaattt

SEQ ID NO: 312807 - DNA, 2214 bp, Cannabis indica
aaaaagatattgtaattgtcatagaaatgggatttgtacgtctcgggaaatacgaatagaaataggattgatttgttctataaatatatataaatactgagtagagcaaaataataacttacgcaaacacgtatatgtacgtataagagagtattattatataaataaaacctctcttgataggtagcttattattaattagagtaataatggcagcaatggatgatattgatattaatgtaatacctcaggagatttcatttgatcggagcagttcgaatgatgatattgattggggtgaattagataaattgttggaggccactaataataataagatgatgaatgaaagtattattagtactgagacgatcataatgaatgatgatcaaagaagcagaagaaaattagaaatctatcgaccctccccacttttgttgaacaggatgagtactacaacaacctcaagtagtactctcaccaagactcaagaaaatattttctatacatctgatatagtacctgcaattaatgtctacccttattggggtcaaactaacaatcaagaacctcaaatggaaacaatcaatgctttttccattcccattccggctactgaaactcgcactcgaaaagtaccttcaaaaaatggtcgttggacaataatagagcacatgtaagtaaagtaatacattattatttacttatttatttactactcttaacttttttttttattatttattatagagaatacttacatgtgaattgtttttattatcaggcttttcttgaaagggttgaataagtttggttatggccaatggacaaaaatatgtgcactacttggtggtacaagaactcccgcccaagtgtctagccatgctcaaaactattataataaaatgatgaagaaagaagatgaagctggtgcagtgacaaagaataataataataataagaagatgttgaataagagtattaatgatattgttctaaacgatgatggcacaatatcagctcccaattatctcttacgcactctctccaaatatcaacatatttattaccaatcctagctagctactataaactaccacttcattttgtatcccttataattcaaactattttgtatcccttataattcaaactaaatataataaactaacttaaatatataatgtaaacaaaccaacaatttctaataataaaaatctagagcattcattttcatatatgtatttcaaactatgaatcttaatttattttataatttgtaggtttaggaaccctaatgtaatctattatgataaaattaattcaattaactaacaagttatatttattcagtaataattaatcaagcactagtaagacaatttgaatctctctaagaaaaactcatagaattagtagttactctcaatcccacacttttcctatgtcattcaattctaagtctgattttagattacctctctcaagtgtaaaacctaaaattttaatactaattaatggtgatcaagcattaataattatataacacaaaaattacataaacaaatagcaagaacaaacatgagaataatctaaaaactttgattcataatctaaaatagttccgttcacattctagaaaagtatgtttacttcataataataaatataataacaacaataatcatgttcataattaaacaactaaacagaagaatagagaagaagaagaagcaaataactctaatgatgattggtgatgattacttgaaatctcttccctcttgctcttcaatatgttttctaatctgtaaaagtatttttgtctctcactcgtcgtcagtgtttaagctaaagaacgagagaaaaagaatattctgtacattgtatttcaagaaagagattacagaggattatatacagagttacagaaagaaagtagttataacaaacattgacccaaaccactttctaacagaaaactactaactaaaaagaaagacacatgcttaataagactaagtcaactcagcacactcagtatccttgacagaccccctcaaacttagtgtggtggaacacacaacaccaagtttgtctcgtaagaaaggaaatttcgagttggagatgggcttggttaggagggtcagctagttgatggttggcagggacatgttgaacacatatctctttttgaagcactttgtccctgac

SEQ ID NO: 312808 - DNA, 1016 bp, Cannabis indica
aaaaagtgcgaattgggatcggattgaacacccctaataaccaattactcttttgttttatagatgccttttttaaattacatttttaagtaatatttttgttgagaaatataggattcatctcaaaattaattggtaatgaaaggagtagtccatacatcttatgtatgatatttagtttccacatattatcaatgtgagactctctcaagatggtggttattgtttgatctttaatcttagacggctcgatcaaaatgacttttttggttcacaacgactctttttggcttgtcttataggactagttcttagatttagattaaatactcgttaaagtttaatttggcttttgataccatgttgagaaacataatgtagttccatctcaaaatcaattggtaatgaaagaaataattcatgcattttatatatagaatttaatttttacacattattaatacgagactctttaatatacatgctctaatattctctatatggtcactttagctagtcccaagtagttctaataaccaatgaatcaaactaagtagttacaaacaaaaggagtattggactatttgttatgagattattgcattgaaaatgtcctttttatttgtggtgtttgtctgtgtgaaagggtactgatttttcatgtcttttttatttaaggcaagtactttttaatctttcttttctgctctttgaccagaacctttacttggtttaccaattacttttttttgaaagtgttctttattgttgattgaagatgttatgtatatacatagttacatatagtaaaatttatagtaaaaaatgtgtttagttgttttatttagctatgttggtatatgtacacctaaccttaccaattgaaagattattccctttgaccaaatccttaatccataatagactcaacaaacacaacactatgaaaaaatatacaactcatatattatttcatgaagaaaactcataagaaagttatatatatatataatttt

SEQ ID NO: 312809 - DNA, 1107 bp, Cannabis indica
gtataattatatagtatataaaacaagaattttattaaaaaaaaacacatgtggcgtccctgttggacagggcgttacatttgtaaaaactgcatcactctttgagcctccataccattggccttacaatacacataattatcatccacaaaaagcatatgagaaactcttggggcacctctagcgactttacacctggttaaccactgatgcctttcatatttcttcaacagggtcgagaaaccctctgcacaaattaggaacaagtacagagatagcggatccccttgtcgcaaacctcttccaagacaaattggacccatagtatgtcccccatgagtgacattataagtaatagcagagacacaaaacataattaactccaccacccttctactgaaccccatctgaagcataagagtctcaataaaagaccattcaactcgatcatagactttgctcatatcgagtttgatagccatataaccatataactccaaacctccaactaaaggctctattatagacaactaaaaccacaataccctaagtaacaaggaatcacctaaccaaagctctaaaagtaacacgaattgatgaaatggattgcttgggaaactgtcctagaatcggttaactggtttgcaccaagtttccccaaggaatccaaaacctgatcaaaatgtgcccaaacctcaccaaaacttccagaacacctatattgacctgaaataatataatccaagcaataaaatccagaaaaacatccagaatcaacatatgccatgtatgaaccaagcatgagtttcaaactcaaacttgtgcatccaccataccaaaccctaaaaccagcaactagaattcaaacctagctcaaattgaacataaaaattgaactacaattcattcaaaccctaacagcccctataattaaaaatcatatgcctaaaaccaactaaaacttaaggaattcacaaattaagagtttctagggtttaccttcactagctactccttgaaccttattgaattccagtaaaaagaagagattcagctgggttccttctggtttggggtggcctagcataaagagagagagagagagag

SEQ ID NO: 312810 - DNA, 1577 bp, Cannabis indica
taggaattatcttcaagttggttgtattaaaaaaaaagttgtttaaaattaaactcagggtcctatttttaccattttagaaaatatagggtctattttgtcatttaacaaaacacagagtccaaaatagtatttacccatttattatctaacactaaaatgaacatgtaggggtgaacatcaagcaggttggtcgaattttaggtttgcgagttttaggttcattgattttgagttggcgggtttcaagttcacgagtttcgggtgaaagaaagtgagctcgtacccagggccggtcctaaaatttagtgggccataggaaaaaaaattattttaggcccttatttagaaaaatatggtatttttcataatcagtaaaaaatatgtgtaattttaaaaggagaaaatatttttttgagctcctgggctaagtaggccctaggcacaagcttagcttgcctatgtccagggtcgagtctgcctgcacccgcttgttcacatgttgcgagttgtcaaatttgcgggtccgggttgaacgggttgactgttgacccactcaaaagattaaaagttcacgaaacaactcttttttttttttaattaaaaattttaattaaattttttgaattctttatatgaagtgatgagcaaatatttaatccttaaactcaatgaagaacaagattaaaacttccccaaacaccatttggggattttactattcatttcattaatgtcctatattagctactagagaatttatgctccataattagttttgagataatttggtcaaggacaaacttttaaccaaaacacacacactcaaagaaagatgattttttatttttgttgttgtttttgatagtgatcaattttcaaagactaattattttccaataatatgttatatccatcatttaagtcactcaatatcatcattagtagaatcattttgcctcaatactagtacaatatatcatcatgccataattaccatcactatgatcatatcatgtaaatcataaaaacattattactaataataaccaaaattattttagctagcaaaaaggaagaacaaaaataatacaaatcatacatacatgtgttctaactacttaattatgtatcaaacttacttatatataacttcaattcaaacaccattaacttaattagtcgttacaacaacaacaacaacaacaacaacattaaaaatacaaatatatatataattattatttaggttgagtaagcatttgaacaacttctctcatggtgggacgctctacactttgttcttgaacacacaacattgccacaaacaacacatgcatagcctcttccaaatccaatggattcaaactttggtccaataaagataacatgttctttttcttgttattatgatattgatcatgttgattattattattattattaatcttagtcttagcccattgaacaatgtcaacaactccttcttcttctccaaaattagtatcaacagctcttcttccactcaccaattccaacaacaccactccaaagctatacacatcactcttttcatc

SEQ ID NO: 312811 - DNA, 2808 bp, Cannabis indica
agtgacaattttttagttacaactttttagttacaacataattttttttatgactaaatgtgatttttagttataacaaaaagttacttatgactaaaacatagtatttagatacaagttgtcactaatttagttttagtcacaacaagtattgtgactaaaaatatatttagtcacaacaaattataatttttgtgactaatacttttagccatgaactttttagtcataacataagaatgttgatttataattagtcacaacttttttaattttaattacaaattttgttgtgattaaaagtaaaatttttgtagtgagcatcagaaatcacaatagccacatgaaggcaatcagtgaagatacaagcctcttgaattcccaacctactaaggaccaccatgcccaaatgaactacctctaactcaccatgaagaactgaaacaacagagaatttaaaggcaaacaaagccaagactccatcttgctcacctctaaccacgataccaaccgtcccaagaccattcttaaacgtaaaatccacattaacatgaatcatgacaggacctggaatcctccaactctgagcatttgtgtggcaattaaattctgcatcgatctatttttttagtctcagaagcatgccaagttcctccattgtgatgattggcattcctgtaaaacaaaagtttttaatacaaaattgttggaaacagagtgaaatcagtcttctctatattgatgtgcactccttgagagtcaaatggatttaaaacctccccattaaaatggaaaagaatttcattaatacatatatccatttacaatcgacccataagtgcttcgtaataaggcattgagaggaaaagtgaaaaacatcatcactccgctcaaagccacataaggaacaatctccacagtggctattgaaaatagccgagagtcgagaaccaaaggggagacactccttgtaaaccttccataaggagagcttcagtcgatcatgaacactcgacttccatatcttagtagtagtatccttaagagtgaactgtttcttgtttaaatcccaataagcatgcatggttcagcgagaagcttccattagcagaagaatgccaaattagtttatcctttttcaaaagaagagtgatgcttgaagagaggatagtattaaacacgcctgggatgaataatctagagacaacgttgctatcccagtcaaaaccatttttcctcaacaagtcctccacttcggtcttatcttttatgcaaggattacaatctgagggactaatgaacttcccatcacatgcaagaccattgacaattccagatttccacatcagagtgtttgccaacaatccacgcgttattatctctaaaattccctaattttccagattcctttagacactagagaggcgttcctaggaagaatgacgtctcaaaagctagaagaggaacaatacttctcttttaacaaagtaacccaaagagcatttctatttttggctataaactagccaagcttggccaaaagacataagttcatatctttgaaccttttaatacctagacctccacagcacttacttacaaatgttctcctaattcaccagagaaagataccactactacaatttagacttttagtgacattatttagtgacacgcagaaaaatgtgagtcactaaagatttagaagtgatttttagtgacatgcacaattagactctaatctttggtattagtatcctacaatgtgtgtcactaaaaatatgaagtgtcactaaaagataattccataatttatataatttttttatttttaaaaaaattattgacctacagtgacacgctagttgtgactggctaaatgtatcccaacatgtttggcgcgtcactaaaagttatttttttaattattttttaaaaaataatcagtacttggaaaatgttcccaaacttaattaataataataaatggccttttaaaaaaaaataatagaaaaagacagcatattttaccctttctctttctcggctaaatgaaaaaaaaaaatatcttgtttcaaaaaaaaaacaaaaaaaaaacctaattatttttaacaaattccctctctcattgctaaagtaaaatataaagttttttttttttatttgagaatgtaaagacacccaaaccctagtagcagcaattagaaaaaccacacacacacacacacacacacacacacacacacacacacacacgcacacacacgcacacacacgcacacacacgcacacacacgcacacacacgcacacacacgcacacacacgcacacacacactctctctctctctctctcattgcgtttatttctacggctgtagattcacaacctcccaccgcgtgcgacgttcccagccacccaccgcctgcgacgttcccggcctcccactgcctgcgacgttcctggcctcccactgcctgcgcacgatgatgacgaacgaagttctcccttcggctcccactgctccaccgccccaaacgcccatggtctctatttatttttctcaaagaaacccttttcttttcttcttgcttcattatcctatggaacaatttatctatttttcagattgaagatgattgtggctgttagagttggcgattggggctgtttggagtggtgggcgattgaagattgtggaacttttgggttttgataatttttcttcataggtttttttaggtttgtagtcacttgacaactatgtatttttctctctttttcattatcattattggttttttttt

SEQ ID NO: 312812 - DNA, 1270 bp, Cannabis indica
tatatgtatgctattttatgtttttaattagttttaattaattacgattttcaataacctcgttgattagcaacgagttgcacagtgagtaaaaaataacgttaacatgcctaaaatagttatggtgttacgtggatgttttaaaagaatttggttgtaacccagatgaacaagaaaacagtttcaaaccttgaaaaaggtaatagatgctcttgtaatctccatgacagaagaagattacatatctgcaaaactcagatgatttaattttagatctgcacaaaaaaacttgaaatctggcttagtcccaattcgttgcattattttggataggtactccattccaaggacaaatagaagcggagacattagatccccttgcctgagtccgcttcgagctttgaaataaccatgtaaagaaccattgaacattaaggaaaatctgggggttcgcacacatatcataatcaatttaacaaacttgtttgggaaattgaattaccagaggttttcttccaaaaagtccaactaaattgcgtcgtacgctttttgtagatcgagcttaatgatgcaccctggtttgactgttttcctcccaaaatgtggcacaagatcctgacagatcattatattatgagcaatgaacctacctttgatgaagccatcttggcgtggagcaaccaaaacaggcagaacatgtttaagtctagagcaaatcagcttagtggctgccttatatagcacattacaacatgcaataggtctgaaatcactaactgtgtttggacacttaatctttggaataagttttaggacagtagtgttaatctccttgagaatttcacctgtttcgagaaaggaattaataacctcaaagatgtcttgcccaataagctcccagttatcttgaaaaaaataacttgataaactatcaagacctggagctttatctccaggtatttcaaagaaaactttcttcacttctttttttgtaaagtcccccaataaaatctctacttgttttggtgttaccaaagttccatgttggataacactttttaaaacaaatttcctgttggccattttatctccaagtaagcttttataataggataggaaagtttcttgtacttgtgctggttcatccactctgatgtcattccaatttacaatagataagatattgttttgccttcttcttgctcgaatgtttctatgaaactgtaacaccctaactagcataggcgtgctaacgtgattttaaacttac

SEQ ID NO: 312813 - DNA, 837 bp, Cannabis indica
atttccaccaatgccctgatcttcgcaagattagcctctattcctcgctggttaaccatgaacccaaggaatttcccggagccaactccaaagacgcatttcagagggtttagccacatcttatatcgtcgcaatatatcgaatcctggttcgggtttggatttaggtttgggacccaatcccagggtgggtctgtgtctgagtccgggtcctagtctgtttaaagttttgggtctaggtccagtcatagtcctggtcctgatcttgcgtcccgatctgcttctgggttcggatactgatttgggtttggggcatggttgaggtctgggtttcggtctcggttagggtccaaggtagggttcagtgtcgggttcgtgtctgggtccaggtcccggtcctgttccatatcgtgttccggttccagttctagtttcaattttggctcccaagtgtgggtctaggtctaagtatgtgcagggttctggtttgagttcgagtttgggttcgtgtttggtctaagtcccaaatccagacaccaactatggctggggtccaagcatcgagtcccatatcccaggtccagaggtgggtcctaggtctaggttttggtctacggtcgggtcctagatcccgatccacgttttgaggaccaagttcttgtcccgatttgggggcccaattctcaggtctaggtcccccatctatgttcaggtcctaggtcctagtgttagaactattattttctatagtgacaaattatgtccagtagtattccagttgtgtctgggactcgtagtgttttgtctggggttcgtactgttagtgttagtccacgtc

SEQ ID NO: 312814 - DNA, 1010 bp, Cannabis indica
ttagaaagttcatatttacggtgttaaacaacatacttttgagtagatctaagatcctggtaaaataattaccaacatcgggcacatcccaaagtaagcgacgatgtttagaaaatattgatgaagcggtaacatcacccatgctcaatatggtggtcagaccacgccaacaaacccagaaggagcctgtgcacctgataattcctgcaaggaatctcgcagtggacatcccttactaagccactagcaagaatctaactgaaggccttttcagaaagagtagaagcaggggagacccaactatctccctatgatcttgcatctagtatcaccggctcagaagactcgtctaggacatgatctagtccaatctctaaagactcactaagcttattcaatggcttaccattggcgtcatagcgacacaagggacaatctaggaggatagaaaaagtcaaatacctcctcctcctcactagagtagcctcctcttaatcagattctacatcagactctcaaccccttggtcaatctctggctcaacattagcacagggctgagcggtctcctccgccatcctaacttgaccacttgtggcaatcctggccacgtgagggtgatatggaggtgccctaaggagggtttgtcttcatctggccataagtgcgaagtaaatgagggacctacgcggtcatcacctcccctatttaacactgagaactacatggatggaagaaataaagggaggtgaacaacttgacaaagctacgaacgcattcaagtcaacagtacccaagggtaccttccaagtaaaacacaatgtacaaggtcgatcaacgaccaactaccatcttaaatacactaactaagacgaatagtaagtcctaagcagtataattgactataatggactcactatcaagccttataagtttctaaaagaaaccacacataaggttacagtttagttgtatatgctgttgggttttatgccctaaataaaactcttt

SEQ ID NO: 312815 - DNA, 892 bp, Cannabis indica
aaacttaattttttttcatatttattctcaagccttatggtatttttgacaaatgttgttcaagttttgttatatttgtgatagtttaattatttagtgataatccaaaccgcagaaatcacaaaaactgcatcgcactgcaagattttttgcggtacaatttttgcagttttatagtttcgcagtgagagtgcagtttagaaaattaaaataatcgcatttgcagattagtttaaaaaaatagtcaaaaactacatcatccccatcacgaacacaagataaataagttgtgattacattgtggttgtgactaattgtagagaatcataacatttattagtcacaaagattagttgtgactaaaatgagttttggacgcaattttatttttattgagagacattttaatcacaactttcttacacacaaaatttgtgattaaattttttggtcagaatattttcggcccaatgtgaatgtatgttatccctcgcctggtctctggaagatgaacgtagatgcggctatctccaccagccatggactcttcgattttggtgcaattatctgtgatgataggagagtggggttggtttagttcttcacagctcaacttcaagctcaccattttccccttctacctgaacttttagggattttagttttagaggctctcaaatgatgctacaaggatattgcctactttgagagtgattgttttagtgcaattgtcatatttaataatattataatattaccatttaactttagtgaagtaaagagaaatgaatttattttgtcgtgtatcgttcaatttagctataactctatcttcgatttcattagggtttcaaatcttggtctttctctgttttttttttttttttgggaa

SEQ ID NO: 312816 - DNA, 1519 bp, Cannabis indica
tttatgaaaatattttgtgagtcaacaaactcagtcttggccattatcgacacataaaaccatatctgtgagtcaataaactcagtaagaaaaacataaaataaataatcatataactagtctcataactcaggcgcccatacacatagttacaagtttgacccgcgtccaacgcgtgtaatgattctcaaacgttcttgacgatggtacgacatctttaccatatacactaagtatctttctaatactagtgttagtagggtttatccatactatgagtacaactgattgttataccacatacactcagtactcatcaagtaatagtgttggtaatgctatgctataccccttaatagcatactataccacacatatttcgtacttcaaccgtactagtgttggtctatacaactcaaataatctaacatgtatactacatgcacatatgtatatcttaatactaattttacctccttttgaatttaggcatgtcggtcaatgtgagtggaaatatctctttcagaactgagaacctatgtcacatttacataacatggatgagtgttactctacacacttttggggacttaaactcaaaattagaagttattctatcgataaatagcgtgaaaatacactaaatatcgataaaacatgaaaattggggttcccaaaatcaccccaaccggtctattggatcccctaagcagttcacctttattggggtcctgccaaaccaaacgggtaagagtttttacatgaaatagttaatcgttccctagcagaaaaacaaaaactcaactttcctcattcaattctacccctaaccttttagaacacttaattacactatattgaacatattccaacaattaaacacatcaccaagcccctgtaataaattttaccattgttgagtcaaacttaagcttaaaaacttaaacctaactcaaccaaagcaatatccaacaaaacctttacaaaatcatcttaaataattctaatataacttaaaaaacaatcctaaaactcgtcaagctcatacagaacctagttctataaatttcatgctcaaaccaaactattttcttctaaaactaaagaaaatgataagctagctagggctttaccttgaactcttgctagtaattctttccaacactcaaggaattcagcttggacactgaaggaatttggtatggttccttagattagaaagatggagagagagagagattaaatggagattgagaaatgagatttctttatgattttatatttatctaacaaacactttgtttattctaatttatttaattagcctagaataatacttagaaaaatctagtaattccattaaaagtttaccttcccacttaagtaacctaaatgcttatggataaaatggtcaaaaattattatcacgtataactttaatattccaaatgtctatatgcttatcccatataataaaagatactaaattatatctatgtgactctaatggccaaactat

SEQ ID NO: 312817 - DNA, 2239 bp, Cannabis indica
atcccgatatcagtgtattcagcatcaatttcacgatccttgcattcagcattgatcccacgatctttctatttataagcattgtaacgagaggggaaactcttcctccccaagcttactagccctataaatagtgttgtatattcactgggcaagagatcggtcggaaagcagttgagctaagactataccctaaatatattatctaagaattatatattcaaagatactgttgtaagagatataagaaaaggaatctttctccttaatcttaagttaataaaagtaacgaggattaagctattaccgaattgctcggggctaaacctctataaaaatcctgtgtctttttattgctttatcatatatttgttattataaatcatttatcgcttataaaatagactcgttgtcgttggctaaaagcgaggtcagcattttggtttaaatattaaaaattatattttatttagatatttagggattgaaattaaaaaaaaattcaattggtggaaaaatcacataaattcagatttttgggtgaaaatacccaactgcccatgaagaggctgctagcagccctctacgcgcacggagcaaggagtttttaaggtcccattgttgagaaacctcggcgcctgcagggtgttcatgggcgagatgtagcatcctgggcgaggggtcatgtccgaagtggtgtgcacaccgagcttctgacaagaaattgtctgagatccgcgcgcgtcccaacatcttgttcgagggtgtgtgcatgcgatgcaccccctctcgacacgatatgcactcaaaacttcaaaacaccatatatctttcaatttttaacgaaatcgatttctgtgaaaaccaaaattgcttaatttttaacaaggaatccaaataaattatttttagaaagaaataaaattatttttatggaaaaatttgtaattcacaaatattcatcaattcacacataaactaatatgaacacatccaaatcaacaaattcatcattttaaattcagacttcatgaaagtaaatcattaccatggctctgataccagttgttgaaacttattttaccaggatctacacttactaacatgatgttgattaacaattaaaatataaattctctaagacgataaaattaaacagataagagtttagaaaaccttacattgatggaatcaaaatactatgaatctttttgctcagatctctaactattgttcctttctatcgtagagtaatagcttggatctctttttctctttcggttttggttaaccaccatcttcgacactatgattgagtacttgacttggtatgtgtgggcatggtactctatcactaaaggcttgaatatggtgaagaacagcaagagggagaaatcactatagaatgagtctttgacaaagttagaaattaggtttttggttgaatgttgagttggatgacaatgacaacatcatgttccttttatagtatttcaactagagtttaggatttaattatatgaaataagaaaaatactgggcaaaaatacactctagtggtcggccacttaatgggactcactagttacaattttgtcacttcatttcaaccacttatcctttctttcaataatgtcatatttttaaatttcaatcctataaatgtcaaaaatatttatttattaattaaaattaccatttatcttatttattaattagaccatacaaattctcttaattaatcaataaaccccaaaacttctttccttcacaattaagcccctgcttagtgaaaattcataaataagatatagtcttatcttgaattataattatttaattaaaaccaattaacttagtctgtaagtattattatctcaactagtgtgaggaccatgagcctatataatcaagtttccaataagtagaactagaatttactaagtaaattctctaacttaataattcctccttgcgccactatagatttggaattatactcttaattatatagaatgctctatatgtaccaagatatagatacggtataaattattcatcgttctaatccaaatagttaaagatcctctatagatgatctacactgaatagggacaaacttaccgttccaaccttcaatgtattttattcttaaaacacttaggtggaattacttgagaggaatgaaaacataggaatgtgaattagaatgagaatgagaataggaatggaatggaat

SEQ ID NO: 312818 - DNA, 735 bp, Cannabis indica
attgtacatgtcggggcagttagccttggagcatacgatctttggaatagcatgttgtattttgtacagtcgcttgacgacaacttttgttttaaatattttgtaactaagttgtaaatatttaaaacacgagatcccaattatatatatgttatttattttgatatttaaaagtattctagaaagtttaaataaatcacatttttcgataaacccgttgattaacaacggatggcacaattaatataaaatcacgataacacgcctaatctagtaaggtgttacaatttggtatcagagctgccaagttgttttttgaagatcgtcacgacatgtaaaataataattagagctaagttcgactcacggttcagtaagcctttattgttttagtagtttgatttattagtatgatataagaaaatcctaataggaatcatgttactagcctaatagctgaataggcgcatgttttaatttcttaagtaagcggtaattggtaatttattcttgaccgcgatctgaccaggcaagtttgttgtttcgcgggttgttctattataatgaacgacaggcaaaacacgagaacccagggttattcggtcggatcaagggtcggtcagggagttcagttttcccccgaatattcatggccgaggtagaggcccaagaggcagggcacccgtccagggagatgttaatgttgggtttcatgacctaaataaaactcatttc

SEQ ID NO: 312819 - DNA, 2430 bp, Cannabis indica
aagcaaaaaagtgtgggttgacttttgcgtcggtcaacaagtttgacttacgcaaaaactcctttttgtagtgaaagttagttgttctcttgggtgaatgattttgttggcacttatgcacgtgatcaactcaagcagagtcgatttgaaaaggctgctattgatgtgttgtctgctatgactaaagttttaaaatcttctaagacttatcctgatgttcctgctgatggtgacttttctagttcttcagatggtgatggtgctttctctgtgcattccccagagatctctccatcgatatggatgtagatccatctgtggatatggaccatggttcttctatccctaagtctaatatatagcttttttctatgggtattgatcaaggtccttctagttgtgttgctgtccatggggagccagttaccgcagatgtctagggggagaacattatttttgatatccagggggagcaaggtcttgcaaatgttcagaaggattcaacaactgctggtgtccagggggagcattccacttaggggtgggcatcatctaatacaatcaaattgaatcgaatcaactcaatccagtccacttacaaaaagtttgatatccaattacaatgggatgagattggatgttaaaagttggattttaattggattggatcagtttttggatgtcaatctcaaaattcaattaaaaaccgatccaatccaattacatttatatatttaaaaattatttatataataaaaaatattgaaaatataatatatatttattatattttattagattttttttgtatgttgaatttgtaacacttgattgttttgtatatttatttttataatgttttgttctattttattacataaaaatgttgttgttttaattatttaaaacttttagctacattacacttaaaagaataatatatttatgacgtattaaacttaaataaaaggtgatacttagcttttacgtatttttattcatatttttaggttaatattgaaatttagttgtgtaattagatatccaattaaaaaaccgatccaatccaattcgtaattgaattggattagattgaattttgaggtctaattggattgatcggacaatgattttccaaatccaatcactaattggattggatcggatgaggaaaaaaatattgtattggatcggatgcccacccctaattccactgatgttctttcttctgttcctgattacgatgctactttagtacatgtttcctctacatctcttgttgcctattccagcaggagttatgatcatcgagggggagattaagtgtttcatcttttgtacaaatactctaaatattgttcatattttgggtttagttttttgtttggttgtttttgcctgtctattaaacttaaccttgtcagttggtaaactgtcttattgttcttcttttttattggcatttatttttgtgttttgttactttgtgtctctcttcctgaatattgtgcttggtcgttgatcataatttgccaaggggaagattgtaagtaccatgttttctatatggcaaattatgtggctttttactattttagtatattgaattctggttgctgtcttggcctattgagttgttcacctatgttggtcttagttgcttctagttagtctgatttcatatatagtttgccaagtaaacttttttaattcttttgtcttttattcaattcagtttgcgccaactggcttgaactgttgagttagttagctgagttggttttttcaaagtatggtatatattaagcggatattactttttctaactaactctcatttttagcatcttctagtgattcttgttctgctagggcaaaatatttttctgtgtttctttgattgtgactcgcagatagtaattcattggatcttcagaggttaaagaagtgtgaatttgcaatgtctgaagagagttcagactgatctgctggaggaatttcatcttggtggaaccaagtgcagcttgtcttcttggatctaagtgtgcttaaatccgtgctcttgattgttttcaagagttagttaaatcttgtgtaaagtcatttcagataatgttatttaatttgtaaaattagaactagtgaatgtaattaaacgatttatagtgaatattactttacccgattcttggggaatcaagccctactcgattggaatgtgtttttgatgcggaggaaacttgtaaatctggtgttcattgatttatctttctagacttaactcatcaagatatattgttaaattaattacttagctttcagaattaaaagtactttcagaagtgatgatattattttgcttattccaattaggacaatgttttgatatttttctgttattttgtaattatatttttattgttttaaaatt

SEQ ID NO: 312820 - DNA, 973 bp, Cannabis indica
agttacaaaaaacaagaattttgaaaacaacaaaatattattttctgttttaaaaaacaattcacttttggtcaatattgtttttaaaaaatactaaccaaacgtgacttgtttcaaaacttcaaaaattatttttttgttctcatttctaaaaatactttttttgaaaacataaaatagaaaacaatactaaacatgatctaagtaatttttaaactcttttattcgaaaacttctttaaaatttattatttatgctctgcatttataaaatattatttattgatctaaatatattttattaattgttttaaaaattaattttatttttacatgtagatatgtgtgtacattaatattatatacttttaaataaatataatatattaaaatattttttaataaaaaaagagattttaataatatattttaaagaatctgatataatgatttataaatgtttgaggtaagaaaataaaacaaaaagatgttttcgtgatgcatatttttttttttacatagtgattagaatccattatgaatttacgatgcagacatccacaaatatattagttgttccttaaaatcttataagaaatcatgatatgaattaataatccactatgtgttaataatcacattaactatattagaataaatttattcaataaaattgaaaatttatgggtgtgattatttttctgtacagtaaaaatttgtacattctagatgaagttatcagaataaatttttgaaatttctactattatagtagaaattttttaatagtgatgtaataaaattatataatcattaatgtatagttttgaggtttaaataaattgtatttttaccaatgtataaacatgcttaaatataaaattttattaaacaaaatttcccatgagctaaatttttaatttaataaggttagatctagatgtagattatgatagattttattaaacaaatta

SEQ ID NO: 312821 - DNA, 2020 bp, Cannabis indica
ctcttacaattcctcatcgattttgttcacttaactatgaagaatttccaccttattaacaatttgaatcttgttcatttccacttattgtaatttgtatcaatttcccttaaagtgacacaacttttaaatttccaaatcacttacagttaatcagcgttataaagtgaattattgtaacctatacgataaaggcaatattgctcataccgggcatccataactaaactaaaaatactcatttccttaattctcaactgataataattaatcagagatcattccttgatctccaagattaccaaacccttatctaatcttcttgctaatggagtgtcttttgagtttgggaaggattgccttaaagcctttcaaattcttaagtagaaattaattttagcgccgatagtcactacaccagattgggatctacctttcgaaatcatgtgtgatgccaatgattatgctatttgtgcaatattgggataaagggtttacaaggtatttcagactatctactacgcaagtagaactttgaatgatgctcaactgaattatgctactacagaaaaggagatgttggccatagtgttcgcatgtgacgaattctaacattacttgattggaaataaagtgatagtgtactctgacagttcagtaatcaagtatttgatgaccaaaaaggatgcaaaaccgagactgatttgatgggttcttcttctacaagaatttgatttagaaataaaagataagaagggcatagagaatttggtagcagattatctgtcaaggttggagcttgaagagagccagaacacaaaagaagtccagattaatgaggacttttctgatgagcacttgtttctgttagattcaacagtaccttggttcgcagattatgtgaccttcttagccaccaacattacaccaccagatttgacaaggcaacaattgaaaaaattctactcggaagtcaaacattactactaagaagagtctatcctctataagcattgtgctgaccaaattatcagaagatgtgtgctagaaaaggagatgttctgtaaagaccgcttagctttaatttggaaattagcagataattagggtttaattatagaaattatttattaattctaattattaatttatgatgatttatttgaattcaaaatgtattttatatgtcatatatagaaattttataattttgcatattcagtgctcggcaacattggaacgcggtgtttagaatttcccaaaaaaaccccccttagtgaccttttatggtatttagtatggaataggcaaaatggtcattttgtctcattaactttttgtcctttagtggactataaaggagttaatatgttgattgttagattaatattaacttaagttaattaataaaacctttctttatttcatttttatctaaaaaaaataaaaaaagtcatgaaatgactctctctctctctcttctctctttcgtgagccctagaaaccagcaagaactttgggttttcttcaacaattctgggtttagacagcatctttgttggggtttcaagcttaggtaatctttctagttcatctttttatggttcttatgttgaaagttaagaattttgcttgaaatgatgagtttaagggctgtagttgctattgttgtttgttgatgtattctgaaattggtttgtggttatttttgttgattcaagcatgttttgatggttgttagtagatttaatcaagttttgagttttagaactcaaacttggagcttgaatggtgaaacttgtttctgtgcatattgaggtaatttgttgccttgtttatgttctttgggatatatggaacaggtctggaaggtttggtgtgatttggggttgttttaagtgagatatgaaattttgaatctttcctgcattgaaccggaattctgattcagggggacctgtaacaccccgatttcccgagacgtcacacttactagtccgtttaaaaccatttaagataa

SEQ ID NO: 312822 - DNA, 647 bp, Cannabis indica
aaattaaaaaacaattcgaagctaaaatgaaaagaggtctactagatatccctttagaaagtgtactgtaaaaatgtcttaaaattaccacttttaaatcatacttcttaaatttttattatatgtcgttaaaagttctctcgaagcatttttactactcgcttatgtttattctgttaattttagtcgtaaatggctaaaaaaatagctatggcattaccatatcaattatttacgtatacatgtataaatacaactaaatctaataaaataattgataaagaaattttaattgaattatccatatgaaatttaacataccttactcacttaaattaattgcattttgttagtcacaaatgattaaaactgagaaaaggagcataattcaatactaggaatagttgggtaaaaattttaaaaaacaagaaagttcgggtacataaaaaatggtaataattcaagaaataaatcctatttattaattaataaatccttgaggcgtttggttgggaggaatgaaaatataggaataggaatgggaatgggaatgagaataggaatagaatggaataaaatttaaaatggataaaaaaattgataaaaaataattaaatttttttattgttacattggaatggtcattc

SEQ ID NO: 312823 - DNA, 1294 bp, Cannabis indica
ctcactgttcgacgttgagtttggtccaaacgaagctgctcggatactttgggtggaaatctcacaacagacttaaagtgaaaacctcttttttgctttgagttcactcagtggaaaagttggtaaaagtggatttgtgaacaatgctcagccctatttataagcaaaaaaatgaaaaagggtaatcattttaaatgccttagacgcctcggttccccccaaaagcaaatatcgagaatcaaatgtaatcaagtatagccgtcaaaacatggtgagagaaaatcgggtttcaaaacattaattgcggcagagcattaattagccaaaaattaaagagacgcctagtcagcctcacattgaatcgcgaacagatccgcttgacatgtgtcacccatccaaatgcaaggacagctcggatgaagtctacaagcaactttggaagtcccgtacaaacttaggggcaaatgttatcccaatttttgcactctgacatggcatcacacgatggtgacacgtggaatcaaccccatgcatctgctcgcgagaaatatgccgaacaggacaccacatacattcgctcagacgaagtcctctccaccgagcagcgagcaatccgcccagcatgccaacacttagcaaattcagctttcgcattgtgagtcattgaagaaatccttataactttgggatcagatcacaagctgtctgaatcccttgatcagggtattttgtattaaatacgcaatctttctgcttatattaattgtaataagaagggaaatacttccctcccaagcttaaagccctataaatagtgattcatacgcactgggcaaagggtcgaaaaacttgtctacgaatttatattcagagatattattgtaagagatctaagaaaatgaaccattttccttgttcttaaatcaatacaaactatgaggattaggctattaccaaactgctcgggctaaacctctataaaaatctcgtgcctttatttgctttattatattatactctataaactatttgtcgcttacaaataagactcattgtcattggctaaaagcgaggtcaacaggcacaaaacctaacaaagtcctacttgcactaatataaaacaaaaagtgcatttcaaataatcttaacaccttgatatccagatcaagtgtagtatgtagtatactctccgtaataggatctaacaggttgtattcaatacaacctttcctccaccattacatttccttaatcacaaaataccttgatattgttgaaattcctctctatatgt

SEQ ID NO: 312824 - DNA, 1134 bp, Cannabis indica
ttactctaaagtaaatttcacaagagaaagcatgcatttaggtgtaattataaatttataaattaattgagtaatatttttttaattttaaatttatttattatatattttcaacttccaatattatataatttttaattttttcccatacatttaagttatattattaaaagaaattggtctctattttatttgatttatgatttagtgatgattttcattatgaagtaaatggtcaataagacaataagcatgataacaaaataattgttgcaaaataatacaataacagagaattgagtaattatttcaattatttgggaggctacggtaataataccagctttagatgaatagaatgtgccaataaggaagatttacttaacaagactcatagcaaagtgagaaaaaaaaagtagaaagtgatatgtaaggtaggagaactattcaactatttaattctctatttacttagttatagagaataattatttgtttcagatctacttaatgaaggaaaaaaataaaaatatcaccataaactttaaataattttaaaaaaatcttaattcataaatataattatttaacaaaaagtaatattattgtataacaataactaaagtttgaatgataaatcaaaaatatcacacataatttaaattcaaaaataattgttgttattttattttttgaacaacaaagtgaccattgttcaaaaatattataattattttagggatttttttctttttatatttttacgtatttaattttttttaaaatgaaaataaattattttcatgttgccgcaacacataatattttatttatataacttaaaattttttataaacaaccgcgcaaattgtttcctagttaacgtataaaaataggggaaattatactttatactttttttatattgtcctcttttacttttatctttttttttttacaagtttgcctacaacacataatattttatatgtataacttaaaaatttttataaacaaccgcgcaaattgtttcctagttaacgtataaaaaatagaggaaattacactctatacattttttattattgtctttttttatttttacccttcttttttaaagtctatcattattac

SEQ ID NO: 312825 - DNA, 883 bp, Cannabis indica
tgaagcattgccaaaggggaggagattttgtcatagtcggtgccttctcgctatgtgtagcctttggctacaagccttagctttaaaggtccttaccttccctacactctcttcttattcaaaatccacttacaccctatggctgtaatgtcctcaggtggagagccaataggaacatccaagtagaggacggtcatgagaacctagatgtgggaagaagtggccagcccaagacaacctccactaatgagccactaaagaaaagagagtttgatcaccgaggagatgattaatgtaaaaaattcaagaaagagatgaacaacagtgctgtgaatacacatgctacacagagttgaatagcttaagagaacacattttcttgactattgactgccgcgtacctttcaaaaaacaatccccatgaagaaagattggcccagaaggtacctgaacaaatatagcaagttccacaaggaccttggacattttacagaggaatgcaaaaatctcaaaattgagattgaggagttcatacagtgagggtacttgggcgggtaccacagacagattcaaaggtccaaggacaagtgacaagaagaagaataaaggaaagccaaaaggaatgaggtattgtcacaagaaataagccactaagatatcttcgtcgtctcacactttagtttgttatgaatcaaggtggaaaccccttaggtgactctaattgtcatgtttatcttttagttcattgtaaataagagaaactcccccataaggacctttggagcccctttattgtataagcgtgatgaaagaaaaatgatatattggatttattttttgtgtttagaagaatattttaaagtggatgttcagtcttccccat

SEQ ID NO: 312826 - DNA, 689 bp, Cannabis indica
ccatcttaagtatcgggagatatacttttttttagaatagtcagagatgagtaaagagtatattttatattatataaaatgtatggtatataaagtaagtgtccctattttgtcagggtaagaagtggtagagaaaatgcctcgagccactgttcgagtaccaaggcgctacgatgctaaaataactcatgccatactctcaggaaaaactcgaatgacctacaacaaaagggtacctgtactcaaaaccgacacaggtaggtagctagagaatacctatgggcgcgagacaactctctctaaggtcaattcaagcattaattttttatgtgattatcaaaacctcttttgaattatatattcttagatagaaaaagtgcatcaatatcaattattacgagataaatgtgtcataaactaaagagatggtgcatggtgaagtttctgacttatattccttgcttttattaaacatgtgacttaattgtccgttcataatcaaataccaataatgtttgcttattttcaggctaagtttagctaatttattatccattattttatgaatcccaagtcattaggggtcctacatttgcataaaataaattagttattgacgtttatcaacttaaaataagtacataatattcttttattaatgtatttctttcaaattattattattatta

SEQ ID NO: 312827 - DNA, 635 bp, Cannabis indica
aaataacatgctaagtttatataaatgctctaaaatagataaaactataaaacattccatggccatataaaattaacataggcataggctggtggagaataatatctatgatagtttatattgatgatgatgatgaccgtacaatagttcccaaaagtacaagaggaaaaggcagcaaaataatagataggtttgatatgttctttcaagcacttccatttccatccatttgtttagaatgagtcacttatatgtgtaggccactaattgtaagagtgtccatctaataatagtagcatatatatctcggagctgtacctctatctctctaccatttacgttgaaactcaaactcattgtttgggccacatttcaatcaagcatcatatcttccttattattattattattattattagagtaattttcaatttagttaaaattttggggtataattctttagatttcaattattatgtttgagtctctacttttctattaatttttgaaataaattgaaaagttatcttttttatttatttatttatactctctaatatataattgggataatttcacaaatgcacaaaaacaacaaaaaacaacaacaaaatacagtttcacggaattttaaa

SEQ ID NO: 312828 - DNA, 1082 bp, Cannabis indica
tttggacctgtgaccaaaatgtcatctacatacacaagtaaaataaccaaatttgcaccagcaccatagacaaaaagtgatgcatcagaccttgaagtagtgaatcccttctttattaaagtggtttttagcttgtcattccaagcacggggtgcttgctttagaccatagatagctttatgtagcttgcatacatatgtaggtctgttagggtcttcaaacccaggtggttgaggcatataaaccgtttcttgaagattgacatgaagaaaggcatttgagacatcaagttgggtcatctgccaactgagagagacaaccaaggtgagaataattggaacagttgtaggcttaaaaactgggctaaatgtctcagtaaaatcaatctcaggtttttggtgaaagccctttgcaacaaatcttgacttacatctgtcaagggttccatctgctctaagtttcactttatgaacccatttatttccaaccaaatgcatctcaaggtggtaaggaaccagagtccatgtattgttcttgatgagtgcttggttttccattgacattgctgcattccacagaggatcagctaaggcttgttttagagatttgggttctgttggtaagagagattcaaggagagggtgacaggtggaaatgtaagcttttggtttgtgtatcccacatttagaccttgtttgcatagggtgattgtttgtaggggttgttggggcagagaaatatgttggtcagctacaggtggtgttgtactggggactgttgggggttgtgtttcgggagaggacatattgttaccacatgcagaagttggtaaggttgattgtggggcatatggcatgtcaactggcagaggggattgattacttgtggatgtgtgtggtgttgggcagcagtattgtgttcttcagtgtcagatgagaaagaggtattagttgcagatataaatggtaatgttgtgaaactagttgaagcaacagggttaataagagaggatgttacctgagtttgtgataatgcagcaagagcaggaaatgttagcccaagatatgtttccaagagggggg

SEQ ID NO: 312829 - DNA, 1759 bp, Cannabis indica
aaaagaaagaaaaagcttgaaagaataggtggtatggtctgttatgctcaatttaaatatgaagatctttcaaccttttgttttatatgtggtgttctgggccatcctgaaaagctttgtgaaagactctttgatactcctctggagcagatagaaaaaccgtatactctagagttgaaagctctcccaagaaggaaaagccataccattggcgcaagatggcttcgatctggttctttcaacaacacgagtggcaattctacgatgagaactccggcgactaatactgatcatggccagagaaacgacggttactttcccggtggaacaagagctgggggttcagggacgaaaaatcagggatccacaatcaataaaccaattgtcacggaggaaattgaggaggaaatcagggtcatcaatgccgataatggaggaaagtctactgaggctaatagtaatgatacaaggggcaaatctttggctcatgatccagctggtgatataaaggagtataatggggaagatcctttattaatattggaaaataagaggagaagaatgggtcaaatacctttaaatggaaacaaagaaagtcttggtttgggccatcacaactttggcccagttgttgtgtcggatcagggggtgaatattggtgatatggactttgaggaggaaggaaatgttaccacaaaaaacttgtttggggcgggctctggtttccaggcccgccaggaattatgaatgtcctaagttggaattgccgggggcttgggaaccaacgggctgttcaattccttaaagaattggtaattcaaaagaaacctgactttatttttctttgtgaaacaaaaagtggtaaaagtaaaatggaaagtgtgggccgaatacttgaatttgatggagtctttactgttgaggcccaagggagtgctggtgggcttgcatttttatggaagaatcaagataatggtagcattgtgggcttttcaaaaaatcacattgattttttggtagagtctccagagaaaggaaggtggcgtttaactggggtatatggtgaacctgtgcgtgctcaacggcatcagacgtggaaccttctgcgttttcttgccagggactcgaatttgccttggtgcgtgataggggacttgaacaatctgactcggcaagaggataaacgtgggggtcgaagatatcctcagcacttgttggatggctttcaggcgtccttagatgattgtgggttggaagatatgaatttgatagggcatccattcacgtgggaaaaaggaagaggaaccactgcttgggttgaatgtcggttggaccgtgctttagtcaactccctttggtcccaggtttttaactctgcttctctctttaatattgaaatttcttcatctgaccattgtccattatggctggaaactgaatttcaacaaactcatattccaaacaaaaaatttaaattcgagaatgcatggttgaaagagcctatgtgctatgaaattgttaaagattgttggcatatgggggctgctggtctcatctcagaaaagttgaagttgtgtgccgaaagtttgggtgaatggggtaaagaagtaacaggcaacttcaagagtagaattcgtcattgcaagaatgaattaaaagagttgaagaagtaccgtgatcctacttctgtccagaggtatagtgaggtgaagaagaaattatttttgattttagatcaaagagaagccttttggaagca

SEQ ID NO: 312830 - DNA, 941 bp, Cannabis indica
tagggttttagtttttgggaccatcctagtgcaaatgggacaaaatttttattggatcatcaaaatcagattcagagaactttgattttgagcactcggtgcctgggcacccagcgcctaggttgacaatttgccaacctgggccacttccaagcatcagatcaaaaatatgactcttgcatcttcttcatcttcataaaaaataaggaaacaagtgctttcaaggaagaaacaagccaatataggggccaaaataaaggaccgacacctaggttgacacttggtgcttacccagcgcccaagttgacattttgtcaacatgggagaattttgaggagtttttctacaaattcttatgggcatattttgtatttttatcaaagattaagattcaactaattccggggagaaaacagattttttaaaaggtcttaaactggacccagcgcccaggttgacatattatcaacctgggccatttccaatcctgcttccgaaaaagtgttatgggcatttttttgtcattagaaataacgaagacacaagtaaacttaagaagaaaaccataattgcaagggcttcaaaactcagcccagcacccaggctaaccaggtgcgctggttatgatcactcaaatataaatactgctatgagtattctatctgaaatggtcaaaatggggtaggagaccttatcttcaagttcaagaaccttggaagtgtcaaaaagacatctcataagctctgaaataagaacacaacacctaggttgacaaatggtctggtacgcttgtttctacttatcaaattctaatttgtcttgactgctcgtctacttcataatcactacgggtgttcaacaaaatttacaaactgcccaacccgaataaaccgcccaaaccaaaccgaataaaacaacaaaaaatacaacccgaaataata

SEQ ID NO: 312831 - DNA, 715 bp, Cannabis indica
gcctaaagggaacctcctatactatgacacgagtgactggaactttttagaataccttctgactggtttgaacttccctaccaggttcacaaattggataatggtgtgcctaaagggaacctcctatactttgatgatgaaagggcggcttcaagggaactttaaagggaagaaatgtctaaggcaaggtgacccgatttcacctttgctctttattctaataatggagtatttgactagaaggctcaaaatgaaggctacggagaaaaccttcaggtatcaccctatgtgcaaaagtctaaacctaatcagtttatgttttgctgatgattctcttttgcaagggctcaaaacaagttgcacattacattaaagtgacacttgatgattttagcaaaacagcaaggctggttgctaatttagctaagtcccaagtgttctttgggggtgttcaagatgcagataaacaagctattttggaagacattcagctagaggagggtaagtttcttcttcaatacttaggggtccctatgagaccaactaagttgaaaaaagtagaccgtgaaatcatcattcaaaagataaagcaaagattgatgacttgggcaactaggcacatatcctttgcaggtagaatacaacttattcattctgtgttgttggatcttctaaactactggatgaatattttcattcttcctcaaagcattgt

SEQ ID NO: 312832 - DNA, 519 bp, Cannabis indica
gttaataataaaacagaagtatgaaaaggaaagatataataagtttatttatttgactgaaaatgacagaggttgaagtaacttgatgttcttcatcttcttgttatggttaaaaaagatctgtacttacattgatttgatccgaaaattgaagttgaagatttaggtttgagtttgggtttgggattttgagtttgagctttggaatgtggtgagtgaagaagagcaaagcatagctgcataggacaggtttaagagagagacaatgtactgtgtactttgggcagagagccactatttcccaatattttttaatttttttaattccaaaattaacctaatctcattatattaattaggacttttgagtttggctcctaaaatattaagcattgttatcaaacataaataagtggggatatgattttgtctcgtaatgtacttttacggaatgtatttattgatacattagatgggtctcagggtatattaaatgagtgtcaaggtacatttctactt

SEQ ID NO: 312833 - DNA, 2153 bp, Cannabis indica
agaattataggtccatggttctcgaattgccacctccaacactgtcaggggatggacaaagagttctataatgatgttcgaaaaaaattattttgaattggaaaaatagtaattatttattgttgtaaaaaaaataaagaaatttttcaaattacttaaatagcaaaaagataaatattgttaagaaaaaaaatgttaagacaatatttgttgagacaaaagttatcaggataaaagacaccatcattctcctaaacaagacaaggtagacgcctatgccttatggaatttttaattaattaattaattaattcaatcatatgaatatttagatttgataagttgttgttgttaaaatattctctcaagtagttgatagattctctcataaatatgagtaaccgaattcagttatagacatttatttatttaaataattaaatataatttattaaaatagttttcaactactataaatagaagctaattttagaaatcagagatacactttgacatactattttcaattttctgtctcaattgttcttgcttaagtgttgagaactcaacaagaacaacattctacactttatcctaataacccacatcttgtgtgtggtggatcgattttgaagacactggtgtgtgttcaattacatcatcttcaccatctggattaagggatacaacatacaagaagtttcaaggataccttatatattcttaacatgttatgttatgtttttgatttaatgtacacacatctagagatccattgtattatagtacaataataattagataatatataaaactctactctttcgctgcgtacctgatttagtaccatgataatcaataaaaaaatggaacggtcaaagctttaagggaataaaggatatcttttaccaagtgactaaattggtgggtttgtgaaagatcttagtaactttgtatactgctattattagtatcatctggtgacctactagatatggtaggtctatcaagtcagctcccaagttagctagtccagttttctaacttggatacccctcttattgagttacctatatagggctttgagttctacttcttgaggtaacgatctagagaggaatttagatgacaattaagtttgtaatgagtgagaatgtttaaaagaatgtgtgagtttgatcacatctctctcaagtgagttgatttgtaaggtgcaagacacccttgtcgatgagattaaactctatattctactctatattcctccattgttgaagatcgaataaagctttgccaaagagcaattcctcccagggattagtcaccacaaaaacggtgatgaacctcgttaaatcttgtctctatttcatttagtttatttcgatttattccgcatttcatataattgttcatgtatgtttcatatatttatataaatttttaacaaatatcgtgttttttgtgcttcgcacttcgtgccatttcatgctaatctgtataattgtgtggttttatgttcaagtcaatattttttcatatctacttgtattcgtgttaattttgtgtcatatcaaaatttaagcttgtacttataatattaatacctaacaataatgctcaatataaaattatcaacccatctaaagaagggcccccaccaaattctagggtgagggtgatttataagaaaaaaaaaattaagtagaggatttttgagggttagaggtcgacatttgatgatatgagatatttgggcaatgactttgtgcattgtacgaccgactggacccaaaagtaactgataagcaaacgttgattgtttgacttatgcgtactgtattaacatgcaatgcatcttaatttgtaaatttaactctccttctctttccattatttcatttcatcatcttcttttaaatctttttctgtcttgagaagccaaatgcgagcactaataattttgaaaggtttcaaaaagaagagatatgttatgtaaatgtatatgattctgaccacaagacgtctttttcattcacaactttctacatgattagacttttgtctcatttgcaatcattatttttcagtttccacatatataatttctacaattaatttagtacgttttggaattattgtctctctctctctct

SEQ ID NO: 312834 - DNA, 765 bp, Cannabis indica
taaaaataaaataaaaaagaatacataattttggtgttgttgtgattagaatgaaaaaagaactttgttatgaggtatcggagtgtctatcacctctatgacatgacgtcttataattagttagtaattttttataatttttattaaattaaaattagtgagatccgatattaaattataccaatagaaatattacacatcataaagatactaggcacacggatgccttttaatatttctcatgaaaaaaaaatatagtgttatatattttaatgttagttgaacagaatatgatacactcaacatatactaaatttacaaaaattatcaaaagatataatattgcaaaaacacattaaaaagagcttagtttaaccatacttttattctgttaagtgataatgatgctacaaaagcaatatttggacttgttttttttttaataaaagaaaagtgggtgaggtttggtgagatgtgttagtttacataagaaggcatgcatattttgggtttgaaaggctcctcttccaatatttgggcatgaatttttctgggatatacataagcatgaaatatatatatataagtcatgatcaaatgaaggcatggtttttgtttgtaatatatataataaatcatcactttttcatgtgtagctactatactgttatgtctttaagcaagctcttcataaccttgccgaccaattctcatcacaaatatatataaatatatatatatatatataaaagtatatatatatat

SEQ ID NO: 312835 - DNA, 2721 bp, Cannabis indica
gaaccaacttacgagcagatcagaaggcaaaaactaaataaaccaccaattgtgggatggaacttctagggtgaccaggatagcggtcaatgtgagactaaaaaatggcgaccttatcctgagtgtttaagatgcaaaaatgtaccatttgagccaacataaagccaaatcttgttttattgtagaattccgggtcatctaaaaagaatctgcccacaattaagaaagattgatgttaaaatagaagagtatatgggtccaacccaagtgccggttatgactcaaggggactcgggtatcggtccttcgaccgattcaagttagaattttatgggcaatattataagtattgtttcgattgatattgatattaaacattatgcattcagttagagaaatctgaatggactgtgcatgtatgttatttaatggtagctcatttgacagggtagacagattagaggaatgacagtatgagttaaatttgatgttattcccaagcgaaacatgggacatgagtagccaatgcaggcatcgacttaattgattcagagaaaagaatctttttgtttagaagtgatccagtattggtaaaggtgggacaatttatgagtattgtctggaatcctagatgaattaaaggcaatgattatgtgggttaacctattcactacgaagggggaaaaatgagatcaaagggggcatgagtcaaactgtgacagtcagagtcccgtgatctataggaatagtctgggagctatacgatctcacatcgccttggggaatgtcgtatatgatgattctgacactatgtaggtatgggactacatagttgtaagggatttgaatggattgattgggactacctaaattagcaaggtgtatcttgtttttggtagcctatcacgaaattttttttacggttagtccttgatctgaggtgatgtcatttcaggaatggcgagttcctaggaagttttttcaagaagcttgggagtcagaacaaagcacgttaggaacactcgagttgacttgaagggtcagtgatcaatccaggacgtagccagagtgacgtacctgtatataaaagccaatagtccgtggagagaaggcccaatagaagcttgaagtagggacgttacaaagataacgtataacagaacgttagggagaatagtgatatcactaaggtaaagaagatttcttaaattattcatggtgatgcagtaatgatagagaatactcttatatttgaccgaatggacaatctgttatacgaggtgactattgaaattacaaaaaaatattgtcttattaagtaatgatgaacatgtatgctcatccagaatgggaaaagcttataaactaagatgcaatttaatggacatgtattcaagtggttggtgaatattgaatcaaaaagtaggttgtttattaaacaacgaaatatataattgagtgtaaaataagttttagagtagttaaccaagtatgaagatagtgatgattgcactttggataaatggttgctaaaatcttttcaaacccatagaaaaatgaagttgtggttgtggagaatcgttgggtttcagtttgtcagacccgaaaaaaaaatcgcagacactcctggtttttcactcgcagttcttttgaaaaaagtattggaaaccacgagaactagtcatcaggtctgttggtctctctcaacactctctcctccttctacgtaaataaacacctcatttttgctgcaatctttgatctacaatcgatctctctccatcaaccaaaagtatctttaagcctttgccgctgctcagaaagccttggattgcgtcgaggtcgaggtcgaggtcgaggtcgatgcactcgccgattactgcgacaagattgccaaggctctctccacttgtactacttctacaagcaacatcggttccaccaccaaacacctcaagtgggagctggatgtcagcaatgatgagatccttcgtgattatcagctctccaatgatgagatcacttctcttagaatgatgcatgaagagagatatgaagggatttaattgactgcgagaattttggaaagcaaattaaatatggtatttcaaaatattttaacaaaaatatggtatatattaacccataaaaaggtaaagattgttaaaaatccatagcttaaatgaattaaaaaactgtcataaaaaaataaatttttcctataatttatgtaatttctactaataaataatttaaaattaatttataaataaaaaataattaaatttaacgtgtatgctacattattctcattataggatatatgagtttttataccacatactgaaaattttcattttattttgtatggtggggtggaattttttttcaaaaatactatgcatttttttatactgtgtactgtgttaaattttcattgttgttccaatggttgttttttaattgttccactgttgtttttaattggttctattttattgttttacaattgttttataaaaagataacactaaaattataatccttaagagtttgaggtattatttagtcgtaatatttatgagattacaaataatgttgtacttgtgcatgctcttaagggtgtgcataaatcaatccaatccaatgagaatcgatcgatccaattacaatcgaccgtcgaaattggatgtccaattgtgatcggatcgaattggatgt

SEQ ID NO: 312836 - DNA, 925 bp, Cannabis indica
tagtatatagttatgttccttactgaattcgtcacaaaattgtgtccatatggttctaaaatgtgatttttgttacctgcttattagacatccagggttaaattatacatgcattgaaattgaagttaaaattctgacattgaagaatatatagacaccgtaaagttgtagcttgtatgtgcattaatatgtgctacactgccgttaaaattctgacattgaagaatacatagagaccgtaaagctatggataaaggtgttatgcttaaccgaaataaggtattatatattgaatttgactttatttttaaacatgcttactatattacttttcaaaggatgctgagaagaatggttttcacttttacaggtgcatagagtttgtgcaaagagataaattcttgacatgttggatcacccttttcttccagcattatatgcttcatttcaggtaataattggtactttcagaacttggcagtaacaacttgatcattgaattttgagttcacttcttagtacttcatgaaaatgtttaagaacattgaacaaataattagttggttttaggtggaattccataattttgaacatgatattataattttattatatcaaatttggatatttgattacttgtaattgatttctggatgaacccataattcttaacatctcatatcattacccttttaattaatgtacttatatatttttaatttcaaatattttttactgaacctttaaattcctttgttcgtaatgaagaatattttttactggccactacagtttgatgatgttggatctagtcggacaaaggtggaagatgatgataatgattaatgttttatctttatttagtttgtattttaattatacttttaatataatgattaatgttttttatcttttgttttacagt

SEQ ID NO: 312837 - DNA, 840 bp, Cannabis indica
taatgcacactaccactactttaaaaatcacttaaagaagatttagaagaatattttgagagaagatgactagcaattttatttagtagaatgctttctcttacaatgaaaaggatggctctatatatagccatttacatgggataggatataaaatagaaaacttcctataaatatcttagaaatagaaaaacatagaaaagacaaactgacaacaaatagataaaccaacaaaatgacaaacatagaaaatgaaaatctgaaaacaaatggacaaactgacaaattgacaaacataaaaagcgacaaaccaaagaacaaatgattaaaaaaaattcttacagacatcatgactatcaagaatttttccacttattgttatcttacaaaagtaagaaatatggaatcactttgtactacacttatgagcggtcgataattgcctcgtggtcaacattatatcttagtcataatttgggtcctcctgaagtgggtgccaatctgatggttcattatcttcatcacttctagctggtggacatgcatcatattcagaataaataatctccgattctagtgcattgcactgaaagagatagggatcctgtttgatttcttggtccatgtatagatcttgtgaatcctcaaaatttcttgtcttacggagtaggacccctacagtgtttatttctttgaatagtgatgaaattttcttctttgcttcaggggcttagacctgtctgtgacttattttttagaaatttggaatttttcaagagtctttgctatgcatcgttaataatccgaggaaaaccttttccatggggcatcatcttctat

SEQ ID NO: 312838 - DNA, 973 bp, Cannabis indica
atatttgtttagttttgaaaccaaatcaattataatccatttatattttatgtatttttatatttaggtctaaaacttgaatacaaacatttgttgggtaaattttatttttatttttgttttcaaagaatgagaaattaaggtgagagaaatttggtgaggctggctgagttttgggtctgtcttcaaagctggagttttaataagtgtttttttatttgttcaaaatttcattttagaaataaaaaattaaatagttttgtattttttttttgacaaaagaaatgtattttattcatgatcggacaaattatctactaaaatagtttgaaaaatagtagggacaaaccctcaccatagtcacgacttgggaaagaacaagcgacagtcgccaaacaattgactgacttgttcccagatcgtttaataaaaacacaaaaaacattattaagatcagagattaaagtataataatcaaaaataactaaaccaaaatgagataataactgagtcgaactatacagagcatcaatgatgcttttacaatccgactcaacaacaacttgatctaggtcctgttctttgatccagctcaaagtttctttcaacccaattgccttcgccaaaaaaagagaggcatgatcatgcaattgtttagagcaatgataaaggacaactctatgatgatgacgggccaaccttccaattccaaaataaaaaggcctagacgtgatagaggaatctacattgactttaatcatatcaatactggaaaccgaccaatgcttcacatgaacacaagaactggaattcattgtgtttgcagaattttagtgagcgatcatccattgattaaagttagacaatacagaaaccaccactccatttgcagcagaattttactttgtcaaacaagtcaatttcttgctttccaaagagaccaacaaatcatcgcaacatgacaaaccaaagt

SEQ ID NO: 312839 - DNA, 684 bp, Cannabis indica
aaagagttttatttagggcataaaacccaacagctctaacattcttcaggccaaatggcattaccttgtagtagtacacacctttatctgcctgaaagttggtgtgttcttcactagttatatgcattttgatctgattatatcttgaatacgcattaatgaagcttagcaactggtacccagaggtggcatctaacatctggtctattcgcgaaagagggaaccaatcttttggacagaccttgttgaggtccatgaagttaatacacatcctccatgtgccattgggattagggaacaaaattggattagccaaccaaataggatacaaggcttcccaaaggaagtcattcgtggtcagcttatccacttccactttcagtgcatctacccttaccagatgaaagggtcttcgcttctggcaaactgttgttgcatcttcgttaatgttcaaagcatggtagatggtatttcgattgacacctatcatgtcaaaatggctccatattagcacatcctaatttcttttgacagtacttatattgcagctttcaccattgaggcaagcttcttcctaccttggtagttttggtggggtcatcattgtaaatgctgacctcttctacatgttggaatatgttttacctggatctagatttactaacaagtatgtttcattacatc

SEQ ID NO: 312840 - DNA, 2496 bp, Cannabis indica
ataaaataataaaattagtgctaattgccttttctaatcatattactagagcggtcattacaaggagtgtgcttattttttttcttattactttttaaattttttcaactttttttttcacaccaacttttcattataccccatcgcgaaccatacccaatcaatcaataaaaaacgtatagcattattcaagagaatggaatattaaaagaggttcaattaggcttaaatgggcttcaaataaataaaattgttaattttaagctcaaaaagacaagttaagaattaacataacaaaagttggcttaacaagctcaattattctaaagaatgcctatattatattcctaagcacgtgtcttctaggatttcattttaaatacaaaacaacctagttctaagataattaccttttcatttcataataatttttttcttcaaaaaattcaacaagaataaaaactttcaaaaataaggaatttattcgaaaatcatgattaggctatcaaatatttacccaaactcatttgaacgaaataaaaaattcaatcaggaaacacaaataatacgatggcttgtttctatccaagtatgcaaacaatatattcaatcacttttctcagcttatcattatcaacttgattcacataaaaatacaacatcctaaaaacaacttggcttagcataaaggaaaaactaaaaataaaaaaaaaatcaataaagcacaaaactaaatatggactaacctactatatactaaaaaataaaggggaggcctagaagtgggccctaaagaacctgcattagagaaaagacttgcaatagaagaagaagaagggcctacagtcccaacatggttaataaaatagctatcataagtccttagatataattttcatcaaaacaccaacttccttacacaagctaataatcaaacatgggaaagtcattgaatttttaaggtgataaaggcattatgagtatgggtggaaatgagtttcctcacatcattagctttacctattaagataacataaaccaatacttccatgtcaggagttacattactcgcacttgaagtcggagacaaattggaacaaagaaaatgcatctaaacacgtcttagttgtaatgatcgtataattagacatgaaaattagtagattattagtgattaaatctgtaaataccgcttaattttagtatagataattagggtctaatttagaattagacttttagttatgatttatgaatttatggagatatatttgaatttaagtgtgttatttgtgttatacatgaattttaagctttctcatatttttatccccggtaacgtggaacgcggcgtatggcctatagagtcactttagtgtagtttagtagttttacaatagcggggcgacctagttagacatttggaatgtcgatagttagggttattgtgttttattatttgcccctaaagtcatcttaccctttcgttatgtgtgtggggggtattttagtcatttttgacttggagcttaggtggcacctccttttctctgcagctggccactaaggaaggagaagataacattggattatctttagtgggaaattaagaaaaaagaaaagaaatattagaaatttgttttttagtctctctctcttgtacgattcaactagggaaaccaggggtaaatcaattttctttcagcaattcagaaggttttagcaaagtttttagtgaggtgattttagtgagggtaagccttaacccttatgctcccttcaatttttgaatattttaattagtttaagcgtgaaattttttgatgttgttattgtagggcttgaatgaactttagtataggtttttgatattattttaaggttgttcatgcttgttgggtgtaaatttgaagcttggttgtggtgttgaccatgtttgagttcaagcactcaaacttggttcagccatggtgattttgtattactatgttttttggggttttattgcttgggtatgattcattataacatgtttaggtgttctggagcttgttggaagatttggggtagttttggtatgttttgggggccttttgtttttctgcaatgaaaaacggcaggttgttgctgcaaaaacggcctaccatttttcttggtgtagaacccagaaaaacgaactgccgtttttcaggtaggttccccatttcgtagttttctcttgttttcgcaatgcttaggactttttctttttagatatcgaaggggaacctttatttttgagtttaagtccctagaaagtaatttagcgtatcacttctcagttttacaaatattgtgatttaggggcctgtaaactgttgaggagttgttccacttaggttgatcgacacacctgaattcagaatcgaggtaagattaatgtaataatattcatatgtgtttcctgttaggttttatgccctaaataaaactccatttcaatgtaatctattttat

SEQ ID NO: 312841 - DNA, 1908 bp, Cannabis indica
aatgcgtctgccaattgaagagtgcttgagactagaatgagtcgaactttggtgttgttgatcttgtcatggataaaatggcagtcaagctctatatgtttagtccgttcgtggaaggtaggattgttggcgatgtgtatagctgattggttatcataatatatgaatgttgacgagtgttggggaacttgtaaatctgaaaggagatattggagccaagtgatctcacttgtagtggctgcaagagctctatactcagcttcggctgagcttttagatatggtaggttgtttcttggttttccaggaaatgagacagtcccatatgaatatgtagaaacctgtagtggactttcttgtcacggggcaggaagcccagtcagaatcagaaaatcctcggaggttgagtgatgaatttgtcgagtagagaagagcttggcttggacttcctttgaggtaacggattagatggtgaagggcctgcatatgtggggtacggggagcggacataaattgacttaagttgttgacggcgtatgtaatgtccggtcttgacaaggtgagatagagaagtttttcaattaattgcctgtactctgatggatttgtgagaggttctccttgtgtgtcgtcgagttttgtctttggatccataggtgttttggttggtttgcagccaatgaagccggtatcctcgaggagttgcaaagtatattttctttgagacatgaagagaccttccttggatcttgctatctcaaagccaaggaaatatcttaagtcccctaaggccttaagtttgaattgttggtgtaaggaattctgaacttgatgtaaggcttgtaggtttggacccgttagtattatgtcgtcgacatagaccaagagggctatgaaagtgtcattggttcctcttgtgaatagggtgtaatcggcttgtgattgcttaaatccttcttggagaagtgcatccgtgagctttttgtaccattgtctcgaggattgcttaagtccatagatagacttttgcaatttgcagacaagaggaggacctttgtgatcagaattagacacttgtaaactaggtggcaaggccatataaacttcttcattgagatccccattaaggaaagcgttgttgatgtcaatttgcaaggtgtgccattgttttatagtagagatggcaagaagcaacttgaaagtaaacatcttggccacgggagagaaggtatcaaaaaaatcgagtccttcttgttgagagtatccttgtgcaactagtcttgcttttagtctttctaccgaaccatcgctgttgaattttattttgtagacccatctgcatcctattgctcttttattcggaggtagaggaacaactatcgacattttgttgttctttagtgcagtgagctcattatccattgcatctaaccattgttgaaactgagtagcttgttgataagattgtggttctttgagagaagtgactgcaagaatgaaggctttgtaagattcggttaaccttgcataagacatatatttattaagagtatggggagaagagattttgtcctatatgtaagaataacactcaaagtcacgtagataagtaggaggttttgatgttctgctggatctcctggggcctgcattttcattttctgcagcaggctgagatctggtttctgtgctgagaggcagtggcaggttcttcaatgacctattcaatttcttggataggagggctgtgactttgatcacctgttgtactaggaggatagtcacttatgggagaattagtaacggtggaagaggggagaactaactcagaaaaaggattaacattagtaatactttcattaatttagtgaaaaggaaaaatattttcatgaaaaacaacatttcttga

SEQ ID NO: 312842 - DNA, 919 bp, Cannabis indica
tgaaaagccatgaagcaaaagaccaccattgtctcgggctaactaaccaactccaaaagaactctgagaaccaatcacgaaagcatctacattggttttaatctttccactttccggcgctcgccaaaaaaaaagtacttttttgtgctaaaaaagtaatttattgtttattttgtaacacttaacaattgcttttaaagagccaaagagaaacagcaacaagtaaactatattgtgagatttatcataatttaagaactattgtttaattatacacttaggaccaaaaacttatattctaattagaagaggttataactaaatgataatagtgacataaatacttaaaattgagtttataatcaacataaattcaataattttttcagcaacataagtacttaatattagtaaaattgtaattttcatcaaatttcgttagtacaaactttgatttaaatttattaaaagaatatttaaaaataattgatattatatgtttccgtccgaacctgataatttagaatgagtcttacatgtattttttttaagacactaacggagtctgtactgataaaactgaatgaaaattacagttttacaaacactgggtactcatactgttaaaagtcattaggtttattctgattacaaatacaaaactttgagtacttatgtcgttatttttctatatatttttgtgaacaatccaataatgtatagggttaataccattttgaactatgtgttcgctaaaagtgtaccaatcagacaactttaaaagtagaccaatcacgactcttaattttattaaatgataaattggaccatatatttctaaaatagtacaaaatagtaccctaagctcaattttttttattttttatataaccaacttgaagataatttctaacatgaa

SEQ ID NO: 312843 - DNA, 1048 bp, Cannabis indica
aagaaagactcaccctggtaaattccctcaagacacctcccatcagcagctccagggatgattcattgtcagcgccggccagctggttactcacctcaggaattaaccggttgatgtcgtgagtaagcatctccttgcctctcttggattctggatgcactagaaaaggtggggtaggagcccgtgtctgcatatatccgctcttggccagctcagatccacccttcgaatgttcaggcctctctgagcttcctccatgagaatctttggacttcgcagctttcaaagcagaagggtcaacgacagttagctcctcagaaagatcaataacctccttggttggtgccttttccttgaatggggttgcctctccacccttagatctcttggtcggaggagatgaacttgagcttcctccaactctcttcttcaaagcatcgagcatcttttgagacatgtctgcacgaaataaaagcaacatgattagaagaaaaaaggcatcaaaagtataaaagcatgataatcaagaagtttaaaaataagacggagtatcctgtgcttcgtgagaagcatttgttggagcaagactcgaaagttcatcatcacctaacaagtctcttatctctgccaagacggccttcccttttcctagtacgggagaaggtggccgagcaagtgagctgggctccctaattcgaatggcatgttcaacgggcctggctgggccggaactttcttcctccttttgagcggaatcacctgctcttccccagcctcatcttcaggattcaaaggctcatgcgcatactgtttggcccttgcacctcccttcaacttagcttcacgcttaagttggatgagttcattttccttatgagctccctcagccaggtcggcactagatttcctctttttctccttcactcgcttaggaatgaaatcctttgggtaaagcccgtactccaaaaagttgtcctcggaggtaaaaagtgttggatatttttttaccaggatctatatttactaacaagtatgtttcattaacatc

SEQ ID NO: 312844 - DNA, 1043 bp, Cannabis indica
ttggtggttgtgtattaatttgtttggtgtttatccctagtggtcctcttgtgtttcctagagtttgtgtgtttggatctgtcaccattagatctcattgatcagtaaggcttcccattcgagtttgtacaaccatcctgtctacctatcaggattaagacaaaagcgtgtgtttttgctctcaatgaaagcaccaaaatgttgactttgcttctagccaacgacagtgagtcaagataaagcgattagataaaataaataatataaagcaaaaacagtaaaataaaaagaacacgggattttaaagagatttggccctataagaatggtaatagcttactcccctacagttatattgacttgggagaaagaatgaagtgttctccctctttaaagctcatacaatcgatctcttagttatttttttctcttagattcacttttctctcttgagtatttttgtggattaattctctcttcctttcttagtgagattataccactatttatagaaacttattacatgaaaaatgggattcctttatctataataaaataggaagaagaagcaggtcgatatctagatgttgtatcttttttggccaatctctcatttcctgaaaatagaagaagcaatagactttgttgcgttcaactgaggcatagtactgtgccatgaaaaatgctacgtgtaaatttacttgcctcacctctcttctccaagatttcagcatcaatatcacacttccatttgttcttttacgcgataaagttctgccatacatatttttgagaacctagtttatcacgaaagaataaaatatgtcgagatcgaccgccacattatttgtgaaaagatcactaatggtagtctaaagatgaatcatatctcctccaaaacaaatctagttgacatactaactaaatttttgtttcctacccacttcgatgagattatatacaggttggcgcaaggcataggcaggctaggctcgtgcttaggggccacacttttcgggggcctaaaataaacaaataaaaaa

SEQ ID NO: 312845 - DNA, 2085 bp, Cannabis indica
aatgaagttcttccttcttgatacaaaaaaaaaaaaaagtttataagttatctgtagaatcttatccaaagtaaacttgagacgcactaattaacttattaaacaaacgatcaagagaaacaatacgaataattctttataaaaactatcacagaagagttttatgggatgattctcatattgatgatttgaatagaaaaatgaaaaccaaatttaggcctcttaagctttatagtcaaagaaaatgagactttatatgtaattccaataaccaatctttataatggatgaatgatttaatagaatgattatttgttttgaggcagattacaaattttgcattttaaagctagatcaaactattaaatcatgtagacacaaaagtttcaagtcatttcttattaaggaggtactaaacaagaaaatctcaatgaaaacaacaacaaagtaaaccataatatccttattatcttaaaaagacaaaaaaaaaaaaaaaagacaaaaaaaaaaaggaaaaaaaagaattctttgccacataattacattgtcctcaacaaaatcacaggcggccgaagacacaatcttttcatccaagcaagcaatgatagctgcaattataaatttcataaatcagccaaaatacaaaaactaatatatactcaatcatatttaaaattaatttattgttcatattcatcgaagtacatgaaattacttcattttaagatcttgttggaggttatgaggtccttagtcacaggtctactctacttagccttaaaactgtctctggttatgcatgttgaatcataagactaatacattcattttgaagactatacacttattgaagttacattaacatcattctccaaattctcccaagagtatcataattatatacaaatttactaaagcatctcatctctcatgaaatcaaattatatactatttatctattgcttaattactatgtatcaacaatcacagctattgtttaagtgtcttagagttagttaggagttagttttgccagctgtatgaattagttagagtttgttattttggttgttagtctgttgcacagtcttctggtatataccagattgtatataaagctttgctcttgtactctgaattcaattaatggaaattacacagagttgtttattctttttctctgttttgtaatatggtatcagagctggactctgtgtaaactccattcttgtcttcttctttcttcctttttcttccatggctcgaggtggaggagctcacactcgaagctctactgaaaattcaaatcgtttctcagctttggatcctggcggccgatccttttctgatgatgctaaaaatccttattttctgtcgaatagcgatcatactggagctagtttagttcctaagatccttaatggatgtgagaattacagttcatggcatagagctatgactgttgcattgattgcgagaaacacgctgaagttcatcaatggcaagattcctgaaccagaagaagacgatgacgattttgagctgtggcatcgatgtaacagcaccgtgatatcttggattcttcatgctgtgtcgagtgaaattgcagagagcatcatgtacatggagaatgctacgacgatatggacgaatctggaagagagattcaatcagaaaaatgccccacgtgttttcgaagcgatcagaaccaaacaatctttggctcaaggaaccaacactgtcactaattacttcactcgccttaaaagcctttgggatctcattcaagaatatcgacctcaactggcttgtacctgtggagctttaaagacttttcaagaacatcaagaggaggatcgtgttcttgattttctggtaggattgaatgagagcttatgcctcttccaaattctgatgcaggagcctcttccaaacattaatagagcttatgcctctattatccaggaggagagacagagatctctaactaatgcacctcaatccatgccttcctcacctgatgctgagaaatctataggcgattcgagttctggccaatttgctggcagtgttcagcctttcaag

SEQ ID NO: 312846 - DNA, 1559 bp, Cannabis indica
taatagagttttatttttttgttattttttaggttgttttgtgaggagcctacacttacagagaatttaccgataagtttaattttaaatataatctgttttatattgattttcaacaattttaaattagggtgctattgttactggccaaagggtacctttggctagttttacttagaaattatattagttttttagtaatgttgagctagtaatttgggttgtgtgttaatttttaagtttgtactttaatttttattttgaagattgtcattctaatataactatgttttttggttggtgttgcgatgtttcttcaattttgtgctccggcgacatcttaaaatgggaaggtattttttcaatgcgatgagattatgtttgaagatgctatagatttattgtttaaattttcgggggtaattttgtcccatgtggttcgcgattagaattttgtagcttatggtttggcaaaacatgccctttggtgagacgatgagttatcctaattcgaagaggttctaccgccaattgtagtttgctgctttatgaatcatgtgtgattctgtacaccaagtaaaaaataataacttactaaaaaaattcaaaattttattatttacgaacacaaaagaaacttttataaagtaaaaatgatgtcatttggccttaaaaacaaggcttctgaactgaaattgcaaacaaatcctacactaaaataaggggagaaaaaaataaaaaaaaataagataccatgttctggataatagcatattctactatttcttctatttgcacccacagcaaacatgttattaagtaacaactcttctccttccttaaacaagatatacttttctatgtctcctcatcgttaatctccaccaaaatcctcttacacgcttcatagcacatgaatgaaatcccaccaacaggaactaacttcatacagctaggaccaagtcctctgtatagacctggtatcccttcatgttcgattatacaagcaagcgcatgaatcacattcttatatacctgccttccactcaaggctccaacctgcatatgcttccgggcaacctcaagagggaaagttgcagtacttaaaatagcaccagctgctgatccaatgagaagagtttcaatgttgccaatcttattatcttgcttgagaaaatttctatatgctttgcgtaaagaatcatatgcaaagtaattagtggctgcatatgggattactccaataagactaggggcaagacctctatagagttctgcaggtccctcttctcttaaaattttcaagaacgcatcgaaaagaccgtcatagacacctctctgtattgttagacgagtcttcagcaactctaaagggtatgtgcacaatgttgagctaactccagcacatgccccaacaattaatgagggagggattgggtgtttggcttgttcgcctagttttggtgtcaaatgcttattaactgtgtcgtaagcaaacagctctatggccttgcttggtgcaacacgaatcacattgacaaaattgttggaaattattt

SEQ ID NO: 312847 - DNA, 1096 bp, Cannabis indica
aaaattaaatataagagagttttaccactaattacttaagcaataaatgtataaagagtttgaccaattgattataatttatttcttttaaaaaataattataattttttatcaaaattattacataaaataagaaaatttaaatccataacaacttaaaagaaaaaatttatagtggacactctaaaaatacaattttatctattttttttatgattatgtacactgtaaatttttaggaccaccaataaaattttaaaaaattttgaataatttacactgctaaaaataaaattcaaacaatcacttacaaccataaaaccattgcaaaaaaacatataatattgttaataaaaaatattaatttttaactgcatgctttaatcaatctggataccgaattgtagaatatcttcatatttggaaaatcttccaattaatataatatttgttgtcatcctatttttgtggttcttaactaagattagtataagttcttgtcgttcgtgtttttcactaaggacacatgtcaccaccaaagaaggctcatatattatcaagctttgctcaggcccaacctagggccaaaaactagtgaggatccaagaatagcaaggattcagattaaggtttcaattcagaacaaacccttaatcctgaacaacttttatcatcatggacgatggtatccttattctcatatcaacacaaataacaagtaaagtccccacattcggacctgaacgataactcttggtgttgagatttatactctaaaagtaaataaataatggataatatattactgaatatatgaaatacaaatatattataaatgaataggttaattattgaaaagtaattaataaatattataaaatttcttattcatgtatgatcttgtaagtgtacaaaagaaataatatcatacaatgtgaataaaattgattggtagtatattaaagtatggtttcctgaatatagaatcaggaagtacggtttaccaagcactaaatactagtagcatgtaattttaattgagatcacatatgtgttgggttttatgtcctaaatcaaactccatttcaatgtaatc

SEQ ID NO: 312848 - DNA, 1210 bp, Cannabis indica
atagagattacattgaaatggagttttatttagggcattaaaacccaacacatgtaactctgatgaaaaggcattccattaattaaaccttcttggaggtaatttaaagtaacatttttgggtggcctctgcgagtgtggtaggaaagattctgcaccggacatcacctcttaccccttgcaagtccatctacatttaaaaatactttaaatgtgataaatgatcttcttttcctgtatacatttccaggttagcattttgaactttgggggtagcttaaggacttcaatttcaggggagaatggtgatttgcgtgctcggtcgagttcaagatcagtgagtttttggctggtcaggccttgtaccatgtttttaagttgatctagttgtgcttgcacagatggatgaacttgttcggtttattgaccggcctgtatcacattgggatctccttgaactggatcctagatacggatacctggttggacagttggtgggacatattgttcatctaggtcccttcttcgatttaggtcagtcctgaggtcatgtgcagtacctaatctatcaaacaccgaggtgcgaggtggccttggtgtctgacttgtttgggtggtaggctggccaaaaatttcagtaggggtgaagttggtgtgtataactcctcccaaaggacggtctggcacgatctggccatctaccgtttggcccataggctggacctatggccttggattggatggctaaccactgtgagtttgtacaatatgcccaactgcatacccttatgacccactgaggggaatactggacgcggtgcccggttgttgattggtgacttggtaggcccttcttattagtacagtggcctgcctggtgcgatcatcaatggttgcctgttgagccctcagagtttccatatcccggtccctccattctataaattgacatttttgttcgtcaaatgcaaggtttatggctgcatggagatcctcttgatcatggtgcaaagcattggtatgaccttgcatgagcctaagggctactcggaggttcttgattttagtgtcatctctaactcgcctctgagtcttagtggtagatgggatctcagtaatgggagtggattgatcggctgccaaactggtgttttcagtctcttgcacgcttggtgtgatcccagccaaagggaaagtcactccatggccta

SEQ ID NO: 312849 - DNA, 1919 bp, Cannabis indica
aatatggaagaagaaagcatcgattcctatttattaataaacttttaccgacacatttcgttacgtaaatgttcatgagctttatacccatctgtcataaaattaaactcaaatcctaaaatttaatattgttatgatagagaaacaatcaacaataaacactaataattatataatttcatatttaagagtaactaactaaaaaaatttgaaaaaattaactaataactgaattaatgtacgtatatacttaaatacaaggtattatttttataaatactattaaatacatgacattatttttataaaaaaagatgtttaattttttttttgaaaacaaatgtaaacttttattagtttgccaaatcaacgaacagataaggttgtgcctcaacaggaacatcacttctgttgagcatcgatctgaaaaagaataagatgctctagcaagcctatgaacaactatattggagtttaataaaaaacaaagaaatattatttaaagatgcaagaagttaacgccaatcttctataataaccctaaaagtataggtaataaatttcgaatagttttgactactaccaagcaatctgactctagctccactttctgccatggttgagttttaatccaacttagcacttcctttataccaattgcttcaaccaaatccgaaacgtatataccagcaaaactattcgacttagccatcactacttccctttgagagtctcgagagactatgccataaccaaatactgctcaatcacaaaaaatgggagaatcaacggttactttgattatattatcctgtagcttaacctaaaattcagctccatcactagcttcaaaaactggcaaagaagcctttgaacctctattttgggatgacttccattacacaagacacctcatagatgagataagaacaccatccaaagtagcatacttttggttccaaaccaactcgtttcgagccttccataacgcccaatacaacataacagcctccccacacttgtccttactacacctttgcaaaatttgatcaaaccagtcgcaaaaatcaatagcaacaattggcctaactccagccaaaaacctcttccaacattgagcagcaattgaataggaaataagcgcatggaacttagtttcctcacctttttaacaaactagacacatgatttgagctgagaccctcttaccacttaattgagtcaaggtggacaaataatttaaagtagcccgctataccaaattgagagctttcggcagtaccttcaaattccagagcttgcgccaaaacttaaaagaattagctgcaatctaatttcttttatgagcttgtatcaacttgtatgcactacacaccgagtagaaacaatgatgcttcttatacccaaaaaaaaaaaaatacatcaactacatttggactcaacaaaactactaaaatatatcgttgatcgcgatcgttaagaagatctttaataatatctaaatcgcatttcctcttatccgagctcaccttatggcccaccaaacattgaacacctgaattaacaaaaagacacatattattcaaaaatcatggctaatgcaaaagatgtttaacttaaattactcaatctattaatagaaaacatgagtattatttttttttaaaaaaataaattaaaatattatataaaattttaaaagaaattgaattagatgcaaaatctccaaacatgaaacatttttctacaaaatataaatttcatgtgttatatcaccactacgtctgcgcatcagtaaaatataaagttaaataatgatcactatattaaggtataatactaaatatgaataatcactataaaaaattgctacttttagtgataattttttagtgattaatgtgacttttaatcacaac

SEQ ID NO: 312850 - DNA, 1082 bp, Cannabis indica
tattttattattttattaaataaaaattaaaagtcacccatgaatttctcataaaccaagaatttcagttatataggcacactttatatagaatagatatggaattactatcattaattagtcacttttatcaagttctgaataaatcatatatatatatatatatttattgtatatataaagtttccatatataccatattcgtaaattatgaaaataataatttaaaaagtaatgttgtatattacacatgcatgcatatatccaattaatttttaaatgtgtgttatgtctagctagctagatatatggagtatatatatgttgagaatttttgaaatcccttatataaaataattaactatatatttgaaatgaatatatatataataataatcaaacaatcaaacatgcacgtacacaatattatttaagttatatatttaacttatttatttgggacatgatcatgaatccaagtacaaattaagcaattaaataacgatctcttgatctctctagctataaatatatattattaggtagagagagagagagatgtgatcacacatagagatatataattaattaagattattaattagcatggaggcatgtctggtggaggagggagcaactgagcttgtttgtatttgccattcttcactatgaaaactgtgtccattccccaagtcaaatgacgctccaaatgacaatgcataaaccacactcctacatacacaatattaattattaaaatgtctgtaatattatatcacaagcatcatttaaattaatcatcaacatcaatattaataattatctacctacgtaccaaacggttgtttaacaaaatataaactatattcctttgtaagtttgcggttgttgaatcaatgaattccgtttaagaaaaacaacccttctttaacaaaataataactttctttgtgtatagttatttttgaaaagacaaaaaaaaaaaaacctacagaatgcacctctatttatatttcggcatatgagagaatttttttagtttaatttttttttttatagtagtctacattgtaattatttaa

SEQ ID NO: 312851 - DNA, 1357 bp, Cannabis indica
ttggcatttgcaaaaactcggtttttcaaatgtttagtaaacaaacaaaaatatattagtcaatctcacactaaaataaacgtaagaaaaataagaatttcatataatcttggggaaaagagtgaagaaaaataatagagcagaaacaaaatttagaattttagtttctagaattgtagaaataacttacatgctccaagaagtgaagaatcaacataataattagggtaaagagtgaaaaaaaaaataagagtaaaaaaattgagaagaagaaaatcaaacctttgcccattgagattgagaattgtggtagttcaaaaatcttggtgattatagctcgactgaagagtgagcatcagctagagagagatagagggtttcagtccctgggtggctttgggaaaaataatgtgagagagcttggacatttatttcctactgctgcgaccactctccttcggcgaagttgaacagagcagaacgagagggagagactgagatcgattttaggtttagggttcgataaatgagagggagatttaggttgtttagggtttaggcaaaagaatgagagagagcttagccccctgtttcctcctgctctgacacactgcctgagttgtcgttcatcgacgaagtcaaacagagcagaacgagagggagagactatcaattttaggttttaggttgataaatggggaaggtttgcatgtttgcagctgtattttttttaaaaaataagcgttcattgataaataatattagacctcactgtcattacaaaataaatcttgcagaatagaagagattgggtaaaggtccacttggccacattgtgggcggcaaagttacaagatctgggtgtacatgtaaaaatgtagccatcaaaacatctagagagtttccaacaaaaagaagaatagattcaatttcccaaaccgaggacacttgattaagagcatagatctccactcttgagtcactctctatgatgatgaacttgtgctccttgagctttgccattttaacagctaaacaacacgcagctacctcgccacaacaaccatcagagaaatccaaccttgccggattagcctaaaccacctcaccaaaatagtttttagccaccaccgcaatgcaagagctttccaatcccactctaacatcacaattaagttttagccaatcccaaggaggaggccaccaaacctctctctagattgaggaaacagcaggaaggagagcaccttgtaaatcggcataagaatagcgaataacacaatacattagttcacattataatgataattattgtgcaccttttcattcctgatgcgccaaatagtatccaccacaa

SEQ ID NO: 312852 - DNA, 683 bp, Cannabis indica
gtaaagaatttaaaattgcatttttttgcgatgtggtgtaatgcaggtgatttgtgcggtttgatgaacacccctaaaaataagggctcataaataagatcactattagaaactgagagcttctcaccctcgttgtaggtgtatgcaactagctggcattatccatcttggccttggttaggagatcaaaaatatatttctttttgcacaagtttagggtagcagaggtgtgagtaacttcgatttccaagaagtagttgagagggcctaagtatttgagagaaacacatgttattgatgatctcaataagtgaaataacaattggagtagagctacatgttaccaaaatatcatccacatagattaggtcacatatagaatgagttgcaatgtgcttaaaaacaaagtaattgtctgcccttgcacttttaaacctaattaaatgcaagtaaagaaactcttaatttatcgaactatgtcctttgagcctgtcttagaccatagatgaccatatgaagtttgcaaactagataggcatgtcaaaaagattcatttagttagaccgggttggagcttcgatccgacggatcacctctaatccgaaacattcggatacttattagatcttggatcagatccgctccgccctgcctaatttttttctggatcggatctgatccga

SEQ ID NO: 312853 - DNA, 923 bp, Cannabis indica
aattataataataataaattttattttattttatttagaaaaactatatcaaacaattttatttaaaaaaaatcgtatcaaacgtgttaaattcatattaagcagattgtattgtgtttgatccgattttatttcgtattgacctatttttcaatccacgttcaatttttctaactctaacccataaattttatatcgtatttatgtttgtgtacggcatcgaaacttgttttggcacccttattataatgaaaagagtaaaaataataaagccaaatgtacaagtacatgaatgaaaaaacaaaggtggaaaaggaggagggagtagtagggattgagagggatgagagtggtggcaagacaaggcaataaagtaaggaagtggaagtgggtgtcttgatacgtgactttggtcccacgactactacacttgcacttccagataggatagatcactggtcacgtactcttaataatccaactcaattccacaattctctgctattctttttcttccaccattcaaccaaaaaaaatatatatatatcatttattatttaaaataaaaagaaaattatggcacccaaaattacatttttatgttatcatcccaatcctgacattagtaataaaagatagcctatcaattagagcatctccgatccgatggagtagcactccagaaaaattattaatccaatgaaattctaaagtgtattaaatttatcatattttaaaagttatatcaaatttaatctacaataaatactattttttatttattataatactactaattattataattcattcaaattttattttttagcaaactatataagttatgacaagttatgtaaaacaagtgaacttatctatgcaattataagaagatactgttgggaattattttaccaggatct

SEQ ID NO: 312854 - DNA, 1078 bp, Cannabis indica
tggcgattcaagcatactggagcaaaattcttatcttaccaaagaaaataattaaaggcattgaagcagtttgcagagcttttctttggaaaggacagacattgtttcaggaggctgaagcaatcaactgggacacagtttgcactccaaaatcagcaggggatttaggtatccaaagagttgaagaatggaacaaagcagctatgtgtaaatatgtttgggcaattgcaaataataaggagtctttatggatgcagtggattcatagtgtgtgtatttgaagaaaggagattggtggagccacactccttctatacatgctagttggtattggaagaagttagtggctctaaaggatcaagtgaggagtttgatagacacaagagagtttgcagcacacaaattctctataacagctggttatagaattctaactccctcattgaccaaaatatactggagtaaggaggtttgggctcgtcgaaacttacctaaacattactttattctatggttagcaatgcatggtaggctaaagacaaaagatagactggttagaatgggaatgcagactgatgagggctgctgcttgtgccaggatgggaaagaaacagctcgacacctgttttttgaatgtaaatttgcaggggaatgcctcaacaaccttaatgattggccgggatggaaagtaagaagtgaaagcttgtctcacatcatcaggtggatcgggaaatcgaaaataagcaacggtaagaagcaaatattggctgctgcaacagcctctcttgttcaccatctgtggacggcaagaaatgctgggatttggaaaggtggactggcagtaataggtcgagtaaatgaagagatagaagggaagttgaagatgagattaacaatgtgtcaacctcagaaaataagcagccacgataaagaatggatccaatccttgtaaaagaaattgtgcatatcagtatgggaatttcagatttgtaaatagagagaatttccgggcctctacttgaggtgcctttaggatgtacaaatgattggttttatgcaatacaactcactgatttat

SEQ ID NO: 312855 - DNA, 791 bp, Cannabis indica
tggtggcagtatttattattgttgttgttgttgttgggttgttgtggcagtccgaagggttgtggtggtctgaaagtttatatatatttttttaaaatttttattcttttgcttcagttcataaccgaagcgaaaaactaatttacatcagtgctttaatattttcttcgcttataaactgaagcaaaaatcttttagcgtctgttactaactgaagcaaaaaataagactatttgcgtctactgttatagcgttagttacacaaaccgacgcaaattatttatatgtcatttaaaactgaagcaaaaggccatttttgtaatagtgtgaagtgcatttcgatgtctatacggttagatctctcataaaacatagggttcttcatttggtggagtgccctttggttatcatagaacactgtgatattatctatctttaatgtcatctcctttgctacaccttttagccatacaccttctttaattgtctcagtagcttccgtgtactcgcttctgttgaggatagagctactaccttttgtagattttccttccaactcacacatcctccttgcattgtgaacacatatcttgccatagatctcctagtgtctatgcaacctgcatagtctgagtctacatagactgagacatcaatctctattttgcagctttttgttgtaggtgaggcctaaatcaagagtgcctttgatgtacctcataatccacttaagaacatcccaatgcttctctccagggtctgcaatgaacctactaacaatgctcattgca

SEQ ID NO: 312856 - DNA, 625 bp, Cannabis indica
tggctggaaatggccagaataatggcttgaaaagtaggtgaaagtctgatgtaatcaacaagttgtgagagagaataaggagtaactttagaagattcctgcaaggctttaacacaattagtttgagcaagaaaacaatgataatcttgcaagtaagagggcttatgtgaggttttgatgcgtctgttatgaggcattccgatgtcaatagcagcaggttcaacagcaggttgctgctggtgtgatggagatccattagaaacctactcattatcatgaaaaaagtctgtagcagatgtaaaaaagaaattctggtgttcttagtaaaggcatcatgagtgtgaaatggaaaaatagtttcatgaaatattacatctctagaacaaaaaatattattagaattcaggtctaatagcttgtaagctttcatgccattaggatatccaagaaaaatacatggggctgcccttggagaaaacttggatctaataaagtacaaagtggatgcataggccaagcaaccaaagcttcttaggtgattataatttggtgccttggatttaagtgttgaaaatattttaccaggatctagatttactaccatgtatgtttcattaacatccta

SEQ ID NO: 312857 - DNA, 1379 bp, Cannabis indica
cttcttcgtcgtctctctctctctctctctctctctctctctctctctctctcgtgcggctccagggctggtgctatggcgaagactagggcaaggcaaaggaagttgaaatcagagctcaagaaacccaaaaagcaaggaccaacctctactactgatgttcgaaagacgaagatgatggactcggtcattagtgtcgaaccaattgactttttggaggaagaaggagatggtgaaccagagcagtctgtgagagcggatattgatctgtttcaagctgcgttatcacctaaattttcacaacaagcaatcaagaggcaggaagagattagcaaagattttgactattttcttcaggcgaatcgaaaatgttctgcaagtgtgctcaaggtactcctatcacaccccctattttacgctctggtaatgtggtgaggaacttagacacttcctttaagaattttggcaattatagtaaggttaagattactttagaggatattgaggatgaagttcatttctggagctcctctattgtatgttatgttcttggttctaacccaccattatctgtaattgatgggttcattaggagggtttggaaagggaaggtagacaaagtaggatcactgtcctatggggtatttctggttcgatttgagacaattgaggccagggatgaaattcttaatgggggttatgtgttcttcaataaccgacctgtggtgatgaaagcttgggatcctgaagttaatttcaagaaagaggatatcatattagtgcctattttgatccaattacctgatcttgaactgaagtactgggatgagagatccctatttaagattgttggtcagttggtactcccttacaggttgatacaatgactgaagagaagaataatttgaattacccgtgtgtactcattgaagttgcaattcagcaagactttcctgagtgtataccctttgaggttgaacatggttttgatgtgtttgcttttattacctatgaatggaagccaataatttataaccattgccaaggcttaggacatcctactgcatattataagaagaaatgagtgaaacagcagcagtgggtggttaaaggagataatactattgctgattctggtgtagaaaataaagcagtggacaatgaaggttttcagcaagtcaataaagggagtaaagctaaagggaaaatattttcagctgagactcagataggtaattcctatcatgttttgactgataatgttgagcatggatcaggggacatggcagcaggtgcacttaccattggatctcataaaaattgctacaattggcaagacaagaagagggggagaacctcctcttggagatggataagat

SEQ ID NO: 312858 - DNA, 1154 bp, Cannabis indica
cctataaaaggagaactcccttaattcgtttttcagattcaaaaaactaccgacaaggtcagaacttctctctctagaaattggagctttgacactataataccatcttgtgagaaataaaaactcgaagtagatgtaactccattactgttaccatacagggaatgaactacgataaattgttgtttctctctttacttttacttaataaatatttcattctcgccaatctagcaagcgggtgtagcttagaagtctgtgtccgaatttctgagacaacagtaaaataacaataaaaaaaataaaaataatgatgagcatgttaattattacaaatgaaaaatgattaatgcaatttttttctaaatatttttttaaaaaagaatcataatagaaatatatgttttaaatatgtgtagggtttaaatttaaattgattgcttaaaaaaaatattttattacatagccacatttaatataaaagtgatataagataaaaggtacgagatatatgtagtaaatataaatttaaattataattttttttaaaaaaaaacaacactttttattatgtagtcatatttaatatatatatatatatatatgtatatatatttcttttaaagtatctatatcctactacaatataatttaaatattttatttgaaaatttttgttacaacttataataacactcaataagccaatgctaccatatatagaaagaaaaatataaattgagttgtactatttagagtagcaatatccaatctaataaaattaaatgaaactgattcaattcaatctaattataaaaaattagatattcaattacaattggattggatgttaaaagttcaattctaattggattggatcgcttattggatgtcaattttaaaattcaattaaaaactgatctaatccaattacatttatatattttaaaaaaatatttatacttatttatataataaaaatattaatattttaattatatttttggtggttttttttttgttaattttataacacttaattattttgtgtatttgttagttatcttgtgtatgtgttttcatgatgttttgttatattttattacttgacagtattgttgttttagttattttaaatttttaattgtattaaa

SEQ ID NO: 312859 - DNA, 921 bp, Cannabis indica
ggatgatgatgacaccaaccacctcaaggaggctggttggccatagggccgaccagcttttgtacagcacaaggctggccagcctgcatcctgcatatgcatggccatccagaacttggcctagcaggactttggcgcacatggacaacaagctagactgcaaatcaggccttaacagcccacaaaagtagatgaaaaatatctattttaaggggcattttagtcatttgtattttattaatttaatatgtaaatattatttgcatttttgcaagcatgagatatggatattatttaaggaaggataaggagtcactaagccgcccgagtgcctcacttagcgccccgggaggatgaaggccttaacctcgcaagaaatggccttcgtgaaagacatctccctaagtgttggccacacaaaaggtgtctgtgagccaatgtctcattccactggagacaaggccatttactcccgtggagagtgcagatcttctcaaaccagaatacactagtttggggtacgcctttgacccgcagaagctcggctcacgtgtgtcaggctacagacctagggactaggcatttttgtgtacaatgtcagaggttgcctcccacgcacgctattgtgcaaagcatgcatgtccttgtgtactgagctaaacaatgcaacggctagggatgaggaaaatttaaataggaatggccctgaagtgacacgcattcgaagtctagctcgtacagccggtacaatctgaaacccataaaagcgacatgggaaatatcccacctaccaatctaacggtggaatttcatccctgcgaagatccacctaagacagcccatgcgatgaagttggcttataaatgttggaaatattttactaggatctagatttactaccatgtatgtttcattaacatc

SEQ ID NO: 312860 - DNA, 1161 bp, Cannabis indica
taatcctagtcataaattctgggatttacacatataaggttaatccctaattccacatttataaaatatatacttggcattcaaaacacaaatattcacatagagctcaaaacgagctttccaacagtatataaaactcccaaatcaaagtccagatcataaagttatggctattcaaagtttgcatttggatctgcccagaaacaaaagggcgggctgcgacgccaaaaaagctgggccgcggcccctgggttccaatcccagaaaaacctgctacaacttcgaatttcagctccttacccctctagacaatcctgattttcttgctttccttgtaggagtctaatcactttcaaatcaacccaaatcataaccaaaactttaaaccacaaaatagattttccaataattatatagagagtttaaaacaccatttcatgcattaaaattcaacaataataacccccaaaatttagattaaacaaccaattccaccttcaaatattcacatgatcaagccaagaagtcatgtattagacaactaattttagagctaataaccaaaatataaacaatactaaaatccctaaaattctttcccaaaccaaaacaaaaacaaacttaagagatccaagtacaaaacatgctcacagccacaagaacaacccctacaaccacaacatgcatttcaagagaaactcaacccatttcatgcttttcaacaatagaaaactcagcaagaatttaaattaaaattcagcaaaagaactacctcaattccttccaatttcaagctcaaaagcatccaacaccaagcttgaaaccaagccaaactcaatcaaaaatcaaaagcaagaataagttgagagagagagagagagacagtttgtgtttgaggggagaagaaaccagaaaataaattctaattttactcaaaatgctttttgatgaaagtaatccaataatgcacaaattacacaaatgcccctagggcaatataacattcattaaagcattcaagggcataatggtcattccacatcacacaaatacattcaaataaattcagatttctcatatataagtcaaatgccaataatttatcccagaattgtatttcggccccgaacccggttcggcccgaaatacccgattgtgact

SEQ ID NO: 312861 - DNA, 1133 bp, Cannabis indica
tttgggcggtttaaacttttttttgtacaaccatatttcttactatgttgtttaggaatttttcaagtttaaagttagttttgggttagggttttaagatttagggatagagatgttaaattgaggttagattatgtttttaagtttgttttaggatttgtatgagtttggattgagtgattttagtggctatttgacttgaattggtttggatgaagtttagtgagtttaattttacttgattatggtattttgttcaaattgatgaattgttgtggattgtttgattgtatatactgtttttatgattttggactattgtggagagtttgagcaggtttcatggtgatttggttaggttttgatgcaaaaacctgagttttttcttttctgcagctgagaaactagttaatcggtttgacaggtatagtgaaaccgctcagctagttttgccagcaaggaaactctggtttttaacctcgaaaccgatttttctcggggtgtttttaagagtttagattgagtgattttagtggtgtttgagctgttttgaaattgtgagagttagttatgtccagttatgaaaggttgttcccgaagttttttacgaagttatttatcgagcttcgttatggtgacataggacccgggatcgtcgagcgtagttccaatcaggtcagcccgcatgcctggttactggactgaagtaagaaaagctttaagcaccgataagtatgtcagataagaagtgattattatcgttgatgcctcgattatgattgcagtaatgattgttattgttgtgactcgattatgatcgagaattagatacggtcattaccgttatgagtaatcactcgcttaaaactgcagataggtttcttacttatcatttttttaccgggtaagaatagtggcataaatagctcgtggataacgagtggtaagggtactttatgagggactgagattgtctcatcttatagacgtttaattgattatgcattgttgaatatatgttgtatgatgagtatgtttgttatatcatgatgttattacttgcattttatattgcgtgtgatttaatagcttttcttgctaagtctctatgactcacgggtgcttcgtggtgc

SEQ ID NO: 312862 - DNA, 3343 bp, Cannabis indica
aaaaagagtccccgttgaggcggaaagtgtcatccgtgtcactgttccgtttaatattcagggacaaacaatcagtatcccttttcccatttagatgaaaaattcctagcccattagaagtgaggccatcattatgagaataatgtgcatcctactcccaatagctactttaaaatagctaaagtttaaaaatttagctaaaaagtaataaagagaagctccaatagatgagctattttacaaaagttttaaatgctatgtacatttagttcttactattcatccttcaaactattattttattaatttctctatctttttatcttttcttatcgctcattttatttttatttaatttaaattgaataaaaatatagtatttaaatattatatataaaaaaatagaaaagttatatatggtataatataaaagttagaggtaaaaaaaaataatgttttagtaatgtattttaaaaaaatagagtagtgctcatcaatttaataagtagactatatatatgtatatacactacaatttttttttttttttacaaattttactattcctcacaacaaaaattttggctaaaagtaaaaaagttgttaagaattataaatcatttgttgacgcaatttttcgtcaactgatctatgaagatcgtaaaaataaagaggattgcgataaattaattcgaccaaataaaattacaataaataaaatggacaccaggaatttataatagttcatccacatatcgcgattgtaatggggctacgtacttttgcttttattaattagatctgacacactagagttatattcttaagagtgtgtagacaatagtacaaaaaaagatttttaggtgaaatctcaatcgagacctatgactgcaagactcctgtgagactcaatattcataaatctgatcaaagttgatggttgtaaggtaaacaacaaaccaataaaaagaagaaaagagaatggtctctgtttttggtaactgtgtagatcaatggtgtttagatcaaggagatttggtgtcgacaaagtatggaagactcaaaaaaaaagtgaaggaaaggatatggtattcttggcagctgttaagtaagttccccataagaagatcccccctacttcagccttttactctcattatataggctttagagtttgttagtgatcctccacatatcagggtgtctcattaacaaatcccttattttatcttccataatgaataaataattacaaataaatataattctccttatttttaagtcaaaattccacaagcattgcgaaaatacttattttcagctaaagatgcaccaatttaaaatagagtgacaagagatgtcacttctcagcttggaattcatgttattggtgagaagtgttagaaacatgtattttgggatgacactactcgcacataatgccacacgggttgtagcattgttctccaacattccacacttaactacactattcaattcccgattaaagtgtaccagtctgcctattgagccaattttggcccgataactacggaattaagctattatcatgagctacacgtagattcgtcttgaaaagctatttcaactgcaagttgagccaggtcatttggataaaaattgagagagttatgcccattttactgaagggtagtttgtggtgttttattctagttgtgagcactgacatgaccaaatggcagctctcggccatgcttgttctcagaccctttagggtgtgttttgacttgttttttgatggtaagtcatattttgggagtcctgggaccccaaaatctcatttcaacgtccgaaaccctaataggagactattgtcaccaattggggtcggaaaatggcagtggtcggccatggtttatgggaagccatgtatagtgtttcttgcttatttcagtcatatgaatgctaaaaaactacttggatcatattggttcttgtccaattgcttaggagagcactgtcactatttttgtaaaaaaagtggtagtgttcgcataagggagctatgaagccttggataaatttttaattttcacttgtatttgatacatagatgatgaaaatataatttggctaaagaaacccacactcctatgtggtggccgaccactgccaccacttgtaccaaaaatgtggcagtggttggccaagtggtttccacactacttggtggcttttctcacttggttttgatatgttattgatgaatattaaaaataataataagaaataataatgttacaaataatatattaatatttatatatatttaaattaatttaaaattgatataagtttacttaacctgaaataaataatattaatatttataaatattcaaattaatttaaaataagtaatattgatatttatatatatttaaaaaactaattttaccgttaaatttaacaaaatatttttatattcttaaaatattatgttaaacaaaaattattaaatagtcacatttatatataaagatatagaaataaaagtagactaacacttgaaatagtagtgatgttcatttgaagccagtttttgtttaattgttattgaacattattgtaattaaatttccttattattttactgatcagcttgtggtattgtttgaagattttctttttaaaattttaacactttaaagtagttttttttttctttaatttttacgaaaatttatataaaaattcacatatagcaattaatagaataacttaaattgcaatcaaaatctatatagcaactcatatagaaaccaacggaacaacccaaccgtaaattttaaaaaataaaataaaaaattgtatataaaataattcctcttgttttaatactatactctatacatatattaatatacacaaaaacgatactacacgaagtatttattattattaagacagttaaatatcaattctcatatatgttaatttaataattattataaaaatcatttgttaataataatactctactaaaaatattgttctaaagaaatactagtgccaagtaggagtggtaaaacatgtcatcgtgtcgtatttgtgttatatttaatgtgacccgcttttatatttcgtgtcaagcgtgttgacctgttttttgactcgtgtctaattatctcaaccctaacctgacccgtaaaaaatcgtattgtgttcgtgtcgacccactgtgacctgttttgctattattgaaactagaattgtagaaaaaaaataatagatttaagctccattagaaaagttatatacatttatatatctatatatatatagtttgttatatataataa

SEQ ID NO: 312863 - DNA, 580 bp, Cannabis indica
atttaatttaatttattattttacaaaaaaaaataattaataatttttaaaaaacacagaattaacgatgatatttgccctatttatttacctgttgaaatgaaatccacaagagaaacataacatcatggttggttggacccagctagctctctctcttagaatacttggttctaacaaatgtgacatggtgtgttgtgtgagccatttttgtgtttagtaacatatacaacaaattttcaacacactgcaagctgtttcaagtcaaattcttaagtgggtcttttcatattgtgattttttttgccctttttgaaaaagagtttagtgggtcagtttgtgtttcctttgaggccttgtttcaacagaaatactctttaataaggggtccttatgacaaaaatttacaatgttatttttttagttaaactaataaatcttaggtagagagaatggagaggagaacagttgaagagggcaaatcttctcatttgagaggaaattgtgagaaggaaaagaaagatgggaagattacaatacttttaggttgtttggttgtatttttagtttttaattttta

SEQ ID NO: 312864 - DNA, 748 bp, Cannabis indica
ttttacttttagtcacaagttttgtaactactaaaagtaagaatttttgtaataaatattacgttttacatatttatttaaattttttaattctaaagtgtcaaaaatttaaacatcaactttaaagaatagtgataactctttcattgtactaaattttaatacattaaaacaaattatataaatatatttaaaattttggccttattgacaaaaattcataagccactgcctagtaacaagtacatattaacatgatcctatataagaaaatatatattataagtttcttatactcattcaaaaatatagtcacccatcggtgatgaaaaaatgcatacccctctcattaaaaatttgatgtagactatagtagtagtgaaactcacaaatatggacattccctaacaaacgagaaatgttatgttcctaacaaacgtgaaatgttatgggatatcttaatcaatgtgtccaagtataaaaagtgacattattattggagcaatataatgttaagttaaacatattttaatttaataaataatataaaaaattattaactacttatattaatgcttctatatagtattactgcttctatgtagtattacgcacttaagggagaagtcaaaaaagtacccttttcattatattttaacttaatttatagggaaaaaaacagaaaaatacaaaaaaggaacaaaaaattataaaaatactttgggccggcccattaaacatttataca

SEQ ID NO: 312865 - DNA, 1400 bp, Cannabis indica
taaatatggactcatcaaattctaaggatggtaaataaatttatttattttcagatctacctaagtatatataattttataaacattaaattaaccttttttttagtttatctaaattagtaattttaattaaataaatatataaatattaaaataaatagattaaaatagatatcaaaataatacaatatcttttaaagtaatgagctttagttttaagatactcgatctccattgttggttctacatggttcttattttaatgagattcatccctaatagatgttcattcattagcaatttaacaccgtagaatctcaaaagaaaagtattatttgtaaatcttttattctcggtaacgggtatgctcttgaagcatgaaagtggcacaattaacccacttagttccaactactccaatattatccatgatacgaatgatggtactcctccattgctctgccttcataatatcagtaacacccaggaatgtcgaaggttgcagcttgacaatcattcaaaagctaaatctctatgtggttgtagagctaatctagggttagctaccactgggacaagaactggaggaatcacttggtctaccagagctgcctgaactggtttcctaatctggcataactcttcttcttgacaaagtatgatagttcacctttcagtaaacatttgcttctattcagaaaagaggattaacattattcatccccgtagtattcctagaattttatgggggtgctggtagtgccggtggattggttagattaacatcacggtctacagtctcgccctatgatctagttgatttaatagggtccacacttcaagatagttcttttttgcatttttacgagaattcacataaaaacccacatagcaagtaaaagagcaacctaaattgcaaccaaaatcaacatatcaacccacatagaaaccactggagcaacccaaactgtaaatttgaaaaaaaaacttaaaaatagtgtattaggtaattttcctttttatacgatttgtgacacttaaccctacaaactaagtttttagtggtagaactttcatttcacgataaaattaaataaatataattgaatgactaggttattataaaaaatatattttgagaggtattattaacaaattctatactataagagattaagaggtacaacttgatagtgtaaaagttcatggcaaaaatgctagggatttttacacttggtgcccaattttgccatttttttacatttatgtctatatacggttatttaaactttttttaaaacatttgtttttcaatattatattttaaaaagtttgttaattacaaaactacctatgcatggtgttatcccaatttttacactctgacgtggcatcacatg

SEQ ID NO: 312866 - DNA, 3278 bp, Cannabis indica
gaggttctgggggatgttatttcagaagagcaaagtgcatttatctcggggcgcttgataattgttaatgcaatgattagttttgagtgtctcaacgctattaaaaggcataagaaaggaaggaaagggtttctggcttataaggctgatatgaccaaggcttatgacagggtcgactggtctttcctgtgcagtatattgattaaactcgagtttcatcctggttgggttgggttactcatgcgcttcattacttcagtgtcttatgctattagcattaacggagatattattggccatatctcgccttctcggggcttttggcaaggggacccactctaccctttttctgtttttggtgtgtgttgagggtttgacttctcttatcaagcgtgatattggacgatggacaatctcgggtcttcaatgtggtagaaggggtcctgtgatttcactttttttgtttgtggatgacagtttcttctttctggaagcatcggtggctagttgtgttcgatttagaaaaactttgcataagtacgagaacgctttgggacaacttgtgaacttgcgcaaatcagcggtgtgcttctctcatagtattcctcttgattttcgtgagtatctggcccacattctcggggtcctgcttgttccttgtcatgataaatatcttgggtttccatgttttgtaggtaaaagtaaaagtggtctgtttcaatcgattaaagataagatttggaataaaatttttggctggaagtcaaagctcttctcctctggagggcgtgaagtgttgttaaaatctattatccaggccattcctacttatgctatgagctagtttcgcttaccggttggtattatcaatgagattcaccgtatgtgtgccactttctggtggggtggggatgatgataagaaaaagatgcactggtgtacatggcctcatctttgttggcaaaagaatgatggtggcatgggcttccaggacatgtttctatttaatcagtctttgctggctaaacaggctgctcggttgtataactcgcctgactccctggcagccagggtaatgaaagggttctacttctgcaatggctctctgttaactgttgaagtgacaaagcgtgcttcttttctgtggaaaagtattttatggggtcgggatctcttgaagaatggttgtcggtggcgtgttggctctcgtgagtcaatcaaaattcatgaagatgcgtggatcccaaaggatcgtgtggggcggacgtactccttctcgggtgggtcgaacctacagttggttagtgacctcaaatttgattttggaagatggaattcttctctttttgaggagtgtttcgacgtgggggaggcttcaacaatttctttatcccgtgctccttgtttgatagtcaggataggcttatttggcatttctctgataatggttctttctcagtaaagagtggatattggagtactgtgtccaggttggggtggggccaagcttcgagctcctctagttcttcccggtggtggaaacttctttggcaactgaatcttccgcctaagataaaaaaatttgtgtggaaggcatgtctgaatttcattccggcttatgccaatttatctcgtcatggtatgaagtttctacaatatgtccaatttgctctcagaataacgagactactactcatgctctttggctctgccattctcttaagtctattcgtttggtttggtttttgagtggccttttgactccttgaaggacgcctcttactattatgagttgttactagggtgtatggatatcttgaaacgacaggaacttgagcagtttataacccttggatggcgtatttggaataggcgaaatacctttgtgcatgatcacaagctcctctccgataacatggttagtgcctgggccatggattatttatggaaatatcaagatgctaataatgtcgaaccagcttctttgggtccagcttctagcaatgcaagtaatcggctggcctcatctgagacggatctggttcttggtgagttcaatctttttttggatgctggggtttgtgttgagaaccgaaaaatagggatgggggctgtggttttcaatcgtttggggcatgtcctattctcgagtgcgactccttgcgtgggttttttggaacctcacgttgccgaagcaaaagctttactctatgggctttcttgctgcgtgctgatggggtatacgatgattactgctttctctgattgtcagcgggtagttcttgctgtcaatagcagggccccttgtttcaatgagtttggtattgttctcaataatattaatcatattagaaattctttcagtagcatatccctgtcgctttgtaatcggtcaaagaaccatgttgctcattctttagcaaaacgagtgttagatttagatgatgctcgggtgtggtggtcgggcttgctcactgatttagctgtttaaatttgcctatattttgtattctgatcttgtggttgatgccttttaatggaatctctttgtttttttaaaaaaaagtgttaaataaattgctacgtgacaatctcttattggtcaaaatcgttaattttttttaaaaaatagtttaaatatataaataagaaaataacacgtagataatgacttaacatttaatggctagatatctacataattctaaaaatacaataagtatttactaaattaaacttagatatttattttcaactaaaaattaacttaattatttataccacaaattactctttataatattaagtaaaaatcaaaacattaacaaattcagcaagaacttaattataaggcaggatagtatcacataaataccaggagaaataatcatgcaaattatttgtaattaacaaaagaaattcatcccccatgacactctaaaattactttaatgttatttttctctactctctttaattctctcatttttaatattttattagaacataaatctacaaattaatattttattattattttaagggtaaatggcggtaaaacccccaaaagtttcattttagtttcacttaatccccaaaatccaaatttatgcggtaaaacctgtaatatccgctttcttggttgaataattttttttttagtttattttgtttgtcaatggggataatttattattttgaatatttatgagtttggtggagtatgaaatttttcttagtgacaataatttttttttattatttttatttcgtttatt

SEQ ID NO: 312867 - DNA, 1155 bp, Cannabis indica
tacaaccgttagcacatgcttctaaggcacaaaaactcgtgtcaaagcattaaatgccttagatactcaaaaggatttgaagagactacatgtagtatcataactacctactctgatacgtgtctctacatctgaatagttgtgagccaagcaagtccacgcacctactaggaggttcctccgcagacttggggggcaaatgttattccaattttagcccgggtgatgtggcacattttttcgggtgacacgtatcatcgtatataagcttgggtggataaaaaaacctcgcgaaatgtctgcccaagataaacactcggtcgaatgtgccaacagacgaaccaagtgtaatctgccacacaagataagcatgaattgacctggacggaaagaaatggtatgaacattataccaaccgactcaggagaaaatgcgtgacagaggcatttaatatagtttcctatttaatatgtaatccaatcccaatttaaagggagtttcgtatatattcttcataatttaagaatgtcatttattccctattttcatggatcgacaactttggaaaaccaatatctgttgtaaacatcacctataaatagtggagtcactccattgtgaaggggaccaaaatcagttgcttgagtgagatattacgctgctcattttctctgtaaagctttcgagagaaatcaaactctttttgcttctccactcacaagttaaatacaataaaaaggggagtaagctattaccagaataatggggctgaacctttataacatatcgtgttcttagttttacttactattgattatattctctttaaatcttattgatttcttgttgctttgaaaggttcagtgtcgttggttaaaagcgaaatcaacaacatgaacattagttcatgattactcaggattcatggtaatctatttttgatcatcattgtgatatgaattaggtatttatagcaaatgatatgtttgataaagataacttaattacatatcggtccatatcatatataatctctattatatacaacatcttcacttagatgtcgtactatatcaacgattcgaatcgagattgcttgcactgaataacgagcatcagtgaaccgtactaacaaccattgattaaaaattctat

SEQ ID NO: 312868 - DNA, 1529 bp, Cannabis indica
gtttgataaaattaccaaacccacatagacaaatatatttcacttataactcaaacttacaccctcactatcttaatcactcaacccaaatctcaatacaccatttgtttcttcctcactctcacatgttgggtcccgttcttataccttgttgggtcgccacctcactttaagtctcatattagtatgaaattatctgctctaataagcttaaaccttcatttatggttttatttttggacaccttccaaaaggcctcatactaatagagtgagtggaatacttatattctagacaactcttgcatcatctttcgatgtgggacttgggttaataccctaacaatcctcccctcaaactaaggactacatactcgtgccctcccctccagtgaaatcatcttgcactgccgctattgccaaataaaacacgtcgtctgaccttcaacattgccaagaatacttttaacactaggcaccaaacacagatctccatcttgtaccgccgtaatcactatgggacacgccacctgactaccacaatattaagtatactttcgacacaaggcactatacatatcttcaatcgtgaggtcatcacattgagggcttcttccacacatttcacatgcaacaacacactattctctcccaaatttttggctctgatactacttattgggctctatttctccacattgtcgggccgccacctcaacttgattccaatattagtataattttgtccactttaaacctaagccctcatgattttgttttgaaaacctttttaatgtctcgtaaataataaatttattatattaaaagctatatatttcttgtgttacaaccaaaaaaaactatgtatgtatatattattatttaaattttcttttcctaaaagatatttagattgttttcataaaagtaaatttttgaaaaactttccataagtacaattaaaacctttaggttttgattaaaaataatcactgctacataattttcctataattataatacaatatcaattatcatacataataatcacaaaacttctgtgtaatagaacataatggtagagccttatatactataaaaagctcattcatctaaattaataagttatattggaaattaattttattttcttgcttgtacgtgtacagtagaacatttatttaagagtactctattcaagaataacttcaaatttgttattaaaaaaaattaagtctcaatttaagccagttataaataagaataataacctctaaattgtaattagttatacatttttttaagtctcgtatcaacaaaggtgtcgttggtaacacttttgttttttatttttttaatcacaaaatgaaagtaaaatttttgtttttaaaaaaattattttttaaaaacaaaaatgcgttctataaccactttgtttttcaattttaaaaacagaaaataaaagtgtttttgtaaagttcatttttatttttattttttgtattttatttaagccgggtctaggtccgg

SEQ ID NO: 312869 - DNA, 644 bp, Cannabis indica
actctcccttatttttgaaaaataaaagcgtttatctacaacaactagattatacaatgttcttaagttgaggatacatttaatgttttgcttcttcgatactttaccaatattgcgttaaatatgcagctgaatacaatttgtgtatttgtgtaaagattggatatcacagactcacagtatgtactgtctgctgagaacacgttgttggctggtctcagatatgaaagctgtaccattgaaaacacggtaagataataacttcccaaggagagatgtaaacaaatgttgtgcaaaccaagaaattgtattgaatgccatttaatgaggtaaaactaaaacacacttctgtcagccgttgatcttcatcaggtggccataaacaatcagtagcacagaattgcagtgcagagcaggccatagaatttcattgacatctttcttatctttctttagtctcttttggtgtgtgtgtgtaatcttacgcacaaaatatatctataaaacagcaagctttccaccctacaaaccagcggaaaggaaaataagtgataaaggaagacatatcaagcaggggtgatgaaagaaatgctgtctgcaccaagttgtggtgctggctggtattgtggctgatgatgtctccg

SEQ ID NO: 312870 - DNA, 1533 bp, Cannabis indica
agtgtcaatgtgtcagtcattgaaagaagtaaactagctttcaaaaatgtgatgattcaacagttttgagaggttttcatcaatttgttaaacaaaaaactttttcttgtgttcatcatcataaaaaatactatcaagattagacttggcatatcaataaacaatattcatttttcattaaaagattatcatatcattaagaaaagaaactacataatttttaaatacaatttgtagcagctatctatagttaatctctctctatttatatataaattaatatatataaattttgcctcataaaaggggttcaaatattctagtagctatacttgatcacatccactggtactactttttcaattttgcgaatcttggtgcccttttgatatatctacctgaaaatatattttaaaaaaatgccaactcataaaaaaaatgaaaatgattaatgtataaatgatcatgcaaaccaaccaatgattacaagtcttttttttcaagtgaggtaataatattcatgatcatgatgaactcctcataattataactatatgagataatacattacacacatatatatacatatatactgaggtcttacttgtcaagggtttgggagaaatagaatggtaatatgcatggaagaactccctattctccttttgaagttctctccaaactgatcacatataattaaatcccaattaccagagaacaaatttataattaaagacatgaaatgagaaattaatggtgatgatgattcatatacatatacatatatttttatatatatatatgtattcataccagtaagtgtaacaagaggtccaatgcttgcatggtgagctaaagctcttatgcattggtcacgagtcatatgaaacagcatacatctctcaataagatgttgaacctgtaataacataacattattatatagctataaattaattaacttatgtatatatatatatgtacaaatttagatattataatataaatatagagataaaaagaaataccattctaatatagctttggggatggcaatgcaaacaagggtgaccaatatttttgtggtacatttttttctttttcttccagtagagtacaattaacagaagacaaaacaaaatactaataatgattttgagagaaaacaaacaaaattttagcccaaaaagtgcaaagatgagaggaatatatatataaaaatattgaataaggtagtcacaccaggggggaaatatttgagatgggttttttattttatgttttttttttctatctatatatatacacatatataaacaatacaaaatgaaaaagaaaggtgtagaagttgaatattgttatcctcagataatctaagtgaagggccaataaagcacaatgatagattcacctcatctccaagcagataagagagaaagggatggtctttatttgatgatcatatacgtacatatacatatacatatatatatatgtgtgtgtacattttcgtactgtaccaaaaattatgtt

SEQ ID NO: 312871 - DNA, 1744 bp, Cannabis indica
gctttcagtgtagcatggttgggaattaagaaagactccctcagatgaaaaaggaagagcagaagtaagacccaaaacctgtacccactcaggtgttttccattacacaagcggatgttgcaaccagtccttcagtggtaacagctcagattcttgctaacaactccttttatactgtgttgtttgactctagggctacacattcatatgtggcgtcgagagtaattaataaattgggtaggccttattattttatagaattagggtttggaaccctactacccagcggagagttagttatctataaaggtggattaggtctatgccatttagaattgaagatagagagttgagtgttgacctagtggaatttgatttaacggagttcgatattatacttggaatggattttctatccaagtattcggccagtattgattgtaaacgtaaaatggtaaccttttagtcagagggtgaggattcatttatttatgttaggatggttaagggttgttggctgtagtgtttgcctttggcaaattcagatattatcttgttgggaccaaggtgatcatttacaccaatcatttagccatcaaatatttaattgccaagatatatgcaaagccaagactcatttgttgggtgttacttcttcaaaagtttgacttagaaattcgagatagaagagggagaaaaaaccaaagtggctgaccatttatcttggctggaaataggtggtgaaaggcaagatgagatacaaattcaagagactttttcagatgagcagatgctggttgtagctcaagaaaatactccttggtatgctgattttgtgaattacttagtgaatggattgcagcatcctgatctgaataggcagcaactaaaaaaatttgttcatgatgtaagattctactattgggattagtctttcttgtataggcagtgtgcagatcgaataatggagcgttgtgtgacaaaagaggaagttgcaagcatcctagaacactatcactcatcttcctatggtggacactttggcgggcaaagaacagctgctaaagtttttcaattggggtattattggccttccatcttcaaggatgctcatgattttgcaagaaggtgtgatcgttgccaaaaagttggcaatattttagtaaggaatgaaattccattgaattacattattgaagtagaactttttgacatttggggaatcgatttcatggggccattttcgccatcttatggcaatctctacatattgttggcggtggactatatctctaaatgggttgaagcagtaacaagtcctacaaatgactcaaaggtggtgatgaagcttctccaaaagcaagtattcacttattttggaacacctcaggcattaataatcgatgaaggtacttattttgtgaataaaattcttgttgccttgttggtcaagtataatctcaaatacaagattgaaactgcttaccatcctcaaaccaacgggcaagccgaactttctagccgagagatcaagggcgtacttgagaaagttgttaatcctaatcgtaaggattggtctcataggtcactctgattctctttgggcttactagacaacgtataaacacctttgggtatgtccctttatcgattggtgtatggcaaggcttgtcatttgctggtagagctggaacacaaagctttttgggctataaagaagctgaactttgatctccaagctgct

SEQ ID NO: 312872 - DNA, 1760 bp, Cannabis indica
tattctgtaactacggaaaaattgttttcaataccagtttcattattccgcatttaattaatcacttaattaaataatgaaactgtgaatattaaaatacggaatttcaattatctattattcaaattgatatatatatacttacatacaaatctttcaaatataaatataaatattctaaaatgttgctcataaatattcaaaagtgttgcattttgaatcaataaagaaaaaacttgacccaatattttatatgattttttttatcactattattttatatgatataattgtatataaacatataatatatatatatagtaattataaataacaattttaacaactttattttatactacaaattttggtgtatatctctttataatgtagttttgttgagtcatatagcaacttttgttttaattaataaactttagatagaacttgtggttgttatcttttcatatatttaatttgacacctaattaatttagaattttgtccaacttatcttttattttaacttttaaaggcgtggccatgcatgcaaatgaccatgcacgtgcttatcacatgcatgcaaatgaccatgcacgtgcttatcacgagtcatgtaaataatggatataatttgatacaaaacgatagaaaattagataagtaagagttattggatatcataattaaatcaattaaatacatacaatatccatttcaaaaaaaaaaaacaaaatacatacaatataatttagggagtcatacgaaaaaaataagttttgggcctttatttaaagaaaaatatataattttaaaaggagacaaactttttttgaccccctagactaggtgggcattaggcaaaggcctagtccacctatgccagggccgagcctagatgatatttaaccaccgagtgtgtgatgtagatggtctgatgactttacactatggtcggccatgattgtatatatatactttaggagaaaaaaattattgggccctttatttaaaaaacacgtggtagtttcgaaaactactaaaaatatgtaaattttaaataaaaaatatttttgggtccctaggttaggtgagccctaggtgtgggcctagtccgccttagccaaggcccgacctttccatagtagcacttattctgggctttaaaagtggcatttatttgtttagtaaattttagattgagagaaactagtgagacctacataaattaaggaaaaattaacgaaaaagttctcctcccattttaataagaaatatctttctattttcttaacttactttatattaattatatatttattaattaaaaatataaaaagataaatatacccttcaaaaatctataaataaaaaataagttaattaggatttttgtcccttaaactttgacatgtatcaaatcatgtcccctgaacttttctggccgttaaaaattctccatgaactattgaaattatcgaatttaaggatttctgtccaatttcattcaattgtactaatttagtgattgtttatctactaacatgctccctagactttaatatctaccaaatcacgtccctcaaactttgacatgtgtcaaatgataccccatgaactttcatccatgttatactttccttactataattggacaaaagtccgtaaatctaacaatctcaatagttcaagagggatttttaacgacaaaaaaagtgaagggggcataattggtacatatcaaagttcaagggcaaaaa

SEQ ID NO: 312873 - DNA, 1864 bp, Cannabis indica
caatttgagttttttgaacgcgcgtggtaaactgggatatcaggaactctattttcggtactgtaaactattcggaattttttataaatttacagggaagatactgtaactataacgaatactggtatgaaaaaaaatatttcggcatgtgattttgaacgtagagattgactaagatcaggttgtaataggaggttttgattagcattcctcattctcttttattctataatggcttagtgaatgttgatattgagttatatatgtcataatttggtatattgagttatgttataattatttcatttactaattagttatttgtatttttttaagagccacattcaccgagttaggaattcataataaaaatatatcttgagaactagggcttatcttggctaccacgaacatcaattacttggggctcctgctctttagatctaatcgcaaggatgctgatttcaattccatcctcgacaaccttgtttcgaagttacatggttggaaattgaaattattgtctaaagttggtcgtgccacgcttatcaaatctgtggggctgactctgccagtgtacactatacaaactaccaagctctccaagaaacttgcttcgagaattgacagtatgattaaaaacttttggtggggctgtgagcagggtaatcgtggcttgtacttgaaggcctgggaccacctttgtcttcccaaatctagagggggtcttggttttcgtaaatccatagaattgaatcaggctctcctggctaagtgtggatgggcccttcacactgtggagcaaacgctatgctggagggtgttgagagccaaatacctgaaaagtaagcctttttttggaagcaacctataaaaattcagactcttggttctggaaaaatgtggtcaagactaaacctatccttagaaagggcgactgtaattttttctcaaatggtgaagatacgaatgtttggaagactccttaattgggttgttcatggaaaagagttttacccgacacccatttcttcttgtcatgagagggtggttaaggtggcagatctactcatgagtaatggagactaggacatctccatgctcaagtccctgtttgactctgacacgattacaaacatcctgaaagggggaaggccttgcggccaagggagagataggtggatttggactaaggaaggaagcggtaagttcaccactaagtctgcttatttgttacaggcaatggagagagcccctgcttgtgtggtggcgccgaccttgtggaacaaactttggaactccaaaattctagaaagacacaaaatcctttggtggggtatcctctcgaatgctctaccagtccgcggcctcctggctaggagaatcccaattgatgacgagacgtgccctttgtgtggggaggttgcggaatcgatggaacacatgttcctttattacaactttgcttaccatctctggaggtcctccccatggggggtgttcccaatccatggttttggtggtcaggtttgggattgtgttaaatttctttagaacatgaggttgaatggagtggacccagacaagctgttcctttatgcttcaatcgtcgtggacacaatatggaaaccccgtaatgacaaggtacataattgtcgaccgagtaacattgtgactgccattgactttatctctcattgttacacagattatgcctcctgtttattccctccgacgttacctgtggcttctcctgtttggaccccggatgactggatcaaaatcaactatgatgccaaggttggtgtgttagactttttatttgggcttacattaaattttattggttttattaaaacttggg

SEQ ID NO: 312874 - DNA, 566 bp, Cannabis indica
tttgtctttcgccggctacaattaatttacttaattgttaattcaggatacggcacaatagatatgaggcacatgctgcttacaagttacaacactataaaactgtcatagtaaaataagtgagcggtgatttgtcttcatgtctatgtctatgtaaaaaaatttagcggcaatgcacacataaatattacacacatttatgtgaaaattgtgtccacatatcattacaaaatgggagaaagttaaaatatagttgatttaacaaaaagtgtgttttaatattgtgccaaaaattgatgtaaatttgtcatttaataaattttatgttaaatttggcacaacatttgctatgatgtaaaatgtaaaatttatatcacaataaatgcattacttttttatttatatttatgtcatttgtattattattttttttttgtaattatttgtattattttattagtataattaactatagcattaaattgtaaagcattttttttggttaattatgatttttgtctcgtgaactttgatatgtaccaaattatgcccatgaacttttaagg

SEQ ID NO: 312875 - DNA, 1854 bp, Cannabis indica
gtacaactcaactaaataactaatatatcaaggcttgttaatcgatgttcatactaactaaaccattttggacactaacagtgcgcccactttcgaaattagggtataaaagagtatacttaaattctaaacgagaagagatttagggttgaagatcagaaagcataactctactttatgttaagaaaacggtaacctcaccactaatgcacacttacctcagtaatacattgtgtactgtatagctgtgctaaaggcacattttgttcgttctattatcatcaccttttcgttttcatttgtgtaaaagggtgtggtcccctgcctataataaaattttgtaagggcttatcccaatatatatggaataccctcagcctcactattcttgagctgagttttgcaatttattttgaaaagtccctttctcatcttggtatcaaagcaaacctgctcatgctttaatgttgtccggtaccagacaaacatgacaaggcactcaggacaatgctgatatttgtcagcaccctggaattgatgctcagtagcagaaaacacaaagggtacaaaacccttatcaaaccagctcctctctaggtaaaaattgatgctcacaatttggtcttcagccttgacaatgaggtatcgctcatactctctttggtaatactctatcacaaccatttgcattcaacctagatcacaacaattatacactctggaagacaatattagatggctatgataatggactgaaacaagctccacaagagtgtgtacctgtggagttccatcaggtcatagactaccagaattggggttcgtgagcgtatgagtaatggattatttgtgaccaacttcttatggggctctatggatctatgataaaaacccatatcaacaaaggtatggcatgcaatttagctagaggttgatgacttgtcttggagagtttgtttggagctcactcaaaagctagaattgatgagctcagagaatcttcaaattattcaaaaagggagcacatcaatggaaaattaccttcaattgaagagatcttgggtagacatgctttccttagtaggatatccttatcttgaacattgcttggtaggtaatgttctacgaggtctagttctggaatatcgacccataacatgtattcttgaagctagggaatcaatcagctgacaagagcttcaagaagttcttcttagctatgataataagctgttagatattattttacgttttttttgggtcttgttattaagttattttagttagttttatgtcatttagttttattttatgatttagtttgcttgtatttttaggtttagtgaataaggaagaaaatgaatgagtagagaaaaatggttgcaaaatagagaaagaaatgtattttcgttgttggcatgccaaaattggagtctttgggaagttttgggaaagcttgaatctttaaaaccaaggaattaaaaaagttggattagggccatgacatagaaattcaatgccaaggcgctcttggtgaaaagtttggcagaaagtttgcattttggatgctatacagaggccatggcattggtgatgcaattccgtggcattgcattcattttgtccgaaaattctaggtgcgccatggcatgagtttttctatgtcatcgaatggtttattttgtttgcccataaattttaggcacaccatctgcctaccccaaattgtaccaaggagcctccaatcaaaaacatgggccacttcatgtccataccatgtcgccacccacatagggttttgattttttctttttatttttgtcttgtgaaggatttagcaacaaagaaagtggt

SEQ ID NO: 312876 - DNA, 1074 bp, Cannabis indica
aacattaaatgttatttctgatctatactaataagtaaatctgattatattgaaatgagttttatttagggcataaaacccaacaacagcaggggccctgatctgctcagattcgcttctgactagctcgggtctgtccgagatccctccttgagagtctttagacttagtcatttttggggcagaagggtctacgacggtttgctcctcggagagatcaataactgcctcgaccggggccttctctctggaaggggatgtctcaccacccctaaacttcttggccggagaagacaagcccgagcttcctcccactctcttcttcaaagctcgagcattttctgagacacgtctctacgaaatagaagaaacatggttaggaaaaagaatgagaaatacgaaatcataataatcaggaaagttaaaggcaagatggagtgtctttcacatcgacagaaacatctgcccgagcaagacccgatgggacatcatcatctgacgagtcttcttgctcctccaggacggctttcccctttcctaccacaggagtggatggccgagcaggtagactaggctccttaatctgaatcgtatgtttgatagacatgtgcttggtcggaagtttcttcttccttttgatcagagtctccggctcttcctcaacctcatcttcctgctcaagatgctcctgagcatagtgctaggctcccgcacctcccttcaacttagtttcacgcttgtctcgaatgagttcattctcctgatgagctccttcagcccggccagcacttgatttcctcttcttctccttcacaggttggggaatgaaatcctttggataaagcccgcactccacaaagttggcctccgaggttaaaaaagtgatatttcgggcatcatccaccagctgagtgatcctttagctctatccctaagagctagcgtgaaaggtggacggtaatgtattggggtctactggaaccgagtataggtggtgcccatgccatccaccatgtaatatactcatcaacaaaattcccaattttgctcacggccttgtccccggtgcccgtc

SEQ ID NO: 312877 - DNA, 1471 bp, Cannabis indica
ttcaagtgtgtcgatcaacttgagtggacagctgttcgacgacttataggtcccttgatcttggaaagatgacaaaagctactaaatattcagctggagtcctcaaagaaagctagaagttgaaggaaattgctagtggttttggtttgggtttggccaaaccctaagggagaaagaaacaatgaatttcttccaacaatttctaatttcttctaagtctacaaaggagtcgccttcctatttgagcataacaaaattctaaataaaataaaatggaaatccacctagcattaaagacaaaaactcagggtaaattaccaatttaccccttgcttcaccatgaagtaactttaccactaaagagtattttggtcaaacctgacaaccccgaatatacttgatatttccaatgtctatctaaattgcctgctattactaaaatactaaaccacaagaaaaaatgatcctaccggccacacgttgcgttccactgttactgggcataaaatatgaaaaatatgaaatttcatatataatataaataacatacctggaattcaaatatatcaccataaattcataaatcataattaaaaatctaatttcaaaattaaactctaattatctgttaattcttatactaaagttaagtggtctttataggtgcggtgcgaccagtttgtgcgatgtgagaggtttgatgaacacccctaacttgatgtgcagcttggatctgggacaacaatccaagttgcaacttagacttcgacaacccacaaaaataggagataaatataatatatttacatattcttggaagataattaacttattaattatttattattttattatataacaaatacattatattttctatttgtttagggatattaggtaatttttctcttgtaatctctcttatataaagagtattaccttaaccctaattcatctaagtctcaagcaccctaaagctctgaaatcctaattctctctcccttctcttctacatgcctcaggctttgtagaagagattatgtctctttcatgtcacttacctgagatttgtatactgattctcatattataatcttaagagggccacttcagaatccacaacccttgtgatctgagtggtattatctttagtattaatacaaccgtaaggagagtaggtcattatccgctaactaaggaggtcgaacctctataaaaatattgtcttattattttcttgttcttattgtatacacgtggtaatatcagtcataaatacgattctactgtcggttggccaaatttaagttcaacaaggtcaataattgttattttaattaatttataattaataaataaatatttattattattatttattattttaagaaaaattgttatgtatacaatattttttttatttatttttcactgttaagttttttttttatattttttatttttatacaag

SEQ ID NO: 312878 - DNA, 1650 bp, Cannabis indica
tttatagtatggattgatgctatacattaatatgactagagtactgggtataggttgatattatggtcaatcatgctatagtcaagaacatttgagactaagttatacgcgttggacacagattataaacttatggcaattaagtgtacgggcgcctaattataggtcaattatatgattatgttttatgttttttttatgtttttttatgttttttttactgagtctgtcgactcacaaatatattttctaagtatagataaaggtaaggcaaaggttgaacaatagtgagtttagagcacaatgaagattgtacatatctagatggttagacctggagggttcagatttttggggcaacatgggctcaattttatagtcgttgggtgacacttttgttacgcggtattttgtataagtttgaaaaataaatttgggatcttgagatatgtaaaattttagaattgaatatgtttatttagtgaagtataattatttaaaaaatttaaattaaacacaattttacactaaaccatttggttagcaaaggttagcacattaattaagaaaaatacaataatgtgcctaagctagcaggacattattacataagagtttatttattaattaagatactttgtgggactaaaatatgtttaaataataattttatttaataattattaaatagataaagttaatatttaaataaaaggattagataatgggtatttttgaaaaaaaaatagattgtttcatttaattaaataatatggccaaaatcaaagccctaaggcccattagtgaattcagcctagacttatgattttggactcacattttttttttcttgccgatttaatctaaccctagtccattcgagagcttataaacagaatgtgatagagctttgatgaatgagaagttgttttaagcgaagaaaacactaaagtcctaattagagaaagttctctctctctctctctctattgaattttcaaattctctctctacactctctctggaaattggccctatagtgtgttgagtaccaacccactctattcaaggtggtactgagatctctgtagaagattgtgtaaaaaaagcgtttgtaaatttaagaaagagacccagattcattacttggcaatatcttgcttcataacaagaattaagggttaaagttattaaacgttagaagacatttaattctactgcaactaatgtgaggaattccaatcttttacatgttatttgatcatttttatgaatttcatatttgataatgttagattattatgtgataatgaaatatacatgattagtaaattaagagcctggaaaaacaagctcaaatagtcagtgaagtcaaaatattcagcttcatttaaggtttgcttttagttattttcttgttgctttatgattgattctactgtcaaagtaccgtatcaaccaaaataacatcatttgaaaatgaatccctccttggagtagatattgtttaattgtttttattgttgtgttgttgtcaagttgctacacatttgtatgtactgagttgttgtcactttctgtcattatcacattgttgcacactattgtttgggtagctacgaaaaaagattgtgtttctgtgttgttgaa

SEQ ID NO: 312879 - DNA, 3222 bp, Cannabis indica
tttttcaaacaaaaaatttgtaatatttaaaaataaaatacattcaaaatcttaaaaagaccaaaatcttaaatgaaactaacaatacgtggctcggcacgtacattcacctagtatatataaatgtatataaaaatggttcaatttagagttcttggaatatattgatcagttataatcatcactcacaaaattcaatatccaatattttttattttttataatatgcaggcataaaaaattagataacttagttttgaaagataataacttcaaatacatataattaaatgtaagcctatgcgtatatctcaaaaagattttatttagtaatgagtgaaatcggacaaaatcattatatggttaaattgttagcagactaaagaaagaagcaaattataccgtttaacaaaaaaaaaaaaaaaaaaaactaaacatgcacattaacacattctactaaagactaaataagcatattctagctagatatgaagaataaaaaagtgccaaaaatactaaatttccaatccaaacaaatatataataattatatctatggataactatcactacaagaatatcaatttttgccggcgagttggcaaaacaacgaggatctcgtcggaacagctttgccggtaacttttcttatcagcaaaggatactggcaatggcccgtcggcgtagcagcttttgccggcacctagtaagtgcactggcaaaagactttatcccgacgaatttatttgccggcataagtgcaacgccagcaataggactgtcagctgaggtcccaatgataaggatttttcggcgagttaacacgacggcacaaattggcacctactctttgtcggagcatgaactccatcaatattataataaatttttaaaataataataataaatataatatcaaatatattataaaactgaaatttatattataattataaaattatattacacttcacaaattaaataaaatatttttagttcataaacaataatattattgtacactgcagattaaagaaaactacaaatcgacagcaacatcgtcatcgtcgtcatcaccaggatgagcagtctgtgaggaggaccgaacaacatgacaagggggctgaaatggtagaatcagaggcatctcaggcatggtaaatcctggaacaacgttggccaattggatcatttgttgttggaactattgttttggtttgtatttagtgtttgtgttctaaaactaataactattcttttgggcaagctttcacttcacagtagatggcatgttgaatcatatagaagacaacccttttctcctatgattgtaaatactaaatacttaagcatctaagacaatgccttgtcttgagtcttgagtcttgagtcttggcttgacccttttcttcaagtcttacatatttattttttcattggttctttttaagcatcttaattatagtttggacaccaaaagaagaagctttgataaaatgagttgtggaaatgaaggagattgaaacacatcgttaataagaggaaaggtttgtaatgaggctgaattggtcaacaagagttgtcaacccaagaatctaatatctttctctttccaaaatctattattagaatagtgcatgaaattgagggtcccttctctcaaagccaaaactcctcaatcccattcctctttcacaaaaaatgacacacattccaattacccaacaaaaacaatctaaccaaaaatcaccaaaacatactcatctcctcttcctcattcctcttctctatttcattcctttctctcattcactttccgaaacagattcccttctcaaactcaaaaactcatttacacaaaccaatgctctcgcttcatggcttcctaactcttccccctgttcgtctcggtgggcaggggtaatgtgtttcgacggaatcattaccggtctccatctcaccaacatgggtttatctgggaagattgatattgatgctttgaatcaaatttcgggtcttagaacaattagtttcatgaataataacttctccggttcaataccggagttcaacaagcttggagttttgaaatctttgttacttagtgggaatgctttttccggtgatattccttctgatttcttctcccatttgaattctcttaagaaagtttggcttaatgagaatcaattcaccggaaatgtgccggaatctcttggccaattaactcatctcatagaacttcatttagagaacaaccaattcacaggctcaattcctgtatttaaacagagtattaattcacttgacttatctaataacaagctcgagggtgaaattccggtcatcttttcctcttacaatgctagtgctttcgccggaaatgatggtctttgcggtaagccattggacagagtttgctccactgtacaaacccaatcgccggctctgccagctgccaccgaaaattacacaaatgacaacagattagtcgtcggcggagtcgtggctgccatggtcattgtcttaatatatgctctgcttagctcaaagaacaatattgaagacgattttagtcagttggggagggaaaccacagacggcgtggttgaagttcacgtgcctagctctaaccggaggaatttggattcatccacccagaagggcagcgatggtggtggtggagatttgataatggtgaacgacgaaaagggtagttttgggttgtctgacttgatgaaagcggcggcggaggttcttggtaatggcgggttaggttcggcctataaggctgtgatgtcgtttgggttgtctgtggcggtgaagcggatgagggagatgaatagattaggaagagatgggtttgatgccgagatgaggcggttcggtggactccgccaccggaatatattgactccgttggcttaccattaccggagagaggagaaattgttagtctctgagtatattcctaaaggcagcctcttatacgttatgcatggtaagagataatatcttcacatattcattactccaaatattttcaagcaatgaaatatataataaggctaattaggatatttgcccctgaactttgacatgtactaaatcatgtcccttgaatttttaaggtcattgaaaatgccccgaactattgagattgttggatttaaggacttttttctaattttagtaaaaaagtttaacatggatgaaagttca

SEQ ID NO: 312880 - DNA, 693 bp, Cannabis indica
gtagcgtgccttagcattagggcattacactttataagctcagcccctattctctcctattctagatacataaatttaaaattgagtatttaaatatagaacataagtataaatattaatattaattataattaataatatatactttattatatacaataataataatatactttacttgtatataataataataatattatatataataacaattataatatagttttatatatataatagttttatttcactattaaaaaacataatatagtatgtataatatagtaattagtagaaaaattataccaacctagattaaagtaattttttttcttgtagttccctagtaacgacgccaaaacttgttggtaccaaaagttgtatgttttatatttatcaactcacaagcacacgaatcattattatagtgtagagattatgaagaacaaggtcaaatccatgagaattgtgtgagatcaaaaaaaatacttatttaatctaagctattcagactctaacctaatttcgataatggttaggtttttggtaacaaaataaaataaagtgttttaacagtaaaaatggtagtaacaaatatttttagtcgtatttgggaatattattaagggttcagaatctacttaagtatatataaaaatatttatgtttatattaattctcataatttaa

SEQ ID NO: 312881 - DNA, 438 bp, Cannabis indica
agcacatatactgattcgataggattgtggacattagagtagacaaaagattgctctttattattgtgtttattacaagtagaggttggagtctctacaatagtacaacaatgattacagcacatatactgattcgatagggatttatactgcatgtttgaagtggcaaggtgcacctacagagcaatgtttgaaagacttgagctatcatctccaaggtgatagaacccatctttgattttccctttaagctagactaccctcgtttccttatccttaacaaaataataagttttatgaaattccaagtaaacatcattatcatgagttagtttagacacactaacaagatttttagttatagagggaatttgcatgtaacaccctaactaacttaggcatattacgtgattttcaaacatactgtgcagctcgttg

SEQ ID NO: 312882 - DNA, 2135 bp, Cannabis indica
ataatctttattaaaataaaatatgtgagacctgatatttaacatgggtaccctttagcagtacacaaaaaagtataacttaaattttctatatagaaaataagtaatttatggcgtaaattaatacttaaatttaactctcagttgcagataaaatacctaagtttcaatttttttattagtaataacacctaagttatatttttaaaatttctgtagagacctgaccgttgagtgtcaagttgttattcacgtgtcattttttaattggtatatttaaattaatttttaaataaaaataaaaatttaatggcatggaccaatcagagattaccacgtggtcaataacttgccaggtacttatagaagttccaaaaatataatataattattattactgctaaaaattaaacttatatatttatttacaattaaaattttaaatttaaatatctatacagtaaattattctataaaaatatacattataattcttataactaacatattacattagttttctttttaataaattttaagtaatttatgatgtggaaataaaatttgtaagtatatttgtacacttataaatatttatacaactaattgcttgaattatatttttaatagcataagttatttaaaatagggtaaatattactttagattttgtattttgcaaaatttattgattggatcatctgttttgttaaatgacaaaataaactctgtattttctaaaatggtaaaaataagaccataagtttaatttttgacaagtttttttttaaatataaccaacttaaaaacaattcttaacacaaacaaatacaaaaaaatgtaatcagttttatcataacacctttagatcatattattattaaattttattttgacaaaaaattaattcaggatcatatttatatcattttagaaaatacaaggtctatttatcatttaacaaaatagagggtccaattagtaacttttgtaaaatacaggatctaaaatagtatttaacctttaaaatatattattaacaaaaatatataactacagtatatagatcattatttaaataacttaatttgcaatataatttcatcatatatgctaacaacagagacattcctactagtaaaagcaaatgtaatatcttagtaaagaattctacaaaatatattttttgttcggaaagataataatattgttctctcaaaataataataataataatattgtttaggtgtaatttagtttagtttatttatgtataaattaatttacaacgttcttcaaacaaaataagtaggattgtctttttaatttgagataaagtgagaaatatctttttttttttatatctattaaattatattttattaaaatatatcacttttgtgggtgagttgtctaatatatcctcaccatctacttaagtctaagtctagaatataatataaatgtgaatatatcttaaaaatataaaaataaaaacaaaaattaaaataaataaaataaatatacactataattttctcttttttaatttagggtcatgaaaactggagcataaggataagaccatccctttatttatattttactttatttttaaacttagtattataattttgtttaaaatgtatattatttttattattttattatgtcatattaaattaattttttttttaatttttttttttaagaaaaatacgtattggttaaagtcacctgatctcaacaactcatgaaaatttcatgtcccttggtcgcagcattcttgttctcgcccccaccgtgtttacatgcctaaaaataagggactaataattaataacttggacaaattatctactttttaatacaaatttgttgatatatatataaatagatatatataaccggaatgaagaaatttttagtttattttttttataacttatttaagatattttgtaaaatttttaaagaatttagaataatttataatatagaatttaatgttcaaaatatttatttcatacacgtataaaataaaaaaaatcaggcatgtaataaatttttttgaatcatatttttggcgtattaaattttttaaaattttgtataatgtcttaaataactacaac

SEQ ID NO: 312883 - DNA, 517 bp, Cannabis indica
tagaatgttaatgaaacatacattgatgatgatggctcgtggatgatggtaacctgtcgttggggaccggaggcagaggtttgcgtgaagctcaccccgggaaccagagggagagaatgaagtgtcacgtccgaagtcgtcctccgtcgatagatgcaaacaaataggccgaggtctgcgattggccactggtcaccgttcgagtttgtgcgagcactaggttggccatcgtggctggcagtgccgttgtgcaagggaagagagaaatattttctggggtagaggagggttgttgatagctagagccagctgtggcttaccatcgcggcaccaaaaagaaaggagagggagagatagagatcgggacaagatagagagaggaaatttaagtttgtttgtaagaaaaagttattgggaattgagttagggtttcaacacattctttttatactatatttatttttttattttctttttctttgattttctttaataaataaattaatagaaaaaaaaa

SEQ ID NO: 312884 - DNA, 1288 bp, Cannabis indica
aggagacatagttctcaagagccaaatgggacaccttcccattgagtgcattgatagctagcctcgagtcactctgcataataatatacttatatcctaaattcattgccatcgaaacaaccaaacaggccgcagcttctccacataacgcatctgagaactccagacgagacgtgtcaacctgaataaccttggccaggtgatcccttgcaacaccagcaatacacatgctctttaagcccactctaacatcacaattcagttttatcccatcctgtggaggagggttccaagttttcttcaagatcggtgtcggaatagtcaaaagagaatcatgcaactctgcaaaagaaatacaaatattgttaatatatttcaacacatctggggggagttattgtgtaccagttcgttgcgcgtcctccagatgttgtcaacaacaatcgatgcataaagaaaaatatcctcagcacggatccccttatgtctaaggtcccaaataaatttaatctaatcccaaacacgaatcccattatcacacacagggtaaataccccaaggagaagcacgccataagtgtggcgccatctcgcaagagagaaataaatattccatagattcctccccaaccccgcagaaagggcagtttgagttctcaatctggaaccttcttctaatgactgctctccgcattagaaaggatacaccaccaaagaactttatgacactccaagattttactattccacagcttattccaaagcgccggagcaacagcacaatgagtagctctatctaaggcctgggacagataagccgatttacacaagaattgaccattgctttccaaagtccaaatccatttgtccttaccttgccccgagggcttacccccttttaagatagcagaaatagtctctctccaaaaaatagtgttcagtttatggacatcccaatccccactagtcagtagaagatcggccacaactaaatgttctgacatcacattaccattcagttttgggacgaaacctttgcaatggggtatccaaggatccctccaaacactagtatctctgccattggtcaccaatttacaggccccttttttcaaaatagcatttgctttcacaacatttttctaaaaccaggaattagagtatttatatctgcaactgagaaaatcctttccttttaaatactttgcctccaagatcttgcagcataaagaatgacacccattcaaaattttccacccccacttggccaaaaaagcgaggttcatttc

SEQ ID NO: 312885 - DNA, 1196 bp, Cannabis indica
aaataagtctcttgcaagtctcccagtgtgttgttgttggtgtgtgagtaaaataactcaatttgttgatgatgaatacaaaatttggccttgttaaattcaagtaatggaaggcacccaatgtgcttctataaatataacatcttctaagggttcttcatctataagactcaatttgtaggttgagctagttgggttaggataatttttggctccttccatatgaaatttggttagaagatcagtaatgtatttacttagcaattctataaatctccactcccaaaaaatagcaaacatggcctaattcttttaaaagtaagactttgttcagatcagttgtacattacttaaaaaagatatttcctgaccgtttaaaatagtcaggtgttgtattgtcgtcggtcactataattgacacctatttaactgacatataactggatagaataggcatcagtagaaaatagtcggtaacaagatttatcgaaacttcaaaaccgtcatcaataaaggaagaattatcgatggttttaaatcacgatcaatcgctattgccgacaattttgtattatcgactatttaataattaaaaaattaaaactttattattgatttatttttcttcttcttctacttctttagactataaacaaacgagaaactcaaatttaagtcaaatatttgactcattacaaattaaaataaaaacaaattagtttacgttttctcactaatcttcttgggaacaaacagaatcccacataaaaaaaatcaaaatgaagagaaaatttgaacatagttttaattttaattttattaacttttgaacaatgctcattaataatcactgacctaaattttctcttcacatactaatttataagaataagtgaaacaattactaaacaaaaccaattcattaaatggtttgtgtttaacttacaagaaaattaataaagaaattcactaactccaacctataaattttgaggggtcctaggttcgctgagacggcaacgaggaggtggcttgtttggatctccgttcggacgagagagcgaggacgaagagagagaaggtggaggtggctcgttgttcagacgagagagtgagaacgaagagagaggatggggagagagaaggtggccgtggtggcgttgtagatcgtcgcggttgagagagagagagagaga

SEQ ID NO: 312886 - DNA, 1482 bp, Cannabis indica
gatctcgctttccttgattgtctcataatcttacaccgctctactaagcgaagaatcactcgttgccttttctttgcgaataacatgtgcagtagcagaggcaacaatagtaagagctagtaagcatggtaaatgtattagcgaccgaagttagtgctctgcgctctatttagaatgtgaaatcactagaatatgcctatgactacttcactttttttaggagggtgtcacataattaatgctatgcaataattaaataaattatgatattaaaagtagagtttggaacttggaatacaaccaattgtaatattaaaagaatgataaaagacatcaatggtatttagcacatttctcgttgtcacgtcgctattgatgcaattaaacatcaagtctcatataatttaatataaaaactcttaagaaatattacttaccaattattagacgccacctctagaaagtgataagtaacactagtatctaaatagcaatgctgaaaaaataagcacaactgaaagttctaagttcctcgtgtgaaggacttcactaaaagagatctcacggtatcaaaaaaagggacctcacaatattaagcaaaacatgaggtatcaacacaaaagatgtgaacacacaccatgcaacaaaaatagcactcaagcattcaattgtcattaattcaggagttttacaatcgctataattgctcttatcaatagtgtcatcaaatatgcttaagactttagcatgtatttaaaaaaaaatcaaataatttgataccaatttatctttagcttattttaacaccctcattctgccctctttcacttaaaaaaaaaaaaatctccctctctatctttttttctctctttagatttgaagagaaaccctcgacgccctaagttcccttctcgtcattgttgccaccactagaagacccccaccgaggcccaaagttcttctagcaccacctattcttctcccatctctctcgcatagaaaagccaccaaaccttcaaaagcacagatgccccgtggttctttcgtattctcattgtcaaaagcccactgaaccagagcatgaaaggccgagaaccactgatccttgtcctccatcaccaccactgagaagacgaactagaggatgacgatctgcagcaatttttttttatagttgttaggttttcaaaaataagattcaacaattgtgttttaattttttgtgattttaaatgtgctttgtatttcttttagtgagattttagtttttttaatattctgggggttgattcctgagatgatggtgtttataatgtggttttatttatgctttttcgatagtatcctgataggttcaagtaataaagtatattgagaatgaaattacatattagcgctatactatcgggatagtatcaaaatcattactccaaaatgttttgtttaattcaaattaatgtgcctaataatcgtaaaaactac

SEQ ID NO: 312887 - DNA, 1013 bp, Cannabis indica
cattttaactagaacatataacaatgctattaagtttaaccagaacatagccacctctttagccaaaataaaacatgtgcttcatcaaataagggttccttttcggaagtggatcatccaattgcttcctcgacaaatgattccaaatcttatatgacatactctgtaaaatctcttagacaaatacatagtgtgccaacttaagctcgcaatctcatattctcgatctaagcagaataaactgctcttaaaaatcaaataagggaatgtcacacatgaaaggagtactggtcttgaacaaatacatactgctcttaaaaatcaaaaaatcgtaatttgctaagaattcatttctaagaatcaaatatcgaaaacctaaccgtaaataaatatagaaacaaagtgagaacaacaaaattgaaacgcaaacctgtctgacaagatgatcaatggttcgatagaaacagcgaagaggaatcaattcgtttatcgactatagtttccaacctaatttcaaaaacctaattgcaaatatatatagaaagaaaatgagaacagagtgaaatcaaaactctctttcgcaaagcaacaatgtgtattaaagtactgtctagatatacatatcaaaagtgagcgagactaaaaacttgtatgaaatagagaaaatgattgtttgagaagacaatttgtccaattggaagatgatgatcaaaatttaatttgagtaaaatctacaaacccataaatttcagatattctagataataattaaacagatgtcaaagtgagaaagataacttacctagccggagtgaagaatggagaccgactgatggagaagaacgatgcaaatttcaggggataatcgccatggtagcgtttgttcgtgaatgtgtaaagcccagaaaaataaagcccacccgtgtaaacaacatcagagcttgagagtgggggtcatttcttaaatcattttggaaaaaacaaaatataattacatattagataatctggta

SEQ ID NO: 312888 - DNA, 768 bp, Cannabis indica
aagtgggggactgaactgtagaaattaagcacgccaatgcaaggagccaagctttacacatagatgacagtgctttactctccaatcttgagaaagctaaatcccagattacttttgaggtgagccaagtatgaaggagatagaaggacaggtaaagtaggtcaaaatcgattgcaaggttgaagttaagcacacggacaacgaggccagtgctctgtactggaaattgtaccaagaagacgaggccaaggctaatccggataacaaggcatagttggaccatctaaaatctaaggtcttatctcttaaaagcaaacttctcaaagtgatagaggagaaagtcagtaaggaggctcgactgatgcttcaaggtgatgctctacagactacacttcgagaggtcaataatttgcaaaataaggtccatgagaaagaggtggttatgcaaggtatgttgggaaaagctaacaacctgaagtagaagatcgaggacttgaaaaagagaaagattcattatcaatcaagtataatcaataagatattctcctacagggtatccacgtaactagtaatgctcgcaaggataccatagtggagtcacagaagaaagctggccaccatcctactaacggtatgaaagcttttatcgcattgctagtcatgcaaagggctcgagagactgccgtgaaattcaactaggatgctattgaggtagaggaaaaagctgagaggttcaagcttcaatccatggaaatgtcctactcattg

SEQ ID NO: 312889 - DNA, 1298 bp, Cannabis indica
atataatatatacacttttataaaaaaaaaatatatatataaatcggtttaattcggtttattcgggttaattgggcggtttagaataatttgtaaaccacccaatatattcattgggcggtttagatttttattgtattatttcgggttgtattttttatcggtttattcggtttggtttgagcggtttattcgggttgggcggtttgtaaattttattgaacacccctaatggacagtagataaataaacgacatcagaaatttatagaggttcaactctaattatatggtaatattttttagtatttgcttattggaatattaagatcacgagaaccatagtcagatgagtttctcaatatttctcaaagaattacaagtgataatttgtgtagcgtattagctctcttgaaaatatgaatttggtccccaaaatagtgaaatgagccactatttgtagagttacaagtgaataaatggtgttaattacaaaatattcaataaatattgattattccctaatctcttgaatttgttgctcagataagatgaagaagaagataataacaactggttttacagcttaacactaagactaataccgcgcatgctcaggtttgtgtgagaacttttaatctaaatggacaaaggcgcgctcaatttcaggaagttgttcaagcttctcccgtaagaagtaatcttctttttgcttatacaagttatggcaccattaaagaattaagtttctcatatacatttgatattgatagaatctccttcttgtaggccatagaacaaatcaccaactcccaagtatctacaccaatcaaatttgcatttcccaagctactcaaaactttaatcaacaactccatatcacctttctcacacaacccatcaacaatttttttctaccctcagaaaaaggtgcaaaacccttaaataacatctcatctaagaaaattgctgcttcattaaaccttctacaatcacataacccaagaaacattgttctaaatgaaacaatatcttgtttgtaaccaagtcttgataaatcttcaaacaaatcatttgcttcactccattttccatctttacacaacccaccaattatgatattataactaattacatttggtttacactcctcttccaccatatgatccaagaccttgtaagctgcatcaaaatcattttcaatacaaaacccatgaatttttgcattgtaagttacagtatgaggtttacaaccagagattttcatctcctccaaaatccaataagcttcatctttct

SEQ ID NO: 312890 - DNA, 1029 bp, Cannabis indica
cacagttgaagagggcttaaatggattaattggtactacctatatcaataaggtgcatcttattttttggtagcccatcgcgaaagaactccatggttaaacgtacttggcctggggcaattttaggatgggcgacctcctaggaagttttcccagaaagcgtgcgattgaggaaaaagtacactgaaaaaataacatgcttgcattatttaataacaagcatactagtcttgagggcacaaaagaagacgaaggaagaagatgcggaggagaatacctgattgaagtctgattaaagtgtagctttgataaaatatcaaattttaagtatccttctcgagctccattgttacagagacaattctctcttccacttcatataacagtcttctatgtctatattttagaagagaaaactctgttctcgtcaatacagagcaagaaaatcatcgactttgtcggattccatgaaatggatttcacttgcattgaatcacttgcactatatttgaggaaggagatgagaaaaagggtttcgttgaattttcaatttagggctttagggatttatgaactgaaatttaattttttttaattaatgcttaactggatctggtcagctccgacccagaaaaaacctaatcggggtggggcgaacgcccgaatagcaatccgattgtaccgagcagaacttccctgtcgggttagggcctcaacccgatccacgaaaaactctaattttccattcctacttaaaaagtatcccataaaaattttaagtattaatattgccattatttattataaataacaaagaactaaaaaaataaagatgttaatatcaatttttttcattaaactcacaagccaacgtaaattaggcacgctctagggaatgaaattctgtaaaacaattcaccattattgatagtcgtcatttttcacaaccactaaataatgatctgcctgtatctctaaccatgccatcaaattttttaggatcatgaataaactcttcttgagcatcat

SEQ ID NO: 312891 - DNA, 914 bp, Cannabis indica
caaagttttaatttagagattctctatctcaagattttccattgaacctgattacactaagttgcactcggattgtacacctcgaattatctattccaaattacaaatgctctttaaagagtttcatatatatagaaggaaaatctcacttcctgaccatatttaataatgagaaatatatcatctcccaactatatgtaattaatgagaggtaattcaaaccatatgtaatatatgggggagcataagtcaaaagctgctgcatagcttcagaacaaatgtgacaaataacaagtcccaaatctcttaaaagttgaactatatatttgcaactttaagataatttgacttttgagctaaagccaacaattatttttaatcaaacgccacgttatgttctattgtggtaaaggcaaggttagggtcaaaattgattttttaagttggggttttctagtcttggtccaagcttggaattctagtcgggttaaaggtttgaggttggactcaaggtcgagctcaatgtctaaggtcaaggtcaaggccagtcccaagtttggatcctgggttgagtcaggatccgggtctttagcaaggcatcgggtgttaaagtttgggtttgtagtcggggtcaggctctggctcccatatctctaaatttgacaacgagatcgatttcgagtttaggattggaatttggttctttgatgaacacttcggtgatattgattattagacacaatgaaaagtacaattgcacaaacatggctcaggcccaacaatttgggaaaaaaaaaaaaaactcacgaggattaaaaagtggggatgatataaacacatataacctcaaacaaaatttgtctctttgatttatatatctttaatttgctcttttatatatggggactattaca

SEQ ID NO: 312892 - DNA, 1994 bp, Cannabis indica
tcattaaactaagtgtgtttctcaatgtatttcaaccacctcccttaatatttgcctaaatggaggacgatttgggaaaattacgccctcttgtggtctttgccatggcgaccccctatcgccttacctcttcatttgggctacgaaaattttgtctagactcctggttgatgctcagtgtaaggccattatcaaaggtattaggctcagtaggagggcctattatttctcatatcttctttgcagatgacctaatcttggttggaaaagcgaatatggagaaggtcaaaggctactagcaatgccttgagaggttttgcacctggtctggacaataagttaataagctcaaaacctctattttttttagaaaaaatacttccaatagtatgaaaagaggaatcaaatctactttggaaatcagctcccctgaaggtaatattaaatatttaggattacctcttttcagatccagacaaaaggatgccgacttcaattttatactagataacctcacatctaaactttaaggctggaaagctaaaacgctgtccaaagcaggtcgtgccactcttattaagtttgtgggtttatctttggccatgtatggtatgcagacgacgaaactttccaatcgtttggctactaagattcatggaatggttcgtgaattatggtggggatccgagaaggggaaccatggtttgcatctcaaagcttgggataagctttgcctccaaaaatctttaggggccctgggctttcaaaaatctgtagaaatgaatcaagcgtttctagcgaaatggggttggcctcttctaacaggcaaccaattcctttgttgttagatcttggaagccaaatacctgaaaggaaggccttttcttaacagtacctctaaagattcagattcatggttttggaaaaatgtagtgaagaccaaacgtatcttaagaaaatgggcttgcaagttggtggcatatggaaagaatacttttatttgggaggacccttggatcgcccacaaaaaagattttttccctagacctaagggttcttccatgcttggggtgaataaagttgctgagctcctgtatgatgatggtggctggaatatcccgaagttaaacagtcggtttgaccaagagaccgtgtttgcaattttgaaaggggatacaccgtctggctagggcaatgatagatggatttggactttggaaagtaacggttgattctcgagccaatcggcttatcttgaccaagcttttgatcgggcaactcattgtgaggtcgccccctcactctagaacaaactgtggaatagtaaaatttcagagaggctgaagatcctttggtggtgcttattgtccaaagcaatcccaatttgcttggagatatgtaaaacatttcctatagaggatgttaaatgccctctctgtggaacagaggatgaatccattgaacatctttttctttcctatcatgtggcgtctcacttgtggcgatctgtggcacgggtatccggatgtgggattgggtcaaattcttgtggaaccttaaatataaaggaatcaactctgatgagatctacctttatgcttcattaattgttgacaccatctggcgaattcgtattgataaggtacacaataattgtccagttgatgtatttacttgtattgacactatttgttcttcttttgcagatcaccatgcttcgatgctcccttgttcacctccgattggggcagttgtctggtgccccctcctcaagactggattaaactaaattgtgatgttaaagtgggatttgacagcatgtgtgctgtagttgtggcaagggatcatcttggcaaggtgatttgggttcatacgtctagattggagtttgctgatgtgttatgtggagaagcgaaagcttgctgctttgctctagatgttgcattggacaaaggctagaagtttatcatggttgagagtgatttgagggtgtt

SEQ ID NO: 312893 - DNA, 3385 bp, Cannabis indica
aatatgtttagatctgtgatataaatatttcttgagtgttttataaatcttaacaggatcaaaatacacaatacatgtaattcggttcttagagacaaccacattttcaaagttgaaaataattttcaaagcaagaataatgccaccagcaagcctagtagcatgaaccacgatactaaaataaaagtggagtttcttaagaatgctaaccaacttagaggcatccgtcttaagctcgaacaaaaatataatgtcagaagaacatggcctaaccaaagctttagttcaagaaccgtagaggtctaccctaactctctacagctccatgacaacccagtcatcttgccttaagatgaggtgaaaccccaaccagcaccgtagaaggaggtgaaacccaaactaacacaaacaacaaagccccaccagagccttaaacgatacaccacacattaacattaaaacatagactagaactcactgacaaaggcaaaaagtacaaattagaactcaaaccaccacacaacagctagacacccacaaacatcttcaaaaactcccactccaaactcgacaagacacaaacaacttcaaactccaaactctataggacacaaacagaatgtaaaacaaattattgaattattctatttagttcctataaataattaaccattgatattttttcaagccacgatatatcaacatcatcatgatgagaagttttcaggaatttcactgggattttatttgatttgaacatataaaaaaaattgaaaaaaataaattactaactaataatcaaatacgagatagcagtttatttttattttgcacaaggtttattattaacaaagttattgttgtaatatgatgtatatcatgccgatacaagtacacacgtaaaaattagaagttagttgttttgtcttgatagttaattcggttaactgtcagttagttatttttgtattctttttattggttcgagttgtataaatagttggagttcaaatctttgtatagtgattagccttgtgcagttctctctctctctctctaaatgtaattctctccaagattaataaacaacacagttcattcaatctattctttactggttcattattggttgttaccagttttctggttcattgctgcagcattcctgctgttgctattgttcatgtgccttggtctttgagcgctcgatcttgattgttacaggtgtgattgatcataataagtggtatcagagtaaggttttagctcaatcaagattcaatcaaaggctccaaaaatcatcaagaagatggttgcaacaagattcgaaatcgacaagttcaatggaactaatggcttcgggttatggaggatcaagataaaggcattgcttgtccacaatagaattttaaaagcaattgatgaagagagtctcaaggaaattaaagatgagaagaagaagaaggagatggaaaccaaggcacatagtgccattcttctcagtttaggtgatgaagtcctaagagaggtatctagtgaagacaaggctttaggtttatggaaaaaactcagttccatatacatgaagaagtccctatccaataagctttatttgaaaaagagaatgtacactcttagaatggatgaagggaaagatttgaggaatcacttagatgaattcaacaaaatcactctcgatcttagcaacattggagtgaaatcaaatgtagaggatctgacaattatactgttgagttctttgccaagatcctatgagcattttgttgatacaatgctctatggcaaagaaactcttacaatgtttgaagtcaagactgctctgaattttaaggaaaattagaagaaaactgaggacaatcaaggtgacaatggagaaggtttgtttgctagaagaaagacacaaaagaaagatttcaagaactagaaaggaggctacatgggaaaacagaaaccaaagtcaaaggatgactcaagggaaactacaacaagaagtgtttttactgtaaaaaagaaggtcattttcgagatgaatgcttggctctgaaagccaaacttaagaaagacagtaagaagaacagggagaaaggaaaagctagtgttgtagcagatggctatgaatctgcagatgtgttagtggcctcaaatgcagattctagtcatgaatgggttcttgattctggatgatcatttcatatgtgtccaatcaaagatcttgaagaaagaaaaggggggacaatatttcttggtgacaacaaggcctgtcaaatccatggtatcggttcaattgtgctcaaaatgcatgatagagtcaagatgaagattcagaatgtcaggaatgtaccagaccttaaaagaaacttattatctattggtatactgactaaaataggttgtaaggttaaaattgatgacaagtttctcaatgtcttaaagaattctaaaatggttatcgaaggagaatttagaaatggtctctatattatgattggtgaaactattttttattgtgtcaacactgtttcatcaaaccatgatcttgaccaaactaaattgtggcacctaaggcttggtcatgtgagccgaaggggtctgttggagttagaagaacaaggaattcttaagggaaaacttggtggtaagcttgatttttgtgaagaatgtgtgtatggaaaatgcgcagacaaaaattcagcattggcaaacacaccaccaaagatccacttgggtacatacattcagatttgtggggtccctcaaaagtgtcaagtttgggaggatcaaattactttctgagtattatggatgattactcaagaaaggcttagaggcacttactcaaaaccaaagatgaagctttcaaaactttcaaggattggaaaattctagttgaaaaccaatctggtaagaaagttaagaaactaaggacagacaatggcttggaattttgctccacacaattttcaaactactacagagaagttgggatcgggagacacaaatctgcaccaaggacttcatagcaaaatggcttggctgagaggatgaacaaaaaacttgctgaaagggttagatgcatgttgaagggtgctagtttggaaagaaggttttggagagaagctgttaaaataacttgctatttggtgaacagaagtccatctactgcaattggttttaaatattatactttctttttcaaaatacaataaatatattctcatgaaaatttaaatttgagttgcaaattaatttaaattaatacaacttaaattaatattttcttaatatttatttgaaaattactactaaaatggaaataattcaatttattttaatcaccatctagaaaatttgagagtgtttggat

SEQ ID NO: 312894 - DNA, 1102 bp, Cannabis indica
gattgtatatatagtggcagagtggctgtgtaattatcagcattcgggtttagttgtctttttcgttttgggtttaatttttgactaatttattagaatactaaagagaagaagcgttaggctgtctcttctgctagtttaattaggtaactttaaaccagtttaattagtaagacaaaagaagagtattttgtttttttttttattattatatcaaattaacattttaaagttaattctattattggctgtaaacttaactagttaacattttcattactttttcaggtaatgtggtatctttaacaataagtttggaaagcatgactttaaaacaacgatataaattcaaagtgcttcttttatagcaatatacaaataaaataaacaattagtattgaaagaagtagaagtaatagtagtagaaaagtaaattaaaatccctttggtgtttggttgagaaaatcagggttttgagaggcccttaaagagagacaatacttagcaatttgtctaaacttaggaacactcctaagatcaaccttagtaccatctttaagagtaatgataatatcaccccattcaccaatgaaacgaggaaccacctgaacgtcctttatcacctcatacgagaaatcactcctatcctcacccgtcagtccagatatgacagtcacccgcaggttagtgaatctgtacctgagaaagaaagctcttgaaaccgcagctattgtgagaggcagccaaaccagagtgaaacccagaacaaggttcgccaaaaggtcaccgtaatgagccccaccgtcgaagaagatggtttcttctttgttggtggtggtggttgttggagaggatgaggacacgtggagccttgtgagtggtctgtttaagttgggaaatgatttagaggtgaagttagggaaatgaaggaatctagaagaagaagaagaagaagaagaagaagaagaaggaaagaaggattgggtagttggagttggagtggtcagagaagagagcgttgaggccattttttcttttggaaggtctctctctttctttctttcttatccacttattacgaaagtggaacacaacaacatta

SEQ ID NO: 312895 - DNA, 1207 bp, Cannabis indica
tattttgatttaatgttgtgcttttcaaggggagtttattgtatatttttactaacattgttttgcaggtgtatgtcaaataaaaatattttgattatctaaaatgacaaagtgggagattgtaaagtctttatttggaaattaattcaaaatattttttaattaatgtattttttttctgcaattaaattgactttattatattgatttcgtgcctctaattactctcggtctcatatgtttaggaaacttgtcttacaagagaaggaattctcttatggaaatttgtctatttttagaaaatttgacttttttttattgatgattttagtttttccttgattagagcagatcaaataaattttatttgacaagtattaaagaccaattcgtgatcttggtccatttagaaaagtttcctttttagtcctgatctgctgcagcagagtccaattttgatgctgtttcttttgtaaaaacctagagtgttcaagctaggttttagctttgtttattgttcttatgttattcttagaataggttgaacaactctattgaacaagagaaggatcttcgggagaagacttgccaaaaccttacttcgggaggaagtaagcactcacacatcaaaagagaatgggattttgctatttattggtgtttcaaaaatcagattggcaaagtaaattacaaaggattgtggcaaagctttagagagagtctaaacttgtttaagtcaattgtattagtaattatttgaaactttacaaattgatttcattctctaggtatagccccgtggattaggagtgtttaaaagaacctaacaccatgtataattctcttatgttaagttttaatttatgcactatttagttttgttctgttactgtaaatatatgttctatagcaacaagtttttattctgttactgcagattgtaacaattgtgtttttctaaaatttaaaaaatatattgacatttataaaaatattgtttttcaattttctatggtcattttaaggcatgaatcacaaaaaaaattgtatgtctttttgttttctcacttcatctctctattttttttctttaaatatctagttgccagaaagtggcaattgattatgtcatgttgtaataaaaaatgaaagaaaaaaataaattatattacttgttttgtactgcatgtgtttttttttttttttt

SEQ ID NO: 312896 - DNA, 2290 bp, Cannabis indica
ttgaataaaatagattacattgaaatggagttttatttagggcataaaacctaacagacgcaacaacttcatataaaaacttaaagactctaatggaaattgggtggattggtctttgggtttgccacaaataatggttgattatgtttctgctctttttgcttcttcgaatgctgactagagagaagttacaagcagcgtccaatctcgtgtttcagcagaccagaatatggagttgttgcagctggtttctgatgatgaggtccgtaaagccttgtttcagatgcagttcaacaaggccccggggcctgacagaataacaccagcattcttccaaaaatgctggtcggttgttaatcgggatgtcatacagctggttcgtaatttctttagcactggacatcttcttgttggtttaaacaacactaatctcgtattaattcccaagaagaaacaacctatggatatgggcgatttaagatctattgcactttgtaatgttctttacaagatcgtttcaaaagtcattgctaataggcttaaagttgttatgccttctattatatcggacactcaaagtgtgtttcttcaaggtcgactaatatttgataacattatgatctcttatgagataatgcatcatttgaaaagaaaaaaaaaggggtcgtgacagtattatggcactcaagctcgacataagcaagacttacgaccgtctggaatagggatgtcttcatgccatgcttgagaggatgggttttgtatggaagatggatcaacttggttatgtcttgtgtgggtacgtatctcttacatgatctcccatgggggaaaggagttaggtcccgattaccacacaaaaaagacttcgtcagggtgatcctttatcaccatatctatttatcctctatgccaagggattctcaagtttgttgtgtagctatgaacagagtggattaattatgagctgcaaaattgctagaggagcaccaattatttcacacattctttttgcagacgatagttacatatattgtaaagctactgaggaagaagcgcataatgtgaatgaattattgtacacttatgaggtggcttcggttcaaaagattatttacaacaagttgtctgttttctacagtaataataccagcacttatcaacacgatacaatctgtcaaatgcttgacatctatgaggcggatgagaatggaacttatttgggtctcccttattctgttggtaagaacaagaatgccatccttggttttcttaaagacaaaataaggaaaaaaaatccagggattggaaggacgaattttatctcaaacagggaaggaagtgttgctcaaatcagttgcacaatcaattcctagctatgctatgagtgcctttttgttacctatggatacttgtaaggagttggaacatcttatggaaaaaattttgtggcaaactgactctattcataaaacaggtgttagttggatgagttgggatcgtttgagtcgtcataaacatgttggaggccttggctttcgatgtttgtgtgattttaacatggctcttctaagaaagcaatgttggtgttttctagtcaatgattgctccttggtgagtagagttcttaaagcaaaatattacgctcatggatccctcttttcagatgagttgggagacaacccaagcttcatatggaggagtatttcgaagctaaggagctattacaagcaggtgctacttgaaccattggtacgggtgaacgaatctctatcttaggagatccttggcttcctcatcacaccaatagttatgttttgtcaactcatcctgctcttgaaaattattatgttagcagcctttttaagacggactcccgtgcttgggatgaggaaatattaaagatctttttaatgatagagatcaagagtgaatttttcaatccaactaagtgatactgctaccaatgattgctggagttggaaatttgagaacctaagacattactcggtcaagattgcttacaagtatcaacaagaaataaaaggggccttgtttaataatggtgctactggtttttggagggacttgtggagtttgaaagttcctccgaaagtgagtaattttctatggagagcagcactttcgacttgttttagttgaagaaacgacacgttccattcaattatatatgccctttgtgtctctcttcagatgaaacaatatacaatgctttggtggggtgtgattttgctcgtgcgtgttgttggatattattttaccaggatct

SEQ ID NO: 312897 - DNA, 1450 bp, Cannabis indica
tttctcataaaccaagaattatgttatataaccacattttatatagaatagatataataatgtatatttacatataaaagcttaccatttttgttttctgcggcattaatgtctgcttgttccttggctgctacatctgagcatatgaaaagaacaatagcaagtaaaagaccaatgtaaaccaaagttttagagcccattctttttcaatttttaagaaaataatagtaatgtatacagagaaggatatgaaaaaaaataagcaattgttatttgtatttatagactgactgaggcataggaagaaagatatggagttgagaatcatttactctaaaatcattaattcccataatatccacacaaaattaaataatttcctagatatacaatataggaaaattattgagtacactctccaatatattggtacaccctgtcgtgttatatataaaatactcaatccaatttaattgacatccaattaaaaattttaaaattcacatttatgcgaattaaatgttagttgatatgtaaaagtaagcgatctaatctaatctaatccaatccatccacatatttatattaattttaaaaaaattatatataatattaatattttaggaaaaaataaataactcaaaaatctaatacatatcatacaaatatatttcaaaacctaataaattaaatgtatattttattctaacttataagaaaaatataacctaaacgaaatttaacatttctttgtacgtacattcttttcgtattcctttgaattttttatttattgtttcagttttttttttaaatttattcttgaagacataaaataacactaatttctttaattttattattaattatgtgaaaaaaaaaattatttcataattgttatcccaattttagcactctgacgtggcatcacaggttggtgacacgtggaatcgactccccataatttgcccgaaaaagatgttccgaacataacaccgaacatatctccacggacaaagtcttcttagccgaacagtggacaatccgaacagcatgccaacacatagcaacttcagcacttgcattgtgactcacaaaagcaatctctatagctctgggatcgtatcacagagatatggcaagctgtcaaaatccctcaatcagtgtattctatatttaatgtgtaatcttaccaattatagacattgtaaacaaaagggaaactttccctcaagctcaaggtcctatagatagtgatctaatctcactgggcaaagggtcgaaagaattatctaagagagtatatactcagagatatcgttgtaagagctttaaggaaagaatcattgcattctttgttcttaagtcaatacaaatcaaggagagtaggctattaccgaactgctcggggccgaatctttttaaaaattctgtgttctttatttatctt

SEQ ID NO: 312898 - DNA, 937 bp, Cannabis indica
gaaacaaatatacaattactttttcgattactatcattgaatgcaatgtcatctccacgcctccgtctaaagtgagccaccaagaacattagccgatttgtattgctgccgccttcattttatagataaaatatttggaagtgcttccggtcacgaataaaagtgttcgacataagtaaatataaaattgagaaacactaaccacttcggattttacacataagtattgtaaatacatatataaacctgattaataataagaaaacaaaaccatgcatataaaaaatagcattgcagtgaagggataaaagttgaaaatcaaaaaaagattaaaaggatagaaaacttattgtcattgattatacgaccaaccgatttgagcgactccaaagcgacaaaggcgcctacttcaagcgaattagggaggtccttgacggcacctgagatcacttaatggaagacagaggtctccttcttcaactcagagccgaactcctctcgagatcgctactataattgtggatcacagacacagattttgtggccaaggactggaaaggtctgccaaagctccaagtattggtgcggccggcagaagagaaccgatctatagctgtttgtttgtttgtaaaacatacaattttttccaattaatatcgtttttttgtttcatgagaaatttcaattttagagtactattgctgtttaaatctatttattgtgttcattttcattatctcatgttttgattgaaactaaatgcagtattaagaaaaaaaattctgaacaaattaaaccctctttttcttttttacaaaaagacaaggttaattagcaatttcccctcccccccctcccccaactttgacatgtactaaatcatgtctcctgaacttttttgaccgttaaaaattccctctgaactattaagattgtt

SEQ ID NO: 312899 - DNA, 2272 bp, Cannabis indica
aagagtagcaaacctataaatgctatatttttgtaacttttttacaaaatcccatatttcatgtaattttcacttatagatacctaaggtataacattagagtgatttaatatttgttttagtttaaatattattattattattattattggacgtcaataagcatcactacttagaaatgatattatattttttaaaagttattactttaaagttaataatatgacattaaaacaacaactattttttaacatttctagttaaataatacattataaattgctagatatgtgtttttaattaattgcaccaataagaattggttggattgagggcacgtatgtgatactactattgcttatcttttctcatcgattttactatgtatataaaaagattttctttctctttttaaaggttgcccatttcagtaggaaagctcaacttccaaaacatttcttattttaatgatgaacacatataggaccattattaacaatttatcgttttgagagggaatagtatagtaagtcctttcttgatgaattattggtggaatcttttctatcttctatctttgagggtaaaagaaaagcctaagtaacaaaatgatgatagttctgaaaccattaccaaaaaagtgtgaaaaacaattagtatatgaacgtacatgatgggaagtttcgagataaatttccattcattcagaatatatataatgtctccaaatcgctaccaatattatatatcccagtgacatacagaaaagtttgaccctgtgtaggccaaactttcaacaatattattatgcatactgaccaaatattcttctgcttacaacagaaatattatactatatatactgcttttcaaaataagtatcatgaactattttgtgaataacgtattgtaaaagatagtagccataaataccatatcaaaaggacgtgtatagcatagacaccattcactgttctaatgattgcatagtagtagttgctaaaagttatataatatatatacataaaatttgtataggtgttgctagaatatataatatgagtgatgaattcacactcaaattggacagatttattacacaaaataatatgtaataaatattaactgcttatatatatatttatatatatattttggtaaatcaagaattatattgaacacaactgaacattacaaatatgcaacactttttttatcataaaggcctgattgtaaaacttcttaaaacaactacacccatttacaaaatgtcaaaccaatcttcatctacaattttttatttatttttggataatactatatattatatatttaacatcgtgagtaatattatgataagtctgagagtgagtctgggcagaaaataaatttgaaaagtcttcaatatttttgagtaacaacactgaaaatgacttgaggaaaagaatcatgaaaattactggtatggcccaagcaaatgcttatagttcttacctggggcttcgtggcatgatgggtagaaacaagactattgtcctaggtttttcgaatgatagagtaagaaaaaaagttgaaagttgggatggtaaaagagattttaattaagattgtggctgaagctcttcctagctacgccatgagtgtctgcttgggacagattgtttgttcataaaaaaaaagtggggcgcatggggtctagatgtcttcctgaccacaatattgctatatttggtaaacaagcttggcgccttttcaataatgatcattccttagttggtaaggttttcaaagctagatattaccctctaagtgttgggaatattttaccaggatctagatttactaacaaccatgttgaattaacatcctaaatatgaattctctaaaacaatgaaataaacgcataagggtttaagaaaccttacattgattgcaggggaatctaatgactccttccgttcaagatctctagaccttgattccgttctgtagcagagcattatcaagatctgaacctggatctctttctctccttcgggtttagttaccaccgtcttactcactaggactgagtacttgatcacttgctatgtgtgggcaagacactcattcactataggttccgaaagtgaagaacagtgaaggaggtaaaatctctatagaaggaactcttgcatctaggttggttgaatagtcaagtttgacattagtttgacaaagtgtcaagtggctgagatgagagtatcatgttccttttatagtgtttcaacta

SEQ ID NO: 312900 - DNA, 2953 bp, Cannabis indica
ataactgtgagtcgacaaattcagtaagaaaagtataattataatcataaatataaaacggatgataattaggtgcccatacacccaaccgtacctatccccgcgccctcagcggtactgagtctagaacgttcatacgataatactattgaccataatatcagcctatactcagtactctagtcgtactgatgtgatagtgtcaaatagtacttgagccaaacatacatttatcggtatccaatacaactctacgtatattgatacctctatcaatgtaatctaacaggctttataaacatgcacgctaaacatgtaatcacatatgcatatcattatactaatcttatctcgtttccgaattcaagtgtaccaatcaacctaagtggaactgctgctcgacgatttacaggcccctaagtcacaatattcgtgaaaccagtgagtgacacactaaatcacttttcggggacttaaaatcaaaactaaaagttttcctatcgatgcataacatggcaatactctaaatatcataaaaataagaaaatctagggtgccctaaaatgcccaaaccgacagactggttcccaacaggaaaactgattctgtggggtctatcaggggatgaactggtagaccggttcctacaggtccaaactgaaccagtcgaccggttcagtacaagaaccacaaaaacacttctaatcaacccaattcgaccccaaatcaaaccaaaccttccaaagtacctattcaagcctcaaggaacataaaccatgcaaaagaactgaataaaaaccccataattgaaaatcaccaagagagagaaaagtttgagctccaaagtccaaactttgctcaaacaaaataacaacactcaaatcagttctaaaccagatcaaataacctcaaaacaacctctgaaagcataatcaaccatcttttaatactgtagaaccctaactccaaaaatcatgcctagaacctagcttgaaaattaagaaatcaaagagaagggagcatgggagtttaccttggattgaatcctacaaattctgctagaataccaagaattaagtaatcaagcttgatttttctgctggtttcaagaagggtcgagagagagaagcttgaagagtgagagtgttttgtatctaaattctaatattttgattaaaatgaaataaaataacttaattgttttattaatacaatataacataaaaaaaattatattttcataaacttaatttagtcttctaagtcactaaaagacaaaagtccacccaaggcaaaagattattttttcccttactttaccaagaagcaaccttgccacctaaaggcattttggtcaaatctaaaaccaccaatattctcgatattcctggcgattgaagtctcgaacagcaaaaatttctttgaaataaaagagcttttctgaggaggagagacattccaagaactcttgtgatgcaaatatttcttacggaacactttgcaccaaagagattgagactcggacgtaatcacccacccaagtttggatagcaagggcaattgaaatctacaaatttccaaaaacccaaaccaccacatgtctttggcttgcataaggagtcccagcaagtcaaagcgagatacacgttcttattatcagtatcaacccaccaaaactttctagtggctttatcaataaaatcacatatggtcttggcaagaaaaaaagttgacatactatagaccgaaatggattgcacgacactacaaatctatgtagccctacaagcttgagagagaagttttgaactccactcttgcaggcggttattaaccttgtccacaaagctattttagcttttcaaaaagctgccctaaatgggactttaaattaaaataaataggacctaatattaaattgagtcatatgacatttcataagggtactaggcaccatgagtgtccttttaacattcccaatttaaaaccaaattttgacatttaaaaattaaaaattaatgttctaatttttttaatatttaaaaaattatttaattaatttttgtatttttactttcctaagaattgaattctaaaaatcaaagtaaagactacaggtgcgtgtgcggggtgtgggtggtccagattgataattaatgacatgtttgatttattgtaattaatattgtaatagaatcatgattacaattctaatttttagtttgcctttaaactcttgtaatatcattccattgtaatgactattacataacttgtatgaaaagtaagggtgtttgcagtgcggatagttggattttggccactttttcaaatcaaaccgcatatacagtttttataatttttcaaaccccaaccacaccgcaaaatcttaaaatcacgaaaaaatacaccgcgaaaatacagtacaatacaatgcaatttaggtagtttgcactatccattatcaaatattataataaaagcttataattaatttcaaaaaagtttcaataatataaaaaaaatcttattaaatttttgacatcataacatatacatatgtgaacaatacgagaagaataaaaaatgatgagaataattatatagatgtttccttaaatttagttgtataacttgagctttgtaaacatatgagttgttcatatctgaaaaaaaaaatcatattgtaaaaattaatatttttgtaacatataatgcagtgcagtttgaaccggcgattattaaattcaaaacttcaaactgcactgcaccgcgcggtttgacaaaaatacaaaccgcaaccgcatcgcaaagaattttaaaccttattttttatgcggaatggtgtgaacggtttgatgaacacccctaataaatagtgattacactactcctatacaatacttattaaaattacttaaaaggactattttacccttattgtatagttttt

SEQ ID NO: 312901 - DNA, 1375 bp, Cannabis indica
tcgtcgatcccattggcatttttaaatttttaaattttaatttttcccgtcaaagaatggaaagaatcttcatctgggcactcctcatttggatcactctcaccattccaaggtcaaattcagtagaagatgaagtgaagaaagctatgatcgagttcatggacaacctttcaccacaaaatgatgtagtactaagacttggcaactggggatggaactcgacttcggacccttgcaaagacaagtggttcggtgttgaatgcaacgatggattaactacagtgaggaaaattgttcttgaaaagcttagctttaatggaaccttcgatgcttcttcattgtgcttagtgacctccattactgtccttagtcttcagaccaacaacctcaccggaaacctcccacttgagattggagactgtaaagcactcactcatttatacttagccggaaaccaattctccggtgaccttcccgactcacttgcccagcttagtaacctgaaaaggctgcatatttcagataacaagttccacggaaacctccctaatatttcacgaatctcgggcttagtatcttttgtagctgaaaacaacgagcttagggggagaatcccagatttcgatttcaccaatttcgataaattcaatgcctcgaataacaacttctccggccaaatcccagatgtgaaaggaaaattcgaagccgagagttttctgggaaatccttatttgtgcggaattccattaccaaatctctgcccaccaccattaaaaacagagaaacccaaaaaaatctcagcaaaaaagattctcatatattcgggttatgtgatcatgggctcattcattttagtattagccattttcatattcctcaagagaaaaaaaccccgaaaggaaaacactgaatctcgtagcgccatgccgagtagtaccattgcttccggcgaaaccagaaaagcgcggtcggagtattcattaacgtcgctggagagcgggaggattccgacgctggtagttcttggaagtcctgggaagaagacggcgacacttgggttgtcgtttgaagggctgcttaaggctccggcagagcttttggggagaggaaagcatgggagcttgtacaaagtgagagtggaaaatggggttttgttggcggtgaagaggatcaaggattgggatatttctttggaggagtttgatcggagaatgaggaggttggaccaggtgaagcaccggaatgtgttgccgccggttgcgttttatggctccgaacaagagaagctcttggtttatgactttcagcctaatggcagtcttttccaacgtctacatggtaaccgctttatttaatatctttattttttattttt

SEQ ID NO: 312902 - DNA, 1137 bp, Cannabis indica
tgagagaccagcaaggacattgccgtaatgatctcggattaaagctccaaaaccaattactgctcctgcattattacaagctgcgtccacatttaatttgaagcaccctgcatcaggtggatgccatttaggccttgtcttcgcaagtggagacccctgatgagcctgaggattgttgctactggatgtaacgccagaatcaacaggctgctgtgttgtagccttatgatattgtgacaaataaggggcagcaaaggaacagagaatggctgctggtttcggtttagtaccatggatctccttgtttcgttcagaccaaatacaccacatgagacatgtaattagttctaaatcagtgtcattgtgggcagcagcaaggtgggaataaatatcaaaacctttgatgttaccaatgttcgggatatacacattaaaatgaagcttgttccacaccgacttatctctctcacaacgaaaaatggcataaccgactgattcccagctacatttacaaagagcacaagcagtagagggagtgattttcctatgagcaagattaacagaggtagggagttcatcattaactagtctccaaacgaaaatttttgacttttttagggagctttagagaccataaccggttccaccatcgtctatttgtggatgatgatgaatgatcatccattaaatctgaacttacagcaaggtgatatcctgatttcaccgtataaaaactagtatcagaatggtgccaaataatcttgtcatctttgggaaaaggactaagcagaatagagaggatacgctcaatgtctatagttccaaaatgttgctctaaaatctgaatatcccattgcctattcgtagagatatagtgttcaacagtgaagaggtgatcaccaccataataatagggagtaaaagaagtattcccaggtaaccaaggatccattgcacatctaacatttcgcccatcaccaattttccatcttagacctttcaacaacaactctttaccatcacatatactctgccaagtgagagatggtaaagtgcctttctgagccgagaggaaatcaccatttttaaaataccaggtgttgacctcgcttttagccaacgacagtgagtcttatt

SEQ ID NO: 312903 - DNA, 743 bp, Cannabis indica
attattattattattattacacatttatatttctctctcttttaaacttaaaacaaaaccctcaatcatctaattcttaaatatttcattacagctcttctcttttgccgcaccttatttcataaccaaatatattttctcaactaatacgaagaagaagccaatgccagtctcttgaatggcaccatggtcaacctattctcttttgcgcacacagtggtggttctgctcatagtcagaccggatggggcaactccgtcatcatccctatctttgttctctctctcggcaagggctctcttctatcattgacatcctcgatgctcatctttctctctctcgacgagcactctcaccattgtttttggttgcttcgttctccatcacactctcactcaatctatctctcccgctctcgatagtctcttgttggcaaccatgacgccttgatctatcccgatctatggagaagaagccatcctttccgctggattctactcagcattcttctcagccgtagtctacaccagggacggagggactttagcccatgtgtgggctaaagccctcactcaaatatatacattaaattttttatatgtagatatatacatatattaattcactttgctcaatttattaaagtccaattcacaaaagccctcactcaatatcttaatcatgattcatgagcctactcttattctaatcaaacacattttaaagtagtccaatacaaataa

SEQ ID NO: 312904 - DNA, 1317 bp, Cannabis indica
ttcctcaattattcataattatctaattagggtttagctaatccatctcttaattctagggtattacaattcattacatcctggcactacaaaaatgtatcaagccttaaaacccttttattgctggcgtgggtttcgtatcttcatgcttgacttgttagcatattaaggctaaacatcaaggacctacagcgttgttgcaacatttgactcttcttgagtggaaatggtaggatgtcacgatggactttgtggttgggttacctacaactatgggcatttttgattccatataagtacttgttgatcgatttaacaagtcagcacactttctaccagtgaaaaccacatacacactagatcagtatgctaaattgtatgtaaaggaaattgtaaggttagatggggactctaaagtcaatttttttagataaggatctgaagtttacttccaagttttgggcaagtctccagcaaaccatgggtacaaagctaaagtttagtactgcttttcatcctcaaatagatggtcagtccaaaaagacaatctagatattataagatattctacgagcttgtgtgattgattttgaaggctcttagagtatgtatttgtcgttgatagagttttcatacaacaatcgttattagagtatgagaaagatggccccgtacgagatgttctatggttggaagtgtagatctcctattcacttggatgaaactagagaaagaaagtacttaggtagggaataggtactttagacctatgaggcaataaagaagattaaggctaggatgctagcctctcaaagttggcaaaagatttatgtagatatgaaatgcagaaatgtagagtttcaggtaggagattatgtattccgacgagtatctccgatgaaaggaattaaacgtttcaagaagaagggcaagttatgacctagatttacaaggcctttgagattctcaagaaggtttgattagttatgtattgtatagccttacctccggcactgtcagcagttcataatgtatttcatatctctatgttgcggaaatatgtctcgaatcccactcatgtgttgagttatgaaaacctagagctccaaaaagatttggcatatgaaaagacactagtagatccttgacaggaaagacgaagtccttcggaataaaaccatagcattttgtcaaggtactctagagaagcaatagggtggaggaagctacatagaagttggaatccgatatgagggctcaatatccaaagttgttcgagttagattttcaggatgaaatccttgttgggttttatgc

SEQ ID NO: 312905 - DNA, 882 bp, Cannabis indica
cccgtttagggaattagggtttcttaatcatattgggtagcgtgcctaaatcttagggcgttacatcgatcctcaggtcgcttagctcaaccaaactgtggctgacttgcaacgagagctgcgagactctctcaataagtaacatgaacgatttcaacacttgttcatgcaaaattggaagaacatcgaaagctaatgtgttaagcaggaacaacggagacttaacctgtcttagcggactagagaagcttattgctctaattgcggaactacttcccaaagaggttttttcgagttagtgagagagacacctctttaaccaactggtcacatgggaactagtatccaaagtgaaacccttaatgttcagaacaccactactacacctagtaactgagcaggcactaggcaaacatcgggtgtggaaacctcccaaaaagaggtaccttcgatcaagagttcgagaggactcaagctcgaggccccaaccaatgggccctccacttgatgttgaacaatcacgtaacaatgagagaaccaacaaggctcctccaccaagtcctcctcaacgttcttaagaaatcaggcctctagaccccgcaaggggaaaggtgtatgggtttatgccctgaaaagcctctaaagatatttctaattattaaataaagagttaaacatttgatatatatgtgaatgttaagttattaatatttattattgaataatttatgttaaatattagaaaattccttattcaaatatgaggttgtggcttgtagctgtacagagaactaagaccacttgctatgaataaaacagtcagcaacaaattaaagttatgaaatctttaattaatggctgctagtacagttcactgatact

SEQ ID NO: 312906 - DNA, 607 bp, Cannabis indica
tcgaggataataggaagaattgacctcgcttgggatcgagagacagagctcaagtgtaatattctaggattagtacgtaatttgcaaccctaattaaattgattaattataaatgagaaattatattattatgtaattaattatgtaagattatttgaaatttatttcattgaaaactccttttatgagttaggggcatttttgtaattttagcccgagaagaataaaatcgtaattttattatatactatgctaatggactatattattatatagtatgttcattttataatattgcaaataattttgacaagttaacgcggtatagtcacaatcaagtattttggctcaaaccgggtttgaaatctaaagtttatgatctttgtcgttagggtaataatcagaattgtatgatcatatgaatatagcgtgtgatgtgaattttaaaaatgcccttatttgttaaatatatagaattttagccttaggggcaaaggggtcatttaaccgattttactaaaattgaaattatgatttctttggctaagatagaaaataaaaatgatattttctaatttttgaacctcctccacctctctctctctct

SEQ ID NO: 312907 - DNA, 1645 bp, Cannabis indica
tgtgaaaaattaaaatttattgtcagacaattctggtgggatatggtgattaaaagaagattccttgggtgaaatgggaaaggatatatcagcctaaggcgatgggtgggctaggattttgggttttttaactttttaatcaagctcttttagctaaacaagtgtggagattatttctatacccagattccttgcctgctcaaattctaaaacataaatatttttcaaattgctctatcctaaaggccactgaaaaggatggttcatcccatctttggtcgagtttgatctagggaatggagttgcttaaatacagtcttcaaagatccatcggtgatggaacgcaagttcaggcatataaggacccatggctcccgcgtctgatatctttacagccaatcacaaggaggattaatgatgattgtcgggtaagtaaatttatacttccctctagtgcttgggatgtggtgaagcttcaacagatttttttgccaatggatgtagacataattctgtctattctattagcgaggcaagcaacaaaagatgggtggtgcttgaactatgatcaagatggggtctataatgttaagagtggctacttgttggcgtggtcgctccaagttgaggagggagttgtagatttatccaagttaattcgctggtggaatggagtatgaaatctttctatgccaccaaaggtaaaagtttttgtttggcatatgttccatttagcgttaccagtagcaacacaacttatcttcctaaaagttcaggtacctcattgttgttcacgatacagagaagaatttaaaactctcaagcatgctcttttttcctgctctggtttgattcctatgtggcatcagttgggggtgcggtcggtgctccgtcaatgtgtacatggacaatgcaagaaactttcctatttctctttgatacgctatctcgtgaggcttttgaattgatgatgacaatcctttggtggcttggtatgatcgaaactcagtattgtttagttataagcagttgagattagatgttgtttcagatttaacccataatcatctatcagagtttaaggagtatggtcgacagggctttcatttgggactgggtcttgcaaacccagttgtacctactcgatggataccaccacctcctaattcctttgctctagcaactgatgctttggtggttccagggaggggttttgttggattggggggtgtgatacgggatgttgcgaagtgtggtttggttggcgtggtcatctggtgtgtggtaggtgatttttttattaatgtggcggagctgcttgccattcatttgggcctaactctcgcgcatcattatgatttcagtatctccattattaatagtgattctacagtagtaattggttggattaataagcttcacttgaattttagttttcattcaattttattatatatcttttctttattagctgttggtggtggtagttgtagcgccatttcatgatcggtaaatggtgttgttcacacattggcaacctcttttactaatttaagtgtttgtgtctagatatatgcttgttcacgatttttgagtacttttacaacaacaaatttgtcttaatgaattatttctttctttcaaa

SEQ ID NO: 312908 - DNA, 1042 bp, Cannabis indica
gacattaagcttacaataaaaaagaaaaaataatcatttactactatttcccagcccatctgatcaaatatttatatacttgaaaaaaacagaaactaaaaaatgatcaatcatttatgtaattaataaaagaacatacctttgttgaagtcaaaatcgaacacataagagagagtaaacatgtaggtgttttttttacttttcaacaaaggaaaaaagaataaacaaatataatattgacattaatatatatatactaataaagacataccaacttttatatatacactaataaagacatacactaatagagaattatcaaatatgtagttgttttgtgaaactaaataggtttttaacagagtcaataataataaaattgtgttcatgtggtgttgctaacttaggggtgacaactatgtttttattgtttatgctaaggttggtgaaaattatatgtcaaaaatactgtagcaatgaaaacccttcatgttcttaacaatatctcaataggtcaataagagcctcacatgacctataccaatcttgtattctcaggccctgatgtcacaggttggttggtatccactgcagtgactatgaatcccagacaacctctgctcatcaagtccttagctttcaacaatgttattcttggtatgcgtgccccctgaaccttacccacgaacactgatgggttaccactatcgggctcaaacactaccatcttccgcttgcagtcgatcattgccccatacttagaaagaaaatccattcccaggattatgtcaaaatcagacagttgcaattcaattagattggcggtcaattcacaaccgtcaatccagaaagataaagaccgaattcacctagtggatacaataaggtctcccgaaggtaacagggtaccaaaccccgaagcatatatatcacatggcttataaaaactttcaataatctactccacacataggagtgagtagctcccgaatcaaacaacacagtatatgaacaaccataatagacaactgacctgtcacaa

SEQ ID NO: 312909 - DNA, 1939 bp, Cannabis indica
atacttgtgagtagatctaagttcctggtaaaatatatttccaacacaaacagaagtagtgaatcgaactttagaaacttatcttcgttgttttgcaaatgagaagccacgacaatgagccaagtggatagcatgggcagaatattagtacaatacaactactcattcagccaccaaaacatctccctttactgccttatatggtagagaaccccctcctttaattcgttatccagctcaatcgtcgcgagtttcagcagttgatacgttatcggttgatcgtgatgttatcttagatgacctccgcatgcaattgttgcgtgcccagcagagaatgaagtcccaagctgaccagcaccgccatcatgaggagtttaaagaaggcgacttggtctacctcaagttacgaccctacaaacagcaatcggtggctaagagaagatttgaaaagctctcaggtaggtattacgggccgtttacagtgctagcaagagtgggagtcgttgcttacaagctcgagttgccccccatttccactatccacccggtttttcacatttctcaattgaagcgagttattggcacaacattgtcctcccctactctaccacccatgacgcctgatttggaagttcacatggaaccagaaagtgtactccgagttaggcagcgatctctcaacaacgacaaagatttggaggttctcattaaatggaagtccctcctgaaatttgaagccagttgggagagctttgctgaattcaatacgaagtttccagatttccaccttgaggacaaggtgagagtgcaccccaggggtattgttacaccactgctactgccacttaaagtgtattctagaaggaataaagacaaaaaaaattaaagaaaataagtgtacatgtatttgctgaggtggcaagtaagtgttatctttaggagtcaattttagtgggctgggtataaatagaaaagtcatattcttttattgagatatagagaaaattgtatagggtgaatattactcttgggagatacctggctgtctcaaaagctaggaaagatattttgtaattgtttttttatcattaataataccagattttcttcttcttctctatggcttggccatttctaatttgaacctattggaaagtgagtaattgtgtatcaattttcaccatattaaggctttaagttacttttgtaattcatgtatttcctcttaattatgaaagttgtttgagagaattactatattcatgcatttgctttctgtaagaaccacggtataggacgcatgctacaattcgtgaatcaataatcatgatagtgcctataagatacccccttataatttataaggcaaatgcagaattttctctatattcgtcataatccaataataatacgcacatttggggaaatacaaaaacaatgcctcttaattttggagaatttcttgctggttttagtttagttcaatatttttggagaatttcttaagttgcataattgattgtgtagggaatttcttaattttctctactgttattggacatatctcatctcatctctctcattgtgtttactttggtaactttgtaagttttttctcttcaattttaatgactctcttttgctattatcataaaagtcttgtatctccttcactgtacttttaccaaagtttcacaattacaagaattcaatttaattttctttttttcattgatatttctataattggtttggtaaggcatgtgagtgagtgttctcctctttagaaataaaaactcttttctctttctcttaactctaatgtttatgatttaaatcaattcggtacatccttattataagaaaatatattggtagtaattagttattgttgttgttgttgggttgtagtggtggtggtggtgcgatattggttcag

SEQ ID NO: 312910 - DNA, 1029 bp, Cannabis indica
tacacatagagtttaataaaatctccagaattgagaaattacaactctaatgcccaatttctaaaaataggtcgcacaatataattaatcatgcataagtataaaatttaaataattaatactaattgcctttactaatttataatctaacatgcagtcattacaaacataaacaataaaaaaaattacgatattgacagaagggaattacttaattgctaaatcgatgatgagctataaacaatgaaaaaagacaatgaataaagaaagaaagaataaaaaaaatcataaaatcttgcaattttttttcttcataaaatagaatagtaaaaatattcctgtgttccacgggtcgtacatatcatctatgaaagtatcgaccagtgttactcttcaaatgaatttgccacagtaattatctatttttttaacaaataatatggataatagtgagatatagatgagtatatatgaggacataaattaaaaaaaaaatatttgatatttagaataacacatcataacgtaatgtattgtatattagtaatattttacaaagattggatcattatgaaaattttaaacaattattctaataaactaatttttacttcaattcttattattaattattaaaagaaacaatcattacttataatagtaggttatcttaatttttacttttattttccaaaagataaaataataattctttggaattattacatgaaaattcaaaattgacactatatttataaaaatactcccataaagtgtgggcagcaatattatctttaatgaacttttatttaccaaaataccacttacacatattcattcatgttagcccaaaccatcttctaaccattacccttttgaaatccacgttcaaaacccacgaaaaccacctcccagccataatttttgccatttttttcttccgactgcctcctatatcaatttttgtatatatcatcttctgcttctccatctccattgccaaaaaaacgcttcaaaaatgggtcataa

SEQ ID NO: 312911 - DNA, 5319 bp, Cannabis indica
ttaattaatattttttaataaaaaatttaaatgtggtaaaaagcaattgaaatattacttcaagtatcacatacaactgattctttttattattattattattatatcttaattttttttttttaaaaaaaaagcaaaaaacgtacacattagagttattatttttatattattatatcttaatttaatttttgtaaaagcaaaagccaaaaacgttaatgtatatatattgattgatattttatgtatgtatataaacaaaatttacgattaattatattttatttaagttttaatatatttttttagaaattattttttattttcaattattttagaatattaatttgaaaaattattaaaataatagtaaaatatcaatttgaaaataatttacgagatcccagaataaaatatactcttttggatttatcataaagttttattataacaagttattatttttattctatgatttaaagtttaatttccacatagtttgtgcttagtcgctatgggtggcgttccttatgttaaggcgttacataaccatagaaacgatgtacctatttattatatttactactgttgttttttaaacaaatattttcactgttttagttactatgttttattggatcactacaatttttcatttctaggtctaaaaaaaaataacaaggagaagatgaaacagatataaatttatgagacatgagagattaatttcagtcaagccaacatagtacatggctcatatgaaaaatataagtgatgaaattgttggacaaatatggcttagttataacaatagagattctcattgaaatggaataatttagattattcttttatcgaggttcaaccattgtcatagtagcagagcacctagtattagtagaagaagaagtagcagttcctgaattatgagtagtaatagtagtagtagaaggttggaaagtgaaaataggttgtttaggttgaggttgatcaaatatttgattagttaacatggaagccacttgtgccatggaaggtctatcagaagcaaagtcttgaacacaaagaagcccaatatgtatgcatctcatcattgtttttgatgattcattaatacatgactcacccaatgcttcgtccaccaacttaattcctctactttcactccaaagttgccatgcctgcacattcattcatccttcattacattacatcaatgtacaaattacaatcttgaaacaattttaaaattcattcactcacatatgcaataaggccttggtatttcccgcttattatctctagtatcaacacgccatagctaaaaacatcagatttctccgaaaagattcctctcagtgcgtactctggagacatatagccgttgcaattcattcattcatgttaatgaaaattgagttcagtgttttatttgtaccatttgaaaaatacagggtctattttgtcgtttaacaaaatagaggatccaattagcaatttttacaaaatacagggttcaaaatgatattaaaaaagaaaaggaataataataagaaagagatatgatatgatgataaattgatgatgcttacttacatagttcctaccaccctatgagtatttgctagatctaaggtgccctcaaaaatccttgctaatccaaaatcagaaatcttcggattcatcttttcatccaataaaatattactagctttcaaatctcgatgtattacccttaaactggaatcgcgatgtagatacacaagacctctcgcgatcccctcaataatcttgaaccgcgtgctccaatcaagctcagcgcttcttcttcttctatcatctgaacacaaaataacaaattaacctaaatagttaaaactaaaacttacattgttaaacataaagagaaaaactaactaaccgaaaatgaaagtatccaagctcttgttgagcatgaactcatatattaacaacttctccccattctcaatgcaacaaccaatgagcttaacaagatttctatgttgaagtttggagatcaatatcatctcattcctaaattcttcatccccttgtgatgagctactagatagtcttttcacagcaacttccttcccatgtaattctccctgaaattaatgcaagcaaaactcattacttcactcactccctcactcgtgcaaaaccaaatcaaatctcaataaaccaataattgaccttatagacaggaccaaatcctccttgaccaagtttgtttgcaatactaaacctgtttgtagccattactatactatccaaatcaaaaaaatgaagctcaggttgatcatgatcatcacctcctcctctcttcaacttaccacttgtccaaatcaaatcattattcattgcaattgctgctgatttcaaataacaaacatacatatcaagtaaaacaacataaacataatcatgaagatgaagatgcaaattgaatatcatattcttaccttttctcttattaccattttttcttctctgcaaacagaagactacaacaaccaacaataccacaccagaaatcgctacaacaactccaaccatgatcttaatcttgttatcattatgtcctaattaaaatcaaaaaacacaaaacatttaacaacaacatcaataataatcttgatcaacaatgtcacattgttcttacctggttgttgcagtagcagttgtgattcgaaacccgaaaggcgaaaaaagagatcatctccagtagtattggattcaaactgtgtaatatcaagaagagtgtttgaatctgaccaaaccaaacacccaattccattgatgaatgaataagctatgcatgaacagttattcaaacacaatttatgacatgaatcaatgctgtttccaccattttccatgtactcataaaaatcaggaacacaaacctctccaatcacaccaaacacatcatcattctgatcaccattgttattatggcaaagattcaactcagattctctaacacaacccccactccaattcccttgactccattcctccattgattttggcttaaacccttccaaacacctacagattggagactcagtgatcttacaaaccccaaatggtccacaaattccgtaacgatcgcaattgttctgaccctgatagctagcgtaccagtaacctccgactctgtctttgaacatgattatcaccattccctccggcgaaagcaaaaccttggaagcaacggaatcgttatacccattgttgaagtaaaggtaagtcgttccttcttcaacatcttcaacaagattgtacggacttttatacgaagaacccatttcaggtactcctgtgaatttgagcttatcccaaggaccgctcctagagtaaatctcggatccgatccaaattactgcctccggggtggtcttcttcgctatgccgaagctgaagtttcccggagacggatcagtttcggatttccaggagatgagtttgtagttctctccggttttgaggttgaaaccgaggactgagcttggtaagaacgtgtctccgatgttatggaagctctgccataatactgatcctgaaatggagtctgtgaggactaagtttccattgtttaacagtatagcttgtgtggtgtttgatgaaatgtctaattcagttgaccagattacaaacgagttttgacttgataaaagctcgagatttccattgatgaagctaatttgaagaaatggagaagtgagagaggagagtggggtttctctgttggcaacccatacaactgaatgaggagaagaatcttccttgtaccaaatacccagataaagatttgaagaatttgttgggttgaagaaacccaattcgaaaacttggttggttgagaccagagtttgtttgggagagagtggttgtgatgaagaagtaagattgttagaaactgcatatgttgatgaacaacataacagaactacaaacaacagagttagagttaaagaagaagaagaagaaagtgccaccatttttaacaatattaactaacactgcatatatatatatattatatatatatatttatatgatgatgatgatgatattggttttggtttttagtttttacttagtggagcagtaatactagtaagctttcttcaacaaaacaaacctcaaccaatcaataccctccaactaagctttcttcaacccatagaatcaaaatccattctctctgcaactgaattgtttaattaactatatgtggtacgtagagatatgttatctccatttatagaaaaaaatgtagatagatgatgttctccatttgttcaattgatgtgaacattagtgggaatagatcaaatgcttgactattatgtaataatgtctctatctccattattcatgcatgtattattcaatttgacgtgtacgttggtgtgaaagctcaaatatttgagtattattaaatagtagaaattacgacgaaattataagagtgacttttttatgacatcaataaataatattatagggttatggatatttttattcttttatatttatttgagattttttatgttatatttttgtaaaaaaaaaaaaaaagaaagatagaaatcctatatttttaatataataataagtgttgccgaaaatatcaccgaaaaaattcccagtatcaaaaaagttagtattgtcagaaagtcaccaaaaaagtcattgtcgtcggaaaagtctccgaaaaagtcactggaaaagtcaccagaagtaatgtctcagatataaacaaaaaaataaccggttctataaaataatgaataaaaataaataacacaaaataacttaaatcagttataattgaaatataatcggttctataacataatgaacaaaaataaataacacaaaataattcaaaccaattataattaaaatagaaccggttcaatgacagtgttataatgaataaaaccaaataacacgaaataactcaaaccgattataattaaaatagaactaattatataacataatgagtgagtatttttggggtaaatatggtatgtgtgtaattatttagtaggttggagcatgttgaatggatgtttttgtttgagttattttatttaactagttttgtgtgtgtgagtttttatcttagttactttatataactagtttttcttgtctcaaactttttactagttgataaatataattggtttctttatattataatatttgagttattgtgtgttattttttgtgtttatttattttattatagaaccagttcttttcatatttatacct

SEQ ID NO: 312912 - DNA, 1825 bp, Cannabis indica
ttttgtttctttttatttattttagtgttgtagtttacagttgttttgccatgattatttatttgacgtcgattttattgtttttgctcaatctctccaagattaatggttattttccgactttcctggtgttgctgtggtggttctgtctgtgagtgtggaagatggatgcctcattattttttttggtgcttacagtaataaaagaaaaaaaaaagggaggacaacataaatgtaatttctgccatgtggcagtaaaattcaaaaaattcaaaaattttacccaaaatctagtatttttgtaaaaaagtctaattgtatatagtcttcttttggaaccggtccccactagggttcaaagtgtgcgtccatttacattaaagaagtttttattttttatttttatgggaattcacatatgaacccacatagcaaccaataaaataacttaagacaaccaaaattcacatagcaatccacatagaaactatcggagtaactaccaaagcaatccaaactgtaaattaaacaaaaaagttaaaaataatatatggggtagttccccaaattaaattgatgcttgtgtttaataacgtcagtgcattttgtttaatggtaattatgggtgtttataaaatacttaatccaattcgtattattcaatctaatgtatttcacaaagtgcgaattggatgttgatttacatataaaagtaacttattcaatctaatccacacatataatacaaatattttaatgtgaaaatattttaaaaaattacacacagttaatattttaatgtaaaaaataataatttaaaatctaatatatataatacaaatatatttcaaaacataataaatcaaatgtatattttattcttctttctaaagaaaatataatctaaaataaaattaaacatttgtttctatacatataatttttttttgcttaataatgacttttttgttttagcacttgtgcttgtattttaatcactgttcatatatattcttccagatgaacttgtattaataagtcctagctgcattcaatgaagccaaaactcaagctaataatttggtgaatgacaaaatcatcaagattcatactttggaaaatagtgttgaacatcagactattctttgagtattgtttattaatggattaaaaaaagatgtactcttaaatttatcctctataaatagttttctataatttgtatgagagtaaaataaattagacccaatattaatttacaccaataataataatactttacatcataatattcccgtaaaagtgcaatacacattaattacgttaaaacacaccattattagtcacaattcacattaattttttgtctttatgtgggcagtttttactgtagagttaatgtaataaaaaaaaatagtaaatgatttaatttgtaaacgtaacaccaaatatctatatatgtatatatacatgaaattataattattagtaatggaataatcatagtataataatataacaccaaatatcaatcatattatatgtataatgaaaaaaaaaatcaatattataggcatcatcaacttaaacgattttacctcgtgagttaaactgaatattaatatccacatcgacccctaattaaaatcaataaataaaaactacaattcttttcttttattttctcaaaattaatggaaaattagtaatgcatggccattatacattttcctttgaatgtaactgtgtctcataaagaaaatctttatatatatttaggtggcgtttggttggaggtaatgaaatggaatggaatggaaaggaa

SEQ ID NO: 312913 - DNA, 1277 bp, Cannabis indica
aagtgtttgtttaaataactcaatgaagtataactgagtccattcaatctttatatacagacataatcttttatctcattcatataatgaaaattagttattgatgtcaatttatatatccaatttgtacactatatttgggtcaccacaaaaatatatcactgaaacattttgttaattttatgatttgagttttcaataagactatcattgataattgtcctccttagctttcaattcctgtgctcatgcactaatggaaaaaactcatttaaatttctctaccactactgatagaagttttggatgacgatagcatagttactgttgtgatattcttcaaccaagtttttaaattgcattaatgcctccattttaaatggtcaataattgtcttgtactgatatagttgaacatttgttggttgtgtcttaggaatagaaacttcaagcatgaaatgattattattgttttgactttatctattttcagagttctttatttaaaaggtttctaaaaaatttaactagtttaggtgttaaggaaggccactcaactaagaaaatataaatttgaagtaagtcctttctaaatgctcatgcacaccaaaaatattctagatgaatatgtgatgaacggaccatcttcaatccacctactggtgcatccattgaagagcttatatcccctgattttgatgaattattaaagacattttggaaaacaaagtctgtaaatcaaataaatggagatgtaaaatacattagagtcccttatgatgctatattctcgtttttttaggtaacttggagtgtttttgacttctctttcttaatatacagatatatattgactaaaatctattaaaaaaatgtacaagatgttttgtgtctaaatatgactaagattaattcagttatcatagcaagttgtgttgtattctaaactatatacttatctatattaggtagaagcttatagacccaatgaactcagcttgccacggtcgctttggcattacaacaataacaaactctgttataagatttgaatttattttacttaattaatttgaaatgaaaaatatgaaaaatatattgagtaacccaattgaggctatacgctttgtaatagtggcattttggagggtggcctatgtctatattatgtttttcattcaatgcttaatgctatagctgataaggatggtgtaggagctactgatttgattagttcttgtgttctagttactaagtaagaaatcttgcttaacccca

SEQ ID NO: 312914 - DNA, 1190 bp, Cannabis indica
aattcctccactgatacataccggaaagccttttccgcggagtaccagtactgctcttgatctttcttagagattacctacataccagatggtaaagtaagtgtgttttttaagagtatatgacataagaatttcaaaggtataaaagagaaaaattatgttgataatttataatgcttacctcttggacaaaatcagctactccttttctctctggacacctaaatccacaaccttcgaaaaattcaagaacgtgatcacgaggaccatggtacacaacattcccttctgatattaaaatgaggtcatcaaatagttcaaatgtttctggtgcaggctgaaggagcgaaacgagtactgtacaatctgtaatgtgtgccaactgatgaatacaagcaacaatctgaaatgcagtagagctgtctaagccatttgttatctcatccatgaacaaagctttagttggaccaacaatcatctcccctgttgtcaatctcttcttctgaccaccagaaatgcctcttctcatggcatctccaatccaagtgtcagcacatatatcaagtccaagaatctgaatgggcacatcacacatcagatgagtgaaaaaacatacattagcatttggagttgtacaaatacaaagaagttattagttcggttggagaggatgaccttcagtatatagtctgtaaggagggttcttttcagtcccttcaccgaaattccctgtcaaaaacagattagcaatttgtcaatacatatttttagaacaacatccagctaaagtattatccttttagaaactgaaatgcaccttcatgaaagtatcaatatcagtatcaggtacaattccagcttctttctctcttctactgacctccttcataatctctacatgatcagaaaagacatcatcagtctgatacccaacatatgagtcatgatacatactatatatggctcaaaacataccagctcggcttccaacaccctgacaacgggctgaaaagtcaagtgtttcccttactgtcatttcagggatgagctgatcaaattggcttacataagcagcagttttctcaggaacaaactcctccactttgtatccattgtaagaaatttcccctgtcaactattaaagaatatgaaccaaaaaagtagcatcatgtttccactattttcacatc

SEQ ID NO: 312915 - DNA, 2802 bp, Cannabis indica
ataaacattagtgctcagtttaggcgggttaacccgaccaaatcaaccaatccattaggcaggttaaaattttatttttcttaattaggcgcgtgcacttagatttattgtaacccaatttttacgttaggctgaataaaatgcaacgtaaatcgaccaaaccgatcgacgtacacccctaggagaagtatattccatcaaagagtcgcctcaataagtcctaactcttcaaaactccttggatccctaaataatcaagtgagtgatgtaaaaaacaatcgtggtatagtttctccaaatgaaaagatccccaaaaggtgtcctagttatggaaagttagttggcatctagaagggcgttctcagaagtctatgtccactcaaaaaaagtcttcaggaaagcaagtctttctccagaaaggagttctggaaggctagttgtttcctcctagaagggagtcccaaatagtcgactctagctgtcacttctcctatctaggaagaccctttagtgtgtgcttcaattcttagtcccgaaagtgttcgcttcatccaggagcattataacttaagctgacgtggagattctgttatgaagggtttgttaagttttttatgtcgtaactaacttaacaacttaacacttgcaacaccgaccttgggatccatatcccacgcctatatataccaccaacacttatcatttcaagcatggtgaatagatcgagtttcaagaggagtttttgagattgagaaggagaaggaggaagattaataggtagagagagaggtacggagaaaagagacagattgagtttgagttttgtatgaagaatcttctgtaaatgaaaaatatttttggataagagtataagcgataaatactttgagagagtccaatagagaatcgatcttaacggtgatgtaccgtattcttgctcaatcaataaagaggattttggtggtgttctaggactggagtagagccatagatcacattggtctataagacttgaaccaatatatatcttcatcttggtgttaattttaatgttttatcgctttatcatttttggtttttaatactctattcttccctactttaatctccatttattgagtgtgaattgttagtcttgtcattgctaactgcttgttgattaagttttagttaatttgattctacacattagtcgtaattcctttacaaatcagagcttggtaatcgatcaagaatgcaaaatcaagattctttctgctacaattcttgaagaaatagttaacgttgtcaatgacgagattcaaattggagaaattcgatagaacatgggactttgcgctattgagagaaagtttgaaagagatcctagtgcaccagaaagtctccaaagttcttggagatgagaaattactggttcaaaaaaaccaaaataaaggagatggcttaatacacgatcatcatgtatctctccaatagtgtgaggagaaagcttgtcgcaggaaaggacggctaaagggattagacaagcttgaagaattctacatgaagccatcaattactagcaagattaatttgttagaaaggctatataattttagaatgatttattctctttctttaaagataatattgacaggtttaatgagattattgtagggtttgctactataaatcataaagttgatgaagaaagtcataccatcattttattgagattgctcccaatcgcatatctagaagtcaaggctggcatcaaatatggcagagatgtgattgcattggaagatgttcttcccacacttaagtcaaaggattttgaattacaatggaaaaggaatccaagaaggaataaaagtatttggaaagagggagatcacctaagaaagtaagtttgaagaataaacactattactctcaatcaagatcgaagtctagagaaaaggaaactcaaaaatgttactgaaggttcagacacttgcaaagattttgcaagaagaacaaggagcaacaaggcttcaacaaatctcacaatggatatatatatatacacacaatacataaaaatgatatatatataagtgaaattaattaatttttctaaattttctcaaaatatttactaactttaataaataacataaataggaaaaaattattagacactgcctaaaagaggaggtattttgataacttttatctatttcggtatctagaatatctttttagtttatttttttctatactcatgtacgttttagttaattagaatcacctataaattctcaaaattttttgaattatttatactctaatgtctggtttttagccaacagatgcgaagttataataaatgagaattaaaacaaaaattgtaataaatgttaattaaagataccaatattcaaggaagtttgacaacgagtgtcagtaatagtctactccccttggtgttttattgatttgagttgcaattaagaaatgttcttgaatgcaaggagtaaaagtggtcgagtttctacttacaaaaaatagtttttgatcccctgccaaggtcaggtatgacctcttatatagggaagaggtttattgtaacaccctaactaacataggcgtattacatgatttttaaacatattgtgcagctcgttgctaatcaacgaggtttatggaaaaacgtgattaattaaaatttttgcttttttaattgaacttataaaataatattacaaaagactcgggatcccgattataaaatcatttgcaaaaagatttaactgtttaactgatacacaaaataaatgt

SEQ ID NO: 312916 - DNA, 1238 bp, Cannabis indica
ctctctctctctctctctctctctctctctctctctctcttgaacccagcagaagctacagcattggttgttcaaattcatggtgttatagcttgttttgatagaatttctaagaatcaattcaaggtaaacaagtctccttcttcttctttgtgattttgtagttttaagtggtgtgagcatgcaaattttgacgattgttttctgtgagtatgaattgtggttggttttgttttctgaggttattttgatgatatttaagctatttaggcttgattagtggctagtgttatgcttgagcaaagtttgagcttaaagctcaaagctttttctttcatggtgaaatttgtatcagagggttagagttgttgttattgcttaaattaagttccttatgagttgtataggtactctagagggtttgaagtcatttggggttgattttctttgtttagaaagtttttacggattcctatactgaaacgatcaatcggttcattatggacctgtaggaatcggtcgactggttcctcccctggcagacccccacataactggttttctggttaggaaccagtctaccagtttgctagtgctctcactcattttaaacaatctttacatttctctaatggtttagaagttcctagggttggattgaaagggggaattatgttattatggaaagataatgtaaatgtaaccttacttcaaatgagtacaaaccatttgtattgttatttgtcctttgatgatggtccttgatggtatctttcaactgtttatgattttctcgaagctagtagcaaaaaacacatttgggctttgattaatagacaagctgatgtttctcctatggacccttggatgttaattggggatttgaataaaattttctcccaccctcataaaaatggaggtctccttcatcttaataatcaaatgaatgctttttgatcgaccttggacatatttttcttaatgaattggcttttgatggtgatgattttacttggactaaaatataagattaatcccactgcattgaaggaaagacttgattggtgctttataaataatgtttggaataatagttttaacttaccaactctcactcgccttgactattatggatttgattatcgtgctcttgaggttgctgttaatttttcccctattgttgacacagattccaagaaaaaatctcgcttttgctttgaaaaattatggctgaaaga

SEQ ID NO: 312917 - DNA, 1289 bp, Cannabis indica
aaaaaaaatgtaaagctgatataatgcaaatttaaaagtgaggtcagtcttagcagttgtattttgttcaataatattaaattttaaaatcatgtaaaacttcaaactttgatattctataaatatatattaacaaagtgagtaactattctactaaaaatttactttttactcttaataatataaaaaaataaaataaattaatattgtacatcatagtctctagctggttgcaaactgttactagtaaccgaaaacaactcatcgctaggaattgattgcacaacagctttgagaagaatttcttttctacttatcgagaagattttatcattccaagcacgcatgagcttccaaattttctctttaagatcactgaacatttgttgcttatcccgatctaaaaatactggcaaactaaaatatttttcattgcattcacgaatggacatagatagttgcgtatggaagaaaacttggattgcgtagtatttggtgaaaaagacatgactgatttatcttggtttagaacctgtcgtaagacacggtggtaaatatccaaagcacgcttgatagcaaggcacgaactctcatttgcattaacagaaaagtaagttgtcgactgcaaaaagtaagtgagaaatgggaggagttcgcctagtgagagaataaccatcaagctatcctatattttcttcatgttgcaggagtcttgaaagactttcagagcaaatcaagaacagaagtcttatcacctttattccaaatattggaatacatgcatatgagctatagaaagatagagaaacaattccattcgaacaagataaacaacaaaccacccaacttatcagacatcatggtagctagcttgaaaaggtttgtgcttggagcccataaacacactctaaaacgtctttggtttaactgattagtgttagaatttgataaggtacatgagtttccatctcaaaaccaattgacaatgggaagaatagtctattcattttatatatatagtatttattcccacacattaacaatatagaactaactctaataattagaccaagacaattaattttctcccgttaagcatctagacccaatactcattattcttcttgaataagggttatgtccttattaaaaaaggcaaagataagcatgtggctgagtttgtgtagagagtacaagcagggccaacccaagcattgaacagcttgggccattgcacaagacccctatttttttaaggcccatttatttttttaaagaaaaggcctatt

SEQ ID NO: 312918 - DNA, 539 bp, Cannabis indica
ttctttattgtttattgatttttgctctgttttgttacatttcttatcacttattaattaactcacttttgttggctaaaagcgaggtcaacatttttatgctgtcattgagagctaaattccaagtttattctttgtcttaagtttcaactgacacatagaatggtggtacgaactcgtagaggcttggttgacccgagtgacgtattactgatagatcctaccataacccctgggaatacaagggtcccaccaagaaccaatcccgagcagccaaacacacatccacctactctgggccaaggtgtgacttcctctctggcttgaatcacaccaggtgtgtaagagactcggaataccaattctgcagccgatcaaagcactccaagcattggaatcccatccacaaccaatgctcagatgacggtaggggatgcaactgagattcgaaacatctgtaatgcccttggactcatgcatggtcacactaacaccttgcatcatgatcaggaggatctccgtgctgcaatgaaccttgt

SEQ ID NO: 312919 - DNA, 1273 bp, Cannabis indica
aaaacaaaatattgatatatgaaaattgaaaattgacttaactagtttaaaagatgtaattcttaacttttaaatctcaatattctttcttattgaaatgtatgcaatattcaaaagaattagttgataaaaatcacttttttttttttactatttgcatttttattttattttttaaaatgttatttagtatttttgtccctcaaattatgatgaacacattagtatgcttcttaatttttttttgtttgttaaaaatagttctcgaactatttgcaatgttgtaaaatgacttaacagaattatagttagtctgaatagtggttagactcttactaattatttgttagttatagttggttgttaggttaggtaaggtgattctttactctagtttaactggttcttgatttagttatgttaattaatttcaatagcattttgtatatataagtccttattttatctttgtaatttaattcagttcagttcagtatcacacttttattttatttcattctgcccttcctgtaatatggtatcagagtagaaaaagtgaaaatttcccttgatcttggttctacagccttccatagatcgtgttcttcttcggtcttgttctttttttttttttttcggtggagttcgtgtcctaatcgaatatttatctttatctctatgacgatctatctcctctcttctctccatctctattttccctccaagaaaacaatggcgatcaaggcaatcaaggcacccagaccatcaatggcccacttattcaaactacaacagagccacaaaatctgatcgttcaaggtttacaggtagctcactccaaaaatcctcttgatctcgtcaacccctattatccatggagataatctaagtaacattttggtctcacatcctttaaatgggcaagccaattatgtctcatggagtaaagttatgcaattaaccatttttatcaaaaataaattgggatttcttgatggtttgattcacaaacctccatccacaaattatgttctttataacatttggattagaaataacaacattgtggttttttggatcttaaattttatttttaaggaaacatcatctaaaatactaatcatttcatttggtttcatttagttgtgtataattcttgccttggttgtttgtagcttgttcgcttttgaataaagatttctcttttttaaaaaaaaaatactcaactaaacttagagtattttatttagtttggataaataattaaaaataa

SEQ ID NO: 312920 - DNA, 1661 bp, Cannabis indica
cctcgatgatcataattactcgccgctggaaaaggcaacaagagatgcagagggaatatgtactaaagcaacatcagcattaggaacaaaagaaagaacatcagtggaatgctccccctagacaccagtatttgttgaatccttctaaacatttgcaagaccctgcttcccatagacatcagaaaccttgttctccccctagacatctgtagaaactggctccctctggacagtagcacaacgtgaaggaccttgatcaatacttatagatgaaggctgaacattggactcagggatagaaggaccatggaaaataagaaaagatggattgcatccataattgatggagagatgactggggaatgcacagagaaagcaccatcaccatttgaagaattggaaaaatcaccatcagccaaaaaatcaggacaagcctcagaagattttaaaacatcagtcatagcatacagcacatcaatgatagcctttttaaattgacgttgcctgagctgatcacgtgcataagtgtcaacgaaatcattcacccgagagaacaactgactttgccaagttgcagaactgaacccttccacaggagttgaaggaacagtcgaggaagaaggagcatcagaggcaagagcctcaccagtagcaggaacatccataactaacgatgacaaaggctttccacacacaggtgagaaacttttgccaatagcaggaacatgcaaaatcttgtcatgctcaaatacactaggaaaccctctttttaccatacgattaatcaaacttggataaggcaatgtgttcagtagtagagttcactatcggatcatacaagagtgagggaagatcaatattgacactagtgcccaatgcaaataaaaacttggctatgccatagttgatagtagagatgtgtgaattttcccaccatttcgacaatacaattttgtgaagaactctataaaactcagtgagcattgtgataggtaactcttttccattccagataaactcagaggttccagtgatctcagaccttatttctttaaaagaaggtttataatcctcattgaaaataggattgggaatggttttgattttcaagacacaactaatagtggaaggggtaaaacaaaatcaatttccccgaatataagcaagatatagaaattttcttttgttattcaaaattctatcatcaagattaccatagaactccctgaccagatcctcattttgttgttgcaaatgagtgacagacaacaaccaccctctttgttcaatcaactcatgaattttggaaaaatacttcagtttaactcgatattcaagccacaaaggatgaaaatagaatcctaaaacctaagcagcttatcattcaaatagaaaggtgcagttattgtttggctcagacacactagggtttgaggatgaacctggttgagaacttttggctttcttagggatagagatgcaaagagaaccagattaaactaatttccttttggtcaaggacctagggctataaggcttggatgggaatgactcagtagggttcatggatggttcagcaggggaaacagtggtggaatgaggtgcatcaaatactttattttattaaataggaaaattatattttttgttgtaaattaatt

SEQ ID NO: 312921 - DNA, 1640 bp, Cannabis indica
ctatataaactcagtccctcatttgtattcaattagacaatcagagcaataataattctcttcctctgttttctctctctctctataattctcattaggagtgtaagaggtagtttcatgtaaatatcttattttaaatcaccatagaggaagacattgtctatatccatgtgatggagataccaatttttagtggcgggaagagcaaaaagtaattttaatgtgttgaactaagctacaggagcataagtgtaaaagaagtctatacttagtttttgtgtatatcgtttggcaactaatcaagcgttgaacgtgttaactgaaccatctaaattgtatttgatcttgtatacctatttattaccaatgacatattggttgggtggaagggttgtgacaatttaggtatggtttctttctaaagcctttatttcatcatccctaacttttatccagacaacatattttgaggcttcagtatatgatttaggtttagataaggtatgagtagcaagtattgcagccttgtaaaagttagaaaaacgatgataagatacataattagctataggatagttggttgaagtagcaaccttatcatatatatgtagtcttaaagatatagaggtttagtaatgtttctaccaaacttgatacgaaatataaaaaatgggtcacataatacgacaggacgacacgatttgtcctggcccctaatttatgacactattgattttaagttaactaattataggagaattactccatatactttttttttaacttttttttttaatgtacgatttgagtttttaaagtggttgcagcgctagttgcaataaggtttttatacgattttttgtgcaatttaagttgcagcgccagttgcaatagattttgttagataaaattccgtaaaaatgcgaaaaaaaaactattttgaagtgtaaaaatgaaaaaaacttaattatattataccagtttaaaaattagtgaccaccagtatacgtagtcggtgcaaagtttcattagggcggcaaagttttaagtcaaggccaactatatgtagacggatccttaaaaaaacaactatatatgtggacggcaaaaaattatgtctcaataatttggcccaattacatgagtatctatctatctaatatatattatacatgtgatacatatatatttattataatgagactgcaataagttcaattggtatattcaagtggacttgacctttatattttcatgattgcatcaacacaattgtatattcttggtaacccttagtcggccactatattataacttcattttcccattcaacttgtagtaattagagttggacatttttttatgggaagagtactttgaggacccactttttttttttttttttttttttgaaagaatggaggacccacttttaataagttgtagatttcttttttaaatggtgaataggataaagacggaaattattttttatccttaaatattaaacgggacggaaataggaatggggatgacactttccactctaatagggacacatttagtattttattttatatttctaacaatattttataatttgtagtttatatttatatctttttttagtataatagtat

SEQ ID NO: 312922 - DNA, 3423 bp, Cannabis indica
tccctgtaatatgcatggcaaattattcatgatcgcctccaattttctctttcatgtccagaatatcattggtcctgaggatatttgagttctttactgaaaacatgcttggcaagcgttgatgtgggaggcgccgtcctttttgattctgttatactgtgtattttttttttctaaaagaataatagtggatgtttcctcgactgagacactctggacccttgaagttggggtgactatttatgttcatttttttttctttttcctggttatctaagatgattttgttgagaaagtatcgcatcagcttgatttaccaaatggaggtgaagttttagatagttgcatcatgatgtgtagattttctgaaaaccctttaccatactcaagtttcgtatccttgccatgaaaatgagacgttattatccatctataaaatcatagtttttctttaggttttcttattagtattttgttttgttaaacatctagtggttgattttggttttgatatgattccaataagattcgtgtaattaatttcaaccataaaattataatatggtacctatttaaaaatatttatgttttagattattgtatgtaattcgagtacgagtctatcattcttctaactacattggatgccggtgaacatgttcaacaagttcataaagaagtagagatataacttttaccttggttgccttttgaccactatcttcgattagggtgaatgtcttaataattttctttgcggtgtgagctgagggcttttttttccctaccggtaggtagtatgctactgttcagcattatgaattcagtagttacaatatatccacttcacgatatatatttatgtatttaattacttgtactttacacatataaaactaatcaaaatttacatattttgcttcaaacataataactatactaactgtttctttgataaaataattaattttttttaattaaatttatctttattaaaataaaactaataactcaaaagagttgtagaaagtttagaaggaacaccccttctcagaacatattactaagcataatatcaaaattatcttgcaagaaaatacgcaactcaattagcaggttaataaaatataaagcaacatcacttaatgtttgcaataaacttttataatctttaaccactaaattaaaactagaactattataaaaaattatgaataacttgaatagcaacaaggctattttgattcaaccctattttgggggtaactcttggttattcaaccaattaagagcctcctaaattcccattgctttggctgaaggagacatcaccccttgcgaacatgaagcagcagctatgaacaactcccacctcgagtccctaaccacaaaagaatcaaattgtctatcttcctcaaaagtagctaacatctatattaatcttaattgtattcattacaggtttagtctaacgctcctccccaacacaagctattaatgggttaaaggaaggtatattccctacaccttgagtaccaatccattgatcaagatttagtgaagaaaccaacaccacatcctccactctctgtcatttttgcttccacactatttctattacaccaaattttcgttaaaaaaataaaatggctactcttgcacaaggactcacaagccaagagtaccttgaagatactcaagtcaaccctgtgactttcaccaaagcttacaaatgccaaataagtgaagacatcctatttgagggccccatgacactattggaaactcatgagaacactaaccaaccatttagttccgggacacacacccatgtgctcacctaggttttatgggcccgcacaagggttttcatcctagagaactttatctgacatggaaacaactaggaacttggcttatttatgtataaaaggcttaaacttgaacataaagtataaattgcacaaggaggccactaatcaatgtatggtcgagcactaccacaagaggatggcagtgctctctcttttttggagagcatttccacaagagaatgatataatgctctctacttcaaacctaccaaagggagcttgtccaaatgtggtcccccaacaccaaggagtatagtataattaaaagaaaccattttccaggcaccattatacatggacgacccactatcatcattgtgcataacaaagttgcacaggtttgccacaccaaatgtagaagggattctttggctgaagtatatttccaacatcatggtataaaaaaacaaaaaaaaagtgagaaaagtcaccaaaaggtgtagaagagccctggttgaccactaccgccattgcctctctttggccctaaagaggccaaaaaggtggaagaggtctctcccaccaattggccaataactaaagttgccaaattatttttatagcatccatatgactaaaataagcaagaaacatcatcaaatgcttcccaatacttctggcctagcactgccatcttttggcactgactgatggtaatggtctccagttagggtttcgaacagatgagattttaggacccccgaacgtacaaaatatgattctccatcaaaaaacaagtcaaaacacgcccaaaagggtccgagaacatgcatggccgagaacttccactatgatgtggcaatggtaagattttttgactaaaaagtacttactacccttcagtaaaacgggaacaaatttctcaatttttatccaaatgacttggatcaactttcattagaaatatcttctcaagatggatcgaagtgcgtctcatggacattacacaattctgaaattattagactcaaaattggctcacaagataaattgtcacactttattcgggaattactaagttatgctaagtggggaccctaatgggtcttgggagagctatcccacaacctatgtggaatcatggtaaagaattatcatcccttagatactcctctccaatttttaacctcctattcgagaggtgacactcgcttgtcacccctctccaattatttggcctctagatcgagaggtgacatcccttctcactcctcttcaattatttggcctcttggccgagaggtgacataccttggcactcctctttaattttataaccacctagttgagaggtgacactcccttgtcattcttctccaattttatacttcaaagtaaaatgccacataagcaagttcaaaagacaaggaaaatgacctacttcaatgacaaaccgaatgattgttgaatatttttctataaatgtgggatcttttctatatttttatttatttatatttattattcattattttttaatatgatatgattaaggttcaaatttgtatatttttagttcttaattatgcacataaaattaatataaatt

SEQ ID NO: 312923 - DNA, 1229 bp, Cannabis indica
aaaattaaaaaaaaaaataccatgtggccatttttttgagataaaaatgcgtattatattaaatcaagcgttcataatacaataagcatttaacgggggaggtatttcctccaaccaagaacaagtagagtctaccgaaagaacatatttggctagcaaatgagccgtcgtattagcagatttatacacatgagaaatctgcactccaggaaaattggacactaggtgtgaaatgtttgataaaagacaatgaaaatcagaaaccgagacagtggatgactgcaatccttttcccactacgagaaaatcagtctctacatagtgtacgttcaattgattgtcgatcagtcattgcaaaccatacattaaagccaaagcttccatcacttcagggcgaaaagtacctgatattgacttagaaaatgcagcaataatttcaccattagagttctgtagaatagctccacaaccagtaatttgagatgccttattaacagctgcatcagtgtttaatttgagtctgccaaaagggggattaagccatgatgcatcagatttgttaggaattatcgagggagataaagcacatgttgctgtatttttcgactaatgggctacatgaaattcctccaaatatgacagagcaaagtataaaagcataaggcttggttttgttgccatgcttctccttgtttctctcattccaaatatgccaaagaattgtgatgaattgttcaagctgcaaatcgaaccagacagtagaaacatggagtcatatgatatgttaccatgtggccattgtagcaacactttacataaaattagtataaaaaattggaccatattacatatgtggcaagaccacaatgatagacaaccctcattggagatactcttagtcttagaacacccatctcaagatactctattatttttttaacatatttcatcaaaatttaactttttctattttatttcgcacatttacataatattatacatcattttttctgtatttttttatttatatttattaaataatatatttataaattaaatattaaatatataaatatatgtggtgacagattgttgtagaagattaaaaaaaaaggcaaataaatattaaaataagcttacttcactattatttatttatttatttaggtgccgtttggtaacacttttttaatcagttttttgtttttaaaagtagaaaagtgaaaata

SEQ ID NO: 312924 - DNA, 2055 bp, Cannabis indica
aatatgtggaaagataatagaatatataagaggaatatactactcctcccatggccaattgattttgagatggaacctcattcaccttattcacaaattctaacaaggcggtaaaaattaattgtgatgctgggttaaattctaagttagttataaatgggattgggacagtgtttcgtgatgagtctggtttcatcctggcttttggaacttggagttggaatgtttgtttctcccgacctaatgttgttgaggttttggatatctactatgggatcttacttttctatcgccttggatatcaaagggtggtgttagagtctgattgtcttagtattattagtgtcattttttatagtaaggttgatcagtcgtatttaggatgtattattagagatatcattgcttattataatcattttattgatattctttttatgtattgtcctaagcttgctaagagcgtggctcatattttagcaaagttagcactgtccttgaatgatcattatgtttggtggtctggctatctgattgtattattgttgttttgcaaacagactcttaatgatattgtctgacactcttttttcttttggggtttctcccactagatttactcttgagattttaatgttgttttttctcaaagaaaataaaaacaataatatgatttatttatttggctaattaagatttttaccctccgaactttggcatgtaccaaacatgtcccctgaacttttaaagtcgttaaaaatctcccttaaactattgagattgttggatttaaggacttttgtctaattttagtaagaaaagtctaacaagaataaaagttcagggggaatgatttgatacatatcaaagttcgaggggcatgatttgatagatatcaaatcttaagagcataatttagtacataaataaacactgaattagtaaaattgaatgtaattaaacaaaaatctttaaatctaacaatttcaatagttcaggagaaattttcaatggccaaaaaatttcaaaaggtataatttgatacatgtgaaagtttaaggaacaaaaatggtaagtagtctatttatcattatatcaaatttatcacatgctatatatattatgcaattttattacaaacatggttgaaaagatttttttttttttcttttttacttacagaaatagaattgcattagaaattaattagcactcacataaagattccctaaataaatagtcaaaggttctacctagttggatccaataatagaggcattttaaagtgttgatagtattgcataccacatatataggttttgtcatcaatacatagtgccgaaaaggttattgtatttgggtatgaaaactaattaatggtccaaaatgaatcttataaattagaagtcaaaataaatgaatgtgatgttaccatgcaatgatcccctctcttccaatcatgttccacattcagtgtagttttggtcccattctccatgatcatgaccacccacaattcacaatgacatgaacagagagactatttattcatttatttatcaaaagcttaaatcctatatttcttcatttgtgaattttatttatatatgaaagactgaaatgctcattttattgtgtttttatttattttttgaaaaaacaaaaaatcaagagtctcgatttatttctcttatatatagtttagtttcttatattttatcaaactacattttaatgagtactctatattttaatagtttagagaagtgctaaagagtatcttaaagtattaaacactataaaaaagatgtataacgctttatcgatgtaatattaaacaccttaaaatgtcaaataagaatactcttaattttgtattcattcatttttttggtagcaaaatctatctatatatatatactagcaaaaagctacgtgcgaggtacgtatattaaattttgtgctattttttttctatgttatttgaaagtaatacaattaaaaattaaagaaaaaatattattagttattaggtgagattattattatgtgtat

SEQ ID NO: 312925 - DNA, 1637 bp, Cannabis indica
aaaatatatatatatttttgtatttttacagaattttacataaaaactcttattgcaactaacggagcaacctaattcgcaactaaaaattgtatagcaacccacatagaaactattttagaaatccaaaccgtaaatttgaagaaaagttaaaaaaatagtatatggaataatttcttataaaaaattattaaaatttgaatacaattaaccaaaaattatacatgacaacctataatatattataactaaaaatatatacacataaaattggaaaaaaaaaactaaaacttatattcaattaagtttattgaaaaattataaaaaccaaacttaaatcaagaacagtcgtacttatagtaatatttatatatatattggtaaaattaattaagaatattcttttaagtaattatatatgtcttaaaattaacacaaaaataaaaataaaaaaatgttaaattaagaattttattataaacccatattttatttagaatagatatcactgaattataaacaaaatctttggacaattttaatttttcctaccttaatattcttattgatgtattatctttgttttgatatatttctaagtttttttaaactctataaattttaggtcaaaatgttaggtataatatctaatgctgcttattaacctaaatatctaatctgaattggttccttttatgccaaaactctaaaattgaacatttgcctttgtagaacaagggaggattatcaaactggcatcttacataatgagtatgctatgaaaattgaaaagtaaaaatgtaaaggtttatgctaaatgagttaggacacttggtcttgtgcgcttgagtactttttttcctcctaaatgagtcttcatgcttctttacaagactgatttattcgtgaaattaactcttcttcaaatcctctaaataattacaagtatagtcatattttgatgaatatacttagctctgttcaacatgttttggactcttgatccttcttcattctttctccagtagagaattatttatcgagagttttggaaaataatttaaagagagattataagttaaagaaatgattggagtaaattaacacaagatcttttacgtgatcttttacgtgttgaaacattaatgaggtttaattcacgagtcactatatttaagttgatcgataacaatatatgctgtttgagtacactggacccccttaaatgtgaagatggagccttatttataggctgtcatgcattatgggtcgagttgacccgaacccgggaggttttacttaatgggacgattacattgttacttgcaagtgggttttgggcttgcttagggggcatgatttagttaaaaaaaattctaacatggataaaagttcgtggggcatgatttaatacatgtcaaagtttgaggggcatgctttggtagatatcaaagtctggggagcatgatttagtgcataaacaatcaccaaaatagtaaaattgaataaaattaaacaaaagtccttaaatttaacaatctcaatagttcagggggaatttttaacgatcttaaaagttcaaggggcatgatttggtacatgtcaaagtttggaaaaaaaaatcctaattaaccata

SEQ ID NO: 312926 - DNA, 1773 bp, Cannabis indica
aagacctctagacccagtaagggtacaagttgtcaagacgaaagttaacaagttaactgctaatgatttcctctaggagtcattgtacccagtatggctggcaaatcctattttggtccccaagccaaatggcacgtggagaacgtgcatagacttcacggacctcaacaaggcttgccctaacgactatttttcactcccacaaatagatcaaaaggtggatgccacatctgagtatgaatttctaagcttcatggatgcctactccaactacaaccaaatcaaaatgcacattgtggtctaggaacacacaagtttccaaataaaaagggagtgtattgctacaaggtgatgccatttgggttaaaatttcctggagccacttattagcggttagttaacaagatgtttaagaactaacttgggaggaacatggaggtgtatgtggatgacatgcttgtaaaattcaaaacttccacaaaaccaagcaataaccttgaagaagcattctcgatcatttggaggtaagggatgaaactcaacctgaagaagtgtatgtttgaggtgtcatctaggaagttcctaggttttattgtcagtccttaaggaatcgaagcatacccaaagaagatcaaagcatttattgacatgaattcccccaagaagcataaggatgtgaaagttgtaacccttagtcaattcatgtcaaaatccataaataagtgcatcccatttttcaatgtgttgcgcgggaacaaaaagtttgaatggactgatgaatgcgaagaagcctttcaaaacttgaaagagcatttggccaaagctctaatactatcgaagccagtggaagaagaagagttatatttgtatttagtagtgtttaatcatgttgtaagtgtcgtaacagtgcatccgtgttttttatgacgagggtatttgtctactaccatatctgaggttcatagctagaaccgagatagtgcggccatccatgaggtttatagtaggtttttatggagatcacacttctaaactaagcctttccaagaagattcttcatcaaggctacgttttggcaaccaatgaagaaagattgtttggaatatgtatggaaatgtgaacaatctcaaacatacgccaaatttctgtgagcaccgcaaactgatatcacactcatgagcagttcttggccttatgtagtttagggaattgacctggtgggatcactaaccacgtagaaaggagggtaaaatatgcaatagttgttgactacttcacgaaaatgggtagaagctgaacctatgaacacagtaacctacaagaaagccttaaactttgtccttaagaagattgtgcgttgtttcagacttccacacaagatttcctctgataatggaaaaaaatttgatagtgtacacttcactgacttatgtgttcaacacgaaatcgtgaaaaaagcttcttagctgtggctagaccacaagcaaacaaataggtggaagccataaaaagaccttaaaaataacattgtagaataagcttgatttggtgattatttggagttggtttgagctttattaattggttataccttgtgttgagcaagtttgagttcaaaaactcaaacttgactccacaatggtggtttttgatgtaggggtttagagatgattttaactgttgaaataagtttttttagccttattggaatgaggccttttgggaaggtgcccaaaaacaaatcggtgagggcttaggcccaaagcggacaat

SEQ ID NO: 312927 - DNA, 803 bp, Cannabis indica
aaacccaacaccatcaagttcacatatatcagaatgtatgaagtctaaaaggttcaatttttctagtaactgatttatgtggtgtcttagttatttttgcttgactactaaaaatatattttttaaaattaatttctgatatttttagaattaagtcaatattactcatgttcttaatgatacgcttattaacatgacaaagtctagaatgtcaaacattaaaagcacacaacatgcaagaagaataagatattttattaaattcaacatttaatttaatcattccatcataagcataattttttcccacaaaggtaacattcttagtgatagtgtacaaattagccccaattatttgagtaaacccagctttgttaagcagatacccagaaatcatattcttcctcatctcgggagtatgcattacatctttcagcaataacgtcttttccgaggtaaaatttaactctacatttccagttccaacaacaatagtggtgtgagagtctcccaacaactatcttgtcatcaacaaccttctaactcttaaacatagcatgatcatagcagacatgatgagaggcatcaatgtctaaccaccacctttctgatccatcaatcaagttaatctcagatttcataactgtaagagcttcttcaatcaagttaacctgcgaattagtgctaggcttgttcttacaattttgtgtcatatgacccgacttgttacaattgtaacatagaaactgcgcgaggtcattctgtttaggtggaggtggttgccttctgttgggttttatgcc

SEQ ID NO: 312928 - DNA, 1591 bp, Cannabis indica
ttctatcaccactcccttaccttgaatgaaacaagtttcagatactcatcgtacaactcagaaattcctttccacgatcctttatagttcacccgctcccacttttggtatcccaatttttaagccttcccgtaacgacttcttaccactctatgccatagtcatttggtttcaagtggaaatctccataaagatatctctttgttccagtgtgaagtatgtgctttagctaaacatcataagaatatgtatccacctcgtccatataaaccatctaaacccttttctctcttatacagtgacatttggggtgcatctaaagtgtcaactaataatgaaaaaagatagtttgtaacttttattgatgatcacacaagagtcagttgggtgtttttattaaaagaaaaatttgaggttgaaaatgtttttagaaggttttataatatgattcaaactcagtttagtacaaatattcaaatgatttgaagtgataatggaggagagtattatgttcaaacccatggaaaattttttgaagaaaaaggaattgttcatcagagttcaagtccacatacaccaccacaaaattggtatagcagagttcatcagagttcttggtcatcagaggaatttttctgagcatgccgcgacctgcctccttttggggcacctgggatgtgtcccaggtgtcacggcatggcttgggcatgtcgcggcccgccctggtgtttttgggcagttttgagttcgaactttgaaaattcataagttttgattccgaactccggtttgggagttctttatattgttggaaagctcgttctgagctctgtatgattatctaaatttcaaatgctatgattgaattttatgagtatggaatcaagggttaatcctagttgtgaaaatcccagatttgtgttactaggattaccgacacctaatcaggagcacccagggattcagaatctctgacattgtgggactacaggtaagacagtggttagcacgtagggtatgctcagtgacgcttatgttgaaaatgatatgtatgattattttagtaaccgggattagggttactaccctaatgggaacggtctgatagcctagggttattaccctagtgatatatgtgtgtaattgccatgccaagttaaatgtaatgagatttaaggattatgcgctcaaggcataatcaagttagacctggtaaccataaccgagatgcattctgaattcaaataaatcatcataaatatttaattcaatatttaaaaataattttcataatatatctctaattatctgctaatttccaaattaaagctaagcggtctttacaattatccccccttaaaaggatttcgtcctcgaaatctaacctgaacaactctggatattgagctctcatgtctgattctaattcccaggtggcttcctccacctttctatttctctagagtactttgaccaaagctatggtcttgttccgaagaaccttatcccttctgtcaaggatctgaactggctgtcttcatagacatgtctggttgcagttcagattctcatagctaagtacatgagtagg

SEQ ID NO: 312929 - DNA, 2334 bp, Cannabis indica
accaaggtcagccctatcatcaccaatgcgaggattaatttcctcaagctctagtgtctctggttatttgatttcttccactatggcaaggattggtgctctcagtgttggatgtcgtgcccctaatggagattgggattgttcatcaaataatcttacaagatgaaaatccccacacgaatattggtttatgtccatgtcaattttgtctagagggtccaccattgttattgaagtaacgagtttttgaagagaaaataaccaaactttccaccgcaacagtctcaatgaaagcaccaaaatgttgatgcgattttcatcaactaatctaaaaaaattgtaaaaaataacaggattgggatgaactgacttggctaaataaagttgcaataaataaaaaaggacactagtgatttatagcagttcaccccaagtcccgatggtaactacgtctactttatttatattatttgattccatcacaccaaagttatattctcaagagtgtgtggatgatagtacaaaagggatttctaagcaaaatcaatatcaaagcttataggtaataggctcatgggagacccaacaccataaacctaataataatgggaaacaagaatagagaatggtctcttctttttggtaaatatgtttatcaatggtgattgtatgatggaggcttggtgtcgtactaatatgaagatctcaaggaaaaagtgaaaagaaaaggtctcaatggatgatgtgttctaggcagctatcctcgtcctcccaaaccctagtttatcattgtctttatataggcctagggttttttagttaccctccacaagtcaaggtatctcacttcaaatttcgtctctttctctaacataatgaatgaaaaaggtgattaagtaaagatttacaaaaatatcccaaatatcctgcattgtcgtcaaaattggttatttcccttgtcttgaacttgcttatgtgacattgtgctttgggaatgacaaaattggagagaagtgaccataggatggcacacctcagctaaggcaagtagagagtcacaagtgttgtggatagctctcctcacatccccttgaggcccacacttagtaaaaccaattaattcccaagtaaagtgtgcaagcctgtcttgtaacctaattttgagccccatagtttcaaaattatgttatgaccatgacacacacttagatctgtcttaaaaataactttcaatgcaagttgaaccaagtcatttagataaaaattgaaagagttatgcctatttcactgaagagaagtaagtatatttcagttccaaatatgacacgtgccatgttatcatggtctgtgccacctcattatggcacaagtcggtcgtacatgttcttggacacctcggggtgtgttttaacttatttttttgatggtgaaccatattttggagggttttggggtaccaaaaccttatctcgatgttcctaatgggagacctgcaccatcttttggtgccaaaagatggcacatgtcgtctaaggcttatgagaattccttgatggtgtttcttgcttagttttaccatatggatgctagaaaaacactttggccacattagttcttgggcaattggtgaaagagacatgtgccattttcttgtgcacaaagatgccacaggttggctaggtggtttcttcgccacttggtggccttcttcacttggtttgatatgttgatgatgaaaaagtatttttggcaaaaaatctctttaccatttggtgtggccgacttatgccacttatttatgcacagagatggcacaggtcggctagcttgattcttgggtgaaaatggtttcttgtgttgtattccttggtgttgagggacaatatttagacaagtcttctttgagagtagagacttgtgccatctttttatgccaaattagggcatagtcgaccatgcataatgggatgccttccttgtgcattcttaactttatgctcaagttttagccattttatgactaaatatgtcaagtccttattggtctcattgtcggattgaggtctctaggacaaaaatccttatgtggacccataaatcctaggttgggcagacttcggtgtgagtcccggcactaaataattgattagtatttttatgagtttcctagagatgtcatggggccctcaagtatgatgtcttaacttatttgacgttttattggtgaaagtcgcaaggttgacttttttgacttttaaaaaattaggtataacacagtgaaactgtaaagcccgcttagttaatttggaaattatcagttaattatgattaatt

SEQ ID NO: 312930 - DNA, 2912 bp, Cannabis indica
taaaatatttccaacacattcttaccgttacccctttgagagctttgactattcgagctcgtttcattctttttgctcttagtatggttgaagccttgagcatttcgctcggcttcctccaatttgatgaactcatcagctctatcaaggaaatctctcatagtatgggttggtttccaccttatatccttccatagccaacttccgaccagaatgccccacatgatagcggcatgtttgccatcgtcacttagattttatttttactttggttgcttcctgcataaagcattgaatgtagtcttttagtggttcatcgagcttctgcttgatggcgaccaagtcacccaactctgctggtatctgtcggactgaagataattgggtatagaataacccttaaaactcatcccaagaagtgattctccctgggggtagtttagtaaaccattgttccgcgtgtccgtgagggttgcaaggaagattcgacacctgaggtcatctatgatcccttgaaggtccatttagattttgaagttttcaacatgagttagagggtcttcactacctgtgtacttgcaagtggcattttgaatttcgctggaatggggaggtcattgatcgtttgggagaaggcacaccctctcctcctttccagctccaagtcagtgagttttggtgcagtaaggtcattgaacaattaggttaactcatccgaccgagcttggatcaccgaatatgtggctgtttggggttgtgcaacattaacgccagcattcgcttggtctctttgaaccgactcaaatggatttactatgttggaaccgtggttgtccctatttctgttgagggcatcccaaaggtctctaccccctcgagggcctacacgttcaaagactgacccaattcttggccttcctcctacattttgactatcagcccttctatcgactaggggtggtacctggtcatccctacccctttggggcagattctcaggttgatgttgcctattaggggcatatagccctccagcttgataacccccaactcaggattggttggttgttggcccgactttcagcttcatcatcgtcgtgaccgtcggggtagtttgggcggtaatcactgttgacctcgaggtcttctcttctccccttagacctactattctcgggcaatcatccccctctcgtggttggccgcgttggtcatggggtttccactcccaatgttggggtgtccttgcaccgtttctgccacagtaccattgtggttcctagagtttcctccaccactctgccttagacggatattatgggagtcatcacgtcccatataatgaccaggtagaacttgctcatcggccgggagcggtcaattattgttgtgaagaaccttattggaggggtgactcctagccctctcttggttcattgggtgctcttcaggtccatagaccaccctctcccgctggttccttggggtagggacttcctgaggataggtttgaggtatcagttgattgtgggtgtcaatacccaacccttgagtgttttgattgaagtaccttcgtattaagtcgacagcctcttgggtgcgacagtcttggtcgtcttagtgcctcctcattccacgagcatgatcttccaaccaagattggaattctctcctttggttagcaagactcttggtcaaggccgcccgagcttgagtttgctcttggtgcatagtctagaactggccttacattcagcctatcgcatctcgtaattgatccatctcggggtcgattccctcgatatttacagacctaaagacaccagggcctcggccaatttatgcttggctcgtgccgttagtaggtgggacaaaatttctagtactgccccttctggtggcaccgtcagtagcgctgtagcgactgcaatatttaaacatggattagtggaaatttaagtactaattttattattattatcattaatattgatgttttatgtaaatgattatgttagatgttaaatatatgctatctttgtgattttagctcggcgatgatggaaaatgctgtggaggttattttagtcacttggggaaatatagagctttgtagtgatagggaatatgtcatgtaagctcaaatgcttagtgttggcgaagttgtggatttggaccattttacccctagtccgattatagcattaggtttaaaggtgggggtagtttagtcatttcacccttttggataggtgtcttaaccattgagtgaaaactgccatttaagagaataaatgttaattaattaaccttttagttattgattttttgaaatgaggaaatagaaggaaaagctcctccattgtccttcttcttctttgttcggccagcaacaaccaccaacttagggtggagttttctgtcaattttttaggctattaggtgtgaatttgcagactcaatctaaggtaaagccctaagcttgccctattatggatttatatatgttaacatgaagttttgttaggtttagagttgattttggtacttctggttctgtgtgggtgaaattcgattagggttagtttctttaggtcctaaatgatattctaaggttgtttgtactactattgatgtttaattttggggttgagcaagtttgagttcatggagctcaaacttgactcaacaatggtgtgttgattcttattgtgtttttcttactactgttgtgtgggaactattctagaatgtgttttcaggtgttctggtgagtatggttgcatttgggaaagatttgatcgagttatgcgatttttggggtttgttgccaaggccccgaaatcacaacttctccaaatatgtgttattttccaagcatggtttggtttcccttagcatttagggtaata

SEQ ID NO: 312931 - DNA, 906 bp, Cannabis indica
tcaaaatgagcgtctcaatttggaaatgtaggccttcatcattttcaatgttgcacaaccttgaataaaccagaaatgttgtgaggctgatgtcacatgtatgaatagttgcctagttgggattgggagtgtctagtaatagtaatagtaggctactattttgtatccaaagagtaaagagtggtttggtgggagtgaagaattacttgagggaagaggcataaattagaatagaatatgggtgtggatcaagtaaattccaagaaatgtacagttgtgaatactgaaaaggcttcttattatcaatcacacattggcatccgatgcattggataagactctgctctgtactcctcagtactgtgttgcagggtattaaggttttccctttgccaatatgtctacaacaaggtctgagaatactgtggtttttcccacctgtcttcatttcattaccaaaaaccaagagaaagacagaccttggtttgttagttaaatgctttttggacagcttatatatttttttttttataatttaatattaaaaataacatattttaaattaattaattattaatagaaaaatcactaagacacctcataactactactctaatttgtagataccagcctgaaaatcacgaacacgataaggtaagatgctataaattggtacgacacgatatgaaaaatatatgtttaagcatgacgcagaacgaaaaacacaaaaaatacaacacataatcacaaataaattagctcgaaaaacatgacacgagccacactcaaaaaacgtaagatgacatattagaaatcctaatatttattattaataataatagatatctatttaaacatgaaatactaaaattatatatcaatttatttataaagtgtaatataaaa

SEQ ID NO: 312932 - DNA, 1716 bp, Cannabis indica
tatggtaaacaccaacatgatatcccatatttatcataaaattaggagaactaaattgattatatttctgccccttattcatggcagaatttccacaagatcctaccaccaacctcctcgttcctcggctgctgatgtaacatcacagaagcagtcgcgcaccacccttgactcgaccaacaaacatctcgtctgtctcattaacatcacgcaaccactaagagcccaccaggttgtttctccgtcgtggttgagccctcatccaagcattatacggctttatgagcatctcgactggtgtatcaaaaagcctaggacaaaatttctcagagtgacctattacaccacagataaaactaaacgtagggatatattcatatttgaattcttcccagaaactgtcctctattgcagttcgagaaggcttcctacgccttttcaacagagcagtgatgtccaattttactcgaacacgcatatagtctctccacacattctgaaagttcttaggatcagccttaacatacatacaaacaaagttgtccaaattctccacaacactcacagacttaaaccccggtaggagaccatggatttgcacccagatgtcaagattgtttatcactaccctttttggaccatctcccctgcttagtttgtgaaaaacaaactgaactctattaaacgtccaagggcttccctccaccaccctttctaaatcaatttcatgaaaaaattgaaatagataacgattggtgtcaatctccttagcataaaccccctttcatggctgccacagagacgccataacatggcgcatagcttcaaagtcaatgacccttccagtcaaaaaccgacccacaatacataactcaacattcaaaacatgatcatcagagactagaaaatcaatacccaactccccatcatcctctccctcgagtgaaatattcgcatattgttcttcaacctcctgatacaatgtactactagaagccatggcatttgtttataactattatacttgatatatataattattttatattaattacgatgaaattttggcctctattttttgttatagacctaaaaagacggacctatatagttattatggttgtggtaccgcaccaaaccagccccttacacccacacacccacacgcaaccccaccccaaaccgcaccccagtcaacgaaaccaaccctcccacacccagctgcgccctaaagagacccacacccagtcgtacccccacccccaaccggacccaggaaccacccccaaaacaacccagtcacaccccaagaaatccagcaataccgaacacacgaccaccacaaccgggaaaccaaccgcacctacctgccaaacagaagccagtccccctttcaacgcaatcacacccctggaaaaaccaagaacagagccaaaccaaacaatctcaagcaatctcaatcaagaaaagtaagaaccaaaaacaaatcaaacaatcatagaatgtcactatagacaaaacaatcggcaccctagctgaagaagaaacccacggccgtcgagtggcagcgacgagaagccggagaagacacccaagacgtcgagtaagaaccctagccgcctctgtggtgttcgtggaaccctagccgcaaacaagttttactgtaatgagaatgcttcatttttttattgtgttttgttttttttattataaatt

SEQ ID NO: 312933 - DNA, 1014 bp, Cannabis indica
tattagggtataaaacccaacacttgtatatggaaccccttaatttgcagtctccttcgctcggttcaaatattattgattttgggatatttgggagttcttcgtagagccacaatttttttcaagcttaatactcaaccaaactcagttagaggaacttacacttgctttatcgtcagatcatccatatgttccttctcctccatagccatcgagacctcccaataataataatgtgaattaagacttttttttaaagaccttaatgataatttttttagaataattagtttaagtttgttaataatttagacactacaaatattaagtatattttatttatttagtttaatttgagacattgaaatagtaatgaatattgtatttattatttagtgttaaattataatatttaaaattagttaaattatatttaatttttatataaatttatatattatttataatttattattaatttttatatttatatttaattttaatataattaatttatttttattatttaaatatttaattattagtggcagacaatagcagtggatgcccaccgctaataactattaatagcgttcaactattagcagcatgtcattagcagtggataccccattactaatgaccaattacagtgtattttatcattaatagcgacgaactcctccgcgctattaattattgataaatgttatagtgacacactcgataagaaaatattataataccaaaattaacttctagaaggtccgaagtggttacttaaattggggtgttattcatccaatccgcacttctaagtgtggattttatattttggctccaattcaattcgcataataagttaaatccaatctactttaatccataaaagtacaaatttgatcaattattttagattggttactttttaatattaaattatttaatatctattaaaaaataattttatccacattactaacaaaaaaaaaaaacaaattattattatttttt

SEQ ID NO: 312934 - DNA, 1445 bp, Cannabis indica
aactccagttttatttgctagaaagactgatgaatctgtgcgagtttgtgttgattataagaaattgaatcatcaaattacaattaagaacaaatatcatttatccacgatggatgagatgtttgatcaactgtaaggtgcaaagtattgaggtttgctatactcatatttcgagccataaatatagacatgacacataaataattggacaaaaaaattacggattacttaattgcataataagtgaattatcttgaagagattattaataacgagcaatattaatctcgcattactcattggtaataagacaatgagataagcaacgtatggtgagatgataagataaaagtcttctccggtacaacaaatcaaaactatatcactagaaagggtagataatgagttctttaagagcttgcaactcattgacctacatactcatgagtatgttgaatgattaagagaaataggaaagtccaacttatctcataatcttaaaagacaactactacaaaactggattttagaggcaatttttaaggccttccaatatcagttttggcaaaaattgctaccgatactgatctaagcgacattgtagggtcaaagacaaccgatgccatagagggaccctatggcgtcggttattgtataataaccgacgacatatgtcagttactatacaataaccgacgccataggaaataaaaatagacgccataggtataataaccgacgccatagggtataaaaatcaatttatattttagttttaaaattaaatataatttcacaaatttaatttatttaaattaatttcatggctagccaatatgcttaaattaatttcatgaaagcaactaaaaaaataacaattacattacacaaatattttaaaattagttcaagtattaacaagttaatatatctagttaaacatataaaaactacaaattaatataaaaaaaaataagctaaggaagaaaaattcttatacatttcagcatcaatctaagccttcgtgaatcaccgccagcaattgttctatccactgtggttgtaacagtaacaatttagtttttgctcatatgtcctttttttttccaaactataaaaaaagaagtaaatatatatattagtatatatatatatatattattttttgttaatataataaataagataattaataattaaaatttacaactttttgatggtttaaataaccttagaatttgcacatgcaacgatgtcacgcatgtatttcaatacataaaaactacattcttagtttttaggttgttttgaaaaatttgcaagtgatattcctggatactccccaataaatgcatttgatccccgaaaattctcgtatccactattttgaaaattatattaatatttcaattaattaacattaatatatatataacttagttaat

SEQ ID NO: 312935 - DNA, 3043 bp, Cannabis indica
aatacctcaaagaactacaatattcctcccgcagaaaaaagaatgaaattaaggggctccaagatcatatgggtgtttggcaagatgacaaaggactggtatgcaagattgttgaagattattatacaaagttatttactagttctgagactaatgaggccatatttgaggaggtccttgaggtggtacaatcaaaggtgacttcggatatgaatgatgatttaatggtagcgtttacaggggaagatgttgttagagcagtgaaagatatgaatcctactaaagccccgaggccggatggactccctgcacttttttaccaaaaattctggtctaagctaaaagaggatgttattgctgtatgtttgaatgtcttaaatcatggggctgatttgaaatgtcttaatgatacggtggttgcattgatcccgaaaattgataagccgcaaagaatagaggagtttaggcctattagcttatgcaatgtgatatacaagattgtctcaaaatgtttagctaataggatgcgccctactcttgatcatgtagtctccgattctcaaagtgtgtttgttaaaggtcggcttatacatgataatgctattgtggggtatgagagtctacatgtgatgaggaaaaatcgttttcggaatggttcgaaagttgctttgaaattggatatggctaaggcatatgatagggtggaatggaggtttttggaggctatgatgattaagttaggatatcattcgggttgggttaataagattatggcttgtctttcttcggtccagttttcgttcataatcaatggtgaaattcagggacgggtcattccacaacggggtattcggcaaggtgatcctctctctccatttttatttctattgtgtagctgaagctttctctagtcttattcaacatgctgaacaaaggggacggattcacggggttatgtttggaagacaaggtgtgactatctcgcatcttttctttgcggacgatagtttggtcttcttagaagctgctgaaaatgagtgccgatggttcaaggaattgctggaaaaatattctattgcttcgggacagcttgttaactttcacaagtctgaaatgtgttttgggcggaatgtctcagctcctgttaaggcacatttagctactttaatgggggtaaaagtggtggataactatggaaaatatcttgggctgcctttttttgttgggaggaacaaagaagcaaaaattgaaagggtggaaaggcctcctttttttctgctgctgggaaagaagttctaattaaagccgttgttcaagctattcctacgtatacgatgagttgttttcgattaccaaagaaaacaattaatagtatacatagtatggctgcaaggttttggtggggctcgtcggagaaggatgctaagatccattggtgtaaatggtccattctgtgcaaacataaggagaaaggtggtttaggatttcgcgatttgggtctctttaatcaagcgctcctagctaaacaaatttggaggtgcttacggtttccaaactccttgtgtagcaaggtgttgaaagctagttactatcctcatggtggggtgttggaggcaaaatgtgggaatcatgcttcctttgtatggcgaagtttggtttgggggaaaaagattattcaaaagggatatcgttggcgaattggtaatgggaactctgttcgggttcttgaggatccttggctacctcggcctgttacttttaaaatttatgacaaaccgcctttaccggatcaactgtatgtcatagatttaaagaaaaataatggagagtgggatgaggagtttgttagagctgtcttcaatccaatagatgcggatctcatcttacgtatgcctacgtctgaatgagatatcgaagataaagtcttatggcactatagtaaggatggggagtactcggtccgcagtgggtatcgtatgtcggctgcattacaggtgcgagatgtacaatcagatactgaagtgactgagaagtggtggcgtcttctttggaagctcaaaatcccaccaaaggttaagcattttgtgtggaagttggctcattcttggcttccaactaatgcggttcttgctcgccgtaacattccaattgagccttactgtaacagatgttttaatggagtgtatgaggatgtttttcatgcaatttggtgttgcagagtgaatcgggaggtttggaaggccactggtttttatgggaaaattcaaagacaagggagtgaggatgtgctagctttcctcatgcgtatctcgaccattttatccaaggaggagtttgaattttttctggtgctgtcatggaatctttggtatgttcgaaactctgttaaccatgggggtcataaaccacaagcttgtgcagttctggaatggtgcagtaagtttctcagcgagtttcgtgaaagtaatacgcctaagagagatcgtcaggttcgggaggctgcacgttggacaccaccaggtactgatgcttttaaaattaatgtggatgctggtgttcgaacggaggctggtgtggctagtatcagttcggtggttcgtgatcatgctgggctggttcactcggctgctgcaactgtgttgctgcagaatatgaccccattacttgctgaactgcaggcgattgcgagaggtttacaagctgggatacaatgcaatttgccggcctttactgttgagtccgactgcctccaagcggtgaccttagtgcagggaaaagaggaaggatgcagagatgtagagtgggattgtcgctcacattagaagtctgctgcagaatggtaagggttagaggggtttcatttgtgtatagggaagcaaataaggttgctcatattttagccaatgaagctttgttaaacaaagctagtgctttgtggattggggttgttcccccttgtgcgagtcaagctgtgatgaatgactcgcctaatccattgtattaattgttgtttgaatgaatcctgttttaacaaaaaaaaaaa

SEQ ID NO: 312936 - DNA, 1649 bp, Cannabis indica
atcctttctctaacattgtatttccatctccacatgtttctgaaactcttgtcaatgatttccctactgttacttccaatcctgcttgtactaactcaactcctcaggaacaatacccgatacaagacactagcatacaatcagaatttcctcccaacgaagacacaaatgaggacatttcctccacaaattctccagttgcaccaccacctactgtcagacgcaccagcagggtctcaagacctccttcttaccttcgtgattatgaatgtcactcggttttgcaagacaaaacctctactccccataatctacaaaaatttttatcttatgacaaattatctgactctcacaaagcctttatttctcttgttacagctttatatgaaccagctacctacaatcaagcatctcaatacaaagtttggaacaacgctatgaacaatgagctcattgctttgctcaaaaacaagacatggacttatgtcaagttacctgccaacaaaaaggctattggatgtcgatgggtctataaaataaaactcaacagtgatggttctatcgagagacacaaagcaagactcgttgcacaaggctacactcaacaagaaggactcgatttttttgacacattttcccctgttgctaagatggtcacctttaaattattgctggccatctctactataaagaaatggcacaccttgcaactcgacgttaataacgcctttcttaatggcgatcttcatgaggaggtttatatgcaagttcccaaaggcttgactttaccccctgaatttgctactgagaaggacattgtatgcaaattaaataagtccatttatggactcaaacagtcctcacgccaatggtatcgcactctctgtactgccttacttaatgaaggcttcacccaatcacaagcagattataccttattcactaaaggtactcaagacaatttcattgctctccttgtctatgtggatgatataatcatcaccggccccaacttggttttgctgcaacaattacagaccactcaacaatcaattctccctcaaagcactcggcactctcaaatattttctcgggtttgaaatagctcgtgcctccgaaggactagttttatcacaacgcaaatacactctccagattcttgaagacagtggctacattggtagcaaacccaccaaaactcccatggatccgcgtatcaaacttgatgatcaacaaggagagcctcttactgatccatcgcattatcgtcaactcgtgggaaaacttctctacctcactttatcaaggcccgatataacctttgctgtcaatgttctcagccaattcatgtcttcccctagaactccacaccttcaagcagttcatcacttgctgagatatctcaaaggaagtccaggccaaggtcttctttactcagcttcatcatctcttcagctccgaggtttttctgattcggattgggcttcttgccccataactcgtcgctccactacgggtttctgcatcttccttggagattgccttatttcatggagaactaagaaacaaccaaccatttctcgaagttctgctgaagcagaatatagggctctggcagcaaccggtagtgagattacatggctccaata

SEQ ID NO: 312937 - DNA, 1397 bp, Cannabis indica
tagcactcttctatgtgttaatattgttattggtccaactaaatatcaggttctatatagtttaatgtaataaatactatatgtcccatccttcaaagttgtgaagtacttagtgagttaccaatttgagggttaggcttcttataatctttaatagaatccagtttgaaaaacaagtattttggtaagaaatactgtaagaattctatctatattgacctaagggtggtgccaccataaatgagaaatatggagtatatttttttcaaaaaggtcaatgaatagaatgtgcacaaggccattaacagtgtaaagtgagacatgaggtcttggatgaatatagcaaatgtgtgtgtcattgtcgttttattataaaaaaaataagttggtttaatgctttgtcaacttaatttttaataaaatttatgatgaatgcactatgattaagttcaagttgaaaaatactatcttatgcacttgagcaaggactctatagagattgttaaattattcaattaaagtggtggatatatattaaattcagtcaagttagttaagtttgttaggcatttagttaaatcaattggttggttttttctcataaattgtactggttcaagctctgcctataaaagccatctttcctctcttgtaaaaatagagttttcatatataataaaatattgctttctttgttctaatatggtatcagaagaatagcacataatccttcgaagcttttccaagctttcaataatggtgaggacacgagcaacaacctctgctactaccaccgatcttgtggttgatgccactgctccaatcgatcctctcctatcttaaacttacactaacaacaataatcgagctccatctacagctccaccaacccagcaaacttagatcgatcgcccagcctacaaagatattcgcaatccgtagtattggtgcaacactgaccatccttgcttggtacttgccactccacttctcacagatcgaaacttttagccatggcaataagacttcaagatttcaattggagctcgaaacaagaccccgtttattgaaggtgctctccctaaaccccctcccaatgattctctttttggttcttggattagatgtaaccaaatagttatgtcttggattttacatttgatttccccctgagattaaaagcagcataatgtattttgacactgctgctaagatgtggactgttctacacaaccgattcaatcaagggaatgggccacggatcttcgagctcaatgaaaccctgacataccttcatcaaggagatgactctgtgagcttttatttcacaaaactcatagaaatctgggatgaaatcaatcaattgagaccaagattatgttgaaaattattttacc

SEQ ID NO: 312938 - DNA, 591 bp, Cannabis indica
ctgggaacaactaagatgtatcaagatgtcaaggcaccgtactggttgccaggtatgaaacttgatatatctgagtacgtgtcaaaatgtctaacttatcagcaagttaaggcagaacaccagaggctagggggattacttcaacctccaaagatccctaagtgaaagtgagaagatataattataaattttgtggttggattaccaaggacaacatgattttatgattctatctgggtgataatggatcgatatacaaagtcaacgcacttttttccagtacgaactgcatataaagtggatcaatacgctgatttatatgtcaatgagataatttgactccatggtgctccaaaattcgattgtctcaaatcacgatccaaagtttatgcccatgttctaggaaagctctcatcgtgtaatgttgtcctcaaaagtgagtgttttaatatttatactcgcaagtgcacgaatcgtttcggaatataatgttcatgtaagtgcaaggtcgaacccatgggagttgactaacatcaaaagaaactatttcaaacaaaataagaatattctaacctagctccaaatatttga

SEQ ID NO: 312939 - DNA, 953 bp, Cannabis indica
atatatagtatatatattaattaaaatatttatgctaaatataattataataaaaaactagataaaaaaactctctttgggttcccctagttgtaggccgattcctcaaatatataataaatttttaggtgagtattaaactaattaagaatgtgttgtatatattttaattattggcttgtattattccttatctatacagttgagagataattaaatctattaataatatatcttaattattaatcctcatcagatctagagagaatgatatacattgtcattctgtcgaaactaaaatctttaagtcattgtaatatctaattatagactaattatgtgtacatatatacatgcatcatgcatacattcatatttcaagtacatatatatataatattgtagtataatgtctgatgattgtttaataggtgaaagaaatgtttcacgtggtttccaagctttttcattaatcagaattttacatggatattaaggttttcaattttagaaggttgatatgctaatcaaatttaattaagtggagtaataagctatggtttgagaactatcaactttttcaaaataaattgtataatgtccaaacaactaggatgttttcccccttaatttattatatatacatatatatatatgtaaatcttgtattctacattattcacttttatttcttgcttcactttgtttccttcttaactacttaaacctgatcaattgagttagacgaaaagagaaactataatcttatagagataagcgtttctaatgttgttggaattggaacactatttctttgtttctaagattataagtttctctaaagcgaattgtgtacttattgtttaattaggtggcgtttggtaacacttttttaatcagttttctgtttttaaaagtggaaaagtgaaaattttttcaaaaacatgttctat

SEQ ID NO: 312940 - DNA, 1749 bp, Cannabis indica
acttttccacttttaaaaacagaaaactgattaaaaaagtgttaccaaacgccaccatagctaaatgcatatggtacacggttttcttcatcaatcagaagtaacatggtctaattactaaaaaaaaccatttttaataacgactttttttgtcataacataaattttttatgagtaaaatatagtatttagatataaattatccttaatttagttctagtcataataagtattatgactaaaaatacatttaatcacaacaaattataatttttataattaatatttctggccgaagacattttagtcacaacataaaaataataatatataattagttacaatttttttacttttaattataatttttatttttattgggactaaaataagacttttatagtgaaaattacactctttaataagaaaaaaaaaataaaagttattaaagaatgtaatatttaagattgaataatgttaccgagaatcgtatgtattgatattgaaaaacaatttaaaaaatgaaaaattaattaatgaaatacaagtctagaaccagtttaaattacgattatgatatttggttatcaaatgagaagagcatcaatgatgcttaacgctagaatgaagagatatactgttagtataatttaatatataagattataaatattaatttaatttaaaaaattaattaattactcataaaattaaagccactataatattaataataatttgcatatatacctgtctgggtgatttaaataaagtggatttacgtaattaggattaggatcaggcacataaaattcagcagcagagcgattaggaatgcctatttcccacagtgttggtccatctcttggaggttcatacacaatctcacccatgtcaatatcacaacctgtatcagaattattatttattttaatcttataattaagctctatctaaaacattcatcacagattaaaactaacaagtttaatttgttaaagaaaaagctgccaaccagctttaataacaccctttaatatttatgtggaattctccaatacattttctaaaatccttatactttcttgtagctatatatgtatagagttatttatcattttttaaaactttacaaaaaagtattggtatttaagaaccaaaaacacaaaaaaaatatactacacaccttttaaggtgtattggaaaaattccatatatatattttacataaattaagtaaaattcttgtgcttatatatatatatatttatatactagatagatggtatgtgacttgcaagtagtaatagttttttttaatatcataattttaaaattaataatattcagtatattagtaataatcaaatttgaaagcatagtgatttaaataaaaacaaaaattactattatactttgtaataataattaaaaaaaattattattcgtcctaaatttatcttcagaattaatgaaaatgctcatctgattaaactatcaaaacattcaaatttaatttaaaataatatttaaaatttaactaattctaaatatgaaaatttgaaaataatttttaataaaaaaataaacaatatgaacaaatttattattaattgcaacattttaggtggattaattatatttaggtttaactttacgtgacaacatctaataatttgttacttttttattttaaaaaaagtcacctaataatttttcataaactaaaaattctattatatagccaca

SEQ ID NO: 312941 - DNA, 849 bp, Cannabis indica
tatttttgtaagttttccaattactttcagtccaatgatgaaatccaagtctccaacgtgatatgcatgtggtttttggtaagtagaaattacgtaaactatgggaaaattttaaacatttacaaatttattgcatattttttttaacccatatggggtatggacttttaaaaatatttttcatttttgtggttttatttctgccacatttttgtaatttatttttgtattcccatagtgagtactatgaagtcattcaatctacgaactcagatttcatttttgaacacaaatgttgccttagacagtttgtccgatcgccgatcaacgcccaccgtcctccgatcgttgacctgagctccagcagccagaagtttagtgtgctagacctaagcaaaactccttcccgaccaaagttcctctttctggcacattttttggtgcctatttctactccgaccagtctaaacccagaacttcgacatcaaaccgagttgttgtttcactgcctatttttatggtgttcgacttccttgctccgagtggatttcagatatggttttagatctagtgttaaatgtttcatcttttttttcctcctatgctttattaacatgaagtaagtaaccataaaaataagtaactatggaatcaaagtaggaccatatgttagaaaagtttcataatttggctactatcttttttattaaatggaagccctattgtacttttctctcagctctttaatctcatatttgaataaagttgcatctgttggaatttattttaccgggatcttagatctactcacaagtatgtttattaacaccttaaatatgaactttctaa

SEQ ID NO: 312942 - DNA, 1245 bp, Cannabis indica
taatgaatacgaaatatatatattgcactcttttttccttagcttcgattttgatcctaggtttttctgacaaggtttttaacgagacaactttatatcatgttaggatacttgcaattcatgaagtaagtagaaaatatgtgcaactgagatcaatgacacaacatattaaaggaaatgtttattgatgcccaataaagaagtacaaacagtcctctatgaattgcatcactcaactaaaaggagggtacactaaaagagataaaactaaacacatttcaccaaagttcatctttacgcacgatcttcaagagagtggtgatatcggctaatgtccaacaaatttgatcaagtactaatcttcaagactttcataaaatcattaccaacatcaatatttgagaagacaatacataagattagaattcatcgattgaaagatcaccaaaatgagggtgagtttatacacaccgcactcttttcccatgaccgagtttttgtcatactaggttttctagcaaggttttaataaggcagatattatggatatctaaagagaaatattatgaatattgtatatatatatgtccaaattacccaaatcaattattaccataaatactattgtatttctttttattttattgatttgcgtttttcaattcttttagccatatttttgtataaaaatagggattcaccccattggttgaaacttctcatttattttttttttctctttatttttttcttctctattttagcatattcataataattgtataataattatataattttagttgtgtttaaaaaagaaactatatatttttagttatttcctttttaggatttaagatatttagttgctattaagttttttttaagaaacagttgttatatttacgtaaataccttccgaggaaattatattgtatatctattttatttaaattattttaatatgggtaaattgcggcataaatacttaatatttcaaattttatacacttaaatacctaatgtttatttttggaggtaaaaatacctaatgttacaattctcttacaccgttactacaatttccgttaactcataaatatagacacgtagagggttcagatgcattacatttatttttatttttattttaaaacttaatattcttaataccaaaaactaaatgctacttgtttcaaaaagaaaaaaaaaaccaagttctcataataattttcacataatatt

SEQ ID NO: 312943 - DNA, 812 bp, Cannabis indica
atacaaagtcaatcattcacagtcatatcaaaaagataaatagagtttttagttataaaagtatattttcttccattctattttgattgttttttaaaaaaaaaaaacaaaataataataataataataatttacttagggttattcatggattgttttagttgggatttttactttttttttaccaaattagtattaaggtttttaaaaaattcaaaatcaaattaactcacttaataagaatggatttgtttggttatttgtatttcgtaattattaaaaaaattatataattgttattatttttctttatacttttcaaaatttataatacataaataataaaaaaaaaatattatacataaagattgtttctaaatttcaataaaaaatctttgtttgacaattgtagagcaattcaaataagggttgttcattggagtggtattaacacatttacaatgcagtacaatttttaagaacaaatcaacaaatttatcaaaatatttgttacagtgtagcctaaatgaaactacagtcacatggctttttttagaggaaagttacctttttaaaagaaatattaatttaatgtttatataattactttcatgggttttcatttttaacatgaaatatcaacttcattaaaataaaacattcaaattacaaattggcattataatctgtcaggacattaacatcatgaatgatatgatcggaatagaaacaagagcgtctagccacaaagtgagcaactttgtttgctgatcgtttaacaaaacgaagactaacattaggtagagaggata

SEQ ID NO: 312944 - DNA, 1912 bp, Cannabis indica
cacaatgaatttaataattggataataaagaaaagatagagacttttaatgtggctttgtagttaactctacacggacaatctttttttttttgagattttatgaacatggatacaattcggtataatttctgtaagtttgaaaactgacattctttttcacaatgtgagtactgctatttataggattaggataacagttactacaatcttatctaaattacaattatgtaatgtagatattcatcacgttttatttatctacaaaataagtgggaatagtttatgtatctttatttgaaataaataactgccattctatgacatggatcttcatcatgctagttcaagatgacattttgtttctcgaggaatatgctaatggatggacacgtactgagcatgaacttaatcggggatcattgagattagaaagatagactctttagtctttatagtgattgtcgagagtgaggcttggataagtgatccctctcctcataagtaagcattttcaagttgtacctcttatatgagctgagttgagagtactcaatcttgcaacaagcttgacatttctgtctttaattgctaataccttctttcttgttaaatgtgagatgctcattattaattttatatgtgattcttgattattttgtcgtacttaacggttatcggttattgaaaagatctttgtatgtctttttatttgcgagaagatcatttaatacctttcatttgtacatgtatttttacgtatataatcaagaatcacataaccgttaagtacgacaaaataatcaagaatcacacataaaattaataatgagcatatgatatagctttttaatgatctccttctcttctcctccatataatacctttcatttgtacatgtatttttacatatatatattaactatacatatatataatccgggccggtcttgaaatttagtggactatagagaaaaaaattatttttgggcctttatttaaaaaaaatggtatttttcaaaattagcaaaacaaattgtgtaattttaaaaggggaaaaaaatttttgggcccctggactaggtgggccctaggcacaggcctagcccgcctatccccagggccggcactgtatataatcctattatatatataataatcttattatctaatcctacaaatatttaataataaattctactctctaatacaattaaaattaactaatatttaatctaattatcaaaatctctaattaccaaaatataattttacttagcaaataccaataatacgtatatttcatttagtgcaaaataaaatattataacacataataatataccaagtaataatatatttatactagatattacaattcaagaaaattagatgaaaaagaattgacttgagtattaataaactccttagagccagtaatctcgtaaagatctaagtgttaattagagacaagtctctagtcaaggccctaggaatatttgagctatattggtcagtgatgccataatacaagttgctacttgttaattgggcatataatttaagatagggatttttacatagtatactgtatttttgcattttattacttttatactgctaaacggtagaaattacaaaaatactgtacatttatactatcttttatactgccatactgccacttgtcactttgcatgcctttctctatttttttttaattgattaattttttaaaaaaattgttgatgtgatgctcatgatcaaatcatggcagctcataattaaaaaaaaaaagtgataaataaaaaaaattatatattatatttattttataattacacgttatcccacatttcatcatttcaattttttttcatcatcttaagttattcatctccctcacatgttca

SEQ ID NO: 312945 - DNA, 1774 bp, Cannabis indica
tctctctctctctccctctctcattagagatctgcctacttgatccatgctttgtaaccttatagagagctacatcagatcccacctacagtaatctaaatagtattatctctaggtatcaatacagctaaaagggggtcgaacctctataaaaatcattgtcttatttactttattcttcttgttgtgtaacatgtggcaaacatcagattcattcgactccgatgtcggttggccactttttgaggtcaatagtttggtgctttcattgagagtgagttgatattatatctaatcaaatgccatggttaacacgagaagaactctagatgcatcatctgcatctttgggtcttcctcaagaaccatagactgtaaatcttgatgtcaacattccaaccacgactggaattcccatgaacactatagatctcgtcaatcctgccatctcaacaggcatcacgaatctggccattacagctggccaggatgttataaacatccctgtgatctgaacaaccggcccttagctccaagggaggaccatccccaggtgcctcccactaaaggaaggacccttgggaaacagcccccatgaacaacaactggatctcatccctggtattatgtaagagagacaagaccaggaattggcaagccccacgtggacttgggagaagatctcgagttagctagacttagagaggtcatctgccaagctgacctaattgaagaaccacatgctattgattgcgatgtattcacttagcagagatgcaaattccttaaagaaccacatgcttctaattgcaatgtattcactcagcaaagacataaattcctgagatggatggatgaccaagagtacatcctttgatctcactaggcagagctggattgccgcaatagagaggccagtgacctgataaggtggttcaatcaaagaaccaatggaagaggccaggatctcatcacagatccactccaaggaagattatttgatagatcacagagggtctatcaccaaattgaccaataaagttcttcaggaagagaacatactcggaggcatcctaccgttgagtcactttcggaaagatatcaggaggatctcaacgaacgacatggaagagttccttgagcgagaaaatggcttcataaagttggaagaagtcatctgggaagcctaaacaagagggtaggtcaacgatgaacaaacatagagcctcataacaccctaagcactgtccaacatgccgaccagcggagatgatctctgtcaattctctaacaatgagaatggtggaggcaagcgcactaacaatcgctctgaccaacaaaatggcaaaagagggaaatttaatgattcccttatgccatgaagtctaagggagaaggaggagaagttcacatgcttcactctcctacagaaactcccaaagcaaagcatgcccaggcaagtgcagcaagggaagttagcaacaggaagtcacaaggttggcctccatctttgaaggttctctgaaggctagcctccatcccccaaggttgtcctccatctccaaaggttagcctcctctcaccaaagctagtaggaacatgacctgccagatcttggcaggagcatgacctgccagatcctagcaagacatggccggccagacctcaacctacaggcattgtatgaccagccatcctgcaccctgtagtgccatgacttgctaggtgccaactgttgggttttgtgccctaaataaaacccattacaatctgat

SEQ ID NO: 312946 - DNA, 659 bp, Cannabis indica
aaatattccgaacaactggcttcagtagccatggtaatgatttactttcaagtaatatggattaaaaatgatgaatatgtttattgtgttgattttggatgtgggtcaaaatgggttaaggggtaattagacgaatgtatgtgatttacaaaaattttctatgaaaataatttattttattctgaaaatatttatttggattccttgtgaaaaattaaataattttggtttttacagaactcgattccgataaaaattgataaagttatggttgtttgaaaatctgggtacacatgccccaatcgcaagcaccagtcactcgtacaaggtgacatgcacacgtgcatgagggggacaaaagctatctgaagcttagggtgctgccttgctcggacacgagatcccttacccaaatgctgcactttgcccgtgtcccatgatgcaggtgccgagaattctcagtgtgagaccctaccaagtctctttctcgcgcgtgcatgagggcgtgccggcagcctctcgtgggctgcaggtgcaccttcaccaaattttcaaattttttgggatttttctaattttcaaaccctaatatctaaataaaatattgtttttaatatttaaatttaaatatcaaatttacaaattaataatattatttt

SEQ ID NO: 312947 - DNA, 1115 bp, Cannabis indica
aacaaacacagctcatagcgccccaaacactgtctagcatgccgactagtgcagacaatctatatcgattctcaaacaacaagaatggtggaggcaagcgcaataacgatggctcttatcaacataatggcaagagagggaaattcaacaatccttttatgctatgaagtccaaggaagaaggagaataagtgtgtatgcttaactcttctatcaaaactcctaaagcgaggcatgaccagacgtcctagcaaggcaagtcagcaacaggaagtctgacctctgccatcgaaggttggcctccgtcctagaaggctggcctccacctccaaagtctggcctctgcctttgaaggatggcatccaccacagaaggctggcttccatctccgaaggttggccaccatctttggccaggcgtacaggtaggtaccactaactctgcccaaacctcagatggatggacacttaggggtcgacattggcggaccccatattgcaggcgagaccaacaaagccagagtgcgctatgcttggacactccgtcacgagcccaaaagtgacttccttgtaggcaaagaacaaggctctaagaaaccaaagcttggagagcccacgatctctttctcaaaaaaggagatcctgcccaagacagtttcccgcacaatgaccccttggtcgttactgcacaaatcaggaatatgactgcaacaagatatatggtagacaatggagcctcctccaacattcttttcaaaattatcacatgaaaagatgaggctccaactcgctgacttggcaccctgcatttaagtgatgtatggcttctttggccaaggcatcacacccattggatatgtcaaattacccctcactattggataaattccaaccaccagaactttgatggtgtagttcgttgtaatcaacattcctttggctctcaacaccatgataggctaaccaaccttattcaacttgaaggcataacatccaactatcacctctgcctaaagttccaagcaaggcatgaggtaagatgtcaagaggaggtcagaaatctgcccgtcactgttacaacttggccttgtccaaagccaagaaatagaagatgcat

SEQ ID NO: 312948 - DNA, 931 bp, Cannabis indica
taaaaaatatcactaatcaattgtaaaataccaccgataaaaagtgtaggacatcacttgtgccaaatagcgcaatactcaatatatagatagatgtttgttttgccctcgtaaccaaccatgaatacgaaagatctagagttaatcttcgtcttcacgtaataattattataaactcagatctaagtggttaggaagttgaacaaaccccctgataaatagcattttctcttaaaggtaagaattcatgatgggacattttgttacacgcaacgctttatattccatatataatacttttgcaaaaatacatacggattgatttttttttgtccaattgttaatttgttataataaaatgaaataagaaaaataatattgtgatcaagcaccctataatcctatcgaagatccatgttttattttattttattttttctcaaagtgattagaatcactcatcaatttacacgaggacgttcgccactggcgcttgaaccttctcaaacaaggatagtttatcgtctaaccgtaaagtacattctgccaagccatgggcggcgaaaatctcaaagcgatccacatggtacaaaactaccctcgaaaatttagaggatattaaattagagacacactttaatgattagtataagatcagatattaaaatacagcaacaataaaaaaaagaaaaagaaaatacagcaataaccaaaggtcatttcttgtgggcttaacaccttgacaattacctcaaaaaacaccttgacaatgctaatgttttgttggtaaaaaaatgttcatattgatgggttgttgtattgcgatttgtgagaggaatatataacaaaacatgaatagaaactaaaaaaatcataccatttgcaattttgatcattatttgtcatatacatattgcgttgctcacacaca

SEQ ID NO: 312949 - DNA, 675 bp, Cannabis indica
tctctttgctagcgcagtttgcgaaatgcgctggtaaaagtgacatttcttatgataggaaagtatgtttgggctgtgacttcaaacgaagataacttgtgggtaaaatgaatctataatgtttacttgaggagcaatgattggtggaattacaaagcaccaactcattcgagctggtattggaagaaaattacttcagtcaaaaaaaacaagtttttagaaagaattgatattcaatctttcactccaaaccaaagtgatcagtctggtccgcgattcaaatgtagagaccaattcccatctcttcttaagttcaatcagttcagcttgcctttaagagctaaagttgtagctgtcctagaagacctcaacaataatagggagacttactaaaatggatccgaaaggaagaagatcacaaagtgcatgaagcaagtttattatggaattgttgcagcaactgtttatcatcttaatttggaagaacaagaatcaagcatattgaactcaaagtgttcaaaatccaaaagttaaaattaaagcaattcaaaatgtatctattttttttggcttttacacaggcctcattagtggtgttaggttgtacattcaatcaattttagaaatacacacttattcaatcaaaaaaaaaaaaaaaaaaaattaagttttaaa

SEQ ID NO: 312950 - DNA, 1171 bp, Cannabis indica
ttcttaaaacgatcactctagaaaccaatgtaaggttttcttaactttatatgtgtttaattatcattttagaaagttcatatttaggatgttaaataacatacttgtgagtagatctaagatccttgtaaaataaattccaacagtattctgctcgtctgtcccccttcttctatttagatcgtcccttaggtcatgggtcatttccagcctatcgaacacagaagagcctggttgcctcaacgattgattcgcttggttgacaggcggaatggctccattattgttgaatggatccgtcgggtatggctcctcctcaaaagatgctttttggaagaagatatctacgccatccatttcgagttgcaagggtcctgatcgaggtataaaaagattttcctgaaccctttcttctctttcactatctcaatctttcaaaattcccatttttgaaatttcaaaccaaaagtttttggtcatttaatttcgctgcaacccatgtaaggtttctcataccttttatgtgtttactttatatcattttagaagttcatgtttaggatgttaaaaatatattagttagtaaatctagatcgtggtaaaatatattccaacataaagatgccaaggtggatgagggatctcccacatccccgattgaggtttctctcgatgaggctaacaatggtatttcaaactctagtttgaatttggtggagcaattgcatgcacagggtgcatggattcttgctggaaaagatgcattgattggatccaatgctaagaacaatcctttaggtcccggacaaggtctgcccgcctacctcttggcatatgagcggaactcgtgaccggggattggacagctgaccgttggttgtttgggaagcattcatcgtcgggtcgtcctccgtttctcccagggaaatgacgctcggcgtttgttggcctacagtctggtaggctcatcgtatcagcacagtagcttgccgactacgatcttcgatctctgcatggtgagcccttaatgcctccatctctttgtccctccattcggcgaacatacgcctctgtttgttgaacgcaaggtttactgcagcacgtagttcctcctaatcatgatgcagagtattgctgtgaccctgcatgagtccgagcgcagcacggagat

SEQ ID NO: 312951 - DNA, 1363 bp, Cannabis indica
aaaaattgctaattagccttatacttattattatataaatttatatgtttcgattaaatcatgttacttaaataattcaattattgtctttattattattttaattgtattaattaaattttaattttttttattatattaaatatatatttattttactttttgaaaaagaaaatataaaccatgcatgtataatttattagagatatataataagtgagtttcaaacttgcatacattgtttgagactactcaaaattctaatcaactgcaatgccactaaatattaattaattaattaactaactaattaatttattgttaaatttgttgatttggcactaatttaagcacctagatttggaatgttttagggtttacttcatcgaaaagaatcacttgccagccactatttttttttttaaaaaaaatatatatatttttattattaaaaaataaagaaaaactattggcctaacacgtgtctatattaattattgctacatcttttgagcaatgtatttactcaaaaatgtcaaatttcaatgctccacaagcaaatgaatcttccaaattttcaacctccaaagatagttgaagattttgaaatttatattatggatgttttcaatacattactttaaccaaaaactaagaataataaaaacaaatattccttccttctaattctaaatgacctaaaaaagtatttcttacaacatttttttattagttgttttgttatttagtcataatttaatttataaataaattaagtaaaagttaaattttcatttattcgcgttaaaattgtctttaaattggttatattaaaaactaaatgttaaaattgagctcagagtcttatttttaccagatctattttatcattcaacaaacagaaggtccaatcggtaaattttacaaaacatagaatctaaaatgatatttatcctaaaaaaaacctctttgccccaaaaaaaaaagagtcaattttattaagtaaaattattgttggaaactttttttttcacaaaaataaattttcactagctttttacttgtttttcattttaatgagattttatatatctttattccaactaaaaaaatttacactaaagatttatttactatgattcaaaaataataaaatatatttataagatattcaagccattctgacttatgctatgagtttattttgtatttttgtaggaatagttattgagatttatggtatgtgtgctcgtttctggtggggtggtgataataattttcgcaaaatgcacttgggtacatggcctcacctttgttggcataaatctaatggtagaatggggttttgtgacagtcagtagtc

SEQ ID NO: 312952 - DNA, 1100 bp, Cannabis indica
ttatggttgcataggactactgagaagatgaccattgggaaaactccattcgctctagcttatggccatgaggtaatgttgcctgtagagctagtgccactatctcacaggagaacaacctatgaccaataaacaaacaacaccctgctggtagagtcccttgacgaagtagaagaaagaagagaactagccaacctaaagttgcaggcctaccagtagaaggtagcaaggcactaaaacaaacatatcaagagtagaaaattcttcataggagacttggtgctccaaagagtgttcttgacacttaagatttagcagcacctatgtttggacctaattgggaaggcccttatcaagttacaaagataactagtaagggagcctataatctgggaaggtacaatgagaacatggagcttattctcctaccaaggtactggaatgcagggaaactttgcaaatacattcagtaaccaacttatagaagtctactcctaagtagcaattctacttactcaacaatagagtatgaaaagcattagtacctgcgaccttattggcgtggtctcccactattcttcaatggtagcctctgcttttattaggtgagcaggggtagccacttgacatctagaagctaaatttgtgtaacgtaggcttgtagactcaatttatgtaagttgcacagcaacaaatacgaatcaatgaataatcaatatttatatacttgtatattgtgtctatgaaccacttgctcatagattaacttcttaaagttattcttttagttccacatgcataccatggtaccgtcatatgataaaacccaagcaatgtttgtgaacatggtgaattgcaagtgagtaagagacttttctgcatggtcacttgcgaggcacccatattgtgcaacacatcaaactagcacaaagaacttaagtaaagaaattttaacgcttaatataaactactaaacatgcctctaagttgtgcgggcatactttagcttcgcaaagtaaaacttgacccttacttgtcaaggccataaaaagatagcaaggattaaagaccgcctaatcggtcacactatccatgataaa

SEQ ID NO: 312953 - DNA, 614 bp, Cannabis indica
agaaaaggaagactcattctacagtggatcgctgaaggcttcgtgaaatcaaagagggataagacattggagttaactgctaaagagtacttggtagagctaataaatagaaatcttattcaagtgtcagagacatctactactggaaaagctaaaacttgccgtattcatgatcttctacgtgagattatcataaaaaatatggaagaactaaacttttgtcaagtttttgctggaaatgattcaaattgtaagagtcgacgcatgtcagttgtcaatggcggatcttatgaatttattaaaagtagtgctccagaacttgcccaagtacgatctctttttcttttcgaggaagaaggattgcctcctaatgttgtaagtgctatctgcatcaattttaagctcctaaaagtccttgactttgaagatgcgccaaacttagattaccttccgaagaatatcggaagcctctttcacttgaaatacttaagcattcgtgagacaaaggttgcagagttaccaaaatcaattggaaagttagaacatttagagactttggatctaagtgaatcactagtgattgaactaccaattgagattaagaagcttaaaaa

SEQ ID NO: 312954 - DNA, 1061 bp, Cannabis indica
acaacaacaacaacaacaatcgtagatccagtgaaagtttcagatattataaaagagtccctgtatttcttctaaattatcataataacccacctacactaatcaattctccttttgttctcccacaaaacaaacgcatcatcgtttatagtaatttattattggttttttttttacacttcaaaatagttttattttcatatttttatggaatttcacacaaaaattcttatagcaactaatgaagcaatttaaattgcaatcaaaattcgtatagcaactcgtagaaactatcagagaaccctaaactataaatttaagaaattatctcatatactatttttaattttttttttaaatttacagtttgggttgtttcggtaatttctatgtgggttgctatacggattttaattgtgatttaagttgtttctttagttgctatagaggtttctgtgtaaaattctgtaaaaataaaaaaaaatattttttgaagtataaaaatgaataaattccttctagagaattttttaatgaataattttgggaaatttgaatttctatgattcatgaggcaattttttggtatacactctcattacatgcattttcaacttaataatgtatagttaattcctagcacatatttaaaagtgttgttaatgattaaaattataagtataatttgatagtcctgttgtattatattatattgtatactatatatttttatattgtatgagtacttttagatcaaactaaaaactagtaggattagtatgcaaaaattgctttataactaaaatattcgtaactagttaccaaaatgctcaagaaaggtaaaacttgtgaacaaaaaccaaaagaagccaataatacatctagtaggggtgagcataaaatctagaaaatcgaaaaaatcgttcaaaccgacctactgaacactgttggaaccgaaaccgacaaaaccgaaaactgaaaaccgaaaaaactgctaacagttaaaaccgccattgaacggtcggttttttggataataaaccgatcgttatacatatata

SEQ ID NO: 312955 - DNA, 2121 bp, Cannabis indica
atcttgatgaagtcatttatataaaacaaccagaagggtacgtgttaccagggaaagattaaaaagcgtgcaagtttcttaaatccatttatggattgaagcaatcctcttcttgtaatataacctttaataagactattaaagagtatgactttgaacaaaacgaagatgaagcctgtgtatacaaatacattaaaggtaatgtaatggtaattctagttctttatattgatgacattctacttattggaaacatgtaaaaatgttgtcatatgtaaagaaatggttattcgataaattccaagcgaaggatttaggggaaacaagttatgttctcgtgatcaaaatctatagagatagaaagtagagaacattggcattttctcaagaaacttatattaataaggtgatagaaatattctcaagggagaattctaagaaaggaaagttattgttcagacatagaattactctacgtgaagatcaatgtccaaagacacctcaacaagaagaggacatgagaaagtatccttatgcatcaacagttgagagtttgatgtatgcaatgttatgtacaaggccttagtcgttaccattctaatccagatttggaacactagatagttgtaaagtacattctcaagtatcttcggagaacgagagatctcatgcttgtatattccggtggagagttgaatcctactggatatactgattctaattttcaaccagacaaagatatactagatataaattatcccagaattgtatttcggcctgaaatacccagttgtgactataccacaccaacttgtcagaacacacctgaaaaaggacaacacatgcatactatatactaatatagtccataagcacataaataaattaattttattattttacccatctcgggtcaaaattactaaaatacccctgactcaccaacagagtcttaacatgtcataatatagtcaaagagtcgaccaccaaaactcaccactcaccactacccatatatttgtttctctaccgtatactccatccatgtctcttgatttttggaaacataaagaaaaaaaaaaaaaaaacttcatctctctccaagatcacgataccgatcccaatcttgataatgatctcgattccgatcacttctcttcgttttctgttgcttaattagttttttgggatagtgagatgagacaaggaagaaagtggagatgaagaaatagtaatggtcggcaataaaccttcactgtcgagacgggtgggtgacaaatcgtagaagtttataaattttttatatatcatattttttaatctttaataaaagaaaatgaaaaaaaaagtaagtaataatttttttattatttaaacaatttttttatgacgtggacataaaattttgacacttggcaattttaaaaactacaaatgaagttattaaattggatacctacggactaatagaaatcttgagcttgggaacttttactgtaatttttcaagattagggacttatctgcatcaaagtgaattttttgtgaacttatgccgtaatttaatatcatcaacacataacacttttggagcaacgaaaacgaagacttataagaatcttgagcttggggactattaccattattttttgaagttgatggcttatttacatcaaagtaaacttcttaaagacttttgctgcaattttcccaatttttcaaaactccttaattttttttagcattgctattgggtatcagtggtgtctaggaccttctagacgtgtcgtcttgtaattaactagctatactccctaaaaattattatattaaactatatgacgcaatactaagttaaaccaataacaatattgacatgtaaaagcatactaagccattggtgccttttagcctttctcatttttttagtgttcttaagccaactccaatggaacactaaaatgttaaatttgttaaaattttacaccaaattcattccaaccatactctaaaacctatcctatatataacattgtctatagtgtcccactagtattagtgtgataatatagactacactaaatatatttttattattttttaatatttaaataatatattt

SEQ ID NO: 312956 - DNA, 1145 bp, Cannabis indica
ttggggttttgaaaaaaaaagtatagtttttttatggtttaagtttttggtataataataaaattttttaattatttaagcatataaaatcaaaattcccataaaaaattgcattagacttttatttaaataaaattaaatgcattataaacaacaaatattcataacttgattggttgagtgtataatacattaaaatagtgtgaatttgaatcttataatactctttattattttattttttttacatatttctaaaaataaggattctaaaatttaaatgcctttatgtccatatattttctagtgagtagcaaagggaccgtgtggcagtacgtgtcggtttcacaaccagagtgtgagtttttggtttgttgttggaagagttttaagacgattggctcaataattctttcattgcgtgccacaaacaacaaaccataaatatattttaagtacattatttgaattgagaaatgctaaaggttactagtggtgtctagcacctcttatgtgtcaatatcgctattgatcaaattaagtattgggttccatataatttaatataatagtttttacggaatatcgctagccaatcacaacgcgacatatcgtgaagatgctaggcactgctggtacctaatagcaatgctcatttgaatttgtaccactacatatccatcatcttattattcccaccaaatatatcacaataaatacatgccatgtacataagtggcaatcccaattcacatcctacttggcatcttcacttggcatttaacccatcactcgtaacagtttttttaaaataaagaaattttaaaaaatttaaaaaattgtactaaaaacatgctacaacggatactgtaaatttattttttattttttttttaattttaaaattgctttaaaattttttattcattgctcgacatttatagaatattattcgttgctctaaatatattttattaattattttagttttaataattatttttgtatatgaatatgtgtatatattaatattatatatttgaaatgaatataatataataaattttaaataaggctaattagtaatttttcctcccaaactttgacatgtaccaaatcataacccctgaacttttttagccgtt

SEQ ID NO: 312957 - DNA, 971 bp, Cannabis indica
taatgtattcatacgctcttcgcttcattcaacattttgtatttccttgatgtattcatttgatcccatgatatgcatattttataattatttgccttggaaaatatttggaaataacctatcaagggctgctctttggtcccctcagctttggtctgctatgcatactaaaaggggttctaatctctggaaactgttacttgataaattgattcagttcggtactgttgtttttttttttttttttttttggaccatgctatactcctgaagtttatgcagtttctctttcctaaagctataaccaaccatatctatgttattcaagtattaggcttcaatatacttgggagtaaagttgcttgttaacttgatattttacatttacatcccagttaacttatctgttctagtatatcggtttcggttataatgtggaccttattattttacatttacatcccagtttacttatctgttctagtatatcggtttcggttataatgtggatcttcatttcatattgttgcaggagtagatacgatcaatcgttcttagggagcagcatttgctattgcatctgtgatggctgatctggaaaataacaactgagattctcaacaatcgctttatgtgaggaattatttgccagtgtcatggccatggctcttgaagttctcttctggcctaagggatgctgacctttgttttattttttgtttcttatttttatgaaatttgattagaaaggtatattctgcatgaaacagttgaggcttgtggaaaagttacccttcgaattttatcaactggtttcaagttgttttttctggattttcgaggagtgctatttaggaccgttgaccttcacaagtttacactagtgtgaatttggtcagtgatatccaatccaaattgattggatcggtagatatacaatgatttacttggagcatctccaatgcatttct

SEQ ID NO: 312958 - DNA, 1103 bp, Cannabis indica
gctgtccgcgcgcgtgggaggggagatacagcccagaaatcaattttattcaacctctcaataagtgctctaatgtttaatgtattagctacagttgtcggagcggtcgaagtagatggctcctctagttctgcaggtggtggtggcaaaactatatttgccttccagacagcttcagcaatggtgttggcttgcgttttaaacaccgaactttgtgcaccatcggtgtccaccatctcatcaacgtccatctcaaaacaaagagaaggtttatcttcattgatgaacttgaagtactcctcctcactaggtcgagagcacaaacacttctttataatgaactgaaaacaaaaatattaaaaatgttaatttttgtaaattaaactagtaaaaaccaaaaaactaagaataatgtcgacatatgtggacattgtttgcgacatatgtcgacatcaaagagttgtttcaataaaaatggcaatattgactttatcgatatatatcgacattgatcgcgacatctatcgataactaacatatcttgtaatcaaacatttaacaataaaattatcgatatatgtcgacattaatctcgacatatatcgatatctaactctgtaactaaacatcctaatattaaacttatcgatatatgtcgacattaatcgcaacatatatcgatatcatcaagatccattataaaaaattcagttaattgtattattatattataaaaatgcattataaaaaaaaatccatttggttgaacaattgtgcaatgtcaactgcctttaagtcctgtttccgctggccctccttggttttccaatttatcatccgagtgaaccttgtgcaactacaatcaacatacttctttcccactttctctatggcttcatatgcccaatattgtatggtaggtacatagccatggacggtataatttgcctcctgagtaaccttcttgtcgttcttcttatcaacgttctgcttgtaacgcgtcattgttggatatattttaccaggatctagatttactaacaagtttgtttcattaacatcctaatatgaattctaaaacaatgaaataaacacataagagt

SEQ ID NO: 312959 - DNA, 534 bp, Cannabis indica
aaattaacaaagttaattaaaaaatgaaaaaaaaaaacataacaaaaaagataatatagggaaatgaattattagaatgctacctcacattatcttatgcatttctttatatacatagatatatagatatataaatatagaagatataaatataaaaaattagaatatgatcagattaaaaaataaaataatgataaaatagataaattaaaaaaataggaattacatatgtcacataaactcctaaagtgtttattatgaggggaaatgttagcatgtgtgcttatttgaagggaattccttatttgatcattagtagatcagtttaaatcttaggatgtttgagtattttttatatatatttttgttagtgttgatttgcataaaaatgtgggcaagagaatcacttgtgagaaaatataaaactcaagtttataaagatattcctgttacccaataaaagtctgtggggcctaccatatttccacataaaaaaagggaaatttttatatatatacattatatacattaata

SEQ ID NO: 312960 - DNA, 1651 bp, Cannabis indica
aaatcgtcctttgccaaatcatccacccagcaatcaattgtttccagaggagtgaattgaggaatatcgattttaactctaaaattgactcactgatggccctagccaaccgtcttcgtgctaagtgtgcttgttttcctctatcagaaccagcgaaaatcagtttggtgttgtcgattccattattaggtatgtatttgtttacttcctcaccttttaactgtgttttgaattcactgtagaatataagttttacatgttctctttggaatgaaataaggatttcttcggcttctgattaatacttttggtagtcttaggcatgatagattgtattgcttttgatttttagccttagcaactcctaaagaatggttgttttgctgcaaaaaatgttggaaaattttttccgtgctcataatccttctggttctgggtactttgtcaattcattccttctttttcctcttgatgttttcgatttcctatctagaacaaatgacccttgaagattttgtttctgaatagtaaatctggtagggacctctccaagcaatttatgggggaggacgttcccgctccctctctatattagatagtttgggtagctaactgcttggttttctttctttttacataaattatgtataagaagatccaacaagaagaggttgaactagaagaagatatgctagagcaagagaatgctccaagattgatgttgaatgacaatccttgagaaatggaccaatatatcaacaaattcaggatttatggcaatcttaggaagtacaagacctacgagggcttgagagtgttccttgattgtctggaataggctctccattcatggagtgaagccaagcaatttcacggacggagggtttggcatctagagctgggcccacgtggagatgggtgcacaccttctgctaaggtgttatgttacacatttctgcgcagtagctggagtggtgcccttccaattcatccctcaagtgtatcgcctcctatctgggtggtacatcctttgtgcttaacacaagaaaacatcaccaataccgaaggaaatcttgtacttctacaagattaaatctcagtccatgaggggtcataaggagaagataggattctacaagctagaacactactccaaaaaggtggcctgtccaattagctccgtgaagtatacaaacaaattttgggactattggttctacacctccagcttcccattgaagagagtccccacactcagtttggacttcaatatagccaataagtattcgatcttcttcctgatttcatttctcgtattcttccaattgctatattttgatgtttgttttatttcttctagttgccttccccaatcgcttctaactttagagttaagggaaaatcactttttacaactctttgtcacccaaggagttgcagatggctcaacttgtaaccaccaaaaatctcccagtagttagaatcattgctccccatcaaaaaattgacgtgatgtgaagtagaatgtccaggaattacttcagggagatcctgatggcgtaaaggaggtaattgaggccataaataatacaactaagctgaacctaaccatatgaggattaagatccatagacctaagatcaaccattga

SEQ ID NO: 312961 - DNA, 2147 bp, Cannabis indica
atcaatacacaatttgatttactgttttctacacacggcaaattcaagacttcctcctatctatacagaagcaggggctcttcttagagcattgcaatggagccaagcagttcatttccctatctgttagaatttgggataagatgaatagagttccatctcaaaactaattggcaatgggaggagtagcccattcctctaatatattctattatctttccacacattagcgatgtgagactatctaacatcctccctcaagatggtactattttatttgctcactatcttggacaactcgatcataagcggttctttctttggctcactatcccggatcacaagtggctctttttgctttatttttggatcggtatttttttttgtggcttttttattttttggctcactattcctgaatcacaagtgacttttttgactttggctcctggatctttttttttgggatttttggtggcccttttttttggcactatttcgatcggtttattttttgttggggttggatagtgtgttttttttgtttgtttttgctttgataccatgttaaaatttgggataacatgaatggggctccatctcaaaatcaattagcaatgggatgagtagtccattcttcttatatattctattatcttttcacactttagcgatgtaggattatctaacactatcaaaattgtggccacagactgtcaagttcttgtttctaaaattttgaagctgccaaaggatctttctgccctttcgagtttgatttggaagatcagtctctctttattctccttttctaatgcaacaatcatttacactcctagaagtaataattctctggcgcataagctagcacaaaccgcattaggaactgacgaagaggatgtctggaacaattgtgtttctagtcacctttagatccttgtaactggtgatttcttgttgttcttctttaattacaggtcttgtctcaaataaaaaaaaaaaggatgtgacttgaagagatgattaaagctaatattaaaattgttggtaattctataatacatctcacaagggtatattttgtatattttttttttatctcttttagtattcataaaagcttttaaatttatatttgttttatgattatgtacattgacattatttaaaattatttgtaaaataaaattaagaaattgaataattaataatattaaaaataaaattcaaatattttattacatttctaataattttttctcacaaatatgttaagcaactatttaattttttttttcaccctaaactatctaaaatttataatggtttaaataaatacatcagaaacaattaaaaaaattaagtaaaaaactctactagattttttatttggctagttagaaatttaaggaaaaaattaaaaaactctactagttagaaaatgagatgtattaaaagaattatttgggagagtgtactatccacttttggtcactttgtttttttgttttttttcatgttttaataaagaaataaaagtgggattcttttgattatcatttttttgggtaagtagatggtgattgtttcttttggtgattgcaagtaggatggtgattgtagcagagtttctactctcgtctccagtctcatctcaactcacactactttgcatatctacttggtcacttccttttattttttattttttttactgtctcattcctgcagtgttcttttacgaaacaagccctgggaagtcgtacaacaactctgtctataatgcgtggcaaccactccctcctagaaataaagtagtgtttggttacaaagtaaaaatggaataagaatagaaatggtaataggaataagtttattggaccacatttaatatttttaggccaatccagattcgatctaattatatattatatgttaaattttaccatccgatccgatccaattaatttcagtcatccaatctatccgctgaatgtatttcatatatatttattggtttaatttgggattattccatattttagacatagtattttttagtttggatcggatccatctaatattttagatccagtatgtattggaaaaaaagagtaaaattttaatattaatttttatatatacat

SEQ ID NO: 312962 - DNA, 558 bp, Cannabis indica
tgtttcctactattatctccacttctaacattgtttctgatgatcctgctgctgtcttacccactcccatgccctacaccactgccaatctccactaacaagttgcaatacatgcctcacaacccaccacttccaacccacattgcctacaccaaacaatatctccttacccacaaatactcaatctgcatcctcacttccgcaacctgtcaatcccaaccaacactgacctacaccagcagcatgaacccaacacacatcagcctatacacaatatccagcaccccacaacacaccagcagcctattatctcccaccagccacctatacaaaataaccagcaccctactcacccaaaccagcaaccagaatcaaaccagcaacctcattccccaaaccagcaacctaaatcacagcagcagcctccaaatcttgttcaccagtagctccaaggaccaacacatgactcaagcctcatatctagaattcaccacatgaaaactgttggaaattattttaccaggatcttagatctacttacaagtatgtttattaaca

SEQ ID NO: 312963 - DNA, 850 bp, Cannabis indica
acgccttagaaaaacacttcactctgaaggtttcgtcaaaaatcttggagtttcgaaccaagctggagaatctgaaaaaaggctctctaagtctgaatgattatttgctaaaggttaaacaaattgttgatctgttagcatctgtgggagaagtgttaagcgatcgagaccatgtagctgccattttcaaaggccttcctagtgagtacgatacttttgtcatctcctccaacacaaggatcgaaaactatactgttggggagatagaagctttgctcttggcttctgagtcaagaatcaagaaatcgagcaaagaagtcgattacagtgcaaatttcacaactactgagttcgatccagctgctgaagtgaatcttgcattcaggcgatttaggcagcagcagtatgctggaagaggaggtcagccattctccaacaatggacaaagtcaattcagcaatagaaactcagctcctactcagaattttggaggaggtagaggtaatttttctatgaacagaggaggcagatctggtatgaatctcaataataggccacaatgtcaattatgtttacgatttggacatcttgttcaagattgcttttatcgttttgaaaaagccttctcaggaccctctctaagttcatctagcagcagcactcaaacctctactcaaccctcaactcaagccaacattgcaacagctaacacaacttgtgacaccaattggtatcaagactcgggagccacaaatcactgcactccacaggttcagaacctagctaattgttatgactatgatggtcaagatcagatgcacattggtgatggttcaggtttgtcaataaa

SEQ ID NO: 312964 - DNA, 1498 bp, Cannabis indica
tttttcaaaaaataaaaaaataattaacataatggcaaattaattattgttggattatattattcaagaaaatatagaaaactatagcacgcagttttatgtaagccattttcatttaacttttttgttagtacaattatttttcatttagtcgaatgagaataaatttaatgaggtgaaagtatttattttttatttatttatttgatgtaaaagtgaaagtattaatagtggaaagtgattttggggaatagagatagataaagaaaatgacggagagtttaaaagttaacagatgagcgagagagcaaaaagttaacatctggtatttatttattggagggacagggatggaacaggaaaaattgggacagacgatttttttccaaccacgccaacgacgatctctacgacgacgttttggaatctgccgtcaagtcctaccagcaacaccaccacctcaaagttaccggaaccctagacccggaaaccgtgaaagaaatgaccaagcctcgatgtggacttcctgatatagtcaacaacaaaaaccacgaccatcaccaccataataaccgcaagctctaccgcttttttcaaggaaaccctcgttggcgaaaatccagactcacttataagtttcgatcaattgctaactcggcatctgccgagagcataaggtccatctgcgcccgagctttcgagaagtgggcgcaggtgagtcattttactttccaagaagttggggagagcagcacggctgatatagtgatcgggttccatgttggggaccacggcgatccctatccgttcgacgggcctaggggggttttggctcatgcatttccaccttcaacagggcttctccattttgatggagctgagaattggagtatgaacccgggacagaacgaggtggatttggaatcggtagcattgcatgagattgggcatgtgttagggctgggtcacgacgacaccgttccggatgcaataatgtattcgacattcagctacggattgaccaagaggaatctacatcctgatgatattcaaggtgtacgtgccttgtatggtctgagttgagtaattgatccatcaatacgtacgcacgcgttactattatatatacagttcatatatataattaaataattttattcgatcagcaaataaattattccaaatgatgaattgtagttgctttaatatgtattgcgcgcgtacgtagttaataaagttatgatattgtaaacaaattataattattactccttgtaggaattttgcttggtgaaattccaagtttaacctacaccaactcaatgttcacggttaaaacgacaaggacaaaattgtcctttcaaatcaattaatatcaattcacacgacaaccaagaattggtcgttttcacttgcacgacaaaggaacttgtcgttctcaccaacacgacagatcgtttgattctcaaaacgatctgtcgttcttctttgaataaaa

SEQ ID NO: 312965 - DNA, 1796 bp, Cannabis indica
gttaaaaaacagagtagcatttaggccaaaagtacgaacatgaaagacctaaagctgaaaagtagagttttttcaaaaagtaaaaaggtcaataggaccagttacaaaaatgtgaaaataaaatgtctatactaatgaaaatcataaagctaaaaatacaaataaactgaagctgcatgtgtgcatgtgcaagttgaactgaatcggaagctagagagtctgaatcattgaagtgttggctgaccatagcctttgtaggctggcctgccacctggtcaaagtcttggccgaccacctcctccgtgggtggactaactatctcctcatcgaactaccctaatgacaatccttttggctggatagtggtctggtctgcttccaacatactctcatacggtgctttcccttgggccaacgtgctcttaaggacccccatgtaaaaaagatcaaatttggggttgtgcatcttgaactcgtagatgagctctaaagacaagctggcatactcatcctttgtggcatactggaaattgagggcagcctttaccttattctcactcattcttagttcagtccctaacctagagatgtcagcagcgagcaaggtattctcctgattcctggtgttaagcatgagctctaagccagaaataatgtcttgattttgttgggaaagagactccaagttggtcacaaccttacccatcgctaggagctcagcctccagggtctttacctgctcctagagagcactagaggaccccctggagttgccatgcaaaaatctaagctttataaaggcttggaaacaaaaaaaaaggtcaagattagtggtagaagacaacactagttggccagcccctctattgtgttactaaggccgacaagcctctcaaaggtactacaaaggccgactagcttcatacaatagcccctatgactggctagcatacaatagcacaaaaaagtgagaaaagttaaatgtacaacataccgaggccaactcctagaggccaacaaaagagagcctctccaactttccatcaccaaactcctaaagcttagtatccaaaaaggtaaggctctatccaaatgcctgtgaattgcctccatggccctttgctccatggtcgactctcctcctcgtctgggcctctaggtggccttgcccgagggtcgattcctcctcaatggggggtcaactatcatgggatacctagctagcgctagcccaagaggaagaggaggaggaagagatgaccctacaatgtcaccagaacgggtggtctggactatcttggccctcgggcaactcgaaggctcatttgaaggtcctctaactagacctttgaatctggaacacatatcttaaagaagaaagtaattatgtcagaatacaagttacaaatattcaatgcaagacaagaatatcaaagatggtggaatcaactatcaaatagcatcatccttaaaaaaggaatcatctgagtcttcaacgactgccttgcccttgcctctagatgtaggcaaggggtgagtaggcccagcaaatgtctggcctctaggcctgacccacagaatagcatccccaatggtgtcccgcgagccaaacgcttgcggagggccctctctcttctccaaacccctggctatgttggaaattattttaccaggatcttagatctactcacaagtatgtttattaacaacctaagaatgaactttctaaaacgatgaaataaacacatataaagtttaggaaacattacattggctgcagcggaattaaatgactc

SEQ ID NO: 312966 - DNA, 738 bp, Cannabis indica
attaaccatatgcggtctttacactattcttctatacatcattgagatatttataggctcataatggtggtaaaaggccatcattgtcgtaattgtatgagccatgctttgcacaatttcctaaattttatcatagggtatgattgcttactttttatgatgtatttgggctgactataggtatttggtgagatatgacttatctcttacttatgatttgatagctcattatgtagccatcaactgatgtatggagcatcgtaaaattagggaattgtgggtttatttttgagtacatctgttcagcgtaaggtattgaatgctctttcccatgccgcattaaatgtgtatacagtgatttaacctcgtgcagtgtgctacactccacctaggtttacatcttgtgcaccgtcttgcatcaattttagttcccagcaacttcctaggagcaattcgcttagccattgtccaaggatacatgagagacatgcctcagtcaagtttcaaactttgaagataagactatgagaaatggcatccgagcccctaaaagccctaatggacacccaggttgggggcccatttggctaattaaattagtttaacctaataaaattgattagcaacataattaatttcaaagtttttttttttttaaattaatttaagaaaaacacacttagtttaatgaattaatttctagataaaatatttgtatttttcttatatttaattaaa

SEQ ID NO: 312967 - DNA, 887 bp, Cannabis indica
gactatgggatggtccacccctaatcacttagaattgctatcaaatatgcaaaccttaattaacagttctagcttttcttaaggtcacgatcaggacacgatgatgggatgagaggagtacacctcacaagcttcatgcaaactgctaggaaaatccaagttttgttcaccatttcttaagaaaaaatgaaccaaagaatgaaaaagctagaaggtaagatgtatgatctacgttataggattgttacaacatcaatggaagatttggaggatgatgaactcggcaaggaatcctcattctcaagggaaattcaaatggaatcatttccacccattttcaaggagccctccatgatgccatatgatggtattgtcctcttttaatgagctaatgaagatgtaaaagtctcccataaggtaaggtgctaatgctttgtggttacgcttagaggggtcacatataagtggtttaagaggtttggaccaggagcaattatatcgtggaaatttttttagaagaattccttcaacaacatcaagcgtcgagtgattacattatgcctataatgagtatcaccaatgtaaagcaaggtaggaaagaaggcttaagggggtacatccaaagctttaatgccgaagtcaccaaggtaggaagaatgtccaacgatgaacataattttaccatacttgctggaatacgccctgggagtagattatgtgggaatatgttgaaaaggaaattggatgacattgaagacttttataagagagtggaaagatatatctacattgaggaaggaaactgttgaccgagattttcggcaactattagaatatgattatattaaagagctgtaagaaagtgagctgaagatttttacgtggtt

SEQ ID NO: 312968 - DNA, 869 bp, Cannabis indica
aaaatcgtaatacaaaaacatatcgagaagttggtattattttacttattgcaattagatcaatatttgttatttttcagttactttgtagttatatttttgttattttatagttattttttaagttattttatgattattttttagttgtttttgagttgtcttcttattttactaaaacacaatattttgataaaattagtacagtaaaaatgtaaaaaattatgcgtctatttttgtatactttctctaaattttatagtatttttgtaagttatttgattggagttggtctaggcaactaaagattttgtaggcaaaaacaagttgcttagttgatataacattttggttttatactcatttattaaaaattaacacattaacaaaaatataacataaaaatataagaccgtattttttataaataaaatcataaaaatatttaaaattctgtacaaccgtatttttattatttttttgttatttttgtgtaattgtgcgattaatgatgattacttaatgcatgtatccaaaattgtaagttaattcaatcttttatccaagttttctccatttcaatatatatctattctatataaagtgtgcttatataactgaattcttggtttatgagaaattcatgggtgactttttatttatatttaataaaataaataaatattatttatatataataaaataaaaataaaacaaatctcattaatatttgaactgatatttgatgctaatcatttatctgtttttattttttaaaaaatacttgagcttaccaaaatctataagaacaaaaccaatgaagaaaattttaacaaaaaaaaaatgaacgaagaaaaaaagtgtcataa

SEQ ID NO: 312969 - DNA, 1246 bp, Cannabis indica
  modified_base (73)..(73): a, c, t, g, unknown or other
aagtatttattttagtttttagtttaggtacgtaatttagttttttgtttttttttgttttatttttttttcngagagtggggaacaaaggtaatttggatttgaaagttgtttttatcaattatattagttttttttttttaaaaaaaaggttattccaattgttctagacttctagtatgattattatattaatatacatatttatggcacatataattagaccagcctaacgctcaccataaataaaaaatattaattctatcaaaaaaaaatataatatataaattaataaatgtttttttatgctttttcacctgaacattagtcaaattaattcaaatacatatgttattttatatttatagtttattaggttggtatggttgcattaaattaatttcttctttgaattgactcactattatttttatttttttaacgtagttgataatttgttacgttaagtaaatttgctcctaattattattattattattaataataataataataataatattattattattattattattattgattttcaagttaagaaataatagtcaaaccaagtctcacaacatgagatacttgtgttgtttgtttaaaaataaaatatatgttatgcaccatttatttatatataattataaaataatatttgtggaataatgcttaacatgataaatgagtaattaatttaaaattgatatgtttaaatagtgacggaccccgaaattttattttgtgggacttatttatcattaaaaaatatttatacctatattatgatcactcttactagatttatttaattttgtgggggcttttctactattttagtctacaattatcaaattaaaaaaattacatttaattttttaaaaggcaatatttttgttagtggggctatagccccatataagcactactgaatccgtccctgtgtatatatatttatgagtatttttacaatatatctccttaaaaggaatgctaagcactctttatctatttggttatcttaaaattttttttagtctttatcatattcgtttacattgtaaatatttaagatattttataaaattttaaaaaattcaaaataatttataatataaaatgcagtgtacaaattatctattttacacgcctgaaatacattgtttaaaccctgttttcattgtgttaaattttttaaaattttgtaggatattttaaataattatagcgtacatga

SEQ ID NO: 312970 - DNA, 1466 bp, Cannabis indica
attttgtatctttcttttacctgttgcatttcagttctgtttatttatttattttatttattatatggcactgaaattcttgatgcattagtaatttttgatttatgttctacaaaatagattattggtttattcacttctaaactcctattgtaaagtttattacattgtttcaaaatcgttgaaactttatttattatatatttttaatgtaaaaaaaaacttcattatataatatcagcccaaaaaatacaatcaatatttaaatgagaagctcttgcaatttgatgaacaattcgattagcgaatagtttgacaaaatgtaactaaacattatttaaagaatttaaaaaatgtctgcaatcttccacaatacctccaaacgtaaaaagcatcaccttagcactacaaattgcttggatcaacaccaagcaatcagtctcaacactgctaactgttgggaagtccatcttcagccacgacaacacctccttcagtgttatagcttcggcaacttcaactagcataacacccgcatttgaatcttaatatacaagtcaccacatgatctctgtgatctctaaccactccaccaaacccatactttcctttctcctaaaaaatggcagcatcgataattcaccttgagtttatcaacatctggtttagaaaaagacttttatcttgaacttttctctattgatcaagaatgactcgagctaaattaacaccatactccaccacattcttcttccccttccacaaaggctagttacgcatataccaaatcgtccaacacaacatgatcacccaaccacattctctcttatctaaccgagtaaacaaattcaagacccaatctctaaaagagccatcaacaaaaggaaccaaggccaatccagcaaaacaactctgaacaaacttacaagtaaccaaacagtacaagatggaatcacttgcccgatgacacactggacacaacaacgacacctccacatgcttcgacttcaactagactctagttagaatgcacccatttatggctcgccacatgaaattcttcgccttcggtggtaaacacatcttccaaaacttcttccaaagcctcatcacatcctgatccacctttccatccctctcctcttgtaaaattttgaacgacctcttcatagtatcaccagttttatcaaactcccaaaacagataatcttccataaccgattttgacaaaaaatccttgacaacatcacaatcccaagctcgttccctaataataaaaagaccattaaccttctcatttaccaagccaggataaccactaaaaagtagtggtgttcatccaatccaatccgcactattttgctcatagtgcattcgatccgcactaagtgcggattttattttttggatccaattccatccgcacaatagctcaaatccaatccaatccaatctgcaaaagtgcg

SEQ ID NO: 312971 - DNA, 1426 bp, Cannabis indica
ggtagttgtctttggtagtgagttcttttatggtatatattttgatatgccacagataaaagcacaaaagaaagtctatagggttaagaccaaataaaatgtctattgttgagagattaagatgcatactcactatacaaggaactaaactcaaattaaaggcagcaataaataagctgcaaaaataaagggggccaaagcctctaatttgactaaaatataatcttcaactaatattataatataccttttcaaaaaaataaataaataattataatatgaaattaaagtttagagaaaatttggccgatctcaaatatttttttcttatattaaatgtgattatttaacggaaattgctcgttcaacagttgttttttatttttcagttaatgttaatgataaaactaacacttttaatttattaattaattatattttttaaaagaaaaatattttaaatatctaaatttaatttatttattaaaatataacttatataattatttaaaagtatgaataaaattaaatagttattttttatataaattttaattaaacgttaattcaattaattaatcatacattataacaattttattagttatattgtttaaaattttaaacttatttacttattttattgtttaataaaattagttagatatattttttgataaataaatataaaactagattaattttatatttttttaaaatataattaaattgtatttgttgcaactctaatacaactataaccaaacactctctaaagatttaggtgagagagaaaagatgggaagaagaaaaattgaaatgactcaatattttgatatttaatccacgtagataatatttgtctaatatccccttttaaaatagctactattttttttgctaattaattttgaattattttattacaagttgtgctatttgcatatttatttttgttcgaatctcaagtatctctttacactatctaaatcttatgtgactaactatctgaatagactatctgaataaccgtattgaaggtccactaaaaatatggctcaagttgagaaaaataagcttccatataaagctaatacctgaaatttatatatatagacatacatatatttatatttattattgcgtagctaatcaatataaaaacacttttttttttttgtatgaaatataaaaaaacaataattgaaattaagaatgttcataattgctgattttaaaaaaaaaattaaaaagttgaatatacaattaatagtgtaatgtaaaaaaataataatttaaaagtctaatagatataatacaattatatttcaaaacgatcaaatctaaaccctatttttatatataattttttttacatataatttaaaaataaattaaatatttttatatatataatttttttaaa

SEQ ID NO: 312972 - DNA, 673 bp, Cannabis indica
agtcataaatattcaaggcaagagaagaatgtaaaaatggtgttatcaactatcaaataccatcatcctcataaaaataattgtcgatatcctcaacaatcatcttgctcttgcctctaaatgtaggcaaggggaaagaaggtccctcagagctctagcctctaggcataattcgaagagaagcatcaccaactgagcccccacagaccaagcatcgacagacggccctctctctcctcccaaaattttgagctatcaaagacagaggcacgtcatcaactaagtcgtggacttgtccatcactaggaaaagccctctctatagataaggctcccactatgccaactgacgggccctaagctcccaactctccatgagcaggaaggcacaaattgtacttctagaagtttgccacacaagccaacctgagtatgtttctcttctccaccgaaagagataggatgtggttttccctatccctcatctgcaatctggggatagagcatttgaaaaatggcatccactgaactagcaatgtccaatcttctgaatgcctcaagcaacaaagtagttcttagcgtacctaccaacttttgacatggttgtgcttttggtgtcacccaaccaatggtggccaccctggctaaagtagttgtttgaattattttactag

SEQ ID NO: 312973 - DNA, 775 bp, Cannabis indica
acccccacaatattagtcacacggcccaataagacttcataaaattatggttcaaaatttctttctttaatttaacccattgacccaaaatctctttttgagctgaactcacaatttaaccacgtgactacagactcaaatatatcaacatgtctagcttttagtttgtaaaatttgttacaatattaatgtgaccttttcctatcacatagctggcatttgtcaatgcacaattcaaatcacccctacctttggcatatcagtagaaacctttccattttgcagcaacaacaaggaagaaaaaatgccagaaatggcaaaacccattgaaacattacacgaagcaataggaaccatggccttccacacttttccaagtttggagccaacacgacccgtcctttttgacttcggcacaaggatctagccatgagaacgggcccccatggctactccgacgttcgcgatcctgggctcctccaccattgccgccgttgaagacctcggcaacctcaactccaacatattgccacgttcaccaataacaaagctcgacccaaaaaagatctcccaaatcaataggtgagaagtcgatgttctaggcacaacagtgacgcacatacgacgacgacgacagtgataggcctaagagcttggacgcacgaacatcatcgacttcacctcctatgcgtctcaccctctcccttcttcaatcttatctctgcgcttgttggagcttgaagctttgttatctgatggaccttgaagcttttct

SEQ ID NO: 312974 - DNA, 975 bp, Cannabis indica
tggagatagcaaagaattagaaaaaacttcatataagatgccacctagaatgctttgtgcattcctttatatttatatatagatttttaatggacaacttttataataatctgtatttattaggttcttttttattttagtcaaaccaattaatattttgtaggtttttttttccttttaataatatacattgtggattagatttgcatagtgagttattttgtttagttcttgtttaaccatttatagtagctaatttgtatcttgattggaggttaatagtgctatttttggtggaaggttgtgcctttgtttggtggctatttttgttttataatttaaaactcaatttaatttttaggtacgaatagatcttttaaaataattttaggtttgatgactacgctggttttttgtatcattttttgatggtttttatgccttcaatagtttttctgccaatttttatgacttgtccctaattgtgtaaggtagatttgtgatatggtcaatgggtacgagaagtgtttcattttatatccatgctttctacaaacaacttttcaaattcgacagattagtttttcaagtcttgacattataatatggattgttttaccatctttattcacattaaattatgtggtaacagagttttatgtattgttaatttgtaggtcagttttgaggaaggccgacttttgtagagattttaccgataaatttattttaaatattatttatttaagagttgttatcttctaactattgagaattctcttattacgttttaatatcatcgctaggggattaatttattttttatcttattttattttgtagatatttttgggaccattcttgatatgttaatgagttggtgtgtagtattcagtgatacaagttaatgttggatatattttactaggatctagatttactaacaagtatgttccattaacatcctaatatgaa

SEQ ID NO: 312975 - DNA, 1511 bp, Cannabis indica
ctctcttctctctcctctttttgagagacatatccatgcatacgggggctcccatggccctttcgaccatgattggcatcgaaaccccactggttttgagaagaaaaaaggtcattactcgactggttttggctggtaaaatttgtctaaacatctaaacaattaaggattccataaatattggagttttcaaactgaacacaaagtattcacgatcactttgattggggacggtggagctgtaactgtaagagtttgtgaacgtactaggcttttcaggttccaagtctctgtgaccattgatgctgttgcgtggattatagatactttgcaggaaatgcagacgatttcctctagaatttgagtctctttggcatagggtcactaagagtcgttatatcttggctaataatttttgggattcaaaaaaaagggatccgatgtccccgaggggaccgtggaaggacatttcggatctttatgatgaattcttaagtttggtgaagtttaaggctggaaaaggggataaaatttgtttttgggaagatgaatgattaggcgactcatctttgctacatacttaccctgatttaaccctgatttctaaagctaaaaacgtaagtataaaagatcttgtggctgtggaaggtgcagctggagaaagtgtagtaagttgggatttcaagttcagaagaaatttgttagaaagggaaatacctagccttattgggctgctacaacagttggaacaagttaaattacttaacgttaatgttgatatcagaatgtgggaacttgatgccaccagaatcttttcaagcaaatcagctttcgtttggtttacttccaaccaaaacgtagctaaacccccttggtcctaatctttacggaaaagtatagccccgccaagggttaaaatctttgtctggttagtagcgcttgggaaagtaaatgtgcatgacgttttacaatgaaggcgaccttttatactcatttcccttgggtggtgtgtatgctgtaagagtagtggagaagaagtggatcacctatttctgcactgtaaattttcctccagcttatggtcaaagttgttggaggagttcgggctgctttgggctctacctagaagtgttcctcaaatgatagtgagtaagttaaaaggaagcaaacgtaaggatgtctttggaagatggctgttgtagcaacactttaggttattggctggagaggaacaccataatttttgaagatatagagaactcaacagaagtggtttgggacaaaatcaagttctggacaacaacatgggttttcagagcaaagcatttcgaagaccttttcaatttctagatttgagcagagaatggagagtcctgttgtaatttagtttctgaattggaactttttttatttttctgctttttgtactctctcttactctattttaagcagttttcctcccccataagtgaggggtcttaatctataatagagggaggtcagtctaagac

SEQ ID NO: 312976 - DNA, 1028 bp, Cannabis indica
acacaatttttagcatgagtcaagtttagcgcaagatttagtatacaattagatgcgtttttaaatatttaggagcctttccatttttttttaaatgtgatcttgatcacattaagacattctggagaagatttcaacaatcagtgtcggaacctcttcaaaccagcataactcattggatagcctaagggcatgtttagccaaaccatgggccacaatgttatctttgcgggacacatgagacaaaactgtcattagaaatttagacaataaaactatgacatcctctaacagcacacccatctcatttgcgaacaccttcatgttattgatagccattactatggatagagaatcagatttaaccgcttctaggggaatcccacacgaatgagcccaatttagtccagccaacagggcaaaagtttcatcttgaaaaacagtaatgctaccaaaaaataaccaaaacaaaactcctccaacaccaaactaaaattacaatataacaataaatcaaaacaatccatactaaccaaagtccaacactttggttagtaactgacaaaattattataattcgtatgcaaactcaacaaggagacaaaacttaacccatgctcctctactcagattcctttggttagtactagtccttagtgtgaagtaattaaatttttaaaatccttaaacttttagaaaatactattgttcactctatggaaacaataacattaaaaatttacaatactaacctcgtaatggtttgcttaacgcaactattactgtatgatttgctgacataataatggtccccacaccaaatatcttagaatcctttaagacagctgtatccaccagcaaagtggatccaataattgtgaaaaggagcctttccaaatttcaatgaaggaggaaataacttttaagacaaaagtctataaactttgttcaagcccattgtttgttgaatgttcttcttcttctataattattttgtaatcttgatgtaataatttatttgtatttta

SEQ ID NO: 312977 - DNA, 2531 bp, Cannabis indica
atcaaccattgatattgacttagaaagatataacggtaagtttaggatatcttatttaagatcaatattggtcccttccaatgtatactccatacatctgacactggtaaactttgccaatgctctgcaaatgtcataacacttatccaaggtgtaagtatacctatcgcagattatcatggcagtctaaatccagtgaactgccaaataatgggaattaaacttttgaacatataatcatgattatatttcactgtgctgacgacactataatcatgaacaaatacatatgttctggacttaatagaatttatacattaaaaataatcatgaaataaatcatgtgaaccatgcaacataaaatgatttttgatctttattaattagtaaatttgattatattgaaatgggttttatttagggcacaaaatccaacactaggtcctaggttaatgtttgggtctggggttgggtccaaggtcccggtcctagtttcgttgcccaggtccctatcttaattttgggtccagggtctcggttcttgttttgtttgggtcccgatctaggttcacgtttgagtcctagtcttggtttagttttgggtctcgatctgggtttttatctgggttcagtttcttgtttaggtcctagtccttgtcctagtcctagtccgattctagttccagttgcgattccaagttcatgttttggtttgagttcaggtagggttcaagtcctagattgagtttggttcaagtctggatttttgtctaggtccggatcaggctccgggtgttgtttcagatcctggtctaggtcaaggtctgggttagagtcccaagttccgatcccgatctaagtctgagttcagttccgggtctaggtcatgggctccgatcccactctaggctcgagttcgggttctaattttaagtttggatcccaaatctaggttttggtcttgggtctaggtttgagtctccaatctcagtctgggtcctaggtctgggtttgggttcaagtccgtgtctaggttcggttttggtttcttgtcccgattccagatccaagttttgattcgggttcgcgccccagactgggtctgggtctaggtctaggtctctgtctaggtttttgtcctagtcagattacagttcctagaacccaaactcagactcgaaccgaggtctggggtacgggtctgggtcttggtccgggtccgagtcttggtctgggtttgagttcgggtatgggtcccagatataaatagcgactacaggttaagtctaagcgggtgaagatctagaaataggacctaaaaccgaagcaaaacgcaaataaaaacctagaccgagacccaaacccaaactgcgactaggacccgaagccaaacctacaccgggacacaaacccagacaagaatcgagagctggacccaaaatcgttatagggacctgggcaaacagaactaggactgggacccaagaccctaccccacacacggacttgaacctatgacccagctcgtgacccggcacccgaactggaaccagactgggacccaagattgggatcccaatctaaacccggggcttgaccgaaccaatagtcggtgaatggatttgggacacaacgctgcaccgaaacccagactaagatctgaacctagagccggacccgaacccagtcccagacccaaaccttgacccaaactcgtacccttgacccgaaattggaaccgaaactgaaagtagaccgagacccgggaacgggaccggaaccaagacttggacatgggcctagaaccgtatccagaccgggacctagacccaaaaccgtaactgggtaattggactaggacctagactccaacccagacctagatgtgaatcgaaaagatcccaacccaaacctaaactcgtgacccgaacctggacacgaacttagactcaaaaatggaaccagacatggaacacagaattagggccgggacctagaactacaccctcttttcggtcctaaacccaaacaaggacctggcacccaggacctaaacaaaacccggtccgggacacgtgatagggatccaaatctgggactcgaaattggaacctgaacaagaacaaccagaccagcaccctcgaaccagacccaaaccgtgacaaaaacttcggcccaaacatggtcgtttacccaaaccgggatcgagtcctggaccccgaactagacttaagacccgatcccaaactaagactctaacctagatagggatctggataggaacttggactcgaacccagacctagacccagaatgggatcgaaattcaggacctatatccagacttagaccctgacccaaacccagacttggacccgcaccctggacctaaactcggacctagacccaaaactagaccaagatcggtatttggacctcgatcaagaccaagacccaaaacctgaaaccagacactgaatcgaaataaaaactgggactaggacccaaacccaaacatggacctagaccgg

SEQ ID NO: 312978 - DNA, 2564 bp, Cannabis indica
taatgcttgccacgtgttttcacaaataagaataaataacaataaacaatatatttgttatagaggttcaacccccttgtgatagcgggtaacgacctactccctttttagttgtattagtaccgaggcttaatactatcgagatcaccataggtgggatctgctatagcacccttaggagtacaaagtataaatcaataatgggccaaccatttctcatatctttttttgttgacgaccttatccttgttggaagcgccaccgtaggggaagctagaggtatgtggaattgctcgaaaaaattctgtgactagtcggggcaatgagtcaacaatcttaaaatgactatcttcttcaacaagaatacttcagagagcttgaaagaggatattaaattggccctaggaatcggtggtcctgtgggtgtcccaagtacttagggctacccctgttccgatataaaggtaaggatgcagattttaattttattgtggagaatctgacgtccaagctccacgagtggaaagcgaaaactttgtccaaggcgggaagggccacccttattaaattagtgggcttggcaatgcatgtgtttgtcatgcaatctaccaagctttctaaccgattatgcttgagaattgatggtatggtgcgtgacttttggtggggatttgaaaaaggtaatcatgggatccatttgagggcttaggacaagctgtgcctccctaaatcttggggcagccttggatttaggaagactaaggagatgaatcaagcctttctggctaaatgtggttggaaggtgcttacaggttgccagtccttatgttgtaaaactcttgaagccaaatatctcaggggacaggatattctcaagtgtaaggctaaaatttcaaactcctagttctggaagagtgtagtgaaagcaaaagacatcctaaggagggaagcctgtaaagttatcgctgatggaaaggacacgaatattttggaggacccctggatcacagatggcaaagaattctacccataattatctaataactcgtctcattcttacacttcggtgtctgagcttctaactgagtcgggtaactaggacacaaataaactgcatcacctctttaatcttgagacggttgctgccatattaaaggggggtaacccgtcaggataagggaaagatcattaggtttggactaaggaaggaaatggtcgtttctcgtgcaaatagacctacttaatccaggcacttcaacagtcccttcactgtaaggttgccccatctttttggaataaacttcggaacatcaggatcctagaacgccacaagttatgtggtggagcatcctttcaaatgctcttcctgtaagggcaactttactcaaacattttcatattggtgacaacacttgcccgatttgtggtgttgaggaggaatccatcgagcacttgttccttcattgtaacctggccttccacctgtggcgctcatcaccctgtggtattttcccaattacaggaacatggatttgtatgtgggactaggtaaaatttttgtggaacataaaaagcaggaacataaatacagatgaggttttcctttatgcctccattgtaatcgacacgatttggcaggtccagaacgacaaggtacataataacagaatggataatgtgaatcaatgtattgactctatttgtcactcttatgcagtttatagaaattctcttattccttcatcatcctcgatcaccctcgcagacttgaaacctccccccaagactacctcaaattaaattgtgatgttaaagttggtggggagcatatgtgcgtagcagttgttgctagagactacatgtggaaggtggtttaggtgtatacgaccaagctggatttttctgatgctctttgtggcgaagctgctgcggtttgcttggctcttgaggtagccaaggaaaggacatcagtttatcctggtggaaagtgattctaaggtagtgatcaacactctcaacgactttgaacccagatgggaaattgaaaattactccttattttgaaaaagaattgttctttctttcattacttgtttattctgtattacagctagaacttgtaactttatggcacataccgtggccaaatgggcatttatccacaaccaatttgggtgtcttgatgttactactattcctatgaacatgttctgttacgacagtgaggtctaattttcatgaatgaacgtatcttttcaagtgttgagatgatgctagtaggggtgtgagagaggaagtgaggaagagagagattgtcagacttaggcttagagcttggaggcaggtttcaggcttagatttaacttaggtttctaggctagggttaaggcctttatataggaggcctaaaccctagattacagttcgaaaccctagatacttgcatagtttgttagataattataaaagattaaattgcctttgaatctagatattattctgccattctgttggacttttagggcccactttgcagctcatgagttgttgtccacgtgtagaag

SEQ ID NO: 312979 - DNA, 2150 bp, Cannabis indica
ataaattaatatataatcttagtatttcatattttaataattttaatatagaattataatatttaatatttattattatttcatttatttataattaataagtttatatcttattattaataataaattataacatttttaataggtcgtgctgtactttttgggtttgtcgtatgtcgtacttttcaggctattctatttgtgcttacgtattgtacttttcatggttctcgtgtcgtgttgtgcttctcgtgtcgtgtcgtgcttaaggatatatttttagtgtcgcatcgtgccatgtcgtgtttaaggacatataatattaacgtcttagaattcaaatttacttattttctttgaatttgaatttgttgacccataaatctaaactagacttttaagccacactcttttgctagattggcaagaataagaaaagtagttaagtaattaagagagacacatcaaatttatagtagttcacccctatttcacgatagtaatagggctatgtttacttcgagtttttatttctcacgagatggtaattacaaaaatagactaagtatcagaaaaactccaaacgttagagagagaagctctaaccttgtaggtagttttttgaatttgaaaaatgagctaagggggctttctttttataggtgaaggaggcccacaaaaataggaaaaaaaatacaaataagttgttttccactgttgatgatgatccaacaatgaaaattagcttctggcggtgatggtcaatttctagtgcctaacaggtcctgctacgggtaactcagagcttatttttgtagctcccttgggggtaaattttgacgatgatagcttctgaattacgtctggggtgtgagacgtgacggtatagtatttaaatatctttaaaacgcaagttgaatcgcatcaattggataaaaattgagcgagttatgaccgttttactgaaggcagttcaagtcctagcgcctaggttgacatccagtgccaagttgacatcccagcgccaatgttgacatctaacttcaacctggacgttgggtaagtgtagaaacgcccaatgaaagtcctttaagatgcctaagtgatattttaacaccacgtagtccatttacatgttctagcgaagctggtcaccagttctcgtagatgttgctattttgcagaaaagggactcgaaactcttcattgccaggagtgatgaaaaggagaaatgcaaagttgtgaattgaatttatctgacttcatagatcattgtatttgtgaaaaactagatggacggtcgaaacaacatcacatttggataagtagataccagcgaaccaggccatatgttgacgtgggcgttgagccctttcaaccgagcttttgggattctatttttgatacttccaaggcttctgaacttgaggacggagtctcttccctcgttttttaccatgccaaattcaatggtcgcatcaaatttaacatttgagcaattgaaggtagcatcctagtttgattgtcaacctgggtgttggaccctatttctagggactcgagtttgtggttttctccctgagtttacttgaatcttcgttattttcgatgacagaaaaaaatgcccaaaatacttttcactgaacttgatcggaaacagcctaggttgacaaaatgtcaactgggcgctagggtctagttttgccccttcagaaatttcaattggtctccgaaaaaagttgaatctcaatattttctgaagacagagaagatgcttgaaagaatttctggaaaaattcaattttaaatagctcaagttgacaaaatatcaacatgggcacagggccagctccatgtgtcaacctaggtgctgagccttattatttgtgccaaggagttgttgtttttcctttataagtaaatatttcctcgtttttgatgaagacagattcaatgcaaaagtcggatctccaatcggacacttggaaggcacttagattgacaaattatcaacctgggcgttgggagctcgtggttgttggaaattatttatcaagatttagatttactaacaagtatgtttgattataaatctataatttaacatcctatatatgaattccctaaaaataatgaattaaacacataaa

SEQ ID NO: 312980 - DNA, 683 bp, Cannabis indica
tggaggacgttggggggctaaacttccaggatttcttcaattactagagccccatggtttgtagaatcttctcaaaactcgtagaagtcttctcaacacccacatatgttttcccaactctttcaagaagtctttttaacacccacaaatgtcttctcaacacctgcagatgttttctcaggactcacagagccctctttagcacacgaaggagttagagtggaagctagaggagtggtgctagtagactttggtttagaggccctccttttctttctcttgttttgcctttagatgcttcagaaatcagcttacctccagtattggccttgatttgtgtaatgttcttatcgatgtttcccatatgcgcattcaacaaccccatctcaagtgttttcaagttctctgcaaaacaaaggagattgtcaaaaaacaagtacaaattaaaagtgtgttgagttatagttatttagaaacatgaacaagtcttagacatgaaggcaaccgtaaactgttctataatttaggttcctttaagcaaacaaagttacatcttcccggttcaggtgtaacaccctaactagcataggcgtgttgatgttattttaaacgtactgtgcagctcgttgctaatcaacgaggtttaaggaaatcatgattaattaaaattttgctttttaaat

SEQ ID NO: 312981 - DNA, 1012 bp, Cannabis indica
aaagtgttaccaaatgccacttatgttttatatattaacaataacgaaaagagagaacttgaataggcatgagagaaagtatgtagagcaattatattgtaaataagggttttttttttgttttcaacttggcattgtttgtaattgcttgtaattaatgaagtttatcattcttgataaaaaaaaaaattaataaaaataattagaacgattatgaaataaacatcatggcttcgaacagattgatttggtttggattgtttgaccatttaattgatttggttcacttttgaagttttaaacatctgtattgcttatttagtttgaaaaaaataaaaatttaaactaaatatcaatccgtaatcaccgctaaataataatagtctactaaaacactcttttaagagggatataatatagtaattttcaataatattaattgatctgaatgaattaaaaaagataaataataatatgtccaacccaactcccaccacagcttaattactagagaaaatattttgataacttcataatcttcttatttggttataaatttaagtctcttcaaaggaacaataaaaactgttacaacagcaaccatcctaactcaaaatcaaactatactacatatatgctggaatacaaatatgtctctatatatatatatatatatttatatatatatatatgcagttgattttgtccccataaatacaaaacacggaatgtattccgttgtacggcaggtgggtcccaaggtacataataatgtgtgtgaatttatttataggtcccagggtacgtaataataggtattagggtacgttactatttttttaactctaattactcctagatcaacctcaaccctcagattaaataactaccacatctaacaactgccgtacattacgaaatacatcccttaaaactacactaacggaacaaaattagtgtccctatataaatatagggatatgattttgtcccgttattgtactttctacgg

SEQ ID NO: 312982 - DNA, 687 bp, Cannabis indica
ggtgtatgctatgccctgctcggtgcatctctctcgggcagatatggggaatcaggtccacgtgtcaccagcatgtgatgccacgtcatagtgacaaaaaataggataacagatatagctaataaaataattcactccattgcattctaattttttttatttattttataatcataataaattttttgaagcaataataataatttttatattgccataataattgtataaaaattcaaatttgaaaattcaaaatatcgtgatttgaatatttcctctctaaaatttattaagttttgaatattttgtgatttgtttttttttttaaatttaattattttgtgaattcatattcgatatacttttaaatttgattgaaccataatatatttatttagtttgatttcatatactaaaggaaatcaatgcaaaaatctttctaaacttatctatgatttttcttattttttattttaattttatacctttattgtattattataattatttatgaactaaacattaattttctatttattattattaattacattttatgtaaaaaaaattgtagtatgtatttgttgcccctgattttgcccaatatacgtggaccaaccggacaatgacacgtggatggaaagggtttagccttcgaataaaacagctaagtcttcttaaagcaaa

SEQ ID NO: 312983 - DNA, 1666 bp, Cannabis indica
gatgacaagagtggatgtggacaaggccaagaaaaagcagaaagagagatggaattaaaaggcaaattgagcagactgttaaggagactgttgaaaaaaatgaaggactgaatctctatgttaaaaatctagatgatagtgtgactgatgaaaagctgaaggaattgttctctgagtttggtacaattacttcatgcaaggtttgtgttgtttcctgcatttcattttgtgaaataagaagcctttatttataattgttgctgattttacatttttattggagatatatataggtcatgcgagaacctagtggcgtgagcaggggatctggatttgttgctttatccactgccgaggaagcatctcgagctgtgagtaataagcctacaggcagttttgttttttcactctgttttttatttagtgtttttaatctatttttttattttcttgttggtaattaccttctttttgttgagtttgtagcttgcggagatgaacggaaaaatgatagtaagcaaaccactgtatgtagcacttgctcaacgcaaagaggatagaagagcaaggttgcaggtatatacaaactgaaatgaaattcttgaaatcttcctacacatgtagtaggaatgtatggaataaggatagatgaggttgggtccttggatctaccttttctatatggtgatatgggattaccaatatagaagtaagatggatgggctatttttttgtagtgagattattttgtatcctatgcaggcacagttctctcaaatgcgtccacctgcaatggtgccaccagttaacccccgtatgcctatgtatccaccgggtgctccaggtcttggacagcaactattctatggtcaaggccctcctgctataattcctccccaagtaatctttcttgttcttgtttaccgaatgtttttataactagttacttatgctgtacatatagtttattgggcttgctggtggattgtctaattaataattgcctgttagaggtaaactggctgcactttttactgctcgtgattcctttattttctgtctctctctttgtttttgcatggagcctcctaagttagttatggatgtatttatcagtctttgcactaacttctgtaaccaaacaaaaagttccatcttttgcttgttttgaatagttttcttaaattcaagatttttagtaggttttcagcagtaaagtttatagttcattttctttaaaatgccaacaactgatcactattccgcctttttttttctagcctgggtttgggtatcaacagcagttacttcctggggtgaggccgaacttttacatgcccattgtccaaccaggacagcagagtcaacgtcccgggggtagacgagctggggcagggcctgtacaacaaaatcggcagcctccacttgtgcagccacaggtaggctttaccttaaaatatgcagtctgcgtggtctagcttttagtcactattccctcgtaatgtgttcttgttatttaatgatattttataatagtaaaaatccattttcaatgtatagtataatggttggttctggttattttataagttcttataattttgaaaaacccttttcaatatatatatatatatattaatattctctgattgcaatggtggtaagc

SEQ ID NO: 312984 - DNA, 1308 bp, Cannabis indica
ttttttttagttaaaaaaaagtgttacatattaaattaatttaagtttgacaccttaatttaaattttttattaaataaaaataattaatacatttaatataaattaaattaattaatttattaaaattaaattagtttaacacagcttctttttaacgagggggaagtggctatttataatatatggtggcatgggaagccacgtagatgatgacttgacttttggaatttttcctttagttttttttttttattatatgaaaaaagtgatgtatattataataaatagaatgagatagcatataggatagtaggaagatgaggttttgataatgtaagccaagagaaggcaacacaacaagtggaggtagaaatgggtgggaccctatagattccagtatccaatggaatttcagccgttgatgttttttgattgatttagtaagagtagtgtttgtttattttgtgttttgaatgcgatttatgggagtgcccacccaaacacagcattggtggaactgaatggaaccactcctgaatgaatcatattattgtgattgtgaatgtgagcaccgccaccaccttcactatttgttcctctaattggctattgcttatttgcccattttgtaatacttaaccacccaatgtgttcttgttttcctccttttgtacggttaagccgcctatgtttgtatgttattgttacaagaaacgacaacattgataataaaatggagataaaacctcaaagggtctagctataataatattattagtgatataatttaatattaaatttgatttattttaagttgcagcgccagttgcaatattgcaggtttttatgtaaaattttgtaaaaatacaaaaaaaatcgttttgaagtgtaaaaatgaaaaagtccttttattttatttcaataaatattataaaattactagtcagttacaaaatgatattttattgctaagcatgttgtaaaatgtagggggtaaaagtaaaattggagtaatctaaaaaaatgtaaatgtagaatgattttttttcttaataattttatataaatagtttatagtttatatttttttagtttgtgctattttttttggcaagtttatgccattttgtttgacaattttgtaccatattatttagctagtttgcagtttgttgttaattcgtttgcgcatgaattcaacttcaaagagtgctattgtagattttttttaaattttactttttaattatattttattaattttggaggaatttctttctattattttatataattattttcttat

SEQ ID NO: 312985 - DNA, 1343 bp, Cannabis indica
gatatgttgaaaccctaattaatctcatttcttttgttttctgaaacaaaccctaaatctcatcatcttcccacatcctccctctccctttgtttactgcgtgtggtttggactggccacggctggacagtcgtgctccggcggccatggctttctcaacccaagaaaacccaaagccccaatatctctctcatctacggtgggctggacagtcgtgctccagcggccaggcctctctctgaactacggtggtccaaattggccacatgatgctcgcaacacctgaactccggcgacatggtttccctttcgttcgcaccccatttcgctcgcacgccatcaacgaggatgagctaatcagaggtgacaacttttctctccctctggttttgtcatgtggcctgagctccgatcttcttcctaaacgacgtaggtccagcatcgccgacgagccaaacagaggtcaccgccgcttgggtttttatgggatttaatattttattatttaaatgggagtaaagaagtagtttgcattgctttattttcttataaattctatattggtttgttgagtttgattataggtatgttatcaatattttttttgttcaagaagaaaagcttcaacaggttggattttctcttggctggattttcaggcttggccaactgctgcaacaggtcggaaaagctggcttcaggtaaggaacaccaacttcagacaaagaattcttgtcgctttgttggctgcaacaatgtatagtctttgaaataatagcaacaattgtattttcaataggcattctaattctgtcaaactgtattgtatatgatgtaaaaagaatcatatactacagaatacaagtggttaaaaatagatatttgaggggacatgagagaaaatttgtagagagtttattttgattgggggtgtgccccttgcttgtatcttgtacagattgttcagttggttatcaatatttttatttgttgtaatgagaatttttgtctattcttagaatcaaattaattagtaatttttgttagaattttagtatgttagaaattctgtattgggttgattttttgtatttgctcctatgttatcaaattaatgattttttttttctaaattagtattcttatttttcttctttagcaacaaaaaaaagaatttttattttttaccaaataaaaatattattataacattattattattattattatattaaattgtatttgtatataattaatataaattattatttataatctataaaatttgtaaattaaattaaattaaatattcactactagaaaaacaggttttagtgacacac

SEQ ID NO: 312986 - DNA, 1000 bp, Cannabis indica
atattattttaattgataattaactaatagaaattctaatataactcttagcaatcaatgttactattacttagtatatatatgtattgtgttggatattgtacttgtaatagatatcctgtccgttttcgaaaagttcttaatattttaccgtgtgtaaaataaaaataaaacaaatgcctaaaactaaatttgagttctatacttttgagattacaaattatttataattttttcaaaaacatccagaatgcctagttcacgccgacatataaaaatatttcaatattaatttctctatatcaaagtaaaagcaaaagtaatatgttctcgctaaaaatttttcctgtgtataaaataactaaatgaagttagtactaattctccatgtctaggattgtggataattaatcatcacaacttgaagctaaactattttaaagggcctattttgttattattaatattaaaggtgttaagtaatcaaaagctttaatagtaattaagttgagtcacgtgttcatgtaagagtaaagtagcttatgtatatatatgtgcacatatttattgtggctaattataacctgtgaaagctcaattttcagagcaacactattttacttgtgatattgttatagaatttttatttaactatatatataaatgccccggttttattatattaatggatggcttatataaatcacagaaaagtcaagaatgatatgtttaaatgattggatcttttgaatatgttaatcctacataattataactctcattggcatttatagaatatacttacatttttattatggcttcatgcatgcgttctcttgctgtaattattgggatatatatagttactattccagccatataagtcaaaaagttggaaattaaagttcttattttcttatccgttatatacatgagcaattgtctcgatctcctttgctcctactaaatagaaaaaacaataagaaacatttaggattta

SEQ ID NO: 312987 - DNA, 917 bp, Cannabis indica
tattaataagtaaatcttattatattgaaatgagttttatttagggcataaaacccaacagtcataaccaagatcgtatgacactggaagtacggtcggagctttctcgctgatatgactaaggcccatgataatttctcgattaccgggtacctgccctctgctcccgtgaaggttttgctggtgtagtagattgggagctgcgcctttccttgttcccgcactagtaccgaacatgcaacatatttgaacaaggaaaggtcgaggagtagggtttccccgggctcaggttttgacaggacggggggcgttgtcaagtatcttttcaacgcctccaaggctaactgacatttctcaacccaattgaacttacggtttcctctcaatagatcgtagaatggtaggctcctgtctgaaatctttgagatgaagcggcttagagcggctatctttccagttaacttttgtacgtcccttacggttcggggttggcccgtcgcctgaaaagctctagattcacctctacccctcgtcgtgttactaggtggcctaggaactttccagatccgatagcaaaggcacacttagctcggttgagtttcatcgagtgggcaaggaggatttggaaacattctcgaaggtggtcaacatggtcggagccatctttggattttaccaacatgtcatcgatgcaggcttccatagtcagacccagctgttgggcgaacattttgttcaccattcgttggtatgtagctccgacgtttttgagtccgaaaggcatgactttgtaacagtacgttcccctctcagtgatgaatgacgttttatctcagtgataatttttccaagatttatttttattttatttcaaagcattttcgaaagtaatattcttatacacttcatttttcgaa

SEQ ID NO: 312988 - DNA, 1110 bp, Cannabis indica
tggggtgtagttagaattttgtgaggtgcaaatataactccccatgtttatatttcaaatttcaaaatattttgttttgctgaagtgattgaggcccatatggtaaaggagagtgggccgtgcgcttggttaaatgaaacttaaacttcggccaaatcttagtcttgggccgtatttacaaagagagaacttggagcttggcattaatttagtttatgaaggttaagagaaactttacattttagattctaagagtaagacctgacccactgctactgctattagtttaaataaaatgtgggatgcggctaaatttctttataaatataacaatatttattacccatcaaacaaacttaacttttcaaggaataaaaaaacaacttaacaatagaataggaaattatgcatagatggaaaagtatgattaaatatcatctacaaaagtgctcaaaatctataaatttatgcttagtaaaaagaatttataagtcatttttgtattggattttaaagtgttaaaaacctttttttaaaaaagaaaaacatgaaataaatcaatggaatggtgtcttgttggtgagggaaggtgaggataataatgttcggtgttgaggttgtgcttagtcattgtatttagtatcttaattacaataatatatttacagatagatttgtatatattgttgtatttagtatttaatataaaaatatttttagtaactaattaactttttatcagtatcaaatatgtctctttgcactaggaaaaaatgtgtacccacaaaattagctagcaaaagtactttcatttttgtagccaaataaatttagtagtgtcatcaaataaataaaagagaagtacaagttaaattatatctgtcatgtattgtaggactttggtaaacttgtttttgtctttataattcagttagtaaattaaaacaaaagaaagagttagggctattcataaaataaacgaccaatttaatctgtatgattcaatctaatttaatttataaagtgtggatatcgcacttgtgcggattagatgaggattgacatgtaaaaataaccgatccaatctaatccacacatttttataaaaaa

SEQ ID NO: 312989 - DNA, 652 bp, Cannabis indica
tgataactaatcagattgtaaaaagttttatttagggcataaaacccaacagcaactttgagataaggttttctagaataaaattgaaattcgcatccttattgcgagtcctaaacaaagggagccctagataattaatgttgccaaagtcattgttgagcccaagttcttgtcttatacccccgcttcatccctacactagtattattgctgaagaaaatagacgttttaagtttattaattctttgcctagaccaatcataaaatttttccaggcactgtcaaatacccttagcttcttccatggtggccctacctactaggattagatcatcgacaaagaaaagatgagaaagttgtggtccattcctactcaacttgatgcctttaattattccagcatctagggcattcttaaaaatatgcaagaggatgtccacagcccaaataaaaagataagcaggggtgttcattggatcacatccaatgaattttgactcaatcaatccaatccaattatttattggatattgaattttgtcatccgatcaaatctaattgaattgagtcatccgatccgatccaatggatgtattgaattggatcggttccaaccattggatgcatcgactggttttttttattggattgg

SEQ ID NO: 312990 - DNA, 619 bp, Cannabis indica
aacagccaaaaaagttcaaggaatacgatttagtacatgttaaagttcagagaaaaaaattactaactaacctttctttttttgaaatcaaatttaagtaacataacaaataatagggaaagaaaaatgataaatttcaaaattttatgccaaaattatcaaattatcaaaatttatagtgaaaaatattacaagtttctttattagatagagatccctccattcccccaagtatcttcacattttatgagtattactttcagccaaacaagtattgtcgatttcttgtgactaattgtttatgatttaattaatgtagtaattagatataaattattattaatatagtttagccacaataaatttattgtaattaaaaatacattttgactaatgcttttatacataattttttagtgaaaatattgacttaatagtgaaaatatttttggagaatcatcccttatactattttttttttttcaaatgcaataggggtttctatacgattttttgttgcaatttaggttgtagcgctagttgcaatagagatttttatgtaaaatttcgtaaaaatgtaaaaaaaaaaaaaaaactattttaaagtgtaaaaataaaa

SEQ ID NO: 312991 - DNA, 845 bp, Cannabis indica
catagttttcggcgtgttaaacttttccaaatttcttaaaattttgcaagatatcttaaataactataacgtacatgaccatgagaaaaaatttgactaaaaaattttgcaagatattttaaggggtgcatggtagaattttcttatttttttttcttctaaaaaaaatcttattaagcttatacgtgtcacccacttctgtaactatatattgatgtgatacgatgtcgttttcagtcacactcttgtcaattcttcttaggaacgtttgtttggtttgtttcgataaatatattttcagaagatgatacgtatgttttttgttcctagatttttctgtgagcagataaagtttgattccttccacaattaaacttgaactgattatttttgtctttttgttaattttatatatatatttatgttgaatgttgaatatctttgtatttttttttttttttggagcattcgttgaaagagttaccaacacataaaataataaattaagtatccgatttactttgatgtttatatacactaataatactataaaaagttgtattttttaggaaaattctacaatgcatccccttaagtattcgatttactttgatgtttatagttatttaagacgctgaaaagtttaatacgctgaaatatacattcaaacagtgtgttgcacgcatgactattttattttatacgcgtgtaaaatagactgtttgaacattgttttctatattgtaaattattttgaatttttcaaaattttgtaggttatcttaaatagctataacgtacatgaatatgaaaaaaaaattagactaaaaaattattctggatgc

SEQ ID NO: 312992 - DNA, 1082 bp, Cannabis indica
cgcctaaggtagttagggtgttacagtataagaggtattttggtaattaaaatcacataaaaggtataaatgttgtcctcaccttatgaatgtatttttgtaaatatagtgtcaattaaaaaattagtgtgtgaaaaaaataagaaaagagagagaattggagaagaaaaaaattaaaaaggtaaaaagagatagacgcatgactttcttgcctaatttaacggaaaagagagaaagaattcttgcttagtctagcttttatggaagctgaagagaaagaaaatcaatagttagccaagtttatataagaaaaagaaagaaaaaaaaagggaaatgagataagaaaaaataagaattcaataaaaaaatataaagcaatataagaaaaaaagaaaaaactttatataagctttaataaataaaaaaataaaaaagaacaaaaaaaaaattaaagaaaaataatataatgtaaattttttgtcaatgtataatgtaaattttaaagaaaaattaatgtatggtataacaggatggtggtgattggagtgagatgaaagtaatatcaacccatttcaaaagaacaaattaaaaggcaaaagtgaaatgacaatcttcacgcaatctgtgtggatgaatcgaactttagtaggtttaatttttcattttcgatttgttgcttttgccgctcactattttcacatgcctttcttagcatcaccaaggcaaactttgaaagcaattttggtcccttctctgcttggtttttcaaaaagatacttggaaaatacttcttacctttatttatttattttattgttttaacgctgccatgccacccatactctaaattatatttatagaaaaaggaagtggactatctatcaaatgctgcaactgcaacctcagttgctttagcttagcttttttgtagtactctaactctagtctctagtacttgtgttataccatttctctcttccatttcccttaacataccacaggcaatctttgatagtgatttttctagagggttgaaaatacttaccttttctaaaagaaaaatacgtagtacacgttaaatg

SEQ ID NO: 312993 - DNA, 629 bp, Cannabis indica
ttgtgaaacacatgagaacaaggcatctctacccctttgcttctacaatcaccaaaagatgaaatcttctccaaacagatactgcaagtctcgctactcaaaccgtcgtcatcatcgcttaagtcttgaagggcgcgaatggagtcttgcgtggcagggacagtctgaacagtgtcaagcgcctctctgaagctacggtcaagtacatcctcgtcttgctgctgttgctgaagaggagtaggaaagcgtgcagttatggtatggatattgatagatacagcgacatagagggagttggggttggcttctaaattgcgcaacgcaaaagttgatatgtggggggtagcgagatcgatgaaggggagctctaaattcgaccccatgagaacgatttgagtgagggtgtcatgcattatcaagaagcttctttggtcaaggtaatgtgtcttagtagtagtggtagttggtaataataaattctcagagtagtcgatgattgtgtggcttaagcgtacatgaaagactataaatttgataccatcatgacgagtaaaattaggaatataaggagtatcatcaaaactcaacctcacgtagcgacgactaacaaccgccattcttgcactaac

SEQ ID NO: 312994 - DNA, 2007 bp, Cannabis indica
tttggctaacaaggaagacagcttgtggttgagatagattaatagtgtgtatttacacaatgaggactggtagagctatgcagaaccagccaagctagctggtattggacctgcatagtaaggctcaaagagaagttcagatctgctatgaacgacaatatgaggatacaaggcaaatacatagtagcacaaggatacaaactgttctgtccagtaggggtgttcataaaaattgataaatcgaaaccgaccatcaaaccgaccagaacgtaatcgaatttttggttccacgtcatcaccgaatttggcggttcagtttttggttttagtttttttgacttcgatttttgaaataaaaaaatggttaaaccaaaaaactgccaaaaatcgtaataaactgcccaaaaccgccaaatcgcaaaatcaccaaaaactgtacgattagttttatacggttataatttctaaacggttggttatggttttcgtaaaataaaaatcgtaaccaaccggtcagttataaaattgtaaaaaccgatcgattttcacccgtactgtccagacccaattaaagtgcattggagtaaacaaatttgggggatactcaatacccgaaaacatagctttgtgttctggttagctatacaacagaggctcaagacaagagatcgattggctaaaatggggattgctgcagatcaggtatgtatgctatgtagctcacaacctgaaacacactctcatcttttctttgagtgtccaaccactcaactttggttacaaagcatcaagagctggcagcaatggaatgtttaaggtaatactttaactgtgctgattcgatggctgagaaaagcaaaaatcggcaagttcagaaaactggtgctagctgctgctgttgccagtttagtatatcagatatggaagatgaggaactcttattattgggagaaagaagcaccttacaacacaagattgtgtaaagagctgaaggctggagtgaaacaaagaatagatttgttttggccaaaaaaggtatctagggaagacaatgtttggtattcaacactgtaattgctgtcattatttctttttatctgttgtacatacagaatgtatagatacatattataggcctgaaaattcgggtgctattaggatgtaaaatttataatttttaaataattataataggtctaccaatataaatgcgccatgtgtacaagagtgtacacataagtttttgaggtttggtaaatatggatacgttggctaatttttgagtgatttgtcattgccacgtagtcaaactaagcatttaacggtagttgtgtggatgacaccttaaaaaaaaacccaagaatagtactttggagggttttcccaccaaaatttgaggttggagggttaagtgcaaaggaaatgagagagtcaaggggtttagtcgcaaattactcataatatatttttctctaaaaaatacttttacattttaaaaaaaaaaacttctctctctaactctctcactctccggcatttaactccgacccagaacccctgtcgtcaacacatagtccgaaaaccctggacgcaaggtccccttggtcgccttctctcacggcgtctctcgttttttgcattttttagtttctaatttttttgtgtattttgcgatatttagcgatgtatttacaatgatagaccaaatttgaggttatggatgaagtttagcgatgattagtgatatttggccatgttttatatatttaacgatgatattagtgatgtatttgtgatatgagactaaaaaatgcataacacatcgctaaacattgctaattatcgtggaaacttgaatgtgatttcacgacatttagcgatgtgtttagcgatgttgtgaattagagacatttagcgatgttttgggatatagtgacatttagtgatgttttgcgacattgtcaaaaattagaaaaaaaatgcaaaaaacaagcgagttgagaactc

SEQ ID NO: 312995 - DNA, 1420 bp, Cannabis indica
tagagtccaagacttttcttgttgagcccgagcccttgggatttcggttttttggagctttccaatccccatcattttccttccctgtaaagtcacggttctggtctgctgcccctttaaggtttccttcagacaaacctttgttgctttggtcttcattttgaacttcatgaaaaatggcagctgctatattttcttcagcagcagttttaactactattaaagcttcaatagtcacaccttctgctgtttgttgagaaactttctctttggcagcttctttcggcttttctaccttcttacattcagccataatgtgctcgaaaccaccacaatgtttgcacttcaccggcaaccattcatattctatttcctactcaaccaattgcccatactcattaacaaaccaaaaagttcgttcaggtttatcagtaatttccatttcaacaaggactcgagcgaatggaactcgggttcgttccttagtatgcttatcaatcattatcgggttccccacagtactcacaagagcgctcaaatttttctttccccaatattggagcccaagattaggcagcctaatccaaagaggaaccgatttcaccatcctaaccatattcaaatctgcagaccacggtctaacaatgaccggtttcctatcaaattgtatcattccattctcaagaacctcatcttgtgttgctacatcattgaacttcaccattgtaagcccctttgtcattctagcaacctggactatgcctaaatgcccccatactctacggataaaaccttcaaacaccaaagctggaacattagcacctagaaccatacagataactgaggatttccagctttcctcttccaatttcacctcctccaagtctatgtgagctattttcctaccttccctaaccacaggttcagtgtatgagagtttagcatcagagttcaaagccttacctccggtaaactgctgccagtggtgatgcgaggccgactgcaagttttcaacctcctctgcccagcttctccttgcagacttgagggattcaacttcttccctattgttcagatctggagtcgattgaaccacgaactgttccagctttgcattcaaacccgcatcactccccctctctaggtctacctactgcttcgagcatcctacgtcaagcgccgccttcaatcccggccttcgacccagctttttccttttcgccatggaaagagagaaaacgaggtcaggaggcgttaacgcaagcttgttttcttcatagtttgtgtttgttaatttttttaacgtattctcatcactttatttaattttatttttttattgaaaccaatttgtgagtaattagttttataaatcaatttctaattttcaatctctctggagacgatactcgatttatca

SEQ ID NO: 312996 - DNA, 1095 bp, Cannabis indica
tttcctaaaatcaatataaaatcaataatataaaatcacctttctatgcttttaagaaataaaatcaataatataaaaaagaaaatatatatggtaatcacctttctatgcttttaaaaaataaaattaatataaaaaagaaaatatataataatgtaagtacatagagtatattcaggacatataaactatcatacaattaaaaagtataatcaaactgcatcacttttatttatttttttaaaaaattatattaaatttcaaaaaaaaaaagtccaaggattttttccaacctcaccattcacgatactgtgtcattcccattacttggtttaacaccattgacagctcaaaaaaaaaagaaaaaaaaatgaagctttccatgccataattatctatgaacaaaaatgattgttgttttattttgttgaacgaaaaaggattagttgttaatttatccaacaaaatctaaatttatttgggtgaatccaaagttaattaagattggctttcttcctcacttgtatctttctacaaaatcataaattcaacccatcaaccaaacaaaatccaaaaacccaagagcaagccaccaccattcgcctcaaaaatctatttcgactctatttttcttcatgtcgaaaccaatcgcagatcgatgaacatgtactacgaaggtgagccatcactctctgccttctgcgctcctcaaacagacctattgccaccatcttccttccatgcgtcaatctccgtcggacacaaggtgacaatagacgctatcgtttatttatcgatgctggcaaaccttacagatctctttccctcgctttctctgtgttccgtatccatgccatgatcttctagtttttttttctacgtgccgaagacaaagatttttacctgtgaataagccgaatattgttcttcaatctagccagaagctttgttaaactatacccaacttttccatgcctctggccctctgtgaggtagccatcagcctgtagatatttcccatatatttctcatatagtacatcgctggtagagaagcaatccaaataggaatccctcttcttgacttaagaagctc

SEQ ID NO: 312997 - DNA, 1331 bp, Cannabis indica
ggcacaggagctggtggtaacccttgattcactggggcagcctgttgcttgtagggaattctcagagttcctgggggacatcttcaccaatctggtttagggccctctaaagagtctgggccacttaattacagatcacatatcccctcttgagcagtttgaatttgaataagttcctgggtatgaggaaattagacaaactcttttctctatgggaagtttaaagccccaggtcctgatggtatgtctgccctgttctttaagcattactggaattctgtggttgcagatttttgtgaggcagtggtggatttctttcaatctaggtctatgcataagggaatcaatgatacaaatgtagtcttgatccctaaggttcccaattgtggtatctatttaaagcttgggatcagttgggccttcttaagtctgagggtgggcttggcttttagaagactttggaaatgaattaggcctcacaggctaaatgggggtttggctctccttactaaggatcaatcattgtgctgcaaggttttgagtgctaagtatctaaaaggtaggcctttcttgaagtgttccttcaagaattctgactcgtggttctggaagagtgttgtcatgactaaagaaattcttttgcaaggagcctgtaaacttaatttggatgggaaaaaaatactaatatttgggaagatctgtgggttatacatggtcaggatttttatccttaacttgttaacgctcaacctgagggtatggaaaaagtggcagatttattatcagacaatggaaattgggatgtatctaaactccataccctttttgacccagaaacaaccaataatatcatcaaaggtggtagaccctgtggtcaaggtagtgataagtggatatggactaaagaaccaaatgttttattctctaccaaatatgcctatctgattcaggccttgaattatgctcctctatgcaatgttgctctcgctttgtggtataaactttggaattctaaaatcttggatcatcataaggtcctttggtggaacatcctctcaaatagcttgcctatctattccattcttgctagaagaatgcttattgaaaaagtttcttgtcctatttatggagagggagaggaaacaatggaacatcgttcctctattacaactttgcctttcacgtatggaggtcttctgttacgaaaattatgtttattacgcaagtgtacgcaatcaagtagtatctcacgcaagtgaggtcgaaccacagggaattggattaagtactactaaactatacttatgattctatttggtaaaataataagt

SEQ ID NO: 312998 - DNA, 834 bp, Cannabis indica
ggtagagtttgagcttttttatgtatgcttattggaagtatggaaatagtagaccaaagtgtgccatatcttatttctttgattacaacttccacttttggaatttattttctttttttttttttaaaaataaatttagaggagataaactagagcttgttctctatgatatgaaattattgtctgcttggcaaagatatattgaggcatttccactatttctcttcttatgcacatcagagtgtgttctctactttgtaatcaactcttcatttctttacaaggcgtgttttcaaaattttaagaaaataaatataatgataattgtcaaattttaaagtctatatatagttttactattattattgccattttatttatagttgtggttatccagctataaatgcttcactctatgatttaagttttcatctaattagtttcaacaaagattgcaaactctacaagagttctagacaagtgaagtgctacaactgttcttacaagaaagtacatccttatttgcatcctacttgttttaccaatacatccttctttttcaatctttttataaaggttttgatatattttcttacataaatttcatcttctcaatgcccaacgagttaagttgtcctctgtcctttattttttgagtcctctccctctcttgcttttttttggtttttattattataaatttatcatgttgttaatgtgtttcaaagaaagttggaatactttaaaagaaggaatggaatatcattatgaagctattgtggacattgttccacatagaataaatggtagagaattgagccatatataagaaca

SEQ ID NO: 312999 - DNA, 620 bp, Cannabis indica
gcataaaacccaacaataacatgttctatgtcttggaaatttggcttctaatctgcaaaaagagtcttgttatgataattccatatagcccataatataccaaaaaaagtgtttagttcatgtttggaaaacttttcaaagcctctcaaaaaaggtactctttaatgtcacaatgtttactagttaagatgtcaaaaaaacttgtgtgcttccaaaatttacctgctctggaccactctagaagagaatgagaattagagtccactttgttagaacagagagtacagtagggattgtcaagaactcttctagagaaaagattaagattagaaggaagaatttgattaaaagccttccaaataaagtgctttattttgggagggatcttggaggaccaaaccattttccaccaacctttgaaggtgccagggttagatgatgagggagaagtctgattagaattagctaggtgatatgtagaattaacagtgagcataccagagggatcatgtccccaaatgagacagtccttggaggaggggttagtgggggtaaagaggatagattgaatagtatcttttgttgggttttatgccctaaataaaaactcatttcaatat

SEQ ID NO: 313000 - DNA, 519 bp, Cannabis indica
ctattttgaatctttaaaattataaatataacctccaaagattaaaaataacatatggattttgtaagcaaacttttcacaaatataacgtgttataaatcacaataaaagccattccaatgataaaattttgtgttaaatcaacactaaaaatgtactattttaatattatattttttcctattctaattataatactaaaaattatacaatttttttattatattattttattaatataataatattatttaattatttgctttttgataaactaatttaattattaaaaagtacataaagtaacaacaaaaaaatttgctatgtctcagtgtctcaccgtgtcccactatttttagtggagcactgtagattgtcttatatagaaagatgacatttaaagttgagttgaaatatttttgggtaaaaactacactatttttaaatgtttgccatcccattggagatagggtcggcaaaacaggtcagacacgatgacacgactcgaaacccgcacga

SEQ ID NO: 313001 - DNA, 955 bp, Cannabis indica
taaaaaaaaagaagaagaaaacataaaaagaccaagcctacatagtaggggatttagttggctcttcttggtcttcttcaacctcgtttgcatctccaacttcctccattttggtcttctcatagaatgcaagcagctcctcagcttctttccccagaaaactgaaatccatcttgggattggctaatcaagcttgatagatagacttcctgacaattctgttgaccctatttttggtgtcaactttggcctcctcaagctttctatcagcctcatcctggataggcttgttggcatcctcaagctcctttattttcttctggttagccctcttttgcttctcgacttcctcctttacccgagagaattcaaactccgaatcattccactttttggccatgacatcacgatgttctctggtctgataaagttctatctcgagcatctccactcgctgaagccccctgtattgaggagcaaaggacaaaagaaaagcctcggaggaatgataacaggcgataagaaaggagtataaagacgattggggaaaaaggaaaaagagtagggaaaagactaacctgttgcatgagatcataacttatgtacaccaaactttcaaaattgcccttgttgagtaattcccagtcgctagactcaaaggtttggtaatgccgccagttattgtagcatgtagcaagcagagttgcgagccttttgtgccagcttcaatgggcaagaggtaatagggctcgaggaagaccatctctgggcgagaaccagagaatttcacctgatgaatagacccaaggggctgttcactggcgctcgccacagtaggagcagccttttcaggagattttgctggctcgatagtgagttggtttgaagatttcttcttatttgtagttgtttttgttcttttgggttctttggtagaacctgaggcttcattcgc

SEQ ID NO: 313002 - DNA, 1258 bp, Cannabis indica
ctactctctctctctctctctctctctctctctctctctctctctctctctctctcacacacacacacacacacacacacacatcaatcggagaagcccaaacaaccaaaccttctctctctccgtcgtacatcgacccaaaccctcgccttcatctttgctattgccaccactgttgacccaaaccctcattattttctcttgctccaccgtcgacccgaacccccgcaatgcgaaaaacttctcgagaagccccaatcttccctacccaagaaggtgaacctccgccttcgtctttgtcgtcgccacaactgaatgcgcaaactaaaatcgaaggtaacgttttttttttaaaaaaaattacattttaaaaacattgcttgtgttagtgattattttttgattggatgtggatttatgattatttttgtgagatcaatttcttttggatttgtgtttgtttaagaccttagatagtggtggttatggtattttctagggttgagcataaaatccaaaaaataaaaaaaaaaaaccattcaaaccgacttactgaacactgttggaactgaaactgaaggaactgaaaactgaaaaaatcgctaataattaaaattaccattgaacggtcaatttttttgggtaataaactgaccgagaaaattaaaaccaactgttatacatatgtacattaaatgattaatttgttttttatttatgtattgtagttactaataatacataataatatattattattttagttatattaaagttaagagaataagataattaatttttgaacaattaatttgtttgtatgtagttgtaaaatgtaggctaatggtctttatagaataaattggatcatattttaaaagaagttcagtttgggcagtttaaaccgaccaaactgggatattcaaaacggtcgactttaagataggttttggattggtcaatcggtttttggattgcaccaatccaaaccgaaaattgaattttagatttttatatagaaaaaaatcgactgatgctcagccttagtatcttttggccaattcgtgcttatcgatagattatcaatactgtattgatggttttcatctgtgcaataccttttttcacatttggtattttatcgataggttattaacaaaatgtctatggtttatcgatggtattttgtttacctctattatttcgttaattttagtattgttaggccatttttagcctatgtttgggatccaattta

SEQ ID NO: 313003 - DNA, 1701 bp, Cannabis indica
tacttgtgagtagatccaagatcctggtaaaataattccaacagcaacctgatttgagagaccacttgaacagggggcacgcacagagggaggctccttatcgagcacagtatgacattcctcaacaacaaggagaatatgcacctcagcgtaatgtgaacgctcctccattagccggttcaatactcctgctcctgtgataaatgacccacggattacagcattagaataacaaattcagcagttattgaatgcccaagggagagtcaggcgatacgaatctaatgaggaacctgagccttttcctccacacatcttggaattgccatacccccaagggttcaagatgcctaccatgacaaaatatgatggaagtactgacctgggagcccacattagtgatgtcaacacatttatgacgacaagaaaagtaagtggtgatctaaagtgcttgtattgccggtgaccttgacatgagcagcaaaaacatggttcaataaatttaagaagcattcgatcacctcttgggacaaattgtcgtgtgatattaaaaaagaattttgtgccaccaggtctcgaaaacctatatgctcttccttggccaacataaaatagcaacgcggtgagagtctaaaggcctatattaataggttcaacatcgaggcggccaaggtcaagaacgttgatcaaagttggagacacatggccttgggggcaggcataactcatggatccttacaatgggatagcctctaagggagaggtgcccccactattgacaaatttatgaaaaggacccagaaatatataaacattgaggaagccaggttagccaataacctacctcttcccttagcacaatctgcttctgctactacaacaacaacttcgaccaatccaaaggccacaactgcaaaccctctagccaccaataactctgggcacaataataagataaagggcgacaatggaggagatcagaacaatgccaaagcgagcaaaggttaccaacccatattcacaatatactccgaacttgtggagacataagaaaccataattgtggcaaacgaacatcaggtggccttttgaatacctaaaccagcaagtcgggcgaagagggatccatccaagtattgctaataccataaagacattggccataccacaaacaagtgttgagacttgagggatgagctagagacttgaggaggctcccgtggtgcgagtggcacaacacgcaaaaatgggatcccaccatctcaaccacctccaccgcttagggatattggtgttgacgagaggggaagagatcatgttcggaaccctccttcaccaatccggtttgccttatcaccagtaaggcatcctgagcctccacgtactaatgcacgagcaccacatcacccagccccaagagagatgccacgacagaaggaagaacctcctagttgccttctaagtcaagactttccccgacccccgccaaaatgggtgagaggactaccgagaccaccatgctcaataggtacctcaacctaggggacatggatgggaaaggcgatgcactgtctcccatgataactatgtccgtccgagatcagcacccagggagaactagaccacagcatcgcacaacctcactaaccctgacgacaatagactactaatcaagatctcggactgccgcaatgcaatcat

SEQ ID NO: 313004 - DNA, 2480 bp, Cannabis indica
gaaaaccgcatgtgcgggttggtttgaaaaaatggcaaaaactgcaccacccgcaccgcgaacacccctaaaccgtaccacccgcaccgcgaacacccctaattcccacctccccgacgacaaagactcagggagaaagaggtcaacccaggagagagagagtgtgagacagtggacgatcaaaaactcggaccattgtatgataattgatcataattaaaatcaataatttttattcaatgtataatacctcagtaattttttgtgtatttttttctttgttggaaaagaaattttaaacattataaaggattgttctatttcaattttgaggccagtacaaaaaattcatagtgagaattgaaagaagtgctgatcaatttagcattttatttattttttttttaaaaaaaacaaaaatcttcccatggaagaagtcactatatctagctagctgacttggcctatttattgttggtgggcatgaaagccttatttaattgggtgggtgaataaagaaaggacaggtggcctatgcgtccctagatagagtgacataatctagttaaagacaaaatccaaatccaagataattgaaaatatcaatcgaaggaggtgggcagtggcagctggcggttgatgaagttttggaaggtagcgttatcagatctgtaaaaatgtttaacgaaatgaagcaattcggaccatgtgaagtttgggtacagtcttgtttcttctcccaacaaaagttccttggggggccttaccaccttgtcttcttttgggcacagaaagaatgccattgattttctctccttgtatttgttcaccactgccctgtgcagactactcttgtattttccattgcttagtgcctacaacaaatataacatacatacatatataataaattaatttattaaaattactctatatactatttttttaatattattattattatttttttaaaatttacgatttgagtttctaaattggttgcagcgctagttgcaataaggatttctatacgaatttttattgcaatttagattacaatgctagttgcaataagaatttctatgtaaaattttgtaaaaatgaaaaaaactattttaaagtgtaaaaattaaaaaactccattaatttattacataatctactatatatttatttataatatatattgtggtttatttattatgtaataacttacttaattagctatatcattttcatcatcatacgtactctctcatctctctttatatctacacatatatatttggtaaaagtaatttttgtctaacatttacataataagaaagtgccaaaaaatgcggactcagtgccaaaaactcttacgtcgcatgggcgtaaacagcttacttaggactgttagttgcatcgtaacatatgtgtagaaccaaatataagtgccaaggaaactttatatacgtttactcatttatctttccttattaagaaatcgcatgattgaaacattatataattattactttttaaaaaaatataaaacaataagtaaaggaattttttatttattttatgtttatttataattttatggcctaaaatttttaattacaaaaatatatttgtaaaatttaatttaaaattacaaaaaaaaaaaatactttgctcactaaaaataaataaaaaaaaacaattagaaaaaaccagaaatcaacttcacgacaattataaatcaaacataaataagttataaattgtaataaaacaattattaaaccttaaaataataaaaaaccgtttatttgaagaggtatttttgtaaataaatttttattgtaattttctttcttttatttttgtaaataaaaacggtttaaatatgaacttttttttgtgttaatgtatttttgtaatttattttaaattttaagtctattatgtaaatttttatatgaaaaataataaattttttaaaaattccatagcactcacaacaagaatatgaaacttagtacaatgtttggaacgccgtattaagtcgtattgtattgtattgtattatattaaattgtattttatgcaatagttttatataaaactatatgtggtattaacttttatgtatacctaaatatataatattttaatataaattaaagtttaacataatattatataaaaatatgatatataatccaattcaatataatacaatacaatacaatacgacctaatacgacgtaggaaccctatatgttttgaataattcgaaactatttcaagctacgtaccttaactagtctatccgtctcaactagcaatagtggtttatgaaaccgtataacttaataataaactaataataagcaagtttaacctagaattaaatgtaagacatattagaatatttttattatggaaattattttctaattaagaaaatgattttctatttaaggaataaataaataattgattttctg

SEQ ID NO: 313005 - DNA, 2479 bp, Cannabis indica
acaaaaaccttatgtgtttttacttttctgcactgtttgtttttctggtttattctggagttacagagttgtcttttgtagttacaaaaaaaactattttcagtacctgttttattattctgcatttaattaagaatttaattaaattataaactggtaatattaaaatacaaaatttcaattggtataagagcgagtcactaaactcttagtgagatcttgagattattttattccgtataatttattttgtgtgagatgtgtttgtttgtagaaggaagcttcattaattgaccacctctgttgaatgatttgaattatccatattggaaggtcaggatgagagcattcatcaagtcacaagatgagaaggcttggagagatatacttacaggctggtcgcaacctactgaaaatgacgataaaggtaatactaacgtaaaacttgaacttaattggactactaaagatgaaaaaatatctggttataacaataaggctttacatgctatttttaatggtgttggtgaatgctctattaaattaattttgtgttgtgaatctacaaaggacgcgtgggaaatgcttcaaactcaatttgagggtaccgctaatgtaaaaagatcacattttaccacgttgcaaattagatttgatgaattgagaatgtcagaaactgaaactttgtctaaattttatgaaagattatctaatatttctaatgaattttttgtcttgggagaaaaaatagaagaatctgttttggttaagaaaattattcgtgtgcttcctgacatgtttgacacaaagttgctaacaatggaagaggcgaaagattttgaaaaaattaaggttgaagaactcatgggttctttaagaacttttgagttaaatcaacaaatcaagaaaaagagtaagaaaagtgtcttgaatgagaaaagcaaaggtattgcttttaaaatttctgaaaaatgatgtttctgatgatgaaatggccttattgacaaagaatttttaaaaatacatgaaatttgttagaaataaaaagatttttcaaaaactccaagaggtaacaattcaggtaacaatcattctaaacattttatctctaataataaaaaaggtattcaatgaaaagagtgtgaagcgtatggttatactcaatctgaatgtgccaataccttaaaaaaaaataaaaaaaggttttaatgttaattagagtgatgactctaaaagtagtgaggatgaaaaagaaaaagttgctttaacaagtgttttgtcaagaggtttgcaggaaaaaggaaaattcaaatgtttgaataacactttgaccgatgtcaatgggaaagaagatggatcaaactcatatgagttagatcttgatgagaactctatggctgaatcttacaagataatgttcagtaggtggttggaaatttgtgctaaaaattgttccttggttaaaatcaataaagatttgtgtcacaacatcaaagatcttgaagaaaaaaaataaatgttgtgaatctgaattgattttaaaagagtctgaaattacctctttaactaaggaacttgaaaatcttaaaagaaatgtcaaaatactaaatccaagttccaacttttgaaaacattcaaaatttaagtcaaacgagtcatgctagtttaggttatgtttcgactcaatccaaatccaataccaaatttatcaaatatgatattttggtttctaaagaatctgtctctacgttgcagagttctattattacagcaaaacacattcaaactttcaaccgaggaggaggcacctcagaatccatggcaaacaggggtgcatcatagagaagaacatgatgatagccaaccaaaactttggagatcaacaagagtgcgaaagccaaatccgaaatatgctaatgctactgtagctgaagaaaagtttagagaaccagagtcgtatgaaaaggcataccaaaactccaagtggctagaagctatgaaagaagaaataagtgtgctagcgaagaattagacttgggagttggtgccaaagctgaaggaaatgaaacccattttgtgcaaatgggtctacatggtaaaaactcatcctaacggttcaattgagcgatacaaggctcggttagttgctcgaggattctctcaacaatatgggctagattatgacgagacatttagcccagtcgctaagattacaacagtacgggttctattagcacttgcagttagtaaaaactagaggctatggcagatggatgtgaagaatgcatttctacatggagaactggatcgagagatatacatggtgcaacgaagaggatttgaggatagagcacatcccgactatgtttacaaactgaaaaaaggcactctgtgtattagagcaagctccacaagcatggtatggaaagattgctgagttcttagtagaaagcggaggcacatgcaaattcaagcttat

SEQ ID NO: 313006 - DNA, 1030 bp, Cannabis indica
taaatatactaaaaacttaataattttctacgttctttttctctttcttttacgataaaccatagcaaataaattaatataccacaaacttaaaataatatacctctttttagtttttttttcctaaatatatggtagtacataataaagatgcactatagtgcaaattaaatatatcaaaaacttaaattaatatttcattctttggattttttttctttctttcattcaagatataccatatcacatacaattgatatacattagagtaatatgaatatactacacagtaaagattattattacagtaaaaattatttttttgggtaagaaaattttctcttactgtttctctatacctttctcagttcactatgttaaattagtgacctcaagcacacataaaaaactgaacatggaacatagtgattcaaccatcttaccaacatgtaattatagtctttactgggatatgttatatcttgaatgaaagaaagaaaaaaattgaactgagttgtgcagaggagctacggtggtaataaccaacgagggagtggaggctagactggaagcgagagatggagattgaactctgttggcaccaagagaagagggaggcgataatttggagacgagagaatgagaaggataaaaagctagggtaaaacttaggataaaacttttaaggttatagttgtaaatttattgtcaaatttttgacagttaggccattttgttaaatatttgaaaaggcagacatttactaacttaattttgagatttatggtcattttacatctcagcccttaagataaacctgatgatgtatatcaatgtagcttgggatgtatgagatgaataaagaatttgggtttttttgagcccatttgctttctatgaagtccacgcccaagagcattgctctatttgtatatgggttgagatgtaaaatagtctttaatttggaaactaagttagtaaatgtctcttttttttaaaaaaaaataagaaaatggccaaatataataaa

SEQ ID NO: 313007 - DNA, 1669 bp, Cannabis indica
acactatcttatatacatcccaaaatattttttagtgcgcattggatgctagaggttgttgcgtcagagaaaattatccatttagaccgtatacatagccataaagtttccctcaaattaatgcaatattaaaaaggtaattataatataattactctttatgtaacaaatctatttattaactaagttatatatatatatgttaataaattataatgttaatataatttttaaaacagagtatacgagattataagagtatcaaatgcattttttggggcgtgaccagaaattttactagcaaattgtctaagacaacctaaaaaccaagagtatagtttttatgtattgaaatacatgagtgacatcttcacacgtggaaaccctaaccgtttataaacaatcaaaaagttgtaagttttaattgttaattattttatttaacaaacaataatatacatatactaatataaatatttacttcttttcacaggttggggaaaagaagacatacgatgcaaaaactgaattgttaccgttacaacgacagttgatagagattactggcggtgattcacgaaggcttggtcgattgatgctataatgtataagaatttttcttctctagcttatttttttaggttaacttgtaattttcatatgtttaattaaatatattaacttgttaatactttgaggtctaattttaaaatatttgtgtaatataattgtaatttttttaattgcttccatgaaattaatttaagtatattggctagtcataaaattaatttaaataaataaatatatattttagcttttaaaaaataaatatttaatttagtttaaataatatttattataaatttataaatatataatttaaataaattaaatttatgaatttgtaataaattttaaactggataaataaattaatttttaatactatggcgttggtttttaagcctttaccgtcaattcttaatgtatatggtgtctgttatatattaataatcgacgtcatagtgtatactatggcgtcggttatatttgaccctgtaacgtcgtttagactaatatcggtggtaaatttaatcaaaatcgatgctaaaaggttttaaaaactgtaaatagtggtatataatagtggggaaatggagaagtgacaattaataactagctaactggaacaaattattatatatgtcatgagtgcatgaaatcgatcgatcaatgaggtccactaatcattatttaaatactataaatatgtgcatgcatgaaagtgctcgaacaattgttaggttcactaaactaattaaagtaatcttttataaagctcaaagcaacgattgaaaaacaacccccagtattaaaatattgatatgtatatttttaatctcttttcttttccttttgtactactttttcttataaaaatttcctaagtgcgtgtaataaggtattcaaacaaaattgattgattaattaacaataaaatgtgtacaataaggctacaaggacagtagtattactgccaaatttgttattgtagttttaggtacattgcagtgatcttccatttatggaaaaattgttatcatataaatatatacggacacgattttgtactgtgatgtacttttacagaatgtattctgtggta

SEQ ID NO: 313008 - DNA, 805 bp, Cannabis indica
ctaaattagtatgaatgtagattagcaaaaaatgtaattagtttgaattacaattaacatcatcaaattcatgacttataaaattattacaaaaaattaaaaacataagtaaactaatagtcactatcacacccatcattttcagaaacaatattgtcttcacatcgatcaattagcaactcgtcaccttcatcagctattacatcatcaacgtcatcatctacaacattttcatcagcctgattaacattcaaactatgtgtagtatcaattattgtcgccacttcagaaggttgcaaaattaactctcctagatccacaatcaatcaaaaatttgaggagcttaaatcatgtacaacatcttcatcatcttcatcctcctcaatgtcccgaatttgtcaatggtttacattcttgactattttccaatatttacctctaagcaaatcatcaagataaaatacttgcttagcttgggtagcaagtcgggtgtttcataattgatgttgggtgcagggagcctattgatcaagtaggcagctgatgtaaaggcttcccaccaaaaatgaagtggcatctcagcttgggcaagaagtgtgagaccaacatcgacaacatgtctacgttttctcttaattcttccatgttgttgatgtgtgtgtttgggcacgagtttctcttgataatgccaagcttggcaaacaagttatagagagattggtattcttttcctaaatcaagttggacactctttatttttgtttgaaagaacctctcaacataggcattaaattgaagaaataga

SEQ ID NO: 313009 - DNA, 1629 bp, Cannabis indica
gattgaatactatcattacatagttgttagatggtgttattgtattgtattatattatattgaattgtattttatgcaatatttttatgtaaaactatatgtggtattaacttttatggatatataatattttagtataaattaaaatttaacatagtattatataaaaatactatatataatccaattcaatataatacaatacaatacaatacgacctaatacggcgttccaaacgattaattaagtgattaaaatgactgggagatggtgaaaaattttagcttggttgaaaggagttacgtacaaaactccatttttaagtatgttaaattatgtttggcgacatatcatctagctagcacaaggtgttttacaaaaaaaaaaaaaaaaacaattccaaacgttttggttttaattggaattaatcccaattttaatcttgagtgtccataacttctattttatctatttatatgctgaaaacattcatggagtgtcatgaatgttaaatgtgaggtgtgattatctaaaaaaaataataaatagtggtctaataagtttagagaaatgctaaagtgcaccagaggcaccttcctatgtgtcaatatcgctattggtagtcccatataatttaatataatagcttttagggagtatcgctatagccaatcgcaacgcgacatgtcgataaggtgctaggcaccacttgtgcctaatagcaatgctcataagttttttatgataatgaagtttttttatcaaaaagagcactttgttagaaaattttaacacttgataatttccaaaactattatctagagagttattagcacttagagatagagagaaataaacttttagacaaagatatttatacattgttcaaatcatagtgttctccactaatttaacacttaaagttgtgagtgagcaaattatcttctttttcatgatatatattatatattatatgttgaaatataatctatttttcttctattttttatatatatagtatagaaatattagtgttgtaatatttatttaatttttttcattggtgtatttatttaatagtgtaatagaattgtaatatcttcattttcttctattgtgtaatgtctcaaacaataaactcattgagtagaccatttaatagcacaacaaaaataattgtgttgaataataagtaacaaattaaatagatagtatctaactaaagaattataagatattacacaggtagttagattttacactgaaatgattgcacataaactatactaaaattataatagaataatatttcgttaatagaaaattatttgaatacttaaatataataaaataatatactatattttgttagactatattataatatgaaacgataaagcatatatacgttatttaatacagaataaactgtaaacatattaaaattgtatatgcaatgaaagaatcaaaatacctccaaccattaatatttaagcttcaatctttgcgatagcttcgatattagagttcgggttttctcggtcttgcaactctctttagatagaattttgctattttgaacagaatgagtcaagagctcggggaccgagaccctatatttataggtga

SEQ ID NO: 313010 - DNA, 1167 bp, Cannabis indica
gaatgctctttccaccattttggaatattatattttaaaaagaaagaaagatcattccaatgtaacaagagaaaaaatttaatgatttttttatcaatgttttttatgtattttaaattttatttcattccattcttatttctattctaattttcattaccatttctatatttttattcattccaatcaaacggcacctagtgccatattctatttaatttgcttccatattttgtattaggtgtgtcgatatattttcgacccatatctaatttttcaactttaatatgactcataaaaaatggtattgtatttatattgattcattttgattcgttttgttattactaaagttggagttgtagtgaaaataataaatttaaaattcatgtacatttatatatagtttttatatataataagagtgaaaaattttaaaattttaaagaaaattaattttataaattttaactcaacattacatcactaaatatatatttttacatagtcatataatcatattaataataattttattttatttcatttaaaaaattatgttaaattcatgttaagcaggtcgtgttatatttgatctgtttttatttattgtcaagttgtgtcgatcccttttcggcttgtgtctaattttctcgaccctaacccgtaaaatttgtgtcgtgttcatgtttgtgggtcatgtcaagaaaatttttgccactcctacttgctgtattgatctttgacttgcttattatttgttaatttgttaatttatattaaaatatattattataagtattgtaaatacgggtccaactttttacacaatacgaaaccaactcaagctcgggaggtacaagcacaactcacacgaaaaaatatgagtttggacacgacacgacatgatgctgcaaaatggcacgacacgaaaaaatttgggttaagcacgacacgacatgacaaatctgaaggcacgaataaactaattcaaaagtacaacacattagaaattaatataataataatacacatgtattaactaataaatattcaaattctaatcattctattattgaaaagttatataaaaaaataactgaaactttaaaaaatacatataatttagtaattaactcattaattgtaaaaaaaaaaaaaagtgaa

SEQ ID NO: 313011 - DNA, 603 bp, Cannabis indica
aattgtaaaaaaaaaaaaaaagtagaaagagagaagctcgaattcgagcctgcataaaaaacgagctaacattttatgaaaaacgggtcagctcaaataaaacaaggcacgaatttgagcatgatgcaaaaaatatgggcttacgagccatatcgggcttatttttataatattaacacgatatgatccatatccttttataggtcggtacaacacaatttatattattgtgagctttttaaaatatgggtcggaccgaaccagcacggacttattcacaactatatataagtgctcttattttgtgttaaatgacacacatgtaaatatgttataatataggaccaaagtgtaaagaaacaatttggttaaggtaggaccgatgtggatattttcttactttattatggacaaacaaatgtctacctttttctttaattactttttcatttcacatatcaatgtactgtataataaattttaactgttataaaattaggatttttgctcctgaacttttacatgtactaaatcatattttttaaacttttaaggtcgttaaaaatgcccctgaactattaagattgttggatttaaggattt

SEQ ID NO: 313012 - DNA, 734 bp, Cannabis indica
tttacggtattctataaaaataaaagaaaatatcgtgaaaattacatgaaagtaaaaaaaagaataacaacaaaacaacataaaaaataatatacaaataacaaaaatataatataaaaatataccaaaagactgtattttatgtaaataaaatctaaaaattgtaagaatcttaaaaacttcgtacaaatcatatttttgtaatttttttttattgtttttgtattttgtatttttttgaaactatcccttattaaatcatctacttgtctttatagtgttggaagttttctaagtacactttgagtgaatagggggataaaatggaaatgtattcaaaatacaaataaaagtattacataatgattatatgagaagaagaagagagtacaacactttgtaataataatacatagcattatttatatgaacacaagagaaaatgaattcttaaaggcttgaataaggttaatatcgatattttatcctaaaagttatttcgtttatattctatttcatcactatcaaccaaatgcattcacgaagatattttagaccgaaatatataacaattgcttttgtaattagtatctgagaagagactcaaacctcaaatcttgttcgaacaagcttaattagaatccaaatttcactataccatcaacctcatatattttcttgcttatgcttatttttttaattaaaataaaattaattatgtagaataaaatagg

SEQ ID NO: 313013 - DNA, 1958 bp, Cannabis indica
ctgctgtattgagtggggttttggagttgttttcctgtctcaatattgagctttatatttggttccatgggagtggataccgatttagtactaagatggccaatatcttttaaaagttgtatggtgaagggtctttgggacaatgatatccccttgttgcagcgtgctattgcaagcccaagaaaaaatataaggtgccaagatctttaagtttgaattgagcatcaagagtggcaacgaagtcgtttagagccatagtgttgttggtggcaactattatgtcatcaacatattaacaaggccataaagaccctgcctggtgtttaagaaagagggaattgtcattctttgactatttgaacccttgttcaagaagggtgctactaagttttgcatgccattgtctggatgcttgtttcaacccatacaaacttttctttaatttgcatacaacattggggggatgacacctttaggagtatagcctggaacaatttcatgtaaatatattcatttaattgaccatgtaggaaagtattatttatgtccatatggtggagatgccactatttgattacagtaagggcaaacagtagtttaagggtgttgaattttgcaacatgagcataggtgtcaaagtaatcgacaccttgctgctgagtgtaatcctttgtaaccaaacgagctttgcaccttttaacaaacccatctgagttatatttaatctggtaagcccatttatggccaatggtgtgttgtgcaaaagtggttggttctatgagatgtgtagtagcaaggactgctgctcgaaaagaagcagagagtctgtggtaagataggtttttggataaggggtgatgagtgcttggggagtgagtggccatagtgcaactgtcctcttacaaatatgcaggtttttgaagaggccaacttgatttggttgaaggttgtgtagtggcaggtacgttggaagcagtattgttgtcatccatgggagttgatttgtcactagatgttttaggtaaaacctgtgattctgctggtttgactgtagtagatcctgaggtgtgatctgtggttgtggaagccatttgattgtttgatgtatgctatttcagggaaaaatttgctaatttctgggttgagaattttagtcataaaagggtagatattttcatagaaaataacatctctggagggaatcattgggatggggttgagagctaagtctgcaatagcagttgtttttcttatttttaaacaaaggcagttatatttgaatttttcacctgttaaaagataaataaaacgtaaggaatgtccacatttcataactattgtttagataggataaaaaataactactatcatactcttataaacagcagtaacaacagtgtacaaaagacgactaattttttaactttagagaaattctactaaattgtaatctcaaccaagaaacccaaaattaataatgactcgtgaactatgtagattttaactacaaaaccacataaaaaatctttatctcttatatcataattcgtagtcaaatatatatttattaagtatttaatatagaacattaattatcaagtctcatttatgttaataaaatttgagttaacatttacataaattaaagctatactacaagatgagaatgatttatctcttggtgaactatcagggtatccttatttcttttcgtataaaaaatcgatcattcaatccaatgattttgatttatgaagaacttacaccaaagtattctagatcaatcctcaacactacaagacatgtttggacttgtaggattaatttcaaggtgactttttttgctatcacagtgtgtactcaactcatgaaacactgtgatgatgagagagtgaatgtgctacatgcataaggagagagcactagggcgagtggtggtgtaactgttggaaattatt

SEQ ID NO: 313014 - DNA, 592 bp, Cannabis indica
cagttttaataagtgaaatttctcaaaaaaaaaagtgattatactagatacggttatataatagatattttaggagaaaaatcccaatcaccaaataagaaaaataccactctaaaaaggtgagaccaagaattttattcaagcataatatttgctatcaatagtttatagaaccagaaaagaaacaacaacattacaagatctataactatgaaccaacttgaataaactcatgtacattattaaaatttatggtaaatgtttgatttgtggtaaattattttccaaattcttatttatctgtttcacatatttttgtctttttattcaatatacagaattcatttagtctccttttaatgtatatacatgtatcgttaatttttatcaccacgatgatatcctataaatattgatttaatacatttatgtaagtaatatctttatgtaaatatacttaaaataataataataatatctttatgtaaatatactaaaaaaaaattgaagaatacacagctcaatttttttggactgatttctaattttttttttcatactaaatataaatataaactgatttgttgttcca

SEQ ID NO: 313015 - DNA, 1790 bp, Cannabis indica
gaaggctcgacttctacaacgcaaaagtcaattgtgcaacgtccagaagggtaatctttctatctctggacttgttgataaggttaagtctatttgtgatagcttagccattgctggatatgtggttagtaatgaggatcttgagcttgaattgctcaatggattaggatctgaatatgactcagtcgtttttggtataacgtcgagtactgaatccaagtcttttgaagaaatttaagccttgttgatggctcatgaatgtcgtcttgagagacatcacattgtttctaatttatcttccaagatgtcagccaatctttcaatttgttcctcaaagagcagctatcatagaccttacaagccaccctttgcaagaggatccacatgtcactctggatcaagacctggtgccaagccctttcctcgatctttttcttcaaatatgtctcaatctttgtgtcaagtctatctaaaattaggtcacgcgactatcatttgccattacaaatttgacaaagcttttgtcactcccaagatccttaatcagcctcgtgcatacatggctgaaatagaatcaacttttgatcctcaagtttattcttcttccaccataccgaactttgttgatcatttatgcaaatactggtgccacaaaccatgttgctatggtatggaacacctttccaatactactccttacacagggtctaagtctttggatgtaggagatggtaagaaattatttatatctcatattggtcatgctcttcttcctttttcttctactcatcctttacagttaaaatatgttttgaatgttcctgccataactcttgttagtgtttccaaattaacagatcataatgatgtgtttcttgagtttcataaatcttgttgttctatcaatgacaaacaatcaaggagggtcttactgaaagggaagtgtaagaatggcctttacatgcttggagatgaatctcaatcctcatcaactcttggattgcagtgtcactaaactaccatttcaaattctcttactaggactatttagtcatttgattttgaatcaaaatgttgtactcaatcttgtaatcattcttataataaacaccctatgtcaaatgattgtaataaaaatagtagcaataaaaacttagttatcgatctttcttgcaattctcaagttttttcagcttatataactaatgttattaatgtgtggcattgtaaattaggttatccttcttcaaaaatcttaagttcattgttacactaatgatgttaactaatgatgtactgtcttggattcctaatttaggttccataaaagacttaaaattttgtgaagcttgttaaaaaggaaaaagccacaaatttctatttccttttgtctgcaactcgtactaatcaacccctataattattacatgttaatctgtggggtccttcatgttggaattattttaccaagatctagatttactaacaagtacgttattagtatcctaaacatgaacttctaaaacgatatgaaataaacacatataaagtttcaagaaccttatagtggctgcagcggaacataatgtatccttccactcagatctctaacccttgtatcctttctgtagcagagtatcaccaagatctgagcccgaatctccttctcttgaaattggattcttcacagccttacacattatgtttgagtatcacttgatgtgtgtgggcacttactctaatcactctagggtttgaattgaagagaggaagagagagatagggttttg

SEQ ID NO: 313016 - DNA, 1707 bp, Cannabis indica
ttttcggcgtgttaaacttttccgaatttcttaaaattttgcaggatgacttaaataagtataatttacatgatcatgagaaaaaatttaactaaaaaattatttcggatactaaaacagatagagatatatcagtgtatcccttttaagggggtgcattatagaatttctccaaaatatatactattaaaaaaatttatccgaatataaaaaatactaaagggtaccactgatacacctatttttggcgggtggaccataataaaacttcctattagtatatattttaagaaaacaaatgattattgaaactaaaataaataaaaaaaattagaagtaacaaagcaaggcatgtaaatgtagtttatagagtagtagagggtggaaaagaaaaggtggtagtggaagaaaatgatatatgatcataagatatgatagtgtatttgtaattataggtggtgagaccccattttggtccctttcatttaataacacctaatatatatagtatgaccctaccaatttaaagaggtggtgggtactcatacataaacttaacattgattgttctttatttcttgtatttcgacattttctttgttataatccaaaagagaaaggccaagagtatttgcataaaagagggtaacaagcaattgattttagaagttcatggcttatatagatttaggtaaataatcttctattttataaaaattactcattaaattatttattttattaaagtgaattatatttttctcaaaatagtattaattatgaactgtatttttttttttttatcaaaataaaactttacaataacccaatttaaaggtattataataaacctagttatatttttccatctattcgtactaagaattaattttaaaatggatatttctttataaaaaaattatcaaaaattacattcattattctatttatactattttgaaaaataacagaatttattttcttatttaacaaaataattaatctaattaaattttttacaaaacacttgatgcaaaataatattaactctttagaatttccaaccaaaaaaaagtaagagttcatttctcaatagcaatataattgaatatattatattttgttgagctttgtttataaatggtataacgtaccaaagaatggggccaaaattatggagttttagtaagataaggattgattattgactttattggccatatatattaaaataattatgttgtatttttctaattatgtagtattttctattttacttgtataacaattttattaaagtcataaatttggattattggagacaaagagagataataaatgaatatgatatatatacagtagaacctctattcaagaatactctattcaagaataacctctaatttgttataaaaaaatgaagtcccaatttgggccagttataaataagaataacctctatattgtaattagttatacattttttaagtcccgtattaataaaatatacctctatataagaataattacatcttaaataaatatatacatatattttataaatttacttatgtaaaattaataattttatttcaaattatagtacatgtataaatattatatgtactcgaaaataattttaatataatatagtattaagaattgtttattggtatttttgttacattgatattttttgtatatttt

SEQ ID NO: 313017 - DNA, 1994 bp, Cannabis indica
agatggtatactaatttttgctatttttttatagaaatactgtcaggctgtattttttatttttttactgtatttttttataagtttcatactgcagtatactgtgttaagtttccactggtgttctactggtatttttagttgttctactgttgttttgagttgttttgttttgtgttctactggtgttttataaaaacacagtatttttgaaaaaaaatccgtgtgacagtatttttgtaaaagttaactcaaattctagtatttttataaatttttcttaatgaatgggaccaagttatgagtactattggtgtctactattctcttagtgtcaatattgttattattgtaattaagtatcggatcccatataatttaatataataatttttagggagtatcgcttattaatcgcaagacgacatgtgtcgaaactactaaaaagagtgaggaatatttatctcagccaccagcactaactttcattcaatctgtttattattttttagttaaaaaaaaaaattagttttgttttggttaataagagaataattgacggatttttggaaatatagtattttttcttttttttttttcttttgtataaagtttggaaataaagattttgatttgaaaaaaaaaaaaagaattcatttttgttttttttgggtaaataccattttagatcttgtattttgtaaaattattaattggaccttctattttgttaaatgacaaatagaccttgtatttttcaaaattatacaaataggatcctaaactaatttttttgtcaaaataaaactaaataataatctaatctaaagatgttatgataaaactgattacattttttgtatctgttcgtgttagaatttgtcttaaagttagttatattaaaaaataaaattgttaaaaattaagctcagtgtcctatttttagcattttggaaaatataaggtctatttagtcatttaacaaaacagatggtccaactaataacttttgcaaaatacatgctccaaaatagtatttaccctttttcggttagtattaattataatttatattttataattaatatgatcatatcaatatattttagggataatttaaaaaaatataaaaaaaaattacagaaatacggtttaatttttaatatttttacggctttttagattttatttacataaaatatagttttttggtgtatttttatgttgtactcttgttattttgttgttgattttttattattgcatattattttttatatttttttgttacttttatgtgattttttagtatttttatatgttttttttatggtagtttcaatttacgttcataattattattgttattttttatttttaaaaatcatattatgaattattttgaatttatagtttggatattatatcttgttaccttttatatattgatactatttatatttatattagatatagcattttaactagtatatagtcaaatgggtttacttagttttttttagtgaatagaatactttataaatttatgatgtaaatatctgtaaatagtgtaagaatctccatagctcatcgattaatcgaaaggtatgctttgttaaactatagactgctaaaataagtgagaaacatgagataaactgtctcccaaaatttaaacaataaatataacgtcctcaaacaacacaccaaaagagttagagcttcaacttataccattgaaaaactacacaccaactcattataaaatgaattaacactaataaaagaaattattaaaatttagaagataacaactctcaaacgaattatgtgtaaaacaaacttatcgacaaagtctctgtactagtaggccattcacaaaaccgacctatagaataacaaaatataaagttctattacccacataattgatgaaaaaataaataaaatccatatataaatatcaagatttgaaacacttatctgtcaaatct

SEQ ID NO: 313018 - DNA, 1345 bp, Cannabis indica
cttaattctagggtattacatattacgactacttgcaacttttttgtgatattttctgatttcgatttctatgtgtcaaatttggcacaatactatatcttgagtcaaatttggtataacttttagtatgagctacgatcggccctaggctaaaagcaggctagacacgcgcctagggcccacccatcttaggagcccatataaaaagatattttttttaataatttttaagaatacaatttatttttataataacgactcactttttttctaagcctatttcaactcagggcccgattggcatgagccaaatttaacacaccattaaagagcttattttttaaaaaaaaactaaaacataacactataccactattttaagccctcttgatatgctcaaccccatttatttgtacttattaggagtataaatctatttcgctcagattttactaattaagattacttgtttgcacttgtttttaactactttttcccttttaattcatctgattcagttatatgtatattcgaaacgtaaaagatttaagagataaaaatttaccatcattctttttttattatatttttttatctaactctcaattttacattaatttgtgcgacatgatatcttctattctatttattttttatacataaatagatataggtgaaattgtaatgtgattagtatgatgtgtacaataaatttaaataattttatattaaattgtgttattgaacaataaaaataaaaataaaataatcttacacataatagaatttataagaatttataatagattttaaaatggcatataatactgaaaataaaattcaaatattttgttctactaattttttatacatgtgataaactactgtttgaatattatttttagtattgtaaattatttgtaatttttaaaaatttaattttaattttaattaagtacaatgtataggattataaaaaaataattaaacttaaaaatgatataggatgcaaaactaaataaagaatgtactgaaacacccttaaaaagggtatagtatcaataattttaaaaaaattattttatattttataccacctgtaaaatataaatttatttcaaatgtttgactataaattataataatatatatagttattcatgccatgaaacaagaaattgttaaatttaataaatttttaaaattaattatgatttatatttaaatatttttttaaaataataaatacaatttaataattttgttaatatttaaatgtaaaaaaataaacagtataaattattgggatattagcggctaaaccacctgaactttacggtttgta

SEQ ID NO: 313019 - DNA, 826 bp, Cannabis indica
ttaaatttaaggacttttgtctaatttcattcaatttactgtttcagtgattatttatgtactaaaccatgctccccaaactttgatatctatcaaatcatgctcctcaaactttgatatattctaaatcatgcccattgaacttttatttatgttagaatttttttactaaaattagacaaaagtcattaaatttaacaatctcaatagttcagaggaaatttttaacggccaaaaaaattcaggggcacgatttagtacatgtcaaagttcggggagaaaaattactaattagcctatactaattagcctatattttttttcctttttttttgttctaaataataaaatacttctggattaaaataataaatttcttctatttttttccccattttgtcagatacaatatatcaatctaattgaataaataaataaataaaagtgttcttgctcacatgcaatgcaaatggatccgaaagaaaaacaaaattaattaataaataatattttcttacagatctctttaggaacatctgtctttcttaatccattttcttctggacttgtcaaatttatttaaataataataatctaaaatttagattaataaattaatatcatattaatccaagattaattgtcccttagtataaatttaattttctacctttcggtttccactttcactctttgtaagatttgaagaatttacataaattattattttttgtaaatttttaaacttaaagattttttgttatatttctacagtgtttataaaaataatacaaaagcaaatgacataaaaataataagaaaataa

SEQ ID NO: 313020 - DNA, 528 bp, Cannabis indica
caagtggggagtcacacatatttacttattgaaagtcggcttattattaagaaggttgaaaataaaaatctggttagaagtttgagcgcatttaaggagatgataatggctatcttatagcaataacaaccaaaataaaggaagctaccatgtgtgtacacaggataaggttattcgcggtgcgggtgggggttataaatttataatatttctttcaaatcaaattgtatgtgcagtttttatatttttcaaactataatcatattgcgaaatcttaaatctacaaaaactacgagatggtgcaatccagtttgaactgtttacactattatcattatcaaacattataattaaaattttaaaatcaatcttaaaaagttttaacaatataaaaaaatcttattaattttaatatcataatatatatactaatcattaagttattatgttaaattgtctctaaaaaaataatgtaacatacacatatattatatgtactagcaaaaagttacgtgcgaggcacgtata

SEQ ID NO: 313021 - DNA, 528 bp, Cannabis indica
attttactaaacagagtttttttggtttattaacaacaataattaatcctgcttttcagaaaaagtttaagtgactaatgaaatattcatcttctggtagattaaacaatctgcatttgatactaggaaaagaataatataaggttaaatgattcagtaccagtggaaggcgtgaggattcttgtaaatatctcccagaggaacataatctgaatcttgaagaggtgaataagtttggttaacaaatttttttgaaattgcttctcttattaatgctctggctgtagcaagatcaccttcaaccatctccaagttttcatctctctccttttttctgttatttatttctaaattttgcaatcccatcccctttctttgattctacacatcacaaatacaaatcatacagatcgaacattgaaagttttatacaaagtcaagactaccaatatatataatcaagaaataaataaataaattaatatcaaacctgaataataagtagagtaccatgtaagtaggagttgt

SEQ ID NO: 313022 - DNA, 2760 bp, Cannabis indica
aaaagtaacttttaaaagtcaaaccatatatgattcccatttgtaaaagtatatacaaacataattagtaaccttgaatttgtattcaatatatgtaaggttgtattttgtgtactatttggttgccctattttcggtaaatgtcctaaaagatgtgttgtatgttagtcgtaaaaaaggaatattaaatataccgtcaattaaagtatcatctttatgtactacgtaaaacgaagtattaaattttcattaaattgaagtatcatctttctgtactacgtaaagtgaagtattaaatttacagttaatcgaaatattatctttatgtactacgtggaacagaaatattaaatgtaattaatcaaaattttatctttacatactatatatgttgttgattgataattataataatattcgactttaaaaaaaagtaactatatttacatactatgtctatgtatgattggtctgtatattcagctttaataaacatattgtatttaagccactaaggctagcttagtggtgagggaaggatggaaaaaaggataggtcgatggattcgaacccaggacctttaaacctaattaagctaatatatgattgtaaaataccattacgctacactcaaattgaaaaaaaaaaaacaaataatgtatttacagtacacgatatatatcccgtaaagtgtagcactaaccttaaaatggtatgcaaaatggtgtgtgatcaacgccatacatataatttgccgtgtccttggagttggtctaattgacttatgaaatagattccaatttgattctcttcttgtgtacacttttgtactgaaataaatttatttatttttttaaaaatattaatttaattaaattaaaaaaaaaaagtaaaaatacagttgtctactgtgccccactattattagtgagacactgtagactcccaactaaaataagattacttggattggaggcttttggtaaaaaaattactatcatatttaaatttttaaagtgtcattgaagatggcctaaatattatgagtattgctattgggcaccagtggtgcttagcactctcaagacgtgtcgccttgcgattggctagcgatattccctaaaagctattatattaaattatatggtacccgatacttaattagaccaatagcgatattgacacgtaggaaagtatttgacaccaccgataccttttagcattttttctcaaatattatatacttattggtgaattaaaatataaaatctacctaatttaatttaataattatttattaaatatcattaatacaaagtgcacctcaaagtacacaaagtagtgtcattactaatgttcctataaaaatggaaaaagaatacaattcaagtctgggacgaaaattttcattcaactaagcttttattgtcaagaaaaagtacatatttggcctatcataataaaagggtaaaggaaagatagaagatgcaccaaaaatttagacaaccctatcataatagcatccttcaacgttatttttttctttctttttttaaaataaatacacatatataatttacaatataaataattaagtttaatttttagttacaaataaataattaagtttaatttttaatcgtaatgatacttaagttatattttttgagatttttacaaaaatactaaaatttaaggcaaaaattaaaaatttaaaaccaaaacaattttttttttttataaaaatactgtctttttataaaacaactgcaaaacaacaaaacagaacaattaaaaacaattgtagaaacaaactaaaaaataataagtgaaacaacagtaaaaacttaacacaatacacagtataaaaaatacataaaattccagtatgtggtgtaaaaactcttattttttaaacttccataggttattgacattaagtctcaagtcaaccgccatgtggtagtccccaattagtttaagtcattaaatttttattttttatttaaaaattaatttaaatatactaataagaaattaacacgtgaataataacttatggtacttatggaattctaaaaatataacttaaactgaaagttaaacttaaatatttacgctataaattattcttttaatattataattgcaaatattttttttaatttatttggtacatgtgtgtactaattttttctctcccttttttatccttttctataaatttctctttcacttctacaatagacaagaatatctaagttgagaactaggtattgtgtgacctagttgtaaacttgtaaggatagttttacagtgtaatgacattttttttttgcttgtttgaaacctaccacaattccgtttgaaagggattaaagatttggccctctgaaaactaatttgttattagtagtgtcatctgtgataagaactctcgatgtgattgctaatgatctaatataacggtgtcatatctaaatggtactaatacctaattttttgttttttgcgtaaaagataaaaaaaaataactgcctcaacttagatttttattttcttttttataattgaaagagataaagttgtataagagcatcaccaaccaacgagcctttatatttggtgatgtggtagaattggctctccaatgtagctgcaaacttaatattaaattgacgtgtgtgctacaatatatggtatatttttttttctttttatatatatatatatatttaattaatatttgtatatatttat

SEQ ID NO: 313023 - DNA, 609 bp, Cannabis indica
tattattatattgtattattatgtctagtttcaaagtactatgtgtgtaggcctaaaacaacaaattatttggggaaaggtcttcaaaagtattttcattacaaatgatactaggtacctagctaactagagtgctataaataagtgtgtgtcgaactaatttgggttcatatttttttatattttttaaaatatgggttgtgtcgtaccataaaaaaatatgtatcgtattgtgtcaagtcaatatttttaaagagtaagctcgatattttcgtattgtgctcaaattttaatcataatttactcggtcaatccacttttcttaaatagaccgcgtcctattttcttatactaactcgaattcatgatgttttgttttaccctttcacattttttttacaactaataaaatattatatatatttttgtataatttttggatattattttatacatgtttatataaaaattattataattcttaaaatttgaaatactcaaaattttaaatcacactcaaataaattaatatagttttagttttatattttagaacagtgataatgtgacagtcagtagttccatgatccgtaaggggaaacaccgggt

SEQ ID NO: 313024 - DNA, 649 bp, Cannabis indica
aataagcagttcatgcaaaattcgaaacagtatttactattcagtatatcagacacaccagtcaatgaaaaagaaaacaacatctgggtaatgagattgaaatatagattcaaaaacaaaacaaaaaagaaaaacccaactcaaccttagaagaaacaagaataaataaacacctcagagaaagactgtaaaaatgtctgcaaacataacagtatacaggagaacataaatatatgtatatatgtggaaagagagagagattagggtttgagcagatttacttgaagaagaggatgatcagaaggaaaaggttaaggaggagccacgactcagacctcgatcgtcgactaacaaacacacagcgatttcaatattaaatatagcgcccttcggcccctttgccctctgatattaattttctttttccgaatcccctatgatattttagataaatattaatataataataaataagtattttgctcatcaaaaccattaataaaatgctaatgagcatttttttcacgaattttaatatttacaaaattatatttttgaatttttttgccgttaataattccttctgaattattgagatggttagatttaagaacttttatctaatttcattcaattttactgtttcagt

SEQ ID NO: 313025 - DNA, 588 bp, Cannabis indica
gacatagacatccgacaccaacctcgacttggaccttagccccgaccctagacccaaacctaagaccctgaaccgacctagacctaaaccctggacagggacccgaacccccgacctcagacccaaacctggccccgaactcgaaaccaaccctagaccccgaccaggacccgaacctcgaacccaaaccccgaccatgaacccaaccccgacttggattaggaccctggaccctagagtccgaccttggaccccagtcctggaccccgatccaaactcgaacatagacctcgaccccaacccagacccccacctcaaaccctagccccgaactcagaccccgatcccaatcctagaccccgaaccctagacccaaaccacgcccctggacccgtccccagcaccagatttggacctagatccaaccccgaccccagccccggtcccagcttctgaccctagccccaaatttgacttaaacaaaatcaacaaatgaaaataaaatttactgaacacacttttgttttttgtttttaaaattgaaaaacaaaagtgattatagaacgtatttttgtttttaaaaaataa

SEQ ID NO: 313026 - DNA, 1267 bp, Cannabis indica
aattattaaattaattcaaaattttatgacaaaaatgaaaatgaaaaataaattaaattttttacactaatttttttttgtaatttgcactgtaaatacttaagtttaatttctatgacaaaaatgccaatttataagagttaataccattttatattacgtattttgtaaaagttattaattgagctttgtattttgttaaatgacaaaattgaccatgtatttttaaaatggtacaaaataatactttaagtataatttttgacaatttttttttaatataaccaacttgaagcacgaccagatgtagaaaatgtaactagttttaacataacacttttagatcgagttattagtaagttttattttgataaaaaattaacttaggatattattttatactattttaaaaaatacatggtcccatttagcatttgataaaacataggatccaattgataagttttacaatatacatggtcaaaaatagtttttctccaatttataatgctacattagcattttgacgaaaataaaaatagaacaaaagctaatacacctctatttaagaaaggtaattgtcattttggaccttgtgttttgtaaaagttatcaagtagactcattattttgttaaatgacaaaatggactttgtattttataaaatagtacaaataagatcctgaactatttttgtcaaaataaaacttaataataatctgatctagaggtgttatgacaaaactgattatattttatgtcatttgtcagtgctagaaattatcttcaagttggttttattaagaaaaaaaatgtcaaaaaattgaagtcttatttttattatttttaaaaatattaagggtatagtttgtcatttaacaaaaccgaggatccaatcggtaatttttacaaaataaaaaatactaaaatagtatttacccatctaagaataatataacaacaataacaataaataatacttaaaactatgccataaaaaatatataaatataatatactatatgataaaatattacaatttggaaattaattataaaatatatattataaactatatatattttattaatatatattaagtataaggattacatttttgcaaatgaatttctattttggatataatgtaagttcatggagcaaaaacattagttatacatatgtatgaaaattttaatgaaaaaactacactttatactttttctatattgtcctcttttatttttaccctcttttttaaagtct

SEQ ID NO: 313027 - DNA, 1208 bp, Cannabis indica
agaatcaatatattagaaaaataaaaattgcatgaacttacacttgagtcttgccaaagaaattaacctaaaaaaatattatctttacaccaaaataaaaaagaaggaagaaaaagataaaatgttggtataataaccactagttaaaatataattcttttacaataattttgggttctatttattgataaatattgctcataaaattagtattttcgtgtaccagttaatttagtggcataaaaagctgataaaaatgagataatggtagagagagtgggaacatgcggacatgtggtgcgcttctattgctggctttatgcgtgcgtcggtgtgtgatggaagggaggaaaacgctggaaatggaaccaatttaatcatggaccaactttctcttgcttgaaataaaggatccattccatatgtatccagctttgattgaagacatatatcatgtgagtccaaaggattctaatcttgatgcttcatttgcttttaatgggcttgtgtcattagactctaatttcatatatacaattttctttttaaatatgaaaaataacataaaatttaaaattaaagtaaattaaatatttctaataaaaataaatttaccattaaaattataaaatatttaagattaattgtgatgctgccttatttgctactgataattggttcggctttggcttgctagtgtgagatcacgaaattgtttgttggaagctgcaagcctgcaacacggtgcaaaactggttgtgtcgaccctcacatggtagaagcaattggcctcaaggaagttctcagctagtttaaaagaaaaattgaagacgagacttcccattctatctacaagactgcgactatctatgttgaatcggactgtcttgtccttgtgcaatccttgtctaattcggttcctttattttctccttttggtttaataatttcaaattgtaaatatttgcttcaaactctccctactattgttatttcttttgttaaacgatctgggaacaaggcggctcattggttggctcgctattcatgttctaatcctgatcgtctttccattgtggaacctgttcccaatgggttaagggtcattttattggccgattggtaataaaatcgatccagtttatttatatatatatatatatattaaaaaaaaaagacttaaaatgtaccaatttgagccttaatca

SEQ ID NO: 313028 - DNA, 1877 bp, Cannabis indica
actttagtagccttggccataaacctctaggtgtaatcctttagagattccccttgtctttgtttgacttcgacaaggtcttctagctgttatggtacaagtcttgaggacaagaattgtgtgtagaattctcgtgagaactcagcccaagagttgaatcttcctagagtgagtttaaagtaccgttgttgagctgtctctgacaatgtggctgggaatatacggtaccgcacatcactattaaccttctaaagatcaagttgcatctcgaagtacttgatctgagccagcgggtcttctcgaccggtatacatcttccatactgacattttgaacttgggtaagggcaaggcatttatgtatgctgagaatgttgatcccgttgaccgatcaagcttaaggtcaaaatgcttcgggccagttatgccttggatcatgtccttgagtctgtccaactgtgcttgcacataaggatctattgccgggggacttgactgactgaccctccttagggaggctacagattctagagagataggggatggctgccataccctgagaaagtgtatggtgaaggtcagccagacccgtgttgaactgtaaactctgactggctattcccaggtacgggaggtggccttggccggccaggcctacacctggctaatgtgcttggctggccagacctccattaggtatggtttggtttccgagtactcctccttggctggccaaacctacaaaggttagggtctcgccgcccatgaggcttccatggccggccaaacctgtaaaaagtagggtctggctacccgtgactccacagtcgactggtgttggttgtgtgttaatagggggtagatcacatcaattgctggagtttggtggatctagatgtctgaagtgatgggtttcactccttgatttgccattttgggtgtttccacccactctcggtccttgtcgattgaagattgacctctgggcacctcgctccccttgaggaggaagtggtgtactctggccgaccaagagtactcttattgatggctggtcagccaatagctgcacagtggggggtgttgttgagccaaagttccatggccaatcccccatgacatcggttaccaggatctggctatttttttcatttgacctttgaggaaaggtctgtcctttcctcaagcaagggaagatccgtcctagttcccgtggaattggtttgatcagcgtgctgacaggccctccctgatctatcgacaagccttccttgaagtggatctctgaggagatcctagcctcttttatcagttctctggttgaaccgtcttattagatcactgacctctcggttgcagcgatctaactttgctcagtgagatcgaaggatgtactcttgatcatccatccatctcaagaattcacatctctattgagcaaaaacatcgcaatcagtagtgcgtggtgttggaattattttaccaggatcttagatctactcacaagtatgttgatttaacaacctaaatatgaacttctaaaaacgatagaaaaattaaacacataaaagtaagagaaatcttacattgggtgcaacggaatatatgtctcctccactcagatctctaacccttgattcctttctgtcgcagagtataatcaagatctgagcccgaatgtccttctttgttgattctgaattctacacaaccttcctcactatgattgaggtattacttgatgtgtgtgggcactactctatcacttagaggatttcgaaaaacagagaaggtagagagagagagagaatggcggcttcaaagagtattttgagtgaaagaaaataatgacaaagtgtgtgtaaaacctgaagcctt

SEQ ID NO: 313029 - DNA, 2869 bp, Cannabis indica
aaaggtgtatttaattataatatttaatttatcaaatatgtcatctctactcattctttcattttattttattaaaatatactcatttttgtaaatttttgtgagtaggttgctcaatatactctcattctccacttaattctagcacataatttttattaacttaaagagtacaggtacatcatctataaaagtgtgtatatcttaaagaatataaaaataaacgtaaaaattaaaatatataaagtaaagtgggtatacaatgtaatttcttcatttttttaaataaattatggaattcattcaaataaataaattgttaataggagaattaataaagtgtggacaagcatctgttcaaatataatctcctaaagaactagtaatacaagtagtcagtgcatgagcaacaccattcgcagaacacgaaataatcttgcgaaaactaccaccaccaagagttgctaacaaagaaatatcatcaaaaataattggctgacaatcttaattgaaaatagaattattaatccaacctatgataattgttgaatcactttcaatattagagacaaaagccaaattgtcgaattcttaagtggaaatctaatctgaatatgatgttagtttatgagaaccacacttttgtccttactgagtagtgtctatattagaactcatgcattgcacatgattaggctaatacatgatgcaaagacacataggtctactgtagacaagaggactcaagtgaacattattcttgagttgctcactcattgcttcaaagtgttcaacacaagttgtgtgatgaacaagctatagttcaacatgactcaatagttgaacaagttgactatgtttgaaaacctatacaaggataattccaaggaaggttagtcaaacaatgttgaagcaaagtccaactctccttcttatttggataaaaaaatgaaataggatggtaaggacaacagtagtggcaagcccgagccgaaaggcaaaggcacctaaagccaagaagaacaaagtcagccctaagtccaaggacaagaaaggtgaaaggcaagtgtttctattatatcgtgatgaaacagtggaagagaaactgtctcaagtatctctccaagcttaagaaagtaaattcaatttatttattcttaaagctaaattagtggaagatgaacaaccctcatagattattgattcgggagcaaataataatattcattcttcaatgtaaatacttgatttatcaagaaaactggctaatagaaaggtgaccataagagtgggcaatggagcacaagtgtctgcgaagtgtattggcaaagtccgtttaagttttattcataatgagattattaattctaagtatggaatgccaatttattatgcaaaataaagtaacagactttatgtgctcagaccaagtgatcaattaattttgataaatgaattgtttaaagtaacattgcctcaacaaaaataagagttaaaaggtttctgatgatgatgaagggcatctatggcatctacgtttaggcaatattatcctagaaagaataaatcgattaataaaggttagtactttgagagaactaaaagttggaactcttccgatatgagaatcttgtctaggaggcaagatggcacaaagacctttttctacaaaaggcaatagagccaaagaacaacttgagcttattcacactgatgtgtgcgggcctattaatattcaagctcaaagtagttatgaatactttgtcaattttatagataattattatagatacggtcatactcacctaatggccaagaagtctgagacttttagaaagtttaacgacttcaaggatatggctgataagcaattaggtaaatcatcaaagacactttgatcagatcatggtggagagtatttttgaatttaaagactacttgctggaagaagagattgtcccaacttacagcacctggagcacctccacagaacagtgttacataaagaagaaatcggaccttgttagacatggtcagattgatgatgtgttactcatcattgccactatacttttagggatacacacttttagagactacccaccttttgaatataatacccttgaagagcacaagtaatactccaatagaattatggaatgggacaaaccccagtttgaaacatttctgtatgtggggttgtcttgctcatgttcttaaatcgaagactgggaaacttgttcctagaactaaagtgtgtatgattgtaagatatttagagggaaattgaggaaattagaaatgagagttttaaaccaacaattttagcaccattagttgaacgaccgatagcggttaccatagttcctgaaaagtaaatcccggtatattgtcatagtagaaggattgtgagacatcatgtccgctatgaacatgaagcacatgttcttatctctgacacagacaaggatgatccattgacttactagaagcaatggaagaccatgagtcgccctggctgcggctgcctcccgttctaactcagcgttttgtcgttttgcctcctccaattgccgcttgagttgacaattttccaactcaactaacggaacatacctgttggggtcataaaaacccccacttctaggagtgccgccaccgtcagtgttgggtatttcattcccagtttttgggttttggccaccttctggctaggtcctccttgaacgtgcgtgtagatcgttgttctgagttgggaggccttcgtgagcccgccggctcattttcaggataggttgattattatcatttttcctgttgtcagccatggagaaaagtttttctttggttaggagggattttttctgag

SEQ ID NO: 313030 - DNA, 745 bp, Cannabis indica
aaaaagtaaaaaaaagatagggcaaacataaatgtttaatgttggaaaaaaaaaaccacttagtgtaaatttctctttaatgtataacacaattggaccatggcagagctaagtattattttcaatgcatgcacaccgtttattcatttgtgggcttataagaatcagtgaaaatttggttgaaacaagaacttagttaaaggcttggctattggaattagtggcattagaaaatgcataataactattgttcatagtcaataataaatagtggaggataaaaaaatttttgggatggtattgaaaatttaacaaacataaataagagaagagcagtgagaaaaacaaaacaaaagataatgattaaagaaaaagaaaggagagataaaaatatattattttattattttattaaattattatttatgtctaataaataatcaagtgtactctaaatatttattattttatactctcatttatttacaattgttagatctattattaatggttataaaaacgttcctaccatagagacaaaatattagttcttactatagacatatcctaaaatataagggtaaatactattttaaattcttattttataaaagttgttaatttgactctttattttgttaaatgataaatttgaccttatatttaaaaaataggtaaataatattttagaccatgtatttttaaaaagttaccaattggattctctgttttgttaaatgacaaa

SEQ ID NO: 313031 - DNA, 570 bp, Cannabis indica
cttatatatggctcaattctctaccatttattccatgtgggacattgtccacaatagacccaaaaacagttaacccgtaatatgtgaacaacctaggtttgggtacaattttttcaacctgaaacctgcgaattcaaaacccgatcaacctactcgatgttcagtcctatcgcctatgtctaggcccaaccctatgcaaaccttgtgtgcacataaccaaacactctaaaagtaaataaaaaaaccatccatccaaataaatcatagcataaaaagaaaagttaaagcctactccaagactttaggtcattaaaagttatatcaactagtagttagataacttaatgttattgatacttggtttcatataccaatacaaatcacttcagacccacaactacatatttttcttctagttcatcaaaacaccttaaatattcaaatttaaataaacaaagcaagatgcaaacttattatcaccataatagctctattttttcacagcttcgaaactggaaatttagggaaaatttctggtgagaatttctgtgctgcagtaagactaccctt

SEQ ID NO: 313032 - DNA, 1242 bp, Cannabis indica
aatttatataaatatttaaagaaattaataattatattaaattagtatttaacataaaaaattttatattattcaagtatttttattttactattttaattatttattaaataaaaatatgataaactattctattatatatttatgatatataattgattatataagatatattattttattttaattatttttttttttttttactgcaaatcatccatttttatttatttattattatatattttaatttaatattatatatttttatttttgtttaagtttttcttaaaaagaaaataaataaaatagttcagcctattcttaaaccaaacacaggattactttcagcataatccaatcttgtccagtccagtccaatctttttcagtccaatgtagtccaattatgtgtaccaaacgggcccatagtgtttagggttcttattcgttaatattttcccattgatggggtcattacaagtaacatattgactagggcttatctaatgaagcttggtccatgaggcgcttggtgtctgctaatgtggataccacatcattttgacagttgccaaaaatcgtgtcctatcttcgtggagaattaaagacacattaaatgtttgattgctaattactctctttccatatttaggatgacatgatattcggatgagatctttaagagttaatttttgatatctcgagatctcataattaatgagaataattctgagctggacatctagatgctcgttgtttacttctcttagatgtgctgtctaatatcttctaaacgtatgccatgcttgataggtttctcgcctggacaagtcttctacttatccgaaaggactaactgcttatgagtttgatccaatatttcatttggggctgttattgggcatggagtatacccatccagaaacacaaataacaacctcgaattacattcaaatccaattacagggtgactttccaaacactcttaaaattactttttctactaatctataagaggcttaacatatttgaccaaattcaaaattgcatggatcaagttacttcattagtaaaaatgaaaagtaagaatttaacaatcaagttatttcttgctgaaaatctgttaaggctcaacatatttgaccgaaattgaaatttgcagatgcctaattacttcattaagcataataacatacgatgtaacgccctaaataattaggcacgctacccaaaatactta

SEQ ID NO: 313033 - DNA, 741 bp, Cannabis indica
ggggtttttgtagtagtgattaactaataattatttatttaataatataattaaaaaaattattaaaaatgagagaattaatgatagaacaaataatactattttgagaaattttagagtgtcatgttaccgcttcatatctctcatttatatatatatttaaagagtcaattaagtttcacagttaaatgtcaattgtgattgtcacgacccgagctctaagccgtaacatatatataatatccataactttagtggtcaaatgtcacactttaaccattgtataaaaatattacttataaatgatcatttaaatgatattacgaaatacatatttataaaagtaatagaataacttctatatctataaagtaaatattagtaacaaaattaagatcactcattaatataaaagaacaataatattcctacagttatgataagggtgctattttaagactcttcgactacaccaaatcaagtttctagacttgccttaatgatagaaagtctactgatgagatggtgattactctgagggtggagcagtgattttggagaagtgcaaaaaccaatatggagtctctaatctaccagtgagactgaatgttaaagctacaggaaagatacttatttagtctatagaaagttctatacagtttttggcattgtaccataattaattaactactagtgttacttcctgactaacacaaatgtagttgccaaaaaagtaaagaa

SEQ ID NO: 313034 - DNA, 2581 bp, Cannabis indica
caaaattaataaaatatatatgtactataagtaagaatcgaaatatctccagtcattgattcttgagcttcaattccacagaagctttaatctgcaaaggaagctgattgatgtgaataatcgggcttccaagctctctctactctactaaaagtaaaattgtctccaaaactactacttcgttaagacacttttagaccatctctaatagaatatgtaaaagttgaagtagactttaacacaccattgaagtagacttttaataaagtgagctacattttatatttgcatcactaatttgtattttcattggagatcctcttataatagtaagatatatatatatatatatatcttaattattaataacatacatattcaatttgctattgaaatgtttattaaattataataatatattatttaatattacaacaaaatgtaatggaacactgtaaagaatttcatatataagatcaagttttagagttctattgagatgcatttattgccaaatgattacatacttcactttttgaagtctgattagagttcgcgtaacctaaatcattgaagactgcacaaaaagttttatatcttccaagaatctgtattttttttatctatgtatttgtggtgatgggaatggagagaatatgagaatttatgtttttttacaattatttattgttagtatagatggttaattctgtaatttcagttagttcttctaactaatttctgttatttgtttgtaactgtttctttcagaataaagaacaatgttctgggtttactctctctcttgcatactctgcatttttctctgtttcttcttttcttcatactctgaagatctcacatggtatcagtcgccctagactaacgtcgttcatggagtccacatcttccgatcctgctccagctcccagaacctcgacggctgctgccaatccgaatccaccccagctgcactccaactggaaccccttctcaaactctttaacctctgttcttactgttaaacttgatagaactaacttcctttcttggaaatctcaggtgatccccactgttattggacatgaactggacgagatcttgcttgctggtactccacctctgcagcgattagtcaatggagaaccaaatcctgaatacacccgatggaaacgcaaggatcagctcttgttgtcttggctgcgatcttccatgaccgaaggagttcttgcctccgttgcaagcttttcctcctcccattcggtctggcgtgctcttgaacaaagttctcaagtcaatctaaagcacggttcttcaactcaagaatcagttttctacaattcgaaaaggcagccaaaccatctccgattatgttgacaagatccagtttattgctgattctcttgctgttgcaggttctcaaattgacgatcaagatctcatcctccagttgcttaatggtcttggacctgagtatgatccagtcgtgtctgggatcacagcaagaagtgatgttctttcctttgaagaagttcaagccttgttactctcccatgaaagtcggctagaacatcactcctctgtcacagaccacactatgaaacttcaagccaatgttgccttcactggtcctaggaacaacacttatcgtcctcctcaaatgtccaaacctggaggcagaggcaactatcgtggtcctacttcacaaagccgtcctttgtgtcaactatgtcttcggtatggtcataccgcaccagtatgccactatcgttatgacagaaactgggttacccccaaacaaggatccaataattcatctgccactaataacaataatcctccccgtgcttacatggctgaacatgaatttgattatgatcctcaagcctttgccacttccttcattcctgatttcggagatgactcaggatggtttgttgacactggcgccaccaatcatgtcacaaatggccttgaaaatcttgactctactgttgcctatcctggttcagaaggcctagctgttggagacggtaagaagcttcttatctctaacattggtttagctaccttacctactagtaaaaatactcatctaaatttacaatctgtccttcatgttcctgcaatgaccaagaatttagttagtgtttctcaactcactaatgacaatcttgtgtttcttgaatttcacaaaacatgttgcttcgtcaaggacaagcaaaccgggacagtgttgctcaaggggactcttaaagatggcttatatgtgctagaagaatgttcaaacccatcacacaaagaaggcttaaagacaagtgtgtccactagttacaaacctactgctatgaattgttctacttctttccaatttccaaatgtaatgaatactgattcctgtaattcaatacatatcaataaagacaattttgctcaactatctctttatcaccccattgccttgcaaactagtgtcaaaactgatattaacacttggcaccataggctaggacacccttcatctaccatattacacaaaatcctgtctcatgtttcccacagtggcaccacccaacaactc

SEQ ID NO: 313035 - DNA, 896 bp, Cannabis indica
gtaaaaaaaagatcagaaatttcaaaatcaagtggttagaaagtaactgccaatagttggtgttttaaaaagaaaaaaaaaaaagagacaaaaataaaaataaataatgtgtggggaaaagcatcttatcactctcatctatggctaagctgccttttatttatttatttattttttattattttagtgataagaaaatcattagtggatttctatgtcaataactttatatttatattacctctttttttttcaattatttatttgaataactttaaaattattgttatttttatggctcatatccaattaaactctagatagtttcacagtacaatcgtacggaatatggctctcgattgagacattatgttattattttttacccaaagctgcaaaatgataaattatttaattatacccaaacatatctataactttatgtaaagtgtaagtatatacctttagttaatatgatatattaatattattattttgtttttggttcattaaaaaatattgatattaatctctcaattgacatttaccaaacttttttttttgataagtaattaatatgcacaaattcaatcatattatctagacaaatattcatgattaatttatattgtgtgtttaatatgatcatttaagaaggcacacgggtgtgtaaaagaaataaatttttaatttttaatattaatatattaattaagatcatgatcatgacttgagtgtttttattttttatttatttatttattagtatttatttgtgaaagactagctacttgagaatccactttgtaatttacgaaaagaaaagcatctaatgagacttattagtttggcaaaaatgaatgattattattatttaatatatattaatttttttt

SEQ ID NO: 313036 - DNA, 1320 bp, Cannabis indica
gatggatccgatccgatccaaaagattccaggtctaaaatattggataaacccaaattaaaccaataaatatatatgaaatacatccaatggatagaaccgatccaatccagcatccaatggatgttggatcaattggatgactgaaattaattggatcagattgaatggtaaaatctaacatccaatatatgattggatcggatctagataggcctaaaaatattggatgtgatccaatgaacacccctactacccactaagatctagccaaattcgaaggcttgctggccaagggcgttgtcaagaatgaaggcctacatccccatccaggcgaggagagtgggaaggtggatgtaaacagtcttaaagttctcacaataccaatgcgtatttggaaaaacttagatttggtcggccaaccttccggaggtgcaagaggccactggtgcttacaagcttgggcaccctctcgcccataggggtgcaaccgtgttgagaaggtaaatgggagagagtgcttgggcctggcggtaaagtcaagaaaagttatgttgacagcaagtaacctgtagagggctaccgaaaataacgtgcctgtcaagctaggttcattatcgtcatcgtcaacttatactattcctatgttggtgctagtatcaggtccatcgtcatcgactacttctactgcctttttgttgagacgtgctatatgacgttgtaagatctcgtggtggcagcaactgtgagttttcatccaatgttgttgaaatctgctaggtttctaattaggcttggttatggtacggttggtataaagtgtgtagttaatgcaaatcacttgctagttaaggttgctgaaagggatctctgccattatgatgtaactataactcctgaagttacatcgaaaaaactaactcgagacattataaactagtcaaggaatctctactggagcaacgattatagtgttggaagcctgagtccttatctcgtgtattgaactaggattcaggcccaaaaggatgttggttctcgaacagcagggtaccctaagatctccctacagagtaggttatcctcgaactcccagagtgcatttttcggtactcctagattcactagctcaatgtggaactacgcaaattatatacgttccctgatgcttttgggtgcaaggattagttggttatggaggacaattttttggccttgccaaacttttagttaaaagatcactgggggttcaatacatcttcaaccctcctttttggaagagaaggactgcttgaaatctatcacactcccagtggggttt

SEQ ID NO: 313037 - DNA, 2655 bp, Cannabis indica
ttaccacacccgaaccatatgcattactcagcatgaaagacggcccatcgacgtttatcttttagcatattttgcagcaggttttacccaacgctccccagtggctcaaattttcttgagttagcgttttttccattgtgctaaagttaaccgagcagtgaacatcacatcagctgcagaacaaaatttctggttccagattacaccatttcgagcttgccatattgaccaacaaagcatcacaccttcctccaacaagtctggtgcattctcgtcaacaacacccttaaaccagagaaaaaagttgtcgctgtgggcagggggagtggccaaactagaccagttccagcaggacttgctgaagtgacattgcagcaacacatgtgtaatcgactcttcctccgtatggcaaaatgggcatgttaattggacagggtacgtgcttcgaatagagttgggtacgagtaggaagacaattggttaaagccttccatatcaaatgtagaactttaggtgggactttaatcttccacaacgtcttccacaccttatcctccatatctaaattccatgcccctttcatctcttggatatactgataagcactttttactgtataaaaaccagcagtgtttttattccaataccaagtgtcttcagtaattgacaaactcaaaggaatgcttagaataatctcttgatccctttcttcaaacatatcccgaatgagctcttcatcccatgctctttcattcattttcatcaagttttgaactgaataagtattcaaaccaggatgagtagatattataagaggattagagtcaatgggcagccaaggagtccctaaaatactggtactttgtccattaccaattcggattcgggcaccatccttgataagggattgagtctcatgcaagcttctccatatataactcgggttattgcctagagaagcattcagaaaggaccctcttggataatatctagctttgaaaaggcgaccaacaagggaattttcatgttgcagcaaacgccaagcttgcttacccaaaagtgacaagttataatcccgaaggctccggaatcccaaacctcccgtactcttatgcctgcacaaccgtgaccagctgacccaactaacgcctcgagtcttctttgagttcgattgccaccaatatttagccatcatttgttccaattggctgcaagtttttaagggtaacaagaaaacagacatagcgtagcttggaacggcctgagctaccgtttttaagagtatttctttgcctgcctttgataagaaacgcccctcccatcgttggattcgttgctgcattttctcttttaagaaacccagaataacatctttatttctgcccatggtacttggaagtcccaagtaactagagtttccatcagcctccatcattcccatcatcccacatagtctaattctagttgcactaggagtattagaactgaaaaagatagatgatttatcatagttgactttctgacccgaagccatctcaaaaacattaagcagccgtaacacactacctgcttctctatcatttgcccgacaatagagatagctatcgtctgcaaatagcatatgagaaatgataggcgctccgttagccactttgcaaccatgtagctcaccttgtctttcgaaccttttaatcagtgatgtgagaccctcagcacataaaagaaacaggtatggagacaaagggtctccttgacgaagaccacgtgcaggagtaataggacccatctcacggccactattaacaaccatatactgaacagatgtaaccgtggtcagcaccgaattgataaaacggtattcaaaccccagctttagcatcatcattcgaagaaactcccactcaattctatcataagctttactaagatccagcttcaccgccatgtagccttctttcccttttcttttccgttttaggtaatgcataacctcaaaagcaaccataatgttgtcagaaatcagtcttccaggcacaaatgcactttgagtatcggatataacctgaggaagaatgagtttcatacggttagcaaagactttggtgataatcttgaagagaacattgcaaagggatatataggggtcgcgagtagtcaccctatgggttgtatgtaggattcttcttcttggggattgaaacaatattttttttttgcacaaatcattaggaatcatacccgtatgaagaaagtcttgaacctgagtaactacatcctttcccaccacactccagtatttttgaaaaaatcctggtgtcataccatctggtccgggagacttgtctgggtgcatttggaaaagagctttgcgaacttcctcttcagtaacaccttggattaagtcaaaattttgctgaggagaaattagaggcactacatcatccattaattcattaaccatagaaccactagtggagaagagattagtaaaataatcaattattaccaattgaagtccagtatcccagtccacccaactcccaaaagcatcttttaacttatgaatcgtattattttccgtctagaagtagctttggcgtgaaaaaatttctattttggtctcctgcctctagccacactgcttggaacgttggc

SEQ ID NO: 313038 - DNA, 2010 bp, Cannabis indica
tagcaactgtgagtcaacagacttagtaagaaaaatatataacaaataatataatatcaacttgtatctaggcgcccatacacctatttacaaggcttaacaaatgagtaagaatgttctttactagggtacaaccattgtaccacatacactatgtaccacttctgtacgagtgttggtagggtttgtttcgtaccccgagtaccactaagtgctataccacacacaccccgtacctttctgtactagtgctaataatatcgtaacgtactctttaaacattgtacactataccaatgcactttgtaccaccacagtactagtgttggtagtgtacgaatcacaacaagcatgcctatatatcacacatacatacattctcatatatacaatatgttttatgctattcttacctcgtttctgaactcaagttagttggccgacctgaacagaaaatctcgtgctggatagatgctctaatcacaatcacataaacgggtaaacgacatgccaaaaccctaatctgggaaacccaacccctaactaacggttctgctattggtaactagtacaataatattctcattatcaaggaataaaccaaccaaggcttagaaaatagcacgaattgatgaatcgaacaatttggaaaacctgtccctgtttcggttaaccggttttacaggacctgtcaaaccggttaactaatttgcaccaagttttcccaaacaattcaaattttgatcaaaacgtgcccaatccgtgccaaaccttccaaaacacctagtacaacatccaacaacattttccaaggaagaaaaccaaggaatacacatataaacaaaacatgccattaatgactcaagtttgagttttcaatctcaaacttgatcattcaccataaaactcaccaaaatcagttactaaaactcaatcttaactcaaattgaacctagaaattgaatcacaactcattcaaaccctaacagccactacaactcaaaattgaattaaaaggctaaacttcaagcttaagtacctagagaatcatggtgctagggcttacctccacttggaaacacctcaatttccagctgaaatctagaaaaattgtcagggttagggttgatcttactggtccttctggtggtcgagcaaagaagagagagagaagggatttcttaatttttctcttaatttcttaattttctttctaaatgaaatgtctaaaacaattacttcagctaagataatcaaatggtagctgtcaagcctccaaatagccaccacatcacactaataaaaattatcaaaatgcccttgtcacttatatttaaactaaataaagtctagggataaaatggtccaaaaccataatcctgcctaaccctggtattctatttatctcaaatattcatcccactaagaaaaaagttctagacttacccatgtgactctaacgaccatccattgcattttccgtcatcgccgagcaaaataataaaaattgcataattcatatataacacatataatgctcctagagtttaataaaatctccaaatttgagaaactataattctaatgtccatttctaataatggtacccacaatataataaattcgtgcataattataaaaaatcaataattaacgctaattgtgtttactaatctatattctaatgtgcggtcattgcgacaagagttcaccctgtttggcaagaggttcaccactaaggggctagctggaaaaagtttgtccaatcaggggtgttgttaagccagagatccttagctggtccactagacccttagttgccagggtttggctgttcttgccacaagatctttatggcaagacttgtcctccttcaagcaggagaaggtctatcctagttccatgatgaaactggttggaaagttttctatagaccctccctgatctatcaactagtctccctcttctggcagttctctaattaaactgccttatcaggtcactagcttc

SEQ ID NO: 313039 - DNA, 399 bp, Cannabis indica
acgtacattttgggaacatgcttaaagaaatcaaatttgtagccaaatttagaacatacctaatatctttgatttctgtaagtgttccatcatccaatttgaacattgcatttccaattcctttgatagagcatgtttaaccattctcaaacaccacctagtcaatcttttggcttctttaatctttgatccaactcttgttgttggtcatatgaaagttgcactccaagtcaatgatccattcattttcttttccgtttaagttagagcatcaggcaattctactacaaacacatctatatcttcacattgttcactgtttgttgaatttttctggtcttgatcattctaattactcgatcttgaatctattctgtaatatccagattaaaatagtat

SEQ ID NO: 313040 - DNA, 1475 bp, Cannabis indica
aactagttcaaggttgtttttggtcagacgagatagaagcaaaggctctttttcatatcatcaactgggcaagtcaattacaaattcccataagaaccgttgaaatgatgccttacgagtttctactgcattatctacaatatcttttgatttgacttccttttcagatttaatctttgttattcgttatctttttattctctttccctagagttattgtctctcatatgcagagacatactaagcaagtagcacatggtttagcaaaatatactctagagttggatgaagatgtctgctggatgggtgaaatcacctatcctattttttctattattgtaaatgactcttgttttccaagatctttggataccgattagtaaaagcttaaggaagtgcaaaatattaaataatagacaaatagattttttacatggttcaggcggtaatgatccttacactactacaaaaaagggtttttatgtcggtcaacgcgtctggtcaaactcattgaccgacgcaaaagtcaacccttttttttgctttagttgttaaccgacacaaataataattaattgcgtcaattgttacttcgacaaatgagaggttgaatttttgcatcagtttatagtatttttgcgttggttgaacaatgacgcaaattttgtgtctgtgaaaaactgacgcttatgactattgttttacaaaaaactattatgcttgctaaataaataaagaggtaaagttaaaaaaatataaacaaaaggcgggccttcaatttttttgggaagaactgagaaaatgtattatatcctaaaatctcaattttctacttcatcacaaaataaaataaaaattatcaattttttctaggacaacgatataccatttctctctctcactctctttcacatttagacactctttctctcccattactgaaacgaaatagcaccaacaacaatgagagcttgcctcactcattgttctcgatcttcttctctagggagcacaatgtactttcccaagtatgatgacgggaaggcagcgacaacaacagtcctgcattattcttctttggcattgtaatcctgttgcagttgtaggagcgacgacaccacttagatatttcttcttcttcatgccacgactacacctactacattgaacaagtcttcatccactcaattgaccctcgacttctctcaactctcgtactcttctatttttttcattccatttaatttctaaaatttttaaaattatgtttgattcaaataaaatttctaataattaaaggagaaaggggaaacttttgaattaaatatacattcgcttttaataatttcaacatttcaggaaggaaaaatctcaaacttgttttgagatttttcattcgggtcattgatgagtccataaattgtcttataaatatgatcaatttatgtagtaatattctcaaattaattctttca

SEQ ID NO: 313041 - DNA, 1771 bp, Cannabis indica
accaatggaggttaataaaaaagatcaaccggatctcaatgctttgtgtatcactttcttttacagcttcaaacaatatctataattagtattgtctcctaattacaatgtacagactaaaattcaagaaaaaaacgtgcccccttagtcataaacacgtccacaaaacaatcaagcccaaaattttaaacaaatgactctcaaatacaataattcaagaaacaaatcttaacaaaatttcaactaaaccaaactaagtttatagactcgcacaactttcaatcataaacctaataaaccgcattgtaaaaaccgaaaaccctacaacaaatcccctctcagattaccctcaattcccatacgaacaaaacaaaaacagatcataaacaacaagaaccctaaaaaacacatcgaataaactaaaagcaaacaactttaaacatatatacaaagataaaagagagttacatgatgggaacgctggtagagatctcaggccagaaattatcgaccaaattgttgagattagatagggcgtggagcttgagtagaggatggctttcgttgagcatagccaaaaggccacccgccgagctcaccgtagtcgccataaccaccaccgaaggtgtaatcggatcgattggtgaggagctagggtttcgattgaaagctctctggtaatttctagggttggggtttttgcagagagcggaattcgaaaaatgagagtgaagagagagaagagaaagtaaaagggaaaatgactcaaaaaattggggatatacttgtttcttagtattgggtttcctttgctttctttacttacccaacaagttaaaaccaaaaccaaaaccaaaaaaaatatacatataatttgcggcttaaatacttaagtttaaatttcgattaattgtgatgttgcaattttttttaattgattttattttagtttgttttgtcaaatgatttggaaattaaatgggtgattatttggctcgtttttctaattgatcgtgttttcaataagtgtgatgtattgaatctattgattgaattgtaaattattattttagatgatttttattaataaaatttcataatttattaaaaaaaaatagttgctgataagtacataagtttaacttttttacaataaagttatatttctagaatttttgtaagtatcggatcgttaagtaagttattatttacgtgttatttttttattagtatgtttaaattaatttttaaataaaatttaatgatcggaccgatcaagtactatcatgtggtcattgacttaacacttaacgactaggtacttgtagaagttctaaatattattatcgttaacgattaaatgtagatatttatgtgcgactgaaagttaaacttagataattatgtcataaattactcaaacataaataaataagtaaaaataaaatgaaaagaaagtaaatctccttcacggcttgggttcattaattataggctaattaagatttttacctccaaactttaacatgtactaaatcatacaccctgaacttttctagccattaaaaattatctctgaactattgagattcttagatttaaggacttttgtttaatttcattcaattttactattatagtgattgtttatgtattaaatcatgttccctagactttgatatctaccaaatcatgcccctcaaactttgacatatactaactttcatccatgttagtactttttttataactaaaattagtaacaaaagtc

SEQ ID NO: 313042 - DNA, 744 bp, Cannabis indica
gaatgacattccaatggaatgctcttttcaccattttggtggaatggctattctattttaaaaaagaaggaatgaccattccaatgtaacaagaaaaaaatttaattattttttatcaatttttttatctattttaaattttattccattcctattctcattcccattcctattcccattcctattcctatattttctaatagactgtatttaaaattatatttgccaaatctttaggaataagttgagaaatattattttttattacacattagttagatataattataaaaataattttaattaataaatacaatattttataatcaaagaattaaatataatctcccacgacttatcaaaattaaaaccctttaacacacataatgagaatataatctataaattaactaacttaaaaaataataaaagagataaaaattaaaataaaaaatataaaatggatatacaatatagcactcaagaaagtagatatctccttttatacacttaattatatttaattatcgcttagaataaatttataattgattattaaagtagataaaaatgcaaaacaataacttaaaaagaaaaaaaccatttttccaattattcctttaattaatatacttaattatatctaatcggtaattattaagagtttatagcttgctcgcattacagcatatcttacaattaagatcttatatgttttaaaaaatttatgtataatattaccta

SEQ ID NO: 313043 - DNA, 935 bp, Cannabis indica
gatcatttatatatatatatatatatatatatataaatatatatatcttttctttcacaaatgtagtttatagtttgttgtattaagaacatattaatcttattatttaaaatcaaaatttaataatcttggtcattatacaaaaatccaccagtcaaactcattttgaaactatgaatttttttaacaataagacataaagaaaatcactcagatattaattattccatgaggaaattaaaacatgaataatcttttttatggaaaattaaaactccaattttgaagagcaagaactaaaaaaaattaagaaagaaaatatctaacatcaataaggatacactcacactcatttgatacactcgaaatacacattataataatataatttgcaccttaaatcatatataaaaataagagatcgtttattttttatttagttttgaattttttttatttaattttgagtgtaaatgatttttaaaatccctttaattaattaacgtaccgcatcagcaatcttagtggcatattctaatataacgccacgtgtcaaatcacactgactaatgctcttttgaaacagatttggacacgttaagtgatgtgaagtagcaaatagtggatcccacactctcaccctattatattgactttttttttcacgacaaacagttgactttgtcaataaaacactgttcttcttctcaggttaataatttcctatactcaaccccaccgtaaagtgaactcaaacaaaaaatacgctgctaattagattttcagtcctgataccaaattatatgctgaattttttatttgaattttttttgaattattaaaatttttattaaggtgtcgtttgataatattttattttttaattttttaattacaaaaatattctataactgttttattttttaattttaaaa

SEQ ID NO: 313044 - DNA, 1665 bp, Cannabis indica
tttcagttattttgttttcatttattaatttactattattagtttaattccaattaatatttttatggggttagaattataaggagttcattccttaattaattttaatgttgtgatcgtgtttatgtgttgaaactaatttagtttttccattagtcttgtcttttgacatggttctttagtcttgtcttttgacatggttttttagtcttttccttttagttttttctggttcgagtcttgtcttttggcatgggttgtgtagctcagaatcatcatggtgctatggtagaagcattcaagaaggggaagattggatgtgttcaacccgaaattgctgagataataggcattaaagaagcattgagttggattgcaactcattcgtgggatagagtcatgttggaaacagatagcttggtgtgtgtccaagcgattcagagcggtattttatgccttcacaatttgtgttttgtaaaacgatctgcaaataagttggctcattgcttggcaagagactcttgtttctctacaggtcgtgtgcttcagttggaggactgttcctctgaagtgcgttctattttttgaacgaatttattaattaatagatcttatgatttttattcaaaaaaaaaaatctaattatatcaaaatatttttgtatgttttccattagttttcaatagaattaaagtgaaactaataaaaaatatacaaatatttgtggttgtacgggtgaatgtttttatattattaaacaactataaaaatggtaatactctcaacatggattaacaatctctcgcacataacgaaacaaaaaatggtcagaaagagtgttttagagtgagattttatattcttgcatttactaatattatatggctctcttttttatttatcgaagagtcttatatcatatgctatatatttgttatgacaatattttaaataaaattcagacattacatatattcctgcttatatatttaatatatatatatataaaaaaaacatgtttgtcaataaatatatattttatgctcaactaattttagcatagtggggcatatatattgggattgctagaatcatatctctattaaaatatcctatatgattaccctacaatcatgggattatatattttgatatcacaacaattgacttataacattttttttttttgcaaaaattcatcatctttattaattgccatccatagtaattacatgattaaaatctggagtaatatccatactcttgataacacgatcaacaactaaataggaagctcgagctaagaaatgagcaacactatttgcagaacgtctaataaaattgatataaacatctcgcaagtcatttaacaacatcttacaatcagaaataataatactcccaaagtatgaaaccataagagtagagctacgtaatgcttgcaccgcagtagactatcagtttcaatgacaaccttcctcccatctttccgtttaacccaactgagtgcctccttaacacccaaagcttccaccatttcgggttgcaacacccctgaccgacagcaggtaaaagcttccaccaatgcgccagtttaatccctaatcacccctgcaaagctataagttgcagttcctgaaaaaatggcagcatctacattaatct

SEQ ID NO: 313045 - DNA, 1916 bp, Cannabis indica
ttcttactgggcgttagctcacgggtactctgtgtgcaggtaaagacaaaactaaacagtgaggatggcgagctcgaggcgtggattacatgttaggggattgtcacgatgttttggtttaagaatatttctttaaagattatggctcgattacttttgtaaaaattaatgtttaaaaatttgtaaatgaatcaagtgtttttgttttaaaataatgagatctcatgctttaattattttcaataaattagtttattatttttataataaatggttttaaacggactagctagtgtgacgtctcgggaaatcggggcgttacaataggttctaaggaggaggtgatgaaggggcctgtggtctaggagaaatacacttgccgatccatcggctgggaggctgatgagttgcattcaactctaacctacgcccaccaactggagaagatcatcactgtggctgggatcaagccttctacttccggagcctttcatcgtcttcccagatacaaggagatgcctaaccataactacggtggcctcggagcttggagccaaactcatctcatgtctggggcaatgctgccgcttcaggattatttcatcaatttcttagtttttgttggccttgtgccttaccaacttatcccccaagtatatcgcctgctctcaggcttatttattttttatgttgccagaggctgggctccgtccagcccggctgaagtccttaatttttatgaacttgtatcagatccaagaagggagacaaactaaaagatggttttttcacactctcggcccatccagctaatgagggttcgatcccttttaacttttagaaaaatgttaaggaataccgtcaccgttttttcttctcatccagcttccaagccattgagcgcccggagctgcttaccgagtgggttagggtaccgccaatgcactgcaccgcccccacacaacttttccttcaacacgccaaggtcttctccacgtacgacaaggatgggttgaatgttggggacttggtcacgactgcacactggaggagggctaagttgattacagagagccagtcagtggatgatttcaatttatccaaggttctttgtcccaacgttcgcaatcctgacttcgagaaggcgctccgggcggacatcattgcctccacagaggatcggtataagaagtacctcttcagaagggaacaagaattggcctacatcaaagaccaagccgctgccgggagggtcctttaaattgaggctggaaaggagcaggtgacctcccggcccaagcttccatttccggtccctaatactggggctcctgatgccagtacctctgaatctggtaagtacctgctaattgttcatcgtgtcccttctgttcaggatgattctggctgtaggccagtagagtttgatgaacgacttcataggtttaggatgccctcttcccgatggggtgaccatgccaagggtttttatttttcaaaccttggtcactttttaggccggtcctggatgggatccggtcctcccgtacctattctcctggatcattctgcctatttatcttccagttgtttcctctcctcggacagctttctaggggacgacgacaccagccttttaatacaacttttgctacggcagaattagatcatcagggtagggttagttttattgtttgttcttgcatgcatgacttcttgataatgttctaacgcctttattttccatgtctttaagcagcgaagccaatggatgagctcctagatgctcttgcccaaacctacagtcccgaaccagtccctcttcaggcgcgagacgctgtagtgaaccccgggaggtcttcttccagcattcacctggaccaagttgtaatgaccgctttagtaatttggattag

SEQ ID NO: 313046 - DNA, 1187 bp, Cannabis indica
caccaaaaatagggtttcaaatcttgatacattttggtggttccctggtgcaacaaataaggtgtagtatgagcctcatcaagtatctcttttctaagctcatcactgcttggaacacaaacccgagccttgtaaagtagcattccattattcgagatcgaaaagtccttagactgacctgccactacctcatacccaattttgaccacctcactgtcttccaattctttctttctaattattttcaacaaatttgactgaagtgtcaggttatgtaatttcccaactatgaactcaattccaggtttaatgatatctaaagctggtgcaatcattatggtattaaagacctgcctgggaccttttttgctcaaagtatctgccactacattcgctttcctgagattatataaaatctcacagtgataatattttactaattccaaccatcgcctctacctcatatttaaatccttctaagtgaaaaaatacttgaggctcttatggtctctgtagatctcacacttctctccatacaaataatgttgccatatttttaaagcaaacacaacaacaacaagttttaagtcatgtgttggataatcctgttcatattccttcagctgaagggaggcataggcgtaaccttgtcggcttgcatcagaacacacctcataccctgtttggatgcatcacaataaacaacaaacttttcttgatctgatggaaaagctaacaccggtgttgtcatcagccggttcttcaactcttgaaaacttatttcacacttgtcggaccatacaaaccgctagttcttcttagtcaaactgtcagtggcattcacatcttagaaaaacctttgaaaaagaatcgataataccttacaaatccgataaaactacaaacttcagtaactgttcttcgcctcagccaatttttaactaagtcaatatttcatggatcgaccataattccatactttctgataatatgccacaagaaggacacttctgacaacccaaattcacactttttaagctttgcataaaacttatgatctttgagtcattacaaaaccattagcaggtgtcgctcatgctgcgcttctatataagagtatacaagaatatcatcgataaagactataaaacaattattgagaaaatccttgaacactctattcatga

SEQ ID NO: 313047 - DNA, 875 bp, Cannabis indica
gtgtgtgagtgtgaattatggcccttgggggtaatttggtcttttggccatttaattggattttaagtaaatggatttttagcattttagaaaccaatttttgccttgttctagccctagccgcacctcccgctttccctctttctctcaaatttttgctttactttggttagttcttgaaattgagttggtggtattgaagcttgagagttaaagcttggttttgtaaaggtttgaggtaattttcatctttgattctgaatttaattgctcgagcttgagattgtttgaatatgcttaagtattgttttgctcttgagtgcatgtttaagaaaatagatgaaattgtgatgcttttgcccttctttttagctagatgggattcaaatttatgttgtgattaatggggaacttggactgagtttttagtgagtgaatttcagttttgaatcttatttttataagctgaaggtgtggcattttcctcaagtttaaaggtgtgtattttaaatgaattttgctcatgtgagaaacttgttattgattgatgtttaagctgaactttgagagttatattaatggatgttaatttatgttttaaactctctgtgttaataagttacgtattggggaatgattttaggttttggttaaagttggggttgaattggatgagttttgggcatgaaaatcgttgctggtttttgaattttctgggttttgaacccaggtgccgcggcatggtatttagcatgccgcggcgcgcccttttctttcaggacagatcctttttgcaaacttcaaatagccataactttgtgattcggacaccgatttggaagttctttataccgttggaaagctcttttcgagct

SEQ ID NO: 313048 - DNA, 1648 bp, Cannabis indica
acataagatgagtagctcctgaatcaaatataacataataagaataactctttttgcaaaactgacgtgtcaccactgacggactaccatcagcatcagcctgagtcattgtcaatagacgccccaggctttggttagtgttcttctttggctcttctttcttagcatgtgaaaaatctctgatgaagtggcccacaaagccatactgaaagcaggtcttggccaggcactcaccctgatggtgtttcttgcatttgggacactccacatacaatctaaatgtggacccacacaatgacgaccacctctattcctcgaaactttctattattccccaatgttctaaaagtttcagccttccgtttgtgatcagggttatcactgtcggtcctcttactgatattaccacccaccgtaggattcgatgccgtggcgacatcctttgtagcctactctttcatcacatgttgctctgcctcttcagctatcaaggctaattcgaccactttcttgtataaagtgccgtgagcggtggtaattttcaagtcctgacttattgttgcattcagttccataacatacttttgttttcgagtgaagtctgttggtactagatcataagcgaacataaatagccgatcacattccaaggtatattcggccacggtcattttcccttaagttaatttcacaaagtcttccctatgtgaagtccttacagcgatgttataaatttttttctcaaatagactcttaagctcttcccaagacatagcactaacgtctcgagtctgtcccataatttcccactaaatgcaggcatgatcttgtaacataaatgcaacaaaatttactcgttctgatcctgtcacccccatattatcttggatgcgggtgatagtgctcatccactagtcgaccttaataatgtcagtacctttcaaaaacgttagacgttccagcttcacaaagcgctcaaacacagaatcttgatgtggcagtataaaccctaagttacccaccactggcacaggaggtggtgataacacttgttctgcaggagctgccagtgctgattgcctcaaccgatgcaattcattttcttaacgaagtatgatacttcacatttctaaaacatttgctgccaatcggtaggtggattagcattaccaacccatgcattatccctagattccggagaggcgcaggcgatgctagtggatttgtttggtcaacacaagggtctacatgcttgccctgaggtcttgatgattctggagggtccattttcacaaataatcatataatcaacaaccccaacgagtctggcaccaatacaacacttacacacttgttgcctcaagccctaactcaaccattttatttcttattaaataaacatttaccaattaatacacaaatcatgactttcatatcacatatatactagatgctcagatactacaccaaaacgagtaaaactttccaaaacttctcattttggaagctttctttgtttttccatcttgtacacttcatattaatcatgtttaagctgatgcaaaaagaatatttcaaaaaggatgcataaaactactttttggtacatatgttgtttttgcttaaatttttgaaaaacttaccaaaa

SEQ ID NO: 313049 - DNA, 1694 bp, Cannabis indica
cccagcctgtagtgccacaagttaggtttatctaggaaagtccgattgcacaagatggtattgcatactgcataacactgatctacaattcggtttcctgttaagacaacacacccattagatgaaactaagcactgtgttttagaaaaacttacagagaagttgttgacacacagttgaccaatgctgatgaggttggctttgagcccttttacatacaggacatctattaactgagccactccattcaggtttacatcaacaatctgccctttctttccatcaccaaatgtcacggccccctccttttcctctttgcaattaactagaaattttttatttccaatcatgtggcgagaacatccactgtcaaaataacactgcccctcaacaaaggcagagagagacaacttagccaccaatccaacatttggacttgggttagattttattttgcattctcgatgaggtttgcgcccttgaggtttgtttttttgaggaaaactattcgatcgattaatcattgctttcaagtagttctgcagtttatagcacttggggcgaatgtgccctttcttgttgcaaaaatgacatgttggaatgaatttttcattttgtggtagatttcctacaccaatccttcttccttcaaactttagtttagtgggtccagatggaacttgtctcttctcagagggatacgattcgctaattgtggttgggatgtttggtaacccatcttccttttgtcagatcaacagtttaggagagtgaattctcaacagacagatcattgccctgtttatacaacatcttataacctaaggaggttcgatcaccataaggcttctgaagttgtaaggtttgattgatagcagttgtgcttggggaaatgaattgaagtgcttgcttagttctaatcagattagcagtgagtttataaatataattctccttctcatcaagaagtctgttgaggtttttaaccgtgtcctctaactttcctttttcagtctccacttgctctaaggagctctttagacctctcatctgtttagtcatgtactcccattaggcaaacatttcgtcataggcattttgtctacctacgctgtcagcttctgatgtagtggagactgcatcatattcagactcaactgagtgacagctttgggccatgaaagctaatgcttgcttatcgtcatccgtgctttcactggtagtggagttcttttcttcttcactatcactccatgtcgctgcaagggccttcttctttttgagagtgtttgcgcactcggcctggatgtggccatatccatcacactctctacacttgattcctcgattcttttgatcaacagatggttgtccttgtttgaagtttccacctttgttcttcgtgagagcattttctttatcagtaggaaaatttgtcttgtagttcttttttaagaacttggcatagtttctcgttaacagggcaaaagtctcgtcagtaattccattcaattcttctagtgttgatttcttattttcttgatgaatgagagctatactcacatcagatttatccttgaccgcatccttctgtttctttattttcttccatctggacagtgacagctcataattctgcaaggacccaatgagctcatcaagatcaagttcctcaatgtttctcatttcttcaa

SEQ ID NO: 313050 - DNA, 508 bp, Cannabis indica
gtgtattgtggtagggttagaatgtttacgtttgatatatatggtagggcttttgtggtgtaaatgtgcttcgtcctttctaattttaattaaatctttattgcgtcagtttgtaattgacgctgcattacgtttgctataaatcgacgcaaatactctaaacgtcagttttaagctgacacaaaagtagtgttggttctaaaccaacataaaatttttatgtgatatttttatgtcagttttaggtattaactgacgtgttgaccgatgtaaatagcccaatttgtcgtgttccaattgattataatgacaaattttttgggtatggtgaatagagaagtcgataggatttgggaagagagaaaaagaagagaataggattatgaggggatattttggagtttagacaaaattgtgatcatttttaagaggaggagttctatttgcactgcacaaaatgattagtacgtcccaatatttaaaaaaattaagtttaaaataattttta

SEQ ID NO: 313051 - DNA, 675 bp, Cannabis indica
caatgcaagatttgaaaaaatttgacaatttttaatcaatttttttatgcattttaaattttgttccattccatttttattctaattttcatttttattcttattcttatatttttattctttccaaccaaacgcgaagattataatttgtcagtatacaattaattaatattaggatcatgctatacatcatgaaaactacctattatgaatgacatggccgcatgtcataattttttattttattaatttatgtttcgctttttaaaattattttttaataaatatattgccacattaatcagatactaattcataacaatttgtgaagacatgtagcattgctctcaatattatatatgcaaagttgacactctttcaataactaattattaattaattaatttgtttataaaatatatgtattatatatgaattacatttcaatctattcatatagtatacatcaattcatgtaccattcatttttgattctttgagcatcatgtataaataatacaaatatatatggatatgattttgttccgtgatgtactttcacggaatgtattatgtggtatattagatgggtctcagggtacattaaatgagtgttaggtacgtttctactttttaaccctaattacccctagatcaatctcagccgtcagatca

SEQ ID NO: 313052 - DNA, 958 bp, Cannabis indica
tatataaaaattaatttatatgtattttcatattatatatatcttggtgatcctcttgtacaaaagggatatgctctaacttaaaagtactgtattaagttgtaaagtattgagttcttattacaagtgtgagtggagagatttaagaagaagacaagacaagaggagtagtgttatattattgttacttaagtgacacattaatgttggaacatggccaagggtatcttgtgaggaaagatgtcattatttggtatatatattatagtgtatatttccaagtgtggttgctatcatccagttgaaaagtgatcaatatgtataaatacgtagatatttatatactagtaaatctataaagaggtagggagagaaaaagagtgaccaaaatatggattattcatagaaattaaggtgaaggatgtatgatgtaatgtcttaacatataataattcattttgtattaaagaaaaaaaaaagataaatattttatttaccaaaaacaatattgtaattaattgactagatgcaaaggatgatatatagagagaaatattaaatcatgagtgtcatggtctaaataaaatatatttattagtagaatttaatattaagttttatttgttttactttaataaatattataaaaattattaactagttaaaaagttaatacttcatagtagtactaagcaccatgtgtgtgtctcatgcattccttatatatatagagaaatattaaaaggcaccaatagtgactaacaccctcttatgtatcaatattactattagtccaattaaatacaggtcttatatatatagtttaatgtaataatttttaaagagtatcgatagccaatcactagtgcccaatagcaatacttatatatagacaggcccggcccaggacataagcgggctaggcctgtgcttgggcccacccagcccaggggcccaa

SEQ ID NO: 313053 - DNA, 2639 bp, Cannabis indica
attcatattttattagttgccgaaaacctcggtcaacacttaccttgtataccaatttgcatgaaatgagttttactttcttcagctttggtatcagctcccaagtttgatttttctctaaagcaattatctcttctttcatagcttcaagccacttggaatactagtatgtctcctcatatgtaacgccctgatacttaggcacactatagtaattttaaaattagtgtgccacctttgctaatcaaagagttttcctcaaaaattgtgccaaattaattttttgttttaaactattaaactctctatatatatttacataactcgagatcccgtatttaaacttttacgatcattatcaaaatacttttacagacatgtcacacaacgactacaaaatatagcccgtcatctcgagaccgaacactccaggtcacgtcgtctcggcatgtacaatcatcctccgagctcagaactcactcctattcaacttttgcctttcctttacctacacacagaaataatatcagtgagccgacaaactcagtaagaaaaacacataatataatacccacttgcatctaggtgcccatacacctatccacaaggcttatcagataaggaagaacgttctttaataaggtacgaccactgtaccacatgcactatgtaccgctactgtatgagtattggtagggtttgtcccgtatctcgagtacccctaagtgttataccacatacactctatatccatccgtactagtgttggtaacatcgtattgtactctttaaacattgtacaatgtaccaacgcactcagtactgttatcgtactagtgttggtagtgtacgaatcataaataacatgcatatatcacacatacatacacatattcacatataaaatatattctatactagtcttatctcgtttctaaattcaagtgtgctggctgacctgaacgaaaaatcacgtgctagataaatgtcatgtgtcacatttacgcaaatgggtaaataacacgccaaaacctaatctaggaacctaaactcacaactacaagtttcgctatcaataatccagggtggttgctgcgtggttccatcagacgaaggtttcaatcaaacgatggttgcagggtagttggtcgaaggttgcatcagacaaaggtttcaatcagacgaaagtttcgaggtagttgctgggtggttggtcgaaggttgcatcagacaaaataactgttagcaaaatgtttatgcaactgttgtgaaacattaaaaattagaacaatgtttccacgtacgtataactctatctacatgtctctttatgatttaatatgaacaaattcactattagaaatttagaaaacaacaaaaatacaccaggataaatattttactatagtattgacgtaaatttttttttggattatacttgagttggattgtttgggaactctagttcaactttttgagatatgcctttcatggatttaaaaattgaagtcagtaaattagttttatgcaaattaaattggatttccggttaaattttagtttcgtagtagtttttctacactttttttatgaattcgaaacagcctttgttttgattgattctggttgccttctcaggtgaagtcaccggaattaatggtggttctctttctgattgaattttcgtttcggttgcgttgggttactacgtggttgcgtgatagttgcctaggaagcatgaatcttgggttgaaggtgtatgtaagaggtatttgtgtaatttttttttatttggactgtatattagtatttttgtaatattattactttttctggttgaaactaaaaaagtccttaatttactttattttacaaaacaatgatcctaattttcaattacaataaactatcagtagcgaaattagccacaaatattagtggggattttttttttttggcaaaattggacattaataatgtttttttaattggagaaaaagaaatataaactttatagcgacaaaaataaatatatgataataatcaaataaatataaaattatgtgaagataaaaatgagaaatataaatttataagaaaaaaaaatgtaatgacaaaactaaaaaataaaattatagtctagagacaaaaacaaaagtaaataaaaaatttcatacaaaagtaaatttattaaaagttgagtagagtcatgtgctcctacataactccacatgactccatttccctctacgtgtggcctcggtgacaagtagtcattgatgacatgtgtaaagcccgggggaggaaatacccttgccttttctgtttaattttgttgttaattgaagacttggggtgcgtttgggatagcttttaagaaagctagaagcactttttaaaaaaactatcattcaaaatgtatttggtaaaattagaaaactagcttttttaagaatttaagaaaaaatttcagctttttgcaaaagttggccaacaccaactttgggaaattagcttgtacgggaagctattttattggtttaatgaatatttcacttgacaaaattaccctcattctaattataaaattccctttttaccattttattttaaaattctcttctccccaatatatcttt

SEQ ID NO: 313054 - DNA, 1961 bp, Cannabis indica
aggtccttagacagacccttcaccagagttagcaccttcatcatcaaattctcgccagagacctcattcgattttacaggcagaggggcaccaagccataaagctctcgacaaaggacactgcataaataaatggtcagccgactcgcaacaaaagccacacaacacacactcctgattactctcccctgcatatttatctttagtcggcagggcccctacacacaatctccacaagaaaatactctgtctcggatgcatcttcccatcccatgtcaatctccaaatctcattgttgctattgaatcttccctgctgctcaaaccaataagccccttttacactaaactttccatcccgagcctccttccaaattaaagtatctctccccaaccgattagacaaagaaattgaaagtattcttcctccctcctctcgaccaaacaagtacaaaacgtactcctttcgccattccaagggtgatcctcgaaggaggtcagctacagtccttagatttggcgcccggacacggacttcttccatgacagtcctaaattcaacatagtccatcacggtatccacggttgataccaaatatccacctcctgaccgttagccaacatcatgcaagctccttctctaaccacttgccgcacctcaagaatatctttccaaaccattgaatccgactctcttggctgcacactccaaaaggaaagccaagagcaatacttctcccttaagaccttaacccatggtttatcctcattgcacgccacttcccaagccaacttcgccactaacgccttattcatgtctccgaacctcctaaatcccagcccccctctctacttcggctggcacaaggtatcccaacatttagttgcaaggaaatggtctttttgagatacaaattgatgatgaagtgctaaaatatagttcattttgtaaaaaaattacttcaatatgttatgctaagagttgtgtgaaatcatgtgccaaatttagttgggttaacaaatcatgtaattgttgacatgtttttttgacacatttatgatcaatacatacacaacatgattattatattaattatgttaagacccctaacacgattacgctcacatttttaacatatgatacaacacgataataagcagggtcggttctaagatatatggggtctaaggcgaaatcaaagtttggggcccctatgtatataatttaactattataaaaatgatagttttagtgcttagtttaatggtaaagcttttaaaaattcttaagagctccaaggttgaatcccttataactacagattaaatattttaaaaaaaattaaaatgtaaaggttaggaattgatctcattacctcttagattaaagtaaaacattttaccattacaccaaacaaattttattatatctacttcttatttaatattttattagcaatattaatatatttttttacaatttcggagccctgagcgttcgggggcccgaggtcacgcctagcctgcctacactcatgggtcagccctgataatatgtttaatatatgtgtcatgttgacacaaatacgaaacatgtttaaccataacaataaaaaaatgctttttacgactccatttcgtgtcttacagacaattagtttaagacactaaggtagtgtttggtttacatgaatgagtgtaggaatgggattgctattcctaaagaaaaatcattcaagtgtttggtttatttattgtcaatggaaaactcattccataggaattgtaattcatgaaaactaaggaattacttttcctaaataaaatgacttgaaaagctattccataccaaccaaaaattatttttccttatctaccattctcatgaataaatgattaaagttataattatatgagtaatatttttttttaaattatatatctacaacatttaatattacaa

SEQ ID NO: 313055 - DNA, 1524 bp, Cannabis indica
gtcatcccgttgaatcttgtgagctgtgagccactaggcgacaggtccctgtctgtgagccctatggtcgtgaaggcttctttgaataatagatttacagagctctcgttgtctactaatattctagccacaaccttattggcgataggaatttctatgactagagaatcatggtgaaggaaacgcactagtttctcatcctcttccgtaaaagtaataggttggtccataagtctgggtctttgtgctgggagttgagtgacctcccacacttcatcgtgttttagggctccaacgtaatgttttaactcattcctggtggttcctccaatatgaggcccattagaaatcatggccactctcccattctgctggggtggtaatccatgcgcctactgaggaaggggccctctgggaggtacttggccttcgggtataccccctgttcctccctgaggtaatgggcctcctgctggatctgtgtttaggtgcggtaacctatttttgatccattcatacaagtgacctaatcggtttaggttctcgatttcgtctttcaagtttttgcactcatttgtggtgtggtcgatgtcattgtgatattcacatctcttgttgggatcttttcgggagctatccctgtacaagggtggaggccttcagtaatgtgtattttttcgggtggcaaagtatatacgctcttgagtatccataagcttcatgtattatgtgtacaggggggtatacccccttcactgtcgcttgtcctcagtttgggtactaccctttgagaatctcttacttcgggagctttggagaactcctgtcttactgttggctggtgctaattgtgacagagtttgggtacttaggccagcggtattactcatgggcgctccaaaatcgtgacaatacgggagctaaagcgagactttgattgtatccttgggtggcggagaattgtatcccgcttgtttggggagtggcaggagatggagctcctggaagttgtgctcctgtcacatatttcgacaccccattcgggtaaaaccctccataagccactatttgggcttcttccaaaataatgtatttttggactctttagaaaaacctggaggttagctgctccctcttgttgcagctcgttcagtaaaagggttcccgtacggattccagcctgaagaagggctagctgctgtccgtcatccaccttcttagtctttgaggcctcctttttgaatgtttttatgaagttttttaggatttctgagggcagttgttttatattagtcagggtgctgaccttgaggttgatctttcttgtcgcgacacattgtctctggaaagtaacatgtaacttgttccaccagtccactgatcctggctccaactttttgaaccattcttcaacagattcgcccaacgttagtggaaagcataaacattttgcgttaattttgaccctcatgacggtcatcaccctgttaaatcgggaaagatggtcactggggtccgaatctc

SEQ ID NO: 313056 - DNA, 829 bp, Cannabis indica
gacagttagacaaaactgcttggagaaaaaacaagttcaatttaaatggattatcttccacaaattccacattaatccatataaactgaaccttaacaaaactagattacacttgggggagtgatcctgttgcaatagacaggaccaatgttgagcaaattcaaacaatgttagaatttgctcattggcaacaccttggttcctgcatcagcagggttctcatcacttgggcttatggttcatattgaatgaaaactatttttatcaactctgatattgaccataaaaatcaacatagacgactcgttcacgcgagacaaacatttagcacaatgtgtctctagataaacgtcaagcggaacttccagatgagtagttaatgagcatccagatatccaactctgcatcatagtaatttattattatatcccacaatataaggattttattcctagaatcatgtataagaatcatatatttcgaatatggaaataaagtaattgtcaatcaagcatctatgtgtttttattatccacaaaggtatgacacatttttaaaattatcaacatgacgtgacatccgcgtcagcagaatactaatgcctcatgggttaggcttcactaaatgagcccgaagtcaatgtattatctttattcaccctatacatgggcaaggtttacaaactagaaccctaactttataaatataagaaaatccattcatgcaaagggagagaatctcattccttgagcgttcagtcaaattctaggatttatatacttgacaaaatacttgtgtaaatcatataggttttgttgggttttatgcc

SEQ ID NO: 313057 - DNA, 1253 bp, Cannabis indica
tgcttagaatcagttcaagctcacgatgacgccgttaacgcttagtaacggcgtttcgacggtttggtattcacaggctcagctgacggaaccgttaaagtgtggcggagagaatatcaaggtaaaggaacgaaacacttcttttctcaaacgctgttaaaacaagagtgtgccgttacggctttaacggttaatcaagaagcgacgttttatttactgtgggtcatcagacggagccgttaactattgggagagagataagtctttatcacacggcggcgttttgaggggtcataagttggctgtgctgtgtttggctacggctggaagcttggtgtttagtggctcggctgatatgggtatttgtgtttggaaaagggttaaaggtggggaccacatttgtttgtctgttttaactggtcatatgggaccagtaaagtgtttggctgtcgagaaagagagggaaaataataataataataatacggctgaggagggtggaggagagaggcggtggattgtttacagtggtagtttggataagtcggtgaagatgtggagagcttcggaacaagcacaaccgttgggtctaaatcagcattgttcttctggtgatgggaatgataaaacgccgtcgtttggcatggctcctagttttgctactcttccaaggaacacgagttccagaagatattaatttagataattaattaattatggatatttcatcaaaagaaaaaaaatcttttttgatattgttataattattattgtatttaatgggtgaagtgaataggaattcgattctgtttctattttttgttatggtgtgtgaaatgtaagtgaatgttaggccaatgttgttgtttggaatatgtagtaattccctaatttaacaaatattttatcattattatttatttttaaagattaaagaagacctcgaatcaaagtaaatggtgaaagaatgtttggggaagatggaattttctatttttgaattgtttgaattgaaagatataaatatcaataaaaacacaagaacttccctcatacaatatacatgtatgtatacctttcaaaaatatatataattaattgggtaaataccattttggaccctctgttttacaaaagttaccaattggaccctgtgttttgtaaatgacaaaatggaccctgtattttctaaaatagtacaaataggaccctgaattgtttttttgtcaaaataaagtttaattataatccga

SEQ ID NO: 313058 - DNA, 775 bp, Cannabis indica
gcctctaaaggggttttgtagtagtgttagctcaattcatcatcataaaagagctctcatcatgatgatcatatgagcgttttgtatatatttttcaaacccaagtatgattacatatataagagtttcatgtgagctaagattctttctctttgaaagtaacacttcacaaaatttggaccgaatctgctttcatttcatgcagtattgtcacaatcacataagaaaagaagaacaaaaatttgcaagcgtacttggaaacttttgttaacaatcttagtctatatgcatgcacaagaaaaaaaagagactatattgtttgttatatatctatacaagaaatgtcaaagtacttagaatatgcaaaagtaaagaccttatgggctaactaggtagtcctagctattttcttgtaatttcttttgaattattatctttgaaaattggatcgatctcaaaaacgacattaaaatacctaaactatgatgtgtgtagtgtacgtacgtacgtgcatgcctagttccacggttgaaactcgaaaacgacaacgtatatgtatacaaagtctgctttggattttctttttaaatattaaaataaacagttattattaaaattttatcttcgatacaaaaaaaaatttatttttgatcacaataaaatttttgactagtaaaaaaattatgactaattataaattattattagtattattaatataatgttgtgactaaaggtttatagttaaaagtataagtcacaaaaattataattt

SEQ ID NO: 313059 - DNA, 1795 bp, Cannabis indica
tttagtaccataaaatcaacaatcacttgtcagtaaagtagagctcaattgtatatgttgagatttgtaatcagtgaacataatattagcaaataactaaacacaaattactaagagtccccttattgacaaaaaatatataacatcttccttctgttgaatgctactctatcatttgataggctttcaaagctaagatcagtcatgtctaactcaatgaacttaattgcatacactgtataatctctcctgttgtaagaaatttttaaaatcaatgatacatatctgtttgctataaatatcaactaataaggcatgtatgaacagacttataaatatacttacgttgaattttgtagaacatgaagtaatcaagtaatcgtttatgtgttcacggtttgtgaaggtattgtgctatctcttgaaattgtaaagattcataaagcatattcggaattatcatctgaagtggcaactttaaatcatccatttcttttgatgtggtcgctccaatactgcactcatatacaatcaactctagtgtttgtatgtcaatatgcaaaacaacttgatgagggtcattatatggtggctctaagtaatgtgaacgctttggtaccctctttggattttctcgcacaacttgatgaggttcaactttaacatcatcctgtagaggttgctctttataataaagagtagactgctcttcaacatgagtgtgttgcctttcaaaatggggagaatattcctcttcaacatgagtatattgcctttcaaaatggggagaatgttgctttcaacatgagtatattgccttttagaatagggagaatgttccttttcaacatgagtatgttgcctttcaaaatggagagattgttgcccttcaacatgactatacaagtatatacaatgaaaaggtgaaagatttagtataatgaaaagggtcagtatatggtggctccaagtagtgtgaacgctttggtaccctctttggatttgtttgcaccacttgatgaggttcaccttcaacatcatcttgtagaggttgctcttcataataaggagtagattgcttttcaacatgagtttgtggcctttcaaaatgggaagaatgttcctctttaacatgagtatgttaccttttagaatggggagaatgttcctcttcaacatgagtatgttgcctttcagaatggggagattgttgccctcaacatgaatattctattgttgcagcgataaaattatctttgaaggcaacattaaaatttttgatcccatcaataaaaattgttgatctatgtaagccttgacaatgcaccagaccactttttcaccttatctcgcttctggtccatacattgtggatggggtggacatatggatgggagaataacctcgggtgaccactagaatatcagctcatgtggcttcactcataggttgaacatgaattgtgttaccaacttctgtagcttgaccagaggatttctcttcatttgtaacagtgtgttgttctttatttctaacattgacattaccacaagtctcacgtctataagtatcatcgatccaattaattgtgcctatagactccaacacagctgtgaatatattaatcaagttgtctgactttgattcagagatacaaatgaagctgtaaagaccgcttagtttaatttggaaattagcagttaatcacgtttaattatgaaattatttatagctattgaaataatttattatactgttattattgaattcagagatgcatttttatgtcatgtag

SEQ ID NO: 313060 - DNA, 1251 bp, Cannabis indica
ttcgtaaaaaccaacgccataggatctctatgtcattggttaatacttcccccttatggtgtccggttggaacaacatcggtagtgaattttgccaaaatagatattgaaagcccttaaaaactgcatttaaagtccaattttctactagtgataatatatatgatatacacataatatatcatatatacaaatatatatgaatcactatttctttatatttaatctcacaaatatatttatatatatattaaatgccaacatacaatatatataactcacatatacatattatataatatatatctcttacaatatatacatatactaacatgttataaactcaattataatattatatatcattatatataataatacacatatatataaactcaaaaaatctctaccaaaatatcatatctcatcgtatgaacatgtaaacatattacttttaattaaaatactttaacacaaataaacccattattcttacccatgaatagctcaaatctcttacacaatgttcttcttctcatgatcttgattcatggataacttttttgattgtatgaccctccatggtaagatatattttaggaaaaagataatatgccattaaaataacttttagattgttagaaattttctaattacaagagagaataggaagattacaattaaaataatcaaaatataaataaaagtactacattaagattacaagaaacttagagaagaaaaaaaagaataacactcaataagttgactaaggctcaacgacctttgtcctaaaagtcatttctttcctcacatggacagttagggaaactttagaagtattcttaaggatttataagccttatatgctcaaccaagtgtctatgcatgaacatatcctcacaaggtcttaaccacaaccagtagttttacctacatgtatcataggtgaactaatagtgactatttatacagttttactcccatataaatataaagtaccaccataaagccattagatgttaccaataataaactagacgtttattgtatgaattgaattatttggaggagtttttgggctgttagaaagactcccaaagattcaaaaaatgtatgcacttgtatgctgaaaaaactataactagttactagttacaattttctcacctttatccaattcttctccaaagtgttcttaactactcctatttgattttgaaccatttatacaccttataaatgaataaat

SEQ ID NO: 313061 - DNA, 1722 bp, Cannabis indica
agccatttgttataacctctcattattgatttcatgtgaatcatggatgccaaaatatagtgttcagacaattaaaagaaataagtatgaatgaaatagaatacatagaaaattgggaaagaatcaaatcaaattaaaactataaacagatatcaaaaaatatccatcaataccctaataactatttagctactcttgttcatcgtaataattcgacacatatcaactaagaacataaaaagaaagtagagaagaataaattattaaaaaaatccattaacaagccttctcgatcattttttttcttctttaactcgtactctctaattgcttgatcaaaagtataaaaattcactccttattatagccccaaaaagataaaaagataaaaaaaaatatatacttttttgaattcaaggggcaagcctcaacactaggccctttgtgtcgcggtccgtgttgtggcatttatatttcctttgatatttctggcacccgggccttgacactagctgggagtgtcgaggcattaaacagcaaaaatgaggcagcaagtttataacaaatctctacctcaacactaagctccagtgttaaggcgcgcccatatcttggtcaaaaccgatcttctttgctagattttggcttttaatgccctgacatggaactacattgttaaggggctactccattatttttaatttcttcgccttaagagctccaaatgcaccaaaacttttgattgtttttttctcgaatgaatttcatggtgcttttgctccgaaagttaatttatttgacttttttctcatatttttttttccaatatttctccattttttttcaatactaaacctgcaaaatatcaactactacaagcgtaaaactacacaaaacaagagtaaaactatttaaaaacacactaaaattaacttaaaaatattattcagatcaacaagcacatactttgaggataaggaatttttatatgatgctcaaggcttataggcggtgtagcaacacgttgttgatctttgatctcaatctggcaaccttagcaggaggaaagaacttggagagaaatttcagggccaattcctcttaagtgttgataaagttaggtggcaaatacaccaaccaactcttggctcattcccttaaggagaatagaaacaaccttaatcgaattgcatcaccactaaccccattcatcttaaatgtctggcacaactcctcaaaatttgcaagatgaatattgggatcttttgatggcagtcccccaatctagactgtggattgaaacatctgtagtatggctggcttgatttcaatgttgttagcttcaatgacaggtggccttatacatggtctagcctctgtcaggtttggtgagacataatccctcaagctacggtcaggtgaattaaaactattagcctggtcgtctacgacacctctattattttcgttattggtcatctctacttcttgttcaaccacttccacgactctttccaatcttttctttcttctgtttagtctacaagtcttctctattttaggatcaataggtaattttgtggttggtccttgacctcacataaactagttgttcttgagaaaagagaaaaattgacaacaatagatttagtacaaaaattgaaaagaaaaaaaaccaaattagaacaaaatttaatttttattaatattaactaacaatcc

SEQ ID NO: 313062 - DNA, 861 bp, Cannabis indica
aaaaaatggctacgtgtctcgagaatatccttaaattaaactaatgaacctactaaaaagctcatcatgttagattaattaaagcaagtgtttaattaggtagttaaacatcgtcatggcaataccaacacatcacacacatttaaaaaaaatgtgatctgaatattcagtttgcctaaaattaccaaaaaatacatgtcctttactccatttttgtaattgtatgcaagtgcttttccacctcagaacgcaataatatatatttatatattttaattaattaaacagataaatggcctcatcattttttttcttcttcattttgtgtagtgatggggtttttatcaactttgtactttgtagttgtacattgcatattttgatatatagtagtggtccaaccgtccaagcaatttttcctttaagtgcctttcttctaaatatatttgacagttggtgaatgatcatttggaatcgaaccaacggttgtgattatagccaatcaaactatactattaccaattcctcccctagaaaaaaaggaaatatgacatgcttaaatgtaaagtgaggaaactattttccaccttaactcaattaagtggtaagaagatctcagttcaaattatgtgtcccatttgccaaaaaagtgaggaaactattttccatgcgggcagaggcttttggctagtattaggtcaattattgctgctaattttagcagctagtttgattaaattttgtaaaggtacagtaagagcaagtgtggggaggaagttatgttgtgctagggattatggaaggctcgaaacgagttggtttgaaaccaaaagtatgctacggtagatggtattcttatct

SEQ ID NO: 313063 - DNA, 1221 bp, Cannabis indica
aatcgtataacaacttacatagaaacaactttagaaatccaaaccgtacataaatgtaaaaaaaaagttaaaaaatagtatatgagataatttctcaaatcttttctcatcttttaatacaatcaaagttataggtgaaaattaatggatttctgcacaaatatatattatgtatggacccctaataataatgaggggacagtagataagatatgataatagaagatctttgtatcataaatatcaatgtcttgtttagataataaaacagagaaaataaatttacctcatttattaagagtatacctaatcaaagtatttatagctataaatagaatgtttatagttgtagaactcatcatcatacacatataacaatttacacaatattatatagatatatatggagatgaagatgaagatgaagatgactagcataataagctttattgtagttgttgctcttgttcctaatcttccttctactacttttgcaatttcaggtgggagagctttgaataatatcattcaacttcaatcaaaaatcaacggtcaagatagaaagatggtgactattatcgaacccgcttctttgaaaacaatattgcttgaaagctcgtcacaaaagaattgtgggggtgaatattgttcacctaatagtccttgcgaacctggatgttattgtgttggatcggttgattctggaaattgcattgcccttttctaaaatagaactacctaatttaattatctatcgattgacacacatatatatatatatatactaataatgtcaatcgtaaatatgtaagtgtaatgaattataataatgttatgcgtacttacaaatatgcatgtgtgggcatgtgtgtttgtttaagtacgttacatcttatatggatgtaactatatagcattatgtattatttattattaataaattagtatatgctgtattatattgtgttgtgtacaatttactaattaatatatatttatatttgggagctaatatataataggtattgtaatttttatctatttataggtataataatttatagttattgatttaatcaaatgacttaaattaactcttagaaattacgccataattaatattcgttatttatacttaattttaaatattaatttagatccaactaacaatactccaagctaactctaaacctataattttcttacttatttaccttataa

SEQ ID NO: 313064 - DNA, 991 bp, Cannabis indica
gggttcttggtctcggtagcaaggcgcagcgagatgttgtagcactcgcgccctctttctgctccctttgagtgtgcaactcccttaagggtcggaaacttcacagccagatgataagctgaggttactatctttaatcggttgagggagggtcatccaatcactacattgaatgcagccagaaaatccaccaaaaaaaatgttgccatcatcgtggcgtgtttggggctctctccaacagtgaatgccaactctatcattctcagcggtcggaccgagtctccggtaaacccatagattggtgttgcacacggtttcaagtccttgagacccagacacattttcttgaaggttgcaaagtagaggatatctaaggagctcccattgtccaccaacgtttgatgtacccgtgtgtaggcaatctggatcacgataaacaatgggtcattgtgacggatgtgcactctctgcgcatcttcctctgttaatgttatcgagcctctctctcccctagaactttttggcggcctttgttccagactccagacttggggctcttgtctcgcctcacgttcatacctctctcgtcccttgcaggtattgcccccaactcctagtcctccgatgacagtgcagatgtctcctagcacttctagtgcctcttcttgatcatctcactgccgtgacttgtttggcctttgattctccttccaatactctcctagatacccacgatgtattggcccttcaatttcgaccttaaggtttttgcactcttctgtgaggtgtcccacatctttgtggaagcaccagcacttgttagggtctctcctaactcttttcctcttcaagggtggcagtctcttgaagggaacttgatgttcattgctcaggtagatatgtcctcttgaacaggttagctctgtgtagtgggtgttggaaatattttactaggatcttagatttaataacaagtatgtaatttaacatc

SEQ ID NO: 313065 - DNA, 1493 bp, Cannabis indica
agaatttgagttattacttgtacactactaactctttgttctccgaaattgctctaactcctcaccttctcttgctcgagttcatcgatctattatattacccttgtgaaaataaaaatgagaaacaaaattactatcaaaatggaatgaaatagattagttctaaacttgtaagccacataaatatgttacctgaatttaatggtcacatttgagaaatagacgagatgggatgtggcggactttgtagaaatcctctcctccttcctccaccctttctttgaattctcttgacacatagacaatcttcatttcctcaagcgtagtaatgtatctcaatccatcaggcaattttctcaattttaaacaatactcaacgcttaaaaagagaagactagataaggccccttcctccaccttccactcttctaagtttggtagatgtctaataatcagtgattcaagttgagggaaacctccttttgagcacatcatctcattcccgacaaagcaattataacgaaaagaaagaactctcaaactcgatagcttttctaggatttgcattggatcatcattaagtctagtcccctccaattgtaacttgataaggtttggagagaattggctgtcttctggtaattttacaatccgaccctgcattttaagcttatagattcgagggtagcttaatatcaaaggaacaatatctatcccatcatccttatagtaatatagttttaaatgtcgaagacaatcaaatgtgacacttggggaatcgtggtaaattctctttaaatcttcacccagatgaattgctaatttcttgagttttttcaactttagaagatcattataatcaaagcactcagtcgaaacacccgtcaatgtttgtaaatttctaatgttaggtgacctcaagctcgttttcaaccattcaaattctcctatgccaacatagacaaagtgtaaatgtctaagttgttctaacttccaaattacacttggtactactttagacctacccaatgccaactttaatgtctgcaagcatctcaaattgccaattgaagatggaatctttgtaatactaacacctctaatactaagcaaccttaggtgaataagctttccgatctctttaggcaatttcacttccttataccaagaaaacttagatttaaaactcttagcatgaaaaaactattgaacacacgtctcattacttgtttcttactacttcttaaatctatagtaacacacctaagagagctatttttactatcaacaaaactagaaaaatcatcaacgggatcaaaataaatagcaactctccttacaacagtagatatagatcttagtggctcatcctcaaccttattcctcaaatcaatgaattgtagaaagttctcatcttcggctttagacacacacaaatctcgcataagatcatgaatatgaaatgttttcattcttcctctcaaactccaatt

SEQ ID NO: 313066 - DNA, 601 bp, Cannabis indica
ttttaaattttaaaactaaccaaaatagattacactcctctctctcactccaatctcttctctctatgcgatcaaactctgtaaacaccaatgaatctcttctccaccaatcaatctccacaaatcaatctcagaacaccaaacaatctcatctccaccaaaatttagcaaatataatatccatctccggcagcaataattgaagacctaaaaaagaaaaatacagatcaaaacacaataaaaaaaaaaagattcaacacaagtaaagagattcacatcattctacctacacatattaaaatgttagatagtatgtaaataaatcatcatcattctgtgattatatatatatatatgcattatgcataaattcataacaactcattttgttatttatcaaaaacatgtatcattatcatcattctataaagaaaaaaaatcatgtatatataagtcatcgttaatctataatttttaatatatatatatttatatatatataatgtaggtgcacttttaatggatattaactatttatgagtaatattgtgaaaatttaaatttttatacttagtttttctactaggtgattgttacgtgc

SEQ ID NO: 313067 - DNA, 936 bp, Cannabis indica
ataattaaatagtatttatttttattttttttgagaaatatatagtatttatttaaaatgctattctttcaattccaagaagcaacttctttattaggaggctcccctatagatatttaatcaccctcaaacagggatagcgggtgggtacagaaacagaaagactaatccaatcttttaatttaataagtaccaatagaatgtgatttcgaataataagacttaggatagtttgttaatcttgtgatggagtgttattaccccaaaattctctttattgatcaatggtactatgcatgagtactttgcttcaaaagagatctcaaataagaagattcaatatctccattattatttgtgtgggaaatgaaatacctttcaaaattgttagctaaggtgtcccaaatgaaagagttcaaacactaccctaaatgtgtagatttaaagcttaaccatctctgacctcttactcttctcaagtggtgatactcaatcctaatcagagcaagatcttggtatatttttcgggaatgtctagtactaatgaacaattcattctagaaagttcaggtttcaataaaagcatggtctttcaggtacttaggcatctttatttgctcaaaacaaatttctaagatggaaaacaaatcaagaaatcgattaatgtttgcattggtgtaattgtggtttcagatttagttaagtccacgttaaaaaaaaatatatgcagcttcagctaacttttgaaactatttataccattttagaaacaattattgtgaaaaaacccattatcaaatattccaagcgttaatccaattaacttagttcaagaaagctttttttaatttcagtgattttaaggaactcaaaaagtttaaaaaagcaaaatgcttaaactctaataggaacattaagaagaataacattgacaaa

SEQ ID NO: 313068 - DNA, 740 bp, Cannabis indica
aacaaaagagccattgggactctgagtgtacgagccaaagtatcaaaatccttcccagacatccttggcaagaaacaaacaacaaatttgttcaaatttactatctaacctgatacattttcataaaaaatgaagaatatctttaaaacgagaacaactttccaaagtagcttctagaaaaagaaatcgtcatccacaaataataaatgaaaagtgatagggttattataccacaagtcaaacccgagatattacccaaaccgatttcctacttaattaatgatagacgacaaaccctctgcacaaatcaagaagagaaaaggaaaaagaggatcttcttgccttataagccctcaaaatgaaataatattaccaataatatccccattaacattaacataagagaccgtagtgatgcagggcataatcaaactaatccaaccaagaggaaaccacaaatatactattatatttataccttcgagaaaggtttagtcaacacaaaaataccgctatttgtgttaaagttataaggaatcacaaagttttaaagtacttttacaaggaatttatcaacgaaaaaaacagcacttaggaaggaatgagttggtgcaactaattttctgtaaaatgacattattgtgatgatcaattgtaaataatttctaaacaaagtgtttgagagttttttttttatttaagggtttgggactcgaacccaggacctccaacactcacac

SEQ ID NO: 313069 - DNA, 1269 bp, Cannabis indica
tagagctaagatcctggtaaaataatttccaacatgtacatgtcgaaatagtgcgacctggagagtacgatctggggatgaattgggcttcattttgtagttactgtgtgacatgtcattttgagattggttttatatagtgactttgtgatttataatagttatagagattctgactttatagaattgttcttgggtagctatgggacaaattttgatgtttacttgttgaatttaaggtgattttgagttagaaattaagtttggaactttttaaaacttaagtccaaacgttaatgatattttccatttaagggcttaattttaatttctgttacgtaaggattgttgtatatatgtgtcctgtgatgttcggaatgatttagataggtttcgatagtgtttcagagagtgaaaaatttgagattagtgtgccaaaaaacagtcggccatttttatcaaaacggcctgctctttttggaaactctagggagatcggaaatcatatttttgtcataacctttcaatgaggtgtccattttggatgttctatataccgtttagaagcttgcaacgaactgtacaatatggtggatgttttagagaaaaaatataagtttaattttagtgtatttataccacatgattttgtaggaaatcctaggttatcctttgcaactattaagctgtgatatgggatagacacttatttgtttactattgttataacatagggcccgagatcgtcaatcattctccaagaaggtcggccaacatacttaaaccaaaacttgaggtaagaaaattataatgtaccacatgacatgacaggttttgtaattgttgattatttgattaggcaatgacaatgtgatgatactatggatgtgatatacgggctcacctgattaagtgatacgatatacctatcggtgatacctaatttagtatgggtagcagtgatatgagaatactaggttagggcatagactaaaactgtttatgggtgtcaacttgtcggcaatacctgataaggtacgggcgacagtgacatgttagtgccaggctatggcacaagctcgtctgattaggcgatgtgatacattggtgccatgttgtggcacgggctcacttaataaggtgatctagtgatattatgtatgatattaaattatgatatgggcttgcctgattatgcaatgcaatttataatcatttttatttccatgcatatggttggttatattatccactcttgaatgctattgt

SEQ ID NO: 313070 - DNA, 1272 bp, Cannabis indica
gctgcaaactactgctctctctaaaccaaatgcttggtttcctcctcccctcgatgtcctcttaatcaatacagatgcaactttaaaaccaggtgagtggggctgtggtttaagtgctgttattcggaattatgcaggggaattgatggtggctgaagtagtttatatacacggttgcttatcagttcagatggcagaggcaactgctattaatttgggcatccaattggctttgcgcaggtccatccaaaaggctcgagttggctcggattgccaatccatcatcaaagctctcaactcaaacttgaatgtgccgactgattggggacaaatggtgatggatataaaccaattgaagattcattttcagaatttgtcttttacttattatcttaggaaatgtaatcaagtagctaatagtttagctaagtggagtcttgagactcaagagtctattgtattgactaatttgttacctccttgtgctgctgctttttaaaaggcagatgtacctaatgttgcttagtaataaaagttttatttcaaaaaaaaaatatatatgaatttataaattttcacatatctaaaaaaaaaaaaaaaaaaaagtgatagtgctaccataatgttgtccttatattcttttatgttagattgcgttactagatttctggtgggaatcgatgagcttatctctatcagtctatctatctatgtcactccattggttgctccccaggattctcctttttcttcacaaccacaaatattatattgttattgggaaatatcttaacaatatatatcagtcatataataatttcctctatctgcctatcctttatttagtatatatcaaaccttttttcaggtaagaaaagagggaaaataaaacagagatcgacttcatttacttaatcaactactcttactgcttttaataatacatgggaatattttatattgaggggctactcttatgacttttccaaaatattttatatgagtatacacattgtaattatataagcacactttcggttttattttttcttttaaaaaataatctaattatttattttactgcaacaaaatttcatcaattactttattacattcctaaaaaaaatgcgtacctaattattttttacagcttaaattattaaaatttaggtaaataacattttgaaccctgtgttttgcaaaagctacagattgggccctgtgttttgttaaatgacaaaatagaccctgtattttctaaaatagtaaaaa

SEQ ID NO: 313071 - DNA, 996 bp, Cannabis indica
ataaacttatacaaatggaaaccattaagtacaagcctttcattaggattttttttactaaaatagtccttacataggaattatatacttaaatgatactattaaataaatattacattatataaataaaaatttgctaattcttttttacattctaggttttttttttttttttttttgttgtttctgataaggttgcatcaaaaattggttcttcacattacatgtttaaaactaacaacaaactacattatttatagccctttccctttctctttctagttgccttttccttttcctccaaagccatgcaaggtgcaggagcccaacatatgtacacagattcactctcatatcctaaaacttgtttcgcttttgcatgagaataaagcaaaaaagacagcgtaattctatgaacgccaacatcaaaattaattggtatgtccttgttttttagaaaagtaccaagcaaataacatatatatatatatatattgctatcactgtatacatatacaaaagataaatcaattaagttatcgacaatctactttacaaaaaaatagtagctagtagctcatatatatgaaatgaaaacgaatatcataaaaaatagaaacaactcacattaaaaatgaaaacaaacttcaaaatacaaaacgactagcatttaacctcatatatgtaaaataaaaacaacaaaatagaaataatttaacttcaaatagtttgtgaaatggaaataactagcatttaaccttaaatatgtgaaatgcaagtatttacaaaatggaaactaagagagtaaaggacatagtagaagttatttacaagtattacctcaatgagattagaacctttgagggacaacacttgcattttatccttcttcaaattcttccttgcacctttcatgcttgctctatgtgtttttcacttgcatacaaatcaataaagcattaaggagttgaggtggcaatttgtatgagtttttca

SEQ ID NO: 313072 - DNA, 592 bp, Cannabis indica
gggctgtaaattggggaaacctagaaacataaaccctttcaaattacagcctttaatccaaagggagaaaattgtttggccagatcaaatgggaagaagaaaggagaagaagaagaaggagcgcccacccaatataattttttaacccaaattcagagaaatgtgttgtggtgtaatgtgcttctggtcaaaggaggctgcaaaagagaattgctaaagtgcctaatatgcttatcgctaactaattgtgagacgctattataaaagatattggacaccactattgcctaattatattgctctaaaataaataatatttttacttttaaaacaaatttattttattatagaattattacatgaaaaataaaaattggacactttatttacaaaattacttgcataaggtgtggataatatttatactttatatgtgcttataattatcaaaatatctcttacactattacttacacaatcagacgatagttgctgggtggttgatcgaaggttgcatcagacgaaggttattgggtggttggccaaaggttgcatcagacgaaaattttaatcagacgaaagttgctgggtg

SEQ ID NO: 313073 - DNA, 2040 bp, Cannabis indica
aagcctttccacaaatgatctccgaagaagattgaacaccaaggaggaaagagccaaagatgaaaaagcaacacctcgcggaaacagtttgagaaaccacataaacgattacattcgcggaagagaatcctcaagtgataagacttaatgcctagaacgtaaggtcaaggagttgatgaagatggcataaaagatctctagaaaataaagtggtgttgtatctgactctaaggaacaatatacaaagccttgtgtggagagaattattgattcaccattgtcgaagcattttagaatgccctagatagaactgtatgaaggactagtgataatgcaaactgtctatgtttttcattaatattgagtaagttcgcagaggactagtggaagaggttatctccaggattgatgcacaactagaaagacccagaagtaatgttcaggaagctgtttatagcagccaaggactatgatttgaaagctagctccttgaccaacgtcaagcaacaacaatgagagagcttgaagaagtttattcaacacatgatggatgtggttgctaaaaccaaagtcactgatgacatgaaaatagttgccctaacatcaggacttataactggatccttactatggggagatcttcaatgcaaaagggcagatacactgagtaagttcttaacaagagcccagggatttattaatctagaagatgcttatgtccaagcatatggagtactcccagcttcttacaccaaaataataagtgcacaaccattgcagatgacaactccattcatttaacctctgctaactacttttactactcctatggcatatggaccaagtacatccgtgcacccagctatacaggctagttttcttgggtttggagctgcataaacaggatatagtgatgctcccagaaaacaaaccaaaaagcagaagttccagagtctaatatagcaactcgaggagtaaaaggagtacgaagggtccaaatcagagagtccacgaagaagggaaaaacccaagaatcaaggtacacagagtacataactctcatagatacttgggagaatgtatacaaggcaacatatgacatggtacactacaagaagcctctgccaatgtacaagggcaaaaaatataaaggagatccaaacaaaaagtgcaaatatcatgatgatattggtcacaccaccaaaaaatgtgactatttaaaagatgaaattgaggggttagtacggaacagacacttaaataattgggtaagaatcctcgttatctatccgagataggcagttacacatggataaatttttgttctaggaccagaaggagccataaatcctcctcaggaagtaggccatccacaagtttcgagaatacaagctccgaatgcaaaagcccttcacggggcccagaacactccaacagcgacattagctatagcccccgatcctaaaaattcataccctccacgagctgcattaccagcctgaaatggttaggtagagacaatttcaagtgaacctcatatttttagaagcacagagaatgcacagaagcggtacttgaatgagttgaatcaaggcaaaggtttccatttggtgtaatcacctgcctagtgtccaatgatgatgaatttgctaatgactttcacaaaagacgatgccaggcacgtgcccttccctcataatggccttggtaatagaagctcaaatagcaaatagaagagtttataaaatcgtcatagataatggaagctctatgaacatcattttcaaaggggccttccatgccattggtttagtagaagccaatctgctaccatgcccaattcaactgcaaggcttcaatggagattcgttgatcccatgggaaaaatacaacttccaatgactataaattgggaagttcctaggagtaatgtagtatcatccttcaagtacaacacatttgtgagttgattgccctactacttataatgctatcctgggaagaccatttttaatggattttggagtggtgacatccatc

SEQ ID NO: 313074 - DNA, 1183 bp, Cannabis indica
aataataagaatttatttttaagaataattatgacaaattagcagaaaactttgaagtacctttgatgagaaataaagaagacttgttgtgagattttgagggttttgtcttagtaatttgtcagaccaaagaatttgtgggtgtcaattatatagggttgatcgacgcgctcataactctatgcggtaggacttaattaaaattaggggaagctaggaagattgagccgtacgcgctgggatggcccttacttacactcactaactcacacggtacatatttgaaaaacacgtgtgaatatgtttcgtaaggggttttttttgttttgtgctgatcactattcaactggaggctctgtttggtcaaattataactccccatcttttctgggaccaataatacattgccacatttgaaagaaagtaagtacatataaatgtattaatgggtcactcagtcagcttagtacttgaccgttcccattaccattgcctattttgctggagtagtgtagtttagaactttctttaaatatttattgggttcgcattatatatataaatagagagagtgtcttttttcattataattaattttgtttttcttatttgtgatttcaggagacttttaatgtggggttagcaaaaaaaaatagacttagggtccgtttggcatgagaattgaactctattagatagtacaaaattgaattggattgaatttatagtataggatattaaattataaaactatgttagtaaatatattcatttcaaaacttgtacaaaaataacctttttagactatttattatttatattattttttatcacataaaaaaattaataattttttttttcatatttttttttttttagaattagaagtaaattacttaaaaatatatctatattagttttgttaatttttttatgggcattttacataaatgtatacattttcttaattaattacaaaaaatgtgcaaaaaaaaattaattgttacaatgtacacatttaaaaatatttttacataaaatcatacaaattcttaatttaattatattggatgtattaatgtgaatgattaccataattagatttttatcctttttataactatttttatggctaatttgtatgatattaatgagtaagctttcaaaataaccaaatttatat

SEQ ID NO: 313075 - DNA, 848 bp, Cannabis indica
atacattatatatataatcatgaaataaatcacgtgaaccatgcaacataaagtgttatttctgatctttattaataagtaaatctgattatattgaaatgggttttatatagggcacaaaacccaacactcatggggtacatccagctacccttgacagttcgcgagaatcccatgacaagaacattgagggcacgattcatagtaatcaacgtgccattagctttcaacactatgataggtcgaccaaccctgtacgacctaaaggtagtaacatttatctaccacctaagcgtaaagttcccaacacggcatggggtaggatgtttaacgagagaccaacagtgttcctatcactgttaaaatctagctttatctaaagcaacaaaagagaggatgccatccaagagctttgacgatgagcctgacaaagggcaataaagtctagccataagcagggaagcagactgtaacgccctaatctatagggacgccacgtgtgtgattttataaactagtttaatactaatagaataattaattattaaaaaccgtgataatattaaaaacttgactaaaataaaacactaaaaatggacattataacggcataaaaagtgtgttccgggaatccctgttgtaaaaagttttgctaaagaaatatgtacgacaaccatttaaacataaaatcaaaatacacagcagatacagccagtctaaaacaactcctggcaactcggcacgcaggccggcgaggtcaatatgtacattgctggagaagactgccacctcatggttgatctagcttttctttgcctttacctgcaccacatagcacccgtgagtca

SEQ ID NO: 313076 - DNA, 765 bp, Cannabis indica
aaaattttattttgaaaataaaaaatgtgttatataatcacttttatttttcaattttaagaaacagaaaataaagtttgtttagtaaatttaattttatttttcattttttgaatttatttaagcgtggtccggggccggagtgaggttcggtgttcaagttcgtgttcaggttcggggtccgggttcgagtcttgggccagagcagggtctgagtatgggatcgggattggggttcgagtccgggtctggggttgaagcggggtccggggccagggccatggctggagccagggtttgagtccagaacggggtcgagtctagggttcgggtttagggatgggctcagggtctgagttcggcgtttggggtcagggtcaaggtctggggcgggggtctggggctagggtcagggtctggggcgggggtccggatctagggttggggctggggtccgagttctggtccaggctggggtcgggattcgggtctagggctagggtcggggtttggatctagttgtggagccgggtctggggtccgagttcgggtcaaggtttgagtttggggtttggatccagacggggttgggggtcggatctgggatccgggcccgaattttaaggtccaagttggggtcggaatctaaaatattaattaaggaaaaaaaattatttaaaacttttttgaaagtgacttttttctattttcatagtttttaaaaattttgattctcaattaaaaaattaaaaagttaaaacagtt

SEQ ID NO: 313077 - DNA, 1642 bp, Cannabis indica
tgtgaaacctgaaaccaaagaaaacaagcgtaattctattctaaatataataatgaagaaggaaaacaactataaaaagtgacccaaaacgtaggctaaaaatagcctaacacttggctggcctgaaaccataagaccttgagctggctaggtcaaggggctcacctttcttgatatacatcaatgccttgcccttgcccaatttgaagatgcaaacttggaagatgtaaatggggcaagaagttcccatagtatacctaaaatactttcagatgcaaatagatctccaacaagtatctagatatgtgtgatgccgaatctttcctacaaccctagctgacatagcccagcagttgtattttaagcaaaccccaggaagatttaattcttgggaagaattctctcgagagttcgatattcaattctctacctcaggacaagtaccttcacgactggaggatcttttaaaaataaagcaaagacaagacgagcctttgaaagactacattcaaaggttcatgtctgagaccaccaagatcaaaggcctgacacaagaaagttgatatacgacacttacccagaggcatcttgcgattgagtaattctggaaagatactaaaaggatcttaacgagcaacataaatgagttccttgagcgagttgatggcttcataaagttggaagaagttgtccgacaatcccataaaagaggggaggttaatgttgaacaaacacagggaatcatacggcccaagtgttgtttgacttgccagctagtgcagacaatatctgccaattccctaataaggggaatattggaggcaagtgcaacaatgatgcctctagccaaaataatggcaaaaaagggaaatttaacaatttccttatgccgtgaattctaagggagaaggaggggaagtgagcatgcttcactttcctaccaaaactcccaaatcaatgcatgccagccagccatggcaacaggtgtcaccaaaacctgaagcacctaggccgtcaagctcaggaaatataaggccacctgtcaacctagcatggccatagaaggctaagctctgccaacttcatggctaaatgtacaagaatgtctccccaaatctctcaagatttgggagaaaagagagagccagagaagaactgagagcaacagcaagagaactcaaccaaaaaggtgcattgacaacctgcccagtgtaggcatggcccttaaggcacctgggggaaatggccacatgaggcaataaaggttagtttcaaagcttctaacaatgaggctgaatatgaagctcagattggtggcctcaagctagcagacgaagtgtgggctgaatacctagacatacactacgactctcaactagtcgtaggtcatgtcctagatgaatacgtagctcaattcaataagatgatggcctatttgagctaattttaatacttgttaagttagctcagaggatgtactaaaaggcatgtcctcaaagaaaacgcaatggccaatgcactcgctcgatataaaggccttaaccctagcatagaaatctcagttcactatgttgcctataagtcacctagcctccaaatagttctaagtctaaaagccatattctctcttctctctctctct

SEQ ID NO: 313078 - DNA, 912 bp, Cannabis indica
atacttgtgagtagatctaagttcctggtaaaataacttccaacagttttacggttgaggctagggggaaaagtggcggtcttattttgttttggtcagcggatattgagactcaagttctttccttctccccattccatattgattctttcattagaatggaggaggggcagtggtggagatttacgtggttttatggcgatccggaccctactcaaagaactcattcttggaagcttttgagaagactaagccggatgtatgctgggccgtgggttgtaggaggtgactttaatgaaattttgagccaaaaagagaaaatgggtggctcatctaaaccaagctatctcattaataacttcaggaaggcccttgattactgccaattaagggaggtggagtttgaaggcagtgactttacatggtgtaatgggagaaagcaaaatctgatttttgaaaggttggatcgggtatgtggaaactcggactggcttgagatgttctcacacgcaactgtcaaacatcttgatcgcatcaactcggaccattgcccgcttctcattacaaggaaggatccattgtccaaaatgcaaggcacgatgagatggcgatctagatttcattttgagaatgcttgggcagaggatgaagagtgtatggagatagtgcaatcgacttggttaaggaaagatctgattgaacagcctacagatcttaagaaccgaataagggagtgtggggctgctcttcaaagatggaatcaagttaaaaagagagagatgacaaagcaattgaatgaatataaggaaaaaattggccaaataacaagctgaaccgggagggaagattggcaacaactccgtgatttggaataccaacaaaatatttggctcgataaggaagagaaatttt

SEQ ID NO: 313079 - DNA, 525 bp, Cannabis indica
aacgactcgtggactaaggctcattaatgctccaactaagtaaaatctcatgcattaaactttctacaactcttctcatcttatcatttaattggttgccgaaaacctcggtcaacaattatgattttataaaagatataatttaaattattatttaataaaataaataatttaatttataatttttacaaaatatataactcaaaataatatttactatttaaaaattcaatactatttttatttttataaggagtccctccaaaaagagatactgcaatcaaggaatatttataggcaacattgaattcttcattttcgtatttgatgtttgtaattaaattacatataaaacaacattgtatataatatttaattgtctaaaatgataatatttctaatttgtatgagtcatgagaattagagaactcgctaaatttttacttttacttataaagtataaaataagtataaattttgacttatttttataatttggatagccaatatataattttttttttt

SEQ ID NO: 313080 - DNA, 739 bp, Cannabis indica
aattaaaaacctttttttccctttttttttctttctctttcttctcgaaagacttgaacccccaaccccctgtaacttcttcttcttcctccaccttcaacccaaaccaccaccacactagaactaatctacaattacaacaaaaaaaaaaaaaaaaaaaaacaattaccaccacaaatcacaatagccaccacctgcaagatctccacacccacaaactcagagccccttcccgttgaaccaagaacccacgaacccaaaccccaactatataacctgtcggacaactgtaaactttcaacaatggtcacctgtagagaaaatagaataataagagaataataagagaagagagacagatatgtgttagaaataaaatgcacaaaaacgacggctagaccatgctggccattctcagtcgtcgatcgtcgaaggaatcctcacattagctttctagctcccaaaaattcttaatctgtcacaatcctctcttggtagctccaatcgcacgactccagtgtaaagcagatctaacgaagcaagcacgagacagatctaaagagacgccctgccgatcggtgttgcttcaacgatgctgataatgaacagtgagacacaatgatagggagagagacagagagtttggctgttaaggtggcctttgttgaacgaaaggaagagagtgatcgaaagagagatgtagtctgtaaactggaaaaaaaaaaatcaaaaagaaaaa

SEQ ID NO: 313081 - DNA, 869 bp, Cannabis indica
aaaaaaaatagaaaataatatttaatggacataaaatagaataatgatatattaaaaaagattaactctacataaagtggtttttaatatgaagtattatctaataatataatatattatatttatatttaaaatttatttataatttgaatttattaaatatagattaatttaataaaattatgggaaaaaaataatagtattttttattcaaatactattggcaaaattttggaaaaaaaataatgagttcactatatttggagatagtggcgaaaccaactacatattttaaagggaaaaaaatttaagtattaatgaataatataatttttattaaaaaaattataaattttgtgagaataaaaataaatatatttaagaataaaaataaagaatgtagaatttttaagcatacaaataaagatatatgggataaaaataaaaaatcatttttatagaccgggtgaaatataaaataatcaaaaatttatataaacaaaaagttgaggagacatgtgggattatttgcctccctttctcaatgtttagagagctcctatttattctttattatatagagaatcaccttttttgtatggttgaagtttatttttttgaaatttactctctattttagttaaggagtatgtttagaaaacataattgaagaagctattaccactttcttaagtctatggtgtaattaatgattagagtagtctagcaaagggagccactacaaaacatcttactcttagtcacaaatataaattgttattcttacgttgtgattaaaaagttcgtgactaaaagtattagtcacaaaaattacaatttattgtgactaaatgtatttttagtcacaa

SEQ ID NO: 313082 - DNA, 1269 bp, Cannabis indica
ggattgattggattggattgaaaaattcaaaatctacactcgtgcgtattggatgtggaaaattcaattcaagcaatttattataagtgtacttgctattatatatttgtaaaataaactgtttgaacaatgttctcagtattgtaaattatttaaaaaatttaaaaatttacttaatatttttaacatctataattgacacattacatagtcataataactgagtgagatagtagctatgttaaaaacataagtgtatcaataaattattttaagagggtgtacactccaaaaaaaaaaaacaaccacaaatgctcacaatatcatatgataaataacattttttaaaataaaaaataatcaataaaaataaaaataaaaaacacaattgtttactaaattggacgagtttaaaaatactcaaaattgtttacttattatgctttttaagggagagggagtggaattttttttaattataaactatttttattttttaaaaaaattaataaacacgacagtattaatccataccggtaataaataaacatatttttatctgttgtgtattttgattagttattgtatatagttttttctggtaaaacttttataacagggatcctcggaacaaataattttagtattataatgtctattactagtattttattttagtaaaaattttaatattatcagagattgtaataattaatcaatctattattactaaacgggtttataaaatcacacacatgatgtctctatatattaaagtattacacatggtatggtagtgtgtatgtacacttgtgatttttttgttggtaaaaaaaagcatatgctatataaaaaaatgtaaaaaaaatagaaggaaagaaatatatgtgatgtgtatgtataaatgaatggacttttttattggctttaagttaatgagttttgttattttaatttttttttgttatggaaaaaaaataaatatgtttaaaaaaacacataatttttaaaattgaattaaaaatatattaggatgtgtcataaaaattatagtatgttttcataagaatgtgttaggaggtgcaatttataacatttggctcaacctttgtgtataaataaaaaaaaattgtatgacttgtatagatagtagtattaaagacaagagtggacttattcttgtacaagaaaggaaagctgtctagcataaataaaattgaattataagtttctcttttgaagggaatccccttgtggatgtaattgact

SEQ ID NO: 313083 - DNA, 934 bp, Cannabis indica
tcttacttaaatcaaccaaagtaaaaccaaactcgtcaatttttaccccaatattgttgtcaacccaagaaaatttaaaaagtggaactcggaatgctaaataatttagttcctatatttcttcaataactccataatacgtcatggtacctaaaacaaggttattatcttttgcacttgaaaaatgcatggtttctgcgatgatacttatgctactatgacctgtccagcatcaacttgactttgtatgaaaatgtttcccccttacaatgtaagcttcatgatttactacctcaaagtttgctccaagaataatacggctcaactcatcggatactccatgatttggttccttcaacttttctagaaaggtattctttaaccatctaatgaaagttttgcaatgctcatcgtcaacccatttttgtttatttttataatattttagaaacattgattgtaacaactccgtatgatcacttcaaatcataattatcaaattagaataaaaaggtaatgttgatcaagttattgttcattgtgactaattaaggttaatcaaaggaaaaacttgctgtaacctacgttatatatggctgaacctctgaattattgttcatcgcgaataattgagcttcatctaatccaatcttggacacattcaccattgttcctttccctccttaattctttatcaacctcatctagatcagttattaatttgctaattctatttgcctcaacttcggccatctactctaaacaaaactccacaacctcttcaaatacaaaacactcaaccatagatgctttcggtcgatagtggttacacacatgacttttaaatatcttcatatttatttcaaatagatacatatccatctcactcatactgatacgcacaaccttccttctctcactagatgaaccatta

SEQ ID NO: 313084 - DNA, 3316 bp, Cannabis indica
gttccgggaggtgcagagatctcttgaacagtcacctcgcatttaatgccccatggggaaagacgtattaaaatatccataaacaacatgacagatggcgtaacccccctttttcggctattacgttatagtcaataagactagtgatgactactttatttgggatcacatcaatcgagaggggataaaagattatatccacctaactcctaagatacctacggtataggtcatgtatttcctattttgtatctgctgggaatatgtgccctatgaagctaacacagaaagacaagtgatcaattcctagggatcacccagaaaacactataaatacccacaaacagactaaaaaagtgtggaacatcctgggtttaaaggaataaaagagagaaaataggagagaaatccaccaagaacattctttgtataaatactgtcattaagaaaaaagactcggggactaaggctcattaatgccccaaccacgtaaaaattccatgcattaaaatttctatagctcttcttatatattacttagctggttgtcgaaaacctcagtcaacattttggtgctttcattgagagctgaaggaagcgtcttcaaacagatagtaatctgagaagttaagtcaacaatggtggaaactcgcaacaacacaagtcaaccccatcctcctcaagatgctcaaaatccagaagaagaggaagtggcctcgagagtgaacgtggactctgaggagcgagatgaggccagtgacgatgagtacgaggggaactttgacgagtatgacgcctaccacgaaggcaattatacagagttgttgctattgagacaaaaggccactgatcttgaagctgaaatcgcggcccaaaaagaacaaaatagaaagaagcaagaggtgatggtcgccatgcaaaaagccatggagacagcaggacttcatatacaccctaaggccatcccggcaggacccgaagatatgctggaagaatcctctccaagcacccagaaacacaagaatagggaaccaagtcctatacgctacccttccaaagaaaaccaaagaaagaaccatacttctatcccagggagaaagaaaaaggcgcagatccgcaaaaggtccgctcagatttctcgaaagggaaaggtccgcaaaggggaaaactccaaaaagggagttttttccctcaggatcgagaggactaaaagagcgtgtccatgcaccaagagcctgggggagaggaaggggaaaccggagataccctcccgttgatttaagacaccaaatcaacgaaaagcacggtgatttgcgggatcacctggacaaaaagaaacacatactagcagtctccgcggggacactaaatgaaggaattttagctaagttggtgtcattgcgcaaaaaagggatgactcagacgccgattgcgaggaccgggagtcatgcgcccggcacatattggaggcagagcttcccaaaaactttaagatgcctaaaatggcaacatatactggagactcggaccccagcgaccatttatcttgtttcaaccaggtaatgacagtcatgagggtcagtgatgacgccaaatgtttatgctttccgctaacattgagcggctccgcggaggaatggttcaaaaagttagaaccgggatctgtggattcctggaacaggttggaagtaagtttccggagacagtttgtcgtggcgagaaagattaatctcgaagtcagcgccataactaacatcaagcaaatacccacaaaaaccttgaagaattttataaagaggttcaaagaagaagcctcgataactaagaaggttgatgacggacaacatctttcacttcttcaagctgggatccgtatagggaccccattttggaatcaattacaataggagggagctgccaatctccaagacttccagaagagggttcaaaagtacatcaacttggaagaggcccaaatagtggcctatagagggtactatccaactggggtatcaggctatgtacccggagcaaagctctcaggggccctatctccggttactcctcaaatgagcggaatacaattctccgacacccctggatacaacgagagcccaaccttggctcccacatcgtcccattacaagaatcccctaagtaacccctcagggatgagtggacaagccctgtctcactctgctcctaccgcaagcttaactggacctcctcaaagcttccggagcaagaggtcctcaaaaggcagcaactggatggaagacaagcgccaaagaagggggtatactccccaatatacccaatacacagagctgacggacacacaagagcgagtgtagttcgccacaaggcaaaatacacaataccggaagcctcctcccctgtacagggacagttcgcaaagggatcccagcaagagttgcgaataccacaatgatattggtcacagtaccaatgaatgcaagaatttgaaagacgagatcgaaaaattgatctggttgggtcatctatacgagtggattaaaaatcaactaccccatctcaaccaggttccggcaggaggcccgttgcctcaaggtgcaccagagggtgcacccagagcaataacacccgtggtaccccccggcggaacgatccttcagcagacccctaggatgccgccaagacccaacggtagagtggccatgatctccggtgggccccatattgtggggaccactagaaaagaattgaagcgctacgttggggccaccaaacacgacgatgtcttggaagtcacccagcttccagcgcaaagaccctaattcatggatcagcctattaccttcacggaggaagacgcgaaagtggcgcatttccctcatcatgacccctttgtcttagagactcccattgccaacaaaattgtggctagaatattgatcgatataggagttccgtgaacttattattcaaagaagccttcacggccatagaactcacggaccgggatctatcacccagcgattcccaactcactggattcaatgcaaccacgcttatcccaatgggaaaagtacggttgtcaatcaccctgtgtccgaatacacctcaaagtacttttaagtactgcacctttgtggtggtatactgcccaactgcgtacaacgcaatccttggccaaccggccttggtagattttggcgcaatcacatccattcggcacttgtgcctaaaattccccacttaggagaccagagtgggaactgttggaatttattttaccaggatcttagatctactcacaagtatgttgtttaaa

SEQ ID NO: 313085 - DNA, 1104 bp, Cannabis indica
aataattagtttaggcaaatatatattataaataattagtattaaatctaaaaattaaagagtaatgcgaagacatgttgactctttcttccttcggagggccgctattcaataatgatgtcttaccattgaccattaacacttaattaactccaacatgcaacactactttatttattaacacatcttatctttatatatatatatagcatgttttaattatatatattggacaaaaaaaattggtgagagcatcagttttgttttacttttgttttaattattttattttgttattttacagttgtttcatacaaaaataatatttttataaaagatttcgtgtgataataaaattgtaaatttttatccccatatatcttattattttttctttttttctatatatacatctttagcagcaacagctatggaagttaaggaaaaacaagacaagaacaaagtaactacctaaacaaccctaatgagacgactctcccactaatatttttaatgaataagtcctattagtttatgaaagttaccaaagtaataaaagcatagctttgcctaattaatagactgcatatatattgattataaacacactttgaaagaggctagctaatctaaattcgcaactttaaatacatgtttggctgtgggttatgggttaatgagatttggtcaatgagcttagtttaagtactacaataatcttaagagatacttattacaagaaaattattaaaaggtactaatggtgcctaacaagtacaacgtgtatattgttattagtacaattaagtatcaagttacatataatttaatacattaacttttatagaatatcgttaaccaataacaaaacgataattctaaacaatactaaacactactgatactttatatataacaatactcctattacaacaacttcaatatatttatataaatttattatatagccagtaagagagtctatcaaagatgggagattcaatacaaaaggaaaatttaattttttatgcttacatttagttaaagaaattttcctaaatacataataactaatatttgtaggatatgacaatttttatgata

SEQ ID NO: 313086 - DNA, 1817 bp, Cannabis indica
ggctgagttgtttcagtgcagacgaagcttgtaaattgatgtgtgatttacagctggacttttaattcatgtttataattcatatcttgaaatcaatcaatctaaagatagacaacttggtaatttgaatcattaaaatctacaagttgcactttcaggttgttttgggcctagcgcccaggttgacatcccaacacccaggttgacatgtgatgtcaacttggatgctaggtgagtggaaaaacatgtcagagatgtattttttgatgcctaagtgatattttgacatcacttagtccaattctgcattctggtaaagctggtcaccaattcatggagatgttgtttttctgtagaaacggtaaactcaaaattactcggtgttagacattttatatgaataacatgaaacatatgaatgtgtatataaagtgcaaaagaaaataaatatatacacaatataactattgaattataatacctctagccattgaatctttgagcatcaatctcacataagctctgatctgcaaagaaaactaattagcatgggtattcaggcttccaagctctctttactctctttagatagatttactgtatttacaaaatgagtagtaagctcagagattgagatcctatatttatataggtgtaacattccatcaatgtccctacaattaattgtcaaaatattttgtaccagtgtggccaacttgtagtagtatggtttgtaccctcctgctcctggactcatgggagcccaaaggccatctgtagagggactttatcttggagatggacaagttcttgacttggatgacgacatgcctttgtcacgtatagctcagaatctggagaggagagagagagagccctccaccaatgcttagccagcaagggttaaattggtgatgcttctctctagatcaggcctggacgccagacttttgagggacctgctcgccccttgcctacatctagaggcaaggccaaggcagttgttgaggattctaacagtttctcttctgaggatgatatatttgatgattgatggcaccatcttttacattcttttcttgcattgagtattcgtgacttgctttctgacttcgttactttctttttaaatatgtcttctaggttgagatgcctcactaggggaccttctgacgagccttcaggttgactaagggccaaggtgcctcagacctttcgtggtagagatcctgttggatcatctctgcctcctcctacaccagggcctgcaccagctgggcagcctatgatagatgatcctcctgctaggagggaagggtcttgtggccagggtgctgcaaggcccagctgaggctcagtcacaaggaagagagccatggacgtggcccacaggcgcatagagagagcccttccttttatggatgaggagcttaaggagcatggtgatgacgagctagataggctctactccactggcctttgtgatctatctgtggtaagttgtacatttgatttttttcatctttctagatcttctgtaagctggccagccaagggatttacagcatggggcttgacgaccaaggttgtatctttgaggggctgaccggccatggcaaccttaaagagaggctggctggccagtgttgtactttgacactaactttgtgttgttttgctttcaggccttgatgaaattgagcttttcacgcaatagctcctgaggatcctcaaatgccctttaggagtagatgaagactatggaggctttgttgggttttctgccctaaataaacccatttcaatataatcggatt

SEQ ID NO: 313087 - DNA, 1099 bp, Cannabis indica
agagaggaagagagagagaggggttgggtccgagagaaggggctgggtcgtgcgtggttcggacggtggtcgtgcgtagtcggggtggtgggtagtcttcggtggccgggcgtggtggtcgggatgaggcagccatgggagagagaggttcgggatgaggcatccatggctgatttcagtttttgatttttttcaaatgggaggggtatttgtgggatattaggaatgtggtcatatattaccaatattattaagtatgtatttagggaaaaaattttaagattttctaagtatagaaaatcaaatttcccaactaaaaagataactttatatggtacatactctattctattatttttggttgttgttgttgttattagtactatatataattcacaaagcaatatatcagcaacaataaaacttgacaaagcctcaaaggtccccaaaacattaatagacatatagtatataataaaattgatatccattgtgcacaaaccttaaggaatttgaagaatttaatatatacaaaagaatatacatgatgtcaccttttgtatcaacttgacccttattagtgggttttgcagaaaagcaaatattcatctgatcaatgtataaattaataagaagtggttgagtccaagtatagggttgtttgaattgataatagtgagtcttaaataactgattttctgttctgaattgcttgctgcccatgttagttggagaaagtaaagtttttatctttatcaaagattgtatccaagatgggcagagaggtgataaagtaatattttcaacttgtaaaaaaatgaaaataaaaaacaaaattttttctcccattatcccaaaaatcaaaactttgtcatggattggtagtttctattctttactcaacagaatttttctataataataataataatgaaaatgggttccttccctctcaaaggattgcttgttttgttgagcttaaagcttaggtttttgctctctctgaaatccaattcgccaatattacggcgcctgtcgctttcttccaaagtcactcagccactgcacccccaccttatcctctctctctctctctctc

SEQ ID NO: 313088 - DNA, 674 bp, Cannabis indica
acttgagcataactcatcaaaattccataaacatattcttaaattctcaagcatgctcaacctcaaatttcagcaacacattcaataagtaaaactaggtttcaaccatgaaaaataccctagaattacattcaaagctcatccaaacacaatccaatatataatcaaaagattcatgtataaacatgctcaaattactaagagaacgccaacatgcaaactaagatcatcttccatctatttcatgctcttacaacaataaaattcagcattaattacaaagattaaagctgtaaaaactacctcaaattcagtccaaagctaagctcaaagatccacaaactcaaagcttcaattcaagccaattccaggaaattctaaatttttgaaataggttagagaaagagagagagggtccgggtatgagggaaacaaaaccagaaaattcattttcatttactcaaaattccattcttttatcaaatataatttaaaggtaaaaatgaccaatttgcccctagggctataaagcacactcatacacatacaagggcatttaagtcatttcatgcataacacatactcaaataattttcagaatatccacacataaatatagtgccaataattaatcccagaattgtatttcgaccccgaacccggttcggcccgaa

SEQ ID NO: 313089 - DNA, 1296 bp, Cannabis indica
atttttgcaattatggagatttatttgaattttaggtgtattagttatgatatatgtaaaattttatgatttttatattttatgtctagtaacagtggagtgagatgtatggcctgtatagtcacttagatatggtttgataccttagaaatagtagggaaatataattagacatttggaatgtcaggagtattcgagattatggattaggcccattttactcataagtgtgttgattacttcatggttaagtatgggtaaaaatgtcattttatcctaggttatttatcattatttaagtgatattttaaaaatctgttaaggttttttttttttttttgtagtaaaaagctgaattaattagagagattagatcttatttcttgtatgacacttaaatcattttatcacaaaaacaaaattaaaaatccccatctttctctctcagggtcggctacaccaagaaccaaagggattcaagattttcttagtaaagtgagcaattaagggattctttgggcaagatttcttagtccaatcaaggtaacactcttcttcttcttcttcttcttcttcttcttcttcttcttcttcttcttcttcaatcgcttggttttcatgcatgattgtgaatttagttgttgtatgttctgtagttgtttggatttgttttctagtgttaaaattgagttaattgggttattttgtgttggttttagttgttgtggttgagaatgaccaaggtttgagcttttaagctcaaacttgagtctttgatggcggatttgaatttaggggtttataactattgttattgcttggaatatgtttatggatgttgaattaggtgttctggagagtttgctacaatttgggaaagttttgagctagtttttgagtttttgtggggttttctacagagaaacgattaaccgtttttgaagaaacagttaaccagtttcccaggcaagccccagaaaacggtttactgtttggaaatttggcttaccaattttagcagttttgggaccctagtttttatgttttatcgatatttaaggtattaccacgctatctatcgatagagaaacttctagttttaagtttaagtgctcaaaagtgatttagtgtatcacttatcaattttatatatgttgtgacataagggcatgtaaatcatcgagcaatagtttccactcaggttgaccggcacacctgaattcggaatcaaggtaagataagtataataatatcatacgtgatgatatgtttagcatgcatgtttatgaatgtcta

SEQ ID NO: 313090 - DNA, 637 bp, Cannabis indica
cccccacgctaaagcatacaatatctattttgaaaaaacataactattaaaattctttaaagtttatccaaataaaatccacttagaattatttagttaaaactatttaagttgcagccacacttgttattattacatccttttataccttcataagtagatttgaagcataggacgataatcaactattaaagatgggaattaactttcaaaattaaagaaataactaccttgttaagatcatcaggaataaggcaaggagagaataacagaagaaaaatcataaccaataccattccaaattgcttttcattcttatctgtgtaaacacatggcaagcattagatctatacgatcccgctgtcggttgttcactttttgaggtcaacaatactcaaaaagaatagaatccaactctttcctatttaatatcttaaggcagtgtttaagtctattgagcttacccataatatagaacaatcccttgccattaattcttttgcaccagttcttcaaaacagtagacaaaaagggaggatgttcagaccagtagttaaaatagcagaaatgtttagtgttagagatttataacaatggaagaaaatcaaaatattacaactctattgtaatacaatac

SEQ ID NO: 313091 - DNA, 1920 bp, Cannabis indica
ttttgcaacaagtcgggctttaagtttgtccaaggaaccatctgctctaagcttctttttgtatacccatttgtgttctaccacatgcatgtcatctgtatagggaaccatggtccaggtgccatttcttttcagggcatagtattcattgtccatagcattgtgccacctaggagactttaaggcctgctgcacagtttttggttcacagaaatcatcattagtaacagttagttcagctgcaaagaccttgggtttggtaatgcccttcttggatcgggtttgcataggatgcacattagtgtgagaaggcaagacaactagaggtggagaggcactagtggactgagagctaggaaaggcagaactggtgttggcatgagacatgctagagccagggaaagggggataaatgggatgaggaaatccaggaggaggagaaatagttgagacagatggagtaggactggtgtgagttgcagagatagttggagttgggataggaaacatagctggggtagaaagtggttggggcaaaggcagtgtttgaggcatgtttggtgacacatgtgtgtttgatgtaggagtagaaaacaaagttctataaggaaaacattgttcatcgaaggttacacttcttgcaatgtatagcctacccgagggatgtaggcatcgatatcccttatgggcagggctgtagccaagaaaaagacatgcagaagttttaaaatcaaacttatgtgatctgtatggccttaagaaaggaaagcaaacacacccaaagatgtgggatgcttggttctgcaggaaggatttggaccagatgactgatgagattgtagatgatacaaaccatctttaagagtgccctgaagaatgcttcttcgaatccttgtccttaacaaaacaaagatcaggggtgaattctatggtcacattgttgtctttagtaaattgggagatactaatgagattttttgagattgcaggcacatgtaaaatatttttgaggtaaagaatacgatcagcagcaaaagaactgttaccaatattacaaatcgagagtttagaaccattacctactaccattttctccttgcctttgtaggatgtcctctgcatcagattatgggcatctggtgtaacatgattggaagccccactgtcgagataccagccatcatcaggaggattggaagaaaagacaatgttggcttgtggagtagattcatttgagttaggaacattgtcttcaatgcctgtaaaactgacatcaaaccttctatagcagcgttgaacagtgtgccctgatctcccacataattgacagatgattctggaattgttggaatttccacggcctctagaagaaccatttcccctgcccctgccacgattgttgttatttgaggattgtgaggttagaggtctgccattattggtgtatccggaggattgatgtttcttggtttgagcaaaatttgcctgaggagaatgaagctctaacagggcagtggattgtgtgagttcaaggcgcatttcatgattttgaagcatgaattgaacttcttgaagggtaagtttgtctttggatgtcagatttacaacaacagattcatattcactcccaactccagtaagaacataaagaattaattgttcttcagagactgaatttccagcagcacgaaggccatctgcatagcttttcattttcagcatatactcatcgatcaactgagagccttttaagcaaggacatcaggtgtatcattcgagccttggatcgagtattgaacagtttctccaaggtttcccagatggcaacagcagattcacaatgcacaacctgaccaatcataggttcagagatcgatgacattaaccaagaataaaagaaactgatcaagacgcatccat

SEQ ID NO: 313092 - DNA, 1776 bp, Cannabis indica
atccgaagagcttggaatggcgaaagtctaaaattttattatcagtagtactcgcaatatatcaatagtactcgtcgtgtatttatacttagttaatttattagtataaatgttctaagtataggggtatatagcctactttgtactattgatttcttgtaataagagttatttatttctcgacgtttcaaatttttcgccttagcatttcttaaaggttttacaccaagctgtaattaaaaaaacatattacgattaagcgtgtagaatatgtgagtaccagtgttccgcgaacgaaaagcaaacagataaataaatatcctcgaagggatatatgctatatatgaaattaaaaaaaaagaaaaagtgaaatttttccacgtacaaaacacgagtacccatgtaccgctaaaaaagtttaatagctaaagaagtaaaaacttagataaatcaagcacttggagcagttggagtagtggagccatctacgaccttgctaacagcctcatcaacgacctcttcagtattcgcagtctctgcgtcctcaggaaaaagatttcctccacacctttgagtctgagtaggcgacatagcacgaaatgctttcgccatcttagccgcctttgctccaaggattgagaagtcaaaatctggtaccttggacaaggtcgtatatatatagtcggagaccgcttggtcgtactgcttcttcccattctccttctcagtctccaagtcgcgagacaactcctcgacctttgattgagaaagtttggcctgaagttccacctgctctttggacctctggaggttctcgagttctttgtccttagcattcgcgtcctgcttcagctccttgtggttctcttgaagctggacgatctggttcttcaaaaggtcgacctctttgtagccagcgacaaacgccctcgagaacatagtgatgaactgcgaggccaactccgtagagcgtgacattaattccttagaaggagtcccttcaacctttgacataaattcctcgcccacaaacttctcttgaagagctaagatttcgtgagctcgaacagttggatgaatcataaccttcttccccttgtcctgagaaggcttcgtttgcttcttggacgagtcagcaacaggagtcgcaataacgtcactcttcctcttctgaggaatgacaggagaagtcgtcaccgtcccgtttttggcttgcgattaagcactagagcctactacaaaaaagtcatttctacgaggacaagaaaagttaagttaaaaataaacaatttatgattatatatcactaatacacgatgagttacctaatgttgttcgagagttttgtttggaaagacgtttgtctatcttcttctttttttcagacggctctttgtatactggttcccgatgaaggcttacgttctaaggaattagcttatatgttctcgcaactttggagttgtacacaataatcaccaatcgcgatcttgaacagggaggctactgagaacttcagcgacttctctacgagctaggtccagaacaggtcgagccggtctatctgcgatcaataagaaagtacattttaatcaatatcataaggtaatatgaacattaactaagtactgaaaagtgggatgtactaggtcggcgattaaagtcagtcctaatctctggcactttaaatacatagaaacacttagatttccaatctcccatattggaaaccatgccttctaccccgttgatttcagaagtggcccacttgctgaa

SEQ ID NO: 313093 - DNA, 1520 bp, Cannabis indica
aaaaataagctagtggagctctacttttatagggaagaaggtcctaaaataataaaaaaatatataaaaaagtacatttaggttatttttgaccgttggtgatgatctaacgatgaaattgactcttgagatcagtcgtcaatttttagagcttgagtcgcgtccgcggggcttgcttcgagtaagttgcagcttaaattcgtaactctcttgatggtgaaatttggagtcgataacttcagaattacaattggagtatgagacatgacttaattgagcattgaaataacttcgaaaggcaagttgaatcacattaatcggtgcaatattgagtgagtaaaaacatgacggagatgtatttattgatgcctaagtgatatttggacatcacttaactagtttatgtgttctggtaaggttggttactagttctcggagatgttgctgttttgcagaaacggaaacttgaaactcaccaattttcgaataagtcactttgctgaaaaagtaaaaatatgaagttgtgaatttgacacttctgaatttagctcccaattactatgaaaaactagacgaatggtcgagacagaattataatcggataaatagaacctagcgcaccaagccatatgtcaacctgggcgctaggggcttattttagagcttctgggatgttgttttgacacttccaaggttcttgaacttgaggatgaggtctcctaccttgtttttgatcatttcgaagagaatgcccgaagaaaaatttgcattttaatgatcgaaaccaacacgatgggcccaacactaagtcagcttgggcactgggctcagtttttaagctcttagatttgttgtgttccctcgagtttacttgtacctttgttatttttgatgaagaaaaaaatgcccttaacacttttttagaaaacttattgaaaatagcccaggttgacaatatgtcaacctgggtgctgggcccaatgctaggtgtcaacttgggcactgggtctagcttaaggcctttgcacaattttgtttgctccccaaaaatagttgaatgttaatctttgaagaaaacagagaatatgcgtaaaagcttttttggaaaaactcttcggaattggcttaggttgaaaaaatattaacctaggggcgctggcacctcttcttctgaagacgcttcaagagctatgatttcttctttcaaagctggttcccacagttcagcctcaacatctacttcaacgagatctacagtctcgagctcaaagtcactacctgacatgttccaagaattcaataccataaactcaaaatgaatttcatgataattacgtaggcctcccctatgaactgcttagagaggtccccctcagattaattgtcaagaggcatagcccagtcctctaagaagatgcatctctgtataaccagtcgggaacacagagaaaaggcaaaataaacttaaatacactacctagggtgttgggttttgtcccctaaataaaacacatttcaat

SEQ ID NO: 313094 - DNA, 1140 bp, Cannabis indica
taggatgttaatgaaacatattggtagtaaatctagatcttggtaaaatatttctaacacatatatcctaaacagggggtcattcatggacagaaaattgttcctggacacaagggtactataaatcctctataggggtaggtcactctcaggtcccaagaacgtaacttctaacactccctactctgctagctccgactgcggtaacttttgtgtctttgggaccgagaaacccatcctccaggcttagctttgccaccggttgatggacatatggtggcgatctctggtggaccgcaccttgcaagaagcaccaagaacttccaaaaaaggtactttagggagttagatggagaacaggaaacatgcattgtagcacagtcactagcctaaaatccttgaataatgaatctacctatcacgacgcctgacatgtgcattttccccataatgaccccttggtcattgaagcccaaataggaaacaagagaatttttagagttatggtggacaatggaagctccataaacatcctgttcaaatctgtcttttaagaaattgggctcaccgagggagacttgtcagcttgccccatccagttacaaggctttaatagggacactgtaatgccaatgagaaagatccaactacctgtcactcttaagggagaaaacaatgtttacacttttaagcattgtacttttgtggtggtggattgcctcacaacatacaaaaccatagtgggacgcccagtcttagtagattttggatcaataactttaatacggcattcgtgcatgaagtttccatacgacaatggatctgtgggggtagttagaagtgaccaaaaaagagcaagaatttgttacaatgtctccattcaaacgatattcatggtccgggaagagacacttattgctcccagaatggaaactcaagtggaagctgaagccattcaggaagactttaaaggtgagctaaacccccgagtgtggatggaaagaatgattaagctgatggaggatgcggaggaagttagcatttgtgatgaagatcccaccaagaccattaaggtgggggaaatctgttggaaatattttaccaggatctagatttactaccaagtatgtttcattaaca

SEQ ID NO: 313095 - DNA, 3379 bp, Cannabis indica
cgtgtaataacttaataagatcagtggtgatgaatggatcggtaatatcatccctctacaaagcaactctagctaccaccctactgaatctttcaaatcctaaaagatatattcaaaacaaaaaaaaaaaatcaaatttacaaatgtttacctcaagacatctgtaaataaatcaataaatccatatagaaatgaaaattaccattgattctgatattgatttcccttgtaaataaacataagaagaagaaaaaaacacaactttgcttgataagacattttcttctgcttccttttcttttttatgttttgataaaaaaaaggttggtattatttgaaatttagaaagacgagaatttatctttctcttttagtaagagaccatagtcttacaataagattgagaaaaagcctaaacctttgctgaaatttttctagaaaataaaataaaagaaaaatgaagactaagattgagaaagaatcttttcaattctagtaaagaaaaatagaaaacgaaaattagaaattagagaagagagatagcttaccttgctgactttgcatgagcctttcccagccaagaaggcaatgtgtcctggagcgtgcgtcaggggaggggaggaagtttgggtctgagtcaatagagggagggaggcgacagtttatgtgagggttagggttagggtttgtaatataagataagagagagaggggttattacatgagagtatatataattgtatttttttaaaaaaaaacaaagaaaggccggcccgggttgggttgattgggccacaaaagctctggcccgtttccgacccaatgaacacgggttgcttaaattccaacccatttcaacttcgacccaaattttagtgggttgttccgcccattttcggtgtgggttggccgggttggtcggcccaccgggttgcatgctcagccctctcaacctcactacaaccatcaaaacccaataacaacaaccaaaacaaccctaaaacaagctctcaaaataattgctaaacaattcaaaccctaagagaagcaatatcacaaattcacaactcaaaaccaaattatcaacttagagaatcaaagagataaaggagctagggttttaccttcaattcttacttgaaaaccttctgaattcctaatgaatcaccaagaaaaagggtgaatttggtctggtcttgcttggtttcttgagaggctgagagagagaatggttaggaaagagagaatttgatttttttaattaattaatcattgtcccttattttcttattttacccttaattaattttagcttataaaacttaattaaaacattaatattccactaaagaaaagacaaaatcaacttaaggcaaaaatccccaaaatgcctttcttctccatgaagtaaccttagaatctaggggtaaaatggtaaaaacccataacctcactcaatcttgacattctaaatgtccaaataacttgctctgctaattccaagatacttaaccctatctatgtgactctaatggccacattgtcagattccagttccatggaacaaaatataaagatgttaaaattcataattaacatgcatgacacacctagaatataataaaatctccataattgagaaattatttcacaaatgcctatttctgacaataggtcgtattttgttctaatgcacatatataacataaacagtaattaaatcactaatgtgctactaatttccatatctaaatatgtagtcattacatttatccctctgttaaaagggtttcttcctcaaaatctaatctgaataactccggatattgagccgtcagaactctgattcctaagtggcttcctccaccttactgtttctccagagtaccttgaccaatgctatggtcttgctccaaaggactttgtctttactatcgaggatctacagaagtggctcctcatagaataaatttggttgtagctctaaggcttcgtaactcaaaatatgagttgaatctgacacgtacttcctcaacattgacacatgaaaaacattatagcattgacacataaaaaatattatgcactgctgataatgttggagggaaggctagatgataagctactaatctaaccttctcgagaatcttaaaaggcgttgtaaacctagtgctcaactggcccttctttccaaaacacttcacccttttcattggtgacactcgtaggaagacattatcccctacttgaaaatgtatatctctgcgttttggatctgcataactcttctgcctgctttgagaagcaagcatcctggtctttattttctttatagcctcactagtctactgaactgaatctgcacccaaatacttcatttcccttattttatcccaatgaatcgaagaacaacacttcctaccatacaacatctcatatggaaccatccttatagtactctgataactgttgttgtaggaaaattttatcaaaggaaaatatttactccacaaactttcaaaatccatcacacaggcttttaacatatcctttagtatctaaattgtccttttggaatggccatttgtctaagggtagaaaattgtactaaacttcagtttcgtacctatgaccttctaatgactctcccaaaatttgaaagtaaactttagatctctttttgaaataatggactttggagcccaaggagatgtacaatctcctttacatataaatcagggtactaatccactatatatgttgtgagcttcatttcgcaccactagtagtaggatttcaaatcatgatacatcttggtggtacctgaatgcaacgagtagggtgtagtgtggacttcatctagtatctctttcttgagctcaccactgctcggaacacaaactcgagccttataaagaaacatcccactgtctgatactgagaagcctttagcccgacaagctaaaacttcctcctgagacttaaccaactcagggtcttctgcttgagcacttctaatcttttctattagatcatactgaagcgtcaaattaccaagtctccaaccacaaactcaatacccactttaacaatgtcaattggcaaccgaggagaaatcatcttggtactaaaaatctacccgaggacctttcctactcaaggcatctacaaccatattagctttctcgggttccttgaaaccctcccactacgacaaggtaccgtgattatatgtctaagaacataagtggtattggcctcatcggttgtgtcaagataatagaggcagtgtgaccatcttatatagaataagatgattaaacattttggaatcaagaaaaaaacatctcctctactttgctactttgttttcagactt

SEQ ID NO: 313096 - DNA, 1704 bp, Cannabis indica
tcacattaatgcatataccataactataattctgatcatgttatttttttgtttttttttttttgttctttggcctaagttccctgatcatgagatggttagattagaaactatattttaatatgagtcgggtttggtatgaaaaagattattgaaaagaaaaccaaaaacaatttaattccaagttatatatgtatgttcaataaaaaaaaacaaagtactattaatgatttagcatgactactaatataattatataacttttcttgtatattcaattaagtttgaatctttcttccacgtcttatagggaaaaaaatcttataataagagattccaaaatatgcagtaggtcatatcaaatatatatatttatttaatgtatgtgatgtagcttattggtttggtaaagtatacgtcacattattattattatttaatatttcatatttatagatatctaccatgtaatgatgatgaagcaaaaattgttaaatatttttaaaattatacaaatactttaatcaaattttgttttatatcgacagaatagtttaatttggtctcctcatatccccacaattcaacttggagtgtggctttaacttttttattacataaatttccacttcacgttacaacttttcgagtgcttggaggggtcattttatttattcatttatttattttctctttctattattgtttttatcatttataacattttgtcattactaattctattattgcataaatgttatacaaataaagacacaaaaaattaattattggaaatttcaaaatgtgacgctaataatcacataaataaaaatactaagtttaacgttgttgacttatatacaattgtgagagttaatatataatgcgtcacacaacttgattggttaaattatttattaattaaattgaccaaatttttattccaaacttccaaccactaattatctttttatagtaattggaaaaaaaaaaaaacaagaagagatgcttaactacaagtttatttcaacgatggcatgacgaaccaccacatcatatgatatcaacatcataaaatcatggattagtgatcttattattcttctatattggttgaaattggattctaattataacataattcataaatgattacttttcatatactcaatactatgtgttgagaacttgagatatataatatattatatctattgtcactttgtcgcatgattgtattatttatttgtgtaccaaaacaaaaccctccgctcttatacgttggatattggtgaaataaaattatgagaaattttgcattagggcagtgaaatttttcttattaatagaaaggtttttttccttcttttttttgaaaaaaataatacagtgtgattaaatttataatgaattaactatttttacacgaatgaactagattataaactagtgagtctttggcatggaatgtctaaggtgtggacaatgccctaatatcatgttcttggattcttctttgatagatttgaggaattagggtccatgtatgtccccaaaaatttaaactctagtcatggtgtgcccagatcactatatatcaacttgggcgcctattagggcttgttggtgccagagtatcatttttcgtagactcatctccaaagtctgaaacttgacgggggtatgtctctcatgtatgttaag

SEQ ID NO: 313097 - DNA, 1259 bp, Cannabis indica
agagagagagagagagctttgtggtggtgatagcgggttccatggcatgtttgaagacgagaatgagagaaagacaagagatagcgaaatctaaatgtttgaacaatgcgaaagttttttggattttaatatgtttaacatgctattcccgttgatttaaaaatgttgggtatactgttattgtcgacaatttaaaattgtctagtatacccaacgattttaaaccgccaaggttaccattttaacctattttttaattttaaaattgtgaatattttgcatagttagggattataaaatacttgtttaaatttattgagaatagttgaattatcccaatagtttaaacattcacttaactttattagcgacagttctaaatggattaatttaaaaactcacacaaataaatcttttgtagtagtgtcaacaccctatgccctttatattgttgtaatagttgataagcactcttcaccatgtataaacccgaaacctctggactccaatataataacaatcatccatacatagctttttcgctcaaaatggatattcactatatatataagaaacgtatccctaccaataataataataataataataataataataataataagaaatttattgtttgggagaaaattagcaagtccaaattattataaaaataagctcaaaagtcacaaaaggtccattctaaaagaagtactatatgttttattaaatatgtatcctagatgaagtaagcatataagtggaagtaagcatataagtggaagagttagatactagatagatgacacatcttaaatgggatgagatagctcaaaacagttgacttatctcaaatgagatacatatcttggattggctgatgtatctcaattggtcgatcggtcagttgacgtatctcggttagtcgtccggtcaggtgacgtatctcagtcggtcgatcaactgacgcatttcggtcgggtgacgtatcttggtcggtcgatcggttgacgtatctcgatcggttaacgtatcttagtcagttggtcaagtgatgtatctcggccgatcggtcagttgacgtatctcgctctgatgacccgtcactacaagaaaggggaccttttatcccacttttttagttaacaaaaataaaaaatgggataaaagatatataaagactttttatcccacttttagatttggcgcctcaaatatgcagcaaatatttttttagacaagggctctgtttggtagaa

SEQ ID NO: 313098 - DNA, 2191 bp, Cannabis indica
ttgtttactgtaaaagcaatgtttgggcgactaagagttaaatatagaagtcctcccaagacacttcaaaagaaggtaggttgatcaaagcgcttactgtcattgatactaagtttgtcaccttgagagataggagttgggcttgagtttgagtgtaacatatgagttttggtgagtaaatcagtagtatattttacttgtgagtggtgaattccatggctgtcgcaagtgagatcgaaaccaagaaagtaattaacgaaagtcaagtttttttagggagaagacctactgtaactgagcaatgataccacaaactttgtggttattgttgcctattaaaaggatatcatcaacgtatacaggaagatataattcagcacctccatttttgtaagaaagtaatgatgaatctaagacaggattttgaaaccaagtgagaatatgacttgtttattaagtcgatcaaacaaagcacgcggcgcttgtcgaatgccatacaatgccttgtgcaacttgcacatatagtctggatgtgtcttgtgaagatagtcgattggttgttccatataaacatcttcagagaggacaccattaagaaaggcattgtcaatacttgttgaatatctcaattgtttgatgttgtcaaagaaagtattacaggttgaaatttaaacaacaggagtaagagtttcaaagaaatcgatgcctggtttttgttgaaaacctttacccacaacacaagacgcgcattaaggcgttgaactgcccttcttgattcaatttgacacgaaaaacccatcgattatcaaaaattttgataccatgtctccttggcacaaggatccatgttttgtttttgagcaaagcataaaactcagtgtccattgctaacttccagcgagaatttttcaaggttgcacttgcactatatggttctaactcagtcattaaggccaatggtaagagagaaggcatgaaagacttgaggtttatgtatactagctttggctttagttatcatgggacgagaaggtgcgtttgggttgggtagagggttaggtgctgcattatgttgcagctaggagggttaggttggtgtggctgtttggactgagataaaggtgacagtggatcaagatctacatgtaaaggtatggtggagtaggagttgacagagccaggagtggcttgatttgctagaccaggtgagttgtgatgttgagtgataggagaatgtgaagaaaaattgtcttgttgggaggtagaacaaggagctccatcatcaatcataacttcagtagcatgatctgaagtcacagtagacaaataaggcagccattgagggtaatggctgggtagcaatggtggatttgtatgaacagtaggataagtaaagccactagcaaagaggaaaacaatttcatcaaatacacactactagcaacatagacacaaccagaggtatgaaggcataaataacccttgtgacttgggctataccctatgaaaacacacttggtagaacgaaattgtagcttattggtagaatatggcctaagatatggatagcaagcacaaccaaaaaccttcaagaacttatagttgggagagagaccaaagagcttttgaataggacacttatagtttagcacaggtgtggcaagatgattaataagaaatgttgcagttttaaaggcttcccaccaaaacctttaacgcatgctagagtgagcaagaagagtaaggccagttttgactatgtgccgatgttttcgctcgacttttccattttgttggtgagtgtgaggacaaggatgcctaaactttacacctattgatttaagatatagcttaaacttgcggtactcacctccccaatctgtttggacaatttttatggtggtattcaattgtttttctacttggatttggaaggttgtgaagaccgaggcctcatcttttgttttgagaggaaaaatccaggtgtatcgactaaaatcatcctaaagtggatgtaatagtgataactatacctagacatagtaggtgtcaaaccccatatgtctgagtggatcagctcaagaggtagttttgattcttttatagcagcaggataagccttatgatgagcttttccaagaggaaaactttaacaaaactataaattggaaggtaaaaacttcttttcatt

SEQ ID NO: 313099 - DNA, 1926 bp, Cannabis indica
aggagtgttcgggagaacactgatgccacgtacaaatctcttgtgtcaagttattttattttctgcaaatattttatattctgcatgttctgttttgtcgttgcaaaactgatttctgcagtaacagaattacattctgcttctgcagacgtatacagttttatattttcatatatattactgacatttgcgaaaactcggtttttcaattttgcataaagaataatgaaaatttatgggtgaggaatttgaggaaccaaagccagatttttttattgtttgaattattttaccaaataaatttaagttttgtttgataaatttatgatgaattagtaatttttctgtaggttttttttttttttgttgattgtagttattgtacttgtttagaatggtaatggaaatatagaatctacgaaaaataaaaagacatgtagcagtcatcaaaaaaaggacaaacaggaggagagagagattgtaatattatttagtttttttaaatttccaaaagaaattatgaagtagaccaatacctgagtaacacgtggcatagaaatattctcagttatatttaacagaaaagtagtaacagaagtaggtaaaactaaactttgggaatttaatcagttaaaaaaaatggtatttaagtgtataaaattgaaaacatttggtatttataccgcaaataactcttaattattcattaatttttttaaaaaattgattcttctctctcacacacattctttctctccctcttaattctttcttaggtttctcaaccgctcaatggagtatccttgtcacttctccctttcctctcacattcggcttcgatctgttgcctccagccattgaagctagccatgacactcgcaactcctctctcatttcaccttctcttcttgtatcttctccctcttcctctctcatattttttcttcaattggtttggatctaaatagcataccatgggtttgggttgtttcaattttgaagaagaaaaatattcccccaatgtcgacgatggatctcgccttctcaccttgtctcttctccctcttcctctctctcacggtgattgtttgttgcaaattgatattttgatttatggcttttcacttattttgtgattttttttttatttctttaattttggtttttgggtgttaatttttggatcttagaaatgcaatggttgtggtggtggtgctagtgatgttggtttttataatttcatattagagtcgtagcgacaagtgtaataaaactttttggttttaataaaaattaattgttgaattcgatatgaaccacaaactctagatcttaatgcagttatacataatgaaaacctaactattagtttagagattttacctcttgttgcctattagggtatcctcactatctttttcgtattatacaatcaaatatccaatccagaagaacttgttgaagagttcacaccagggtcttccaagccagcctcaacactctagaaatagagtgggctattagattcaatttagattaatataattttgtaatcacaatatgtactcaactcatgagacactgtgattaagatagggaagaccataacagacaccacactgagagagagtggtgtgtgagatagtttagagacagagagagagtgtaatacccggaattaagaaaaggattagcaaagccctaattaaataattatgaataattgaggaattatattattatatagttcaatatatgtgaaattatatgaaatttaacatgttaagaccccgttggtgagctaggggcatttttgtaattatgacccgagaagggtaaattcatgagattaatctaattacgtgcttaatagaactacattattatatagtatttctgtgttgtcttttcaggtgtgttctgaca

SEQ ID NO: 313100 - DNA, 1848 bp, Cannabis indica
ttactttgtaacttgtttgggtgagggcgtaacattacaaaagaaatatttttgcaaaaagtgcaaatatttattgagaaataaacaaccaactttctaaaaaggatatttaaatgttgtgcttttgaaatggcacttgaaaactaaaaaactaataacattattcaatcttcaaaaagtaattaaaagcttaaaagagtggctccacgtggcttctcctagccacttttgttgtcttggcaagtgtgttcaacgattggggttgacctttcatcgccacgctgttacattctcttgccgccaactgatccccacgtactatgccattcccatgatttgttgaaaactttacagccaagtgtcttactgatgtcactgcccccagtgcaaaaagcactagtcttcccattattacactataaacgtatggaatgtccacaacgacaaattttgtcatttttgttacagtttgcggggcctctcccattgtgagagggagagtaattttttcaatactcgctacgccttcaccagtaaatccatataattatgtggggcatggttgcaagtcgcgagtctctagtcccatcttgtcaagggtactggacttgtacaataagttaactccacttccattatgaacaagtattctcctaactctcttgttggcaatttaggtggttatcaccaagggatcattatgtggcatccgaacatggtctccatcttcttcattaaaaataatagaattttctgtatgtggttgttttgggggatgctgaggtggtggcacttgcgcgttgttgctacttttcagttcattaatgtagcggttttgggccccattgctagtttcaacaaagtgttgacctccaacaattactaaggcatcatctccttccaacggtggcgccatatctacattttggccttgtggcgggactggcgcattgtttggcgtgacctgggcattgttttgggcttgcccttgtgctcaggcatttggtccgtgcttgttgcgcgcataacgagcaagtggtctggctagaatgagatcatcaatttctattttaagactttgcactcattggttgtgtggacaacgtctttgtggtatcaacaatactttgaggtatctcgactttttctgattcattttattggctctagaactctaaaattcacaattttctcattggtgaggaaaattatttgtggtgtttttgtcaattatgtgaagatggtgtaaaaagggtggttagtcctccctttcttagtattattgtggtccccatcatggtcatttttccctttgttggcagtgttcgcattggagggattattatttgttgaagtgggagtaacttctattgctccagatgaaagagggaggttattggccaaccttgcctcttccctattaatgtattttaaagctcttttcatgaactcatctatggtgcgtactccatttccttgcaaactttcccaaaattgggacccattagtaattcctgcccccagcaccataagtcttccactatcattaacgtctctagccttagcggcctcggcattaaaacggttgatataagcttttaagctttcgcttgggtgttgcttcacattggcaagggaggaacattctaattttctggacttgacggcacagaatttcttcttgaagtcacgtgatagttggtcctatgaggtaatggagtgcctcttaaatttcttgaaccaagtcttggctgctccagtaagtgttaaaggaaataacacacatcttaagtcatcaactacttggtgggcacgcctgttacgaaaattatgaacaatacgcaagtg

SEQ ID NO: 313101 - DNA, 2823 bp, Cannabis indica
agcaccaaatgttgacttcacttgtagccaacggcattgagtaaaaataaagtgattagttataataaataataaaaagtaaaaataataaataaagagaacagcagaatttctagaggttaagtcccgtgatggcggtaatagcccactcccttttaggttgtattgacttatgagacaaagaacaaagtattctctctctaaagctcttacaatagatctatgagtaattctctcttagatcgctatttctctctcgagtgttctttctgaatcaattttgtcccctcaaatagtgagattaaatcactatttataggggctcattacatgaagaatgatttaccataatctataataaataaaatagaaaactagtttatttctataattacaatgtagatattgggaaatctagacttattgcctttactctttgaatttatcccacaaatataggaattatcttcgcgacatgcaagcttggaagtaaggatgtccatctctaaaattgtcaactcacattccctgcctggtgtatgcgagttaatcacacgatcgagcttggtcggatgtcccttgatgactctgtctgaacatcctgctatgcatggataatatggacctttgtatcaatccttgggggctgctaggcgcgtaaccatccacacaggttagaaagtctaagacatgtgtcatccagctaaatgtcacgtcataatgtaaaaaataggataacagtcctttctagggcattggcaaatagatgtattagttagcatcggtctggaccgatattgggagtggaaaagatatcataaacttacaatattatattttctaagttgatgtcacttagctgatcttaggtcaattgatctcaatcctaagataattaagttctagattaattgtactatatgagttctttaacttattcattacaagcttacctgtagctctagcccatacttacatccttggaattcggtagtgcaattgtgtgggagtgttaatcatacaaatagaatctatagcttctataactatttagaagtgaagcgacggtttccttagagcttggcctaacgacataaatggaagagctcatatttcgctaattacattagttttactaaaatatcaattataagtagctaagtgttttaaggataaaatacatcgaagggtaaaacaataaatttgtcttttgaagatgtaaactgtctatagaggatcattgattgtttagattataacaacagataattcatagtgtatctgtatttggtatatagatttggtatatagagcattccatgtaatcaagagtgtaattccaaatttatagtggagttaagaagaattaataagttgagaaatttactaagtaaattttggattagcttattaggagcttggttacatagacccatagtccccacactatctgggataatactaccttgtagacttagttaaattgatttattaagttaattgtaattcaaaaataagattatgccttatttgagaatttttactgaagtttggcatatttgagtatatggagattagggttttgtttgttaattaagatactttaaggatcttattaataaatatttaaacataaattttgtttgataattattaataattgtcaaacagataaaattaatgtttaaataaagagggttgaaaaaaatggcattttgaaagagatagcactgtttcatttgaatgaaacaaaatggcaaaaatcaaagccttgaccccaggtgtagaattcggccaattatatttttctaaatcccatttgatcctaaagctaacatagagagagccaataaatagaacatgatgagcattgattgaaagagagagttgcattaagtgttcttcagtattcaaaagagaaaaaaatactacaaccctagaaattagaatagcttcctttgctctatgaaaattttgtatccactctctctttccctttctcttcttaatattgaattcagcccagtagtgagtgagtgtttgctaacacaaataaaggttgtactcaaatcagcatagaagattgtgtagaaaaagtgtttcgctattcaaaggagaattgagtttcaatacttgttattactctgcgatagaaaggaacaagagttagagtattgaacggaaggagtcatattgtttctgttgcaatcaatgtaaagtttctcgaactcttatgtgtttaattatctttcaacagttttcatatttaggatgttaaattataatatttataatcaacatacatgattagtaaattaagattctggtaaaataatttccaacaatttactccatccacagatagaccaagatgaagatgccttcgttcaaatttgaattctgaatttatgtaatttactttttttttgttgcttgtgaatttgcaagatgtctgagttttctatccttcactctcttagtctcgtgctaaatcaagtttttagaatattctgcactacaatataatcgtattaagtcgaggaatcaaatgcatatgccaccacactttttgggggataagtttcatattatccttacccttgtttattttatggtgggataaactataagttgggtgttgtccatgtctgcatattacttacgatataaagtaaaatcattcagacatgcgtagatcttttcatacttcaatcctatgaaatttgaagttttctttacttcatatgtagactccgggaaacaactgtcaaatggcaaaatatctttaaaaatagctaaaaattgagtaaaacatttatcgct

SEQ ID NO: 313102 - DNA, 633 bp, Cannabis indica
ataataataaaatatattttttggtataaattttagtgttatggttggagcaattttctcgatatttcgggtattgttgcattatttatcaatagggaaacttcaagttttaagtttaagtcattgaaagtgtcttaatgagacacttaccatttttacgtgaatgtaacttagggcttttgatcgtcgagcaattttttcacttaggtcgattgatacacttaattatggaattgaggtaagattagtataatggatatacatgcatatatgtgttagcgtacatgtttttgtgattgtatattagataaatatatcagtaaaagcgatattggtgtacatagagttgcattagatactgacggatatatgtttgacaaattcataaagtacgaaccgatgctactacatcagtatgactagagtgctgagtataggatggtattatggtcatttgtactcatagtatggattgatactatcacattagtacgactagagtactaaatataggctgatattatggtcaatcgtactatgtcaattacatttgtggctcaattttaaacttgtgagtaggtgtatggatgtctagttacatgttagttattgtcggaatatgttttaccagga

SEQ ID NO: 313103 - DNA, 1398 bp, Cannabis indica
taaaataatttccaacacgaacccccaccgtcgaattagtaggtggcatattttccatgtggtctttaccgatgtcagattgtactggctatactggcggtgctttggacgcgtgtcattccagggccgttctcatttgaattacccttattcctagttgttagatggttttgcatagtacataaggacacacatgatatgcatggtagcgtgtcgtgggagacagcctctaacatcgtacaagtaaaaaccccaccattgggtctgtagcctgacacgcgtaccccgacctggtgcagctcggtggaaggtctatattctttgcgggagcaaagggtcccgtcttttagaatgggaaatgtcactggctcgcagatatctcttttgtggcctctttctgggaagacgtctctcgtagggacttattttgcgaggttcatgttggcatcttcccggagcgtgaggcaaggcacgtatgcagcttaacgactttttgtttctttttaattaatgtccacgtgtcgttccaacgaaaatgtagataacatttaccccacaagcttctgagacataccctggtccgggagcttgcagtgtcttcaactttttgcgcacgtggtatttatgacgagccctttaatgcattatgtcatgagccgtcaaattgtagtgtccttatgtgggaggtatgatttcctttgcctctatgttaggattttaaatgctgacttttggattcctacgcgcgtgctgggcgcgcgtacctctgggaagctcaaaatggcgacgattggacttaggcagtcttctcattcactgagtgttctttacgatgcatgtaatgatgggagccgtccgttgggaggtgaggtaccctttcagcttctcacatccaatcatcgaacatctcttggggcgaactgaagtgtcggcttcttacgaaaggtgtaccttcctaggcgtcccataaataccttcagcagccattacatttttcactcttcttgcccgccaagtcaaagcttttcgagttcccttcttctcagttacatttgaacgttgttgctgtcagatactgatttttctgccaaggacaccacgccgaaatcatctgcctcatcactggtacgttcttcgttcacttaatagtttctcagggaatcattacagtgcacctgcttctgggactccagtttcagcagcgtcacttcttgggaatcttagggccaaacaatgacccttttctttttctgtagtaccgacttatgataggtacattatgtcgactctggagaggaccggtccttccaagatggcgggcagcagttcttctgccaggaagaagcagaagctcttggtgtcggacctcaatatggggggtatgggggaccacccccg

SEQ ID NO: 313104 - DNA, 508 bp, Cannabis indica
atgaaacgtgggaattgatcacgtgtcatttaaacacatgtagataacaattaataaccgcataatcgcctatcattcttatcttcaaggatggtagatgctaatttggacaatagcagctcgcttaacttgtgaatgaccaaagttgatttggacaattatatgccttccagcaatggcatgagcatcaatgtattgagcaaacttaacaactgctctttgaccaaggcctcacagactggataatcatgtcctgaatatttccaagttgttacacttagttattgtaatgtggaaattacgctaagtgttataacaactgattcgcctcgtcaaaattttcttatgtatagcgaggtggatgcctcactatgtattatctgtggttgattcgaataacttcacttatttttttttaaaataaatgaatcttgttcttggatctacatattccgaggcagtatggtgtctcgtcaatacagatattaatagttttgtatcattgtct

SEQ ID NO: 313105 - DNA, 2138 bp, Cannabis indica
ctagtgtgcattagctataatattgtagctaattagaggcacatgattaagtaataccatgctaattaattaaccaactgaaatatatatcattaataattaatattttttttttgtttcaaaaatataattaaatcaaatgtgacctgaaaataaggggtttatgccaacatgtgaagcattggtcaaaacttaattgtcctgctctaataatttttcaattaaaagaaagaaaaaaattagaccaagatagagtatcttttagtaccaattctagctagatgtccaaaataaccaaataattataccccaattcatattttatttgaatttatttattacttcaatattatatacatttaaaaaaaacagaaaatttaatttcatattacttagaaacttggcaaaccaaaaatgattttgtccttaacaattgtgtccaaaaaagagtgactaaaaaaatggcaaagagtaggatacacatgttggattggaatacgcaatcatctctttcaattcatgtgtattctaaatgtttttcttttgaccaatatttttatatatttattattattattcatttttgtattcaattcttcaagattaataatatatataatattcatgtatacagtaatgatacgagcacacaaaataactacctttgtgagatagtttcaacttgaaagtgtttagattcgaaaatcttcgtaatcttctctaatgttttgtcggttgtagatggtgtgtaaatttttttttttcaattttaggattagtagaccttttttttacttagaataaaaacctaaaattctacccaaaagtgcaatatagttctaaaaaaaagaaagaaggagatatcattaaaaaatcatgacattgatgattaaattttgaatacaatctagataattattttactacttaccacagataaaacaaacttagtaagattttgagcaacaacattaattaattaacttaaaacaatacaaaagacttatattatttaaaaagagtaaaattacaataaatatctcaaaaaattaagtctagcgacgagtttaaaaaaaaaattattgttaatcttattaaccacattaagatagttaatttcaaaatatttttcagaccaaatcgatagattcttgcatgacgatcgaagagcaaataataactttagcctgaaaagatgacattggaactccgcatgcatgacagattagtagatctattaataatcgagtttgttctcttttgatttgggttgctataataaaataaaatttttagcgttttgaaatatgttagtgttactccgtttaatattttaattcatattttgtgggtaaggtaaaaaagaattaagaggacctaaaatacaatcttaaaagaaatttttatatcaatttatatatgtaacataactttatataatttacaatatatgtacatagtaatacctttatgttacatttgtttatcaataatattatatatcaaatatgatatatgttaaattgataattaattttgaatcaaattaatatgtaaattttcaatattttatagatataattctatcaaattataaacttctcatagtaataatacatcaacattatcaacaaaaaaaaaatttacagtacaaatattttttcccctcatatgtttagggcggtcgacaaaacatacagctaacttcattcccaattaatcacaacattaacatttatcttgtgaaactttttcttgttctgaaaaattgtcatgacttgatcgaaagacataatctataatcatctaatattttctccaaaattctaataattcacatgtactaaaattacatatttgtttaacacatcacatgttgcttacatatgttttatagtttattttgtgtttgaatacataagtacaagtccaacctatggactcttcaactaacttttacacaatacattcctatggctcacatgtttttctatgagaactctaccacaaaaataatatatataaattttgtagcaataataatcttaataaaaatatatataatgtgatacaacttaaaaaataataatattcaaagggaaatttgattttctatacttacatatacttaatatttt

SEQ ID NO: 313106 - DNA, 811 bp, Cannabis indica
tttttgggttttgggaatttgggtttgagaatctgaggctgagtttgttgtatttataggtctcagaaaatatggggagtcactcaactcactttttttctactcttgaccccacaattttttttttaattttttattttaagaaaaaaattaagataatatatttataagtagtattgtaaatatggatcaagtttgttacagagtttggaaggcacgagtacgaataagtacaaaataatatagattagggcacaatacgacatgatgctacaaattgacacgatatataaatacaaatatattagtttgaaaaatacgacacaacaagcctaaaaaacacgtcaaaacactctattcacttttttccttaaccccacaattttttattttttattttaataaaaaaaattaagataatatatttatcagcattcatattagccaccaacctaacatattttaaaagtggtgtcttgtgattattatattaaattatatgaaattcgatacttaattacattaacagcaaaatggcaataagaagagtgagtgctaagcaccacaaatagagccaaccttgagataaaacgaaagagacgtccgccttaagccctcaccgctcaggcccccattccgaaaaaaaaaattgtaatatagttagtaataaaataaattaaaatacttataatattaaatagggatattggcggctaaaccacctgaactttacggtttgtaacacttaaccacaaaaactaaatttttggcggctaaactacctaaactctggttctgttttgctctgcac

SEQ ID NO: 313107 - DNA, 1121 bp, Cannabis indica
ttgttgcactataagttttttcttaagtttcactttgatctcatctatgttctaatcctccaacattcatactttgagtttccaacgactaacattgttgatgagtttacatcatcaacagtttgacgcagtgtgtagaaacaacaagctcaagctacaatttattccttaatatcgtagcaaaaatcctagatgctcttgttgtctttaagatgtcgagattcatctagagaatactcaatttatcgcctgacggagagagccaccagcacccgttgctgaaaaagaaggtcagaacagtcgaatacctcaggcaagagaggagagtaaccatcgtggaagagatggagtaactgcatccatcatgcctgttgatgataataatacacaaaggcaaagggttccatcaccgataaggcgctctccggcaccaacactgcgagattttggtacttcgcgacaacccttcaatcacgaagaacttgttatttataactactaataatattttgatgacgagtcatcgaagaacaaagaataaccaaataataaaataaaataaaataaaatcatgttacacaaacaagactaaaacactcaaaatcatgtcatagagataaaactaaaacatttaaaattatgccatagagacaaaactaatcacaatagcaaaacacaatcccgaccaagccgtacctatacctagggaaagttggtgggcctaatcggaaaaaaaaagataactacttgtagctaattttaagaaggagatttttttttaatttagtttatattagtataataatattgtatataaatgtagggaccctataaatgtaatcaaatttgtcatccaaaaatttattatttgtgatcaaatatgccaattaaatgaaaatctgtaatcaaatttgtttaaatcatctaaaatttgtgtcaaatgaaatgtaatattattttaggtataattagttttcttgaacatgctcttattatagaaacgaaaaatcaatctatatacatatatagttgtgtatttttatgggcaaatctgtcattcaactaatgaaaaggaatacaaagtaaatggacaagtgataaattttatattagggaataaa

SEQ ID NO: 313108 - DNA, 899 bp, Cannabis indica
aaaaatgcttttgggaaacaaacaaagctgtctagagccatgaaaaagttgggcgtcaagggtgacgactcccttgacactgggcgcccaggttgatatgttctacacgaacatgtaattctgtcgatccaattgcaattttgtctcttgaattactcttgttttgctccaaaaacaatatatgatacctagaattagaagaaaatatcatccaagtggtgattcagctcccagacacaaccaggcaccacactgggatcctaggttgacattcaacctagagctaggtatttcgtcaatcaaacgatagttccattcttggaattaatcttattttacctccaaaatactactttgattccttttcaagtaaatatctcatttacatgtgtgacgctcaaggccaccgacacccatgtgcagtagtgatcacctggttgtctcatagtcgtcacttgtgattacccatgcatcacacatgtatatcaagtaaaatagccaatagatattcatggagtcaaagaatgaactaatgatatctatcacattattaaatcatctcaaaatatgcctgaagcccatgaaacaaggttctttgaacctattggttgacattttatgtcgacctaggtgcccaaaggtcgacttgaccttgtagtcactttcagcaatgcacaccactcaataaaattgtcataactcactcaattattatccaaatgatactattaaagtggcatatgaaatccattttcaatacaaatctaagtgtagttcacacccttgccacgatcttgatgtttcgggcctcaaaatcaacccctgagctagtgcataatatgttggaagttattttaccaggatctaaatttactaacatgtatgttgattataattct

SEQ ID NO: 313109 - DNA, 1617 bp, Cannabis indica
atttaatttgaaaagtagttaaagatatttcgagttggttgagatatttcctcaaagttagtggagagattccctcatcaggaattttagtaaccgaatacagttttaaatatttatttaaataattaaatataatttaattaattaagaattaactactataaatagaaacctgatttgagaaattaggaaaagcttttcacattataatttctgaaattcagaggagaaaagaaaaaatactttttactctcaaatagtttttgctcatgtattgagaatttatcgaaaataaattatacactttatcttagtagcccacactactctttgtgtgtggtggatcaatttagaatactacggtatgaggttattgcatctaacttacaagaagtttcgaggataccctgatagttatcaacatgtatacatatattttgatttcatggttatacatctggctattcttgggctatggtacaatgatacttagaaatttaaattttttgctgcatatctaatttactaccataaaactaataattggtatttagagcagttccatgagtgtatatacattaaataatgtgctaggttttatgtatttaaatatatgtgatatgtatgtaaatggattataatattattgtgaatgtatgagatgtgatgaatcattaattatatggtaaaattcggtgtaggctttgttattattattttttagaaaataatataagtcatatggggcataggaatttctttacgtaattttaattttatgaaaattaatttatatgtaaattatatacctaatgtaatgtatattgcatgtaagctcagtttctaaacttgaaacccgaccatgcacagtcactcaagtggcttcgggtaccgttcccacgtgaaggagactcatgcatgcaatgcatgcaagagggacgtgagtcccttaagacacaaggaaaaccagtcgggtccaattggagccttgcgattggtggtggtcgtgcttggagaaggaacttgtttgggttctagggtcttcgggctcctcttgttgccaccgtgagccatggaccaaggaagtttggctcacccctccgcctcccttacttcacacaactgaagaccccctcgggtcttaggcaattttgacatgctaatgctcctcctcgtgcgattgaaccttatggtggccaaccatagccaccgtggccatggtggctccctagatccgctggccacggtgtgaccatagtggttggtccacctctaaacctaaaaaaatagctcctatatatgggtgtatatatatatatatttttgggtatatatatgtatatattatatgtaatgtatatattgtatataatatatatggtgcatataccgtgtatacactgaatatacaccataaattattattaatattatattaatataatacataattttgtgggatatttattttttcaaagggaaatttaaaattatatgcatattagggactgaaattggtatcctgatctaaaattatgcataatttgtaaaatgggataacttttacttaaatccaattttacccccctcatttctaaactgactctctctctctct

SEQ ID NO: 313110 - DNA, 823 bp, Cannabis indica
tcataaacatgacacatgggttttaatcaaataaggctaagaagtcattagttgaccaacctcctcatttgatactctgggaagataaaggccataacttcgctggaagagttgccgtgatagggaattccctgactactagcaacacagagggtatccttgaaccaaagtctcccaccgttccaggaaccaaatccattgactcctaagaagagaagggatttccccagaagggccaaggcattttgagacacgttaatccaggccacgcctttagcctgcggaagctgtgcctatacgtgtctgagtatggacctagtgaccaggatttttcaggtatgacgtcagaggttgtctcccacgacacgttatcatacagagcatgcatgtccttgtgtacctgaccaaatgatctaatagctagggatcagggaaatttaaaaaggagaagccttgggatgacacgcatctgaggcccagcttgtacgacctgacgcccttaaatgccatatggggagaatgccacgtacgaatctaacattcaaattttgccccaactatgatccatctaaggcaggacatgtaaagaagttggcctacagatattgctaaaaaagcacaaggggagagacccttttttgggagagatagaagactcattcttcatcgtcctaagaaaacatattttgtaaccttccaaccaactcaaaaatattcctactaagcttcattttctttaagaggaacacaggaaaaggagttacaatccattgtatatctataaacagttatcggctgatgagcctaataaaatggacttgtg

SEQ ID NO: 313111 - DNA, 1482 bp, Cannabis indica
gttagtgaaacaaaatttcctggctatatctcgaagatttagtttaaacaatactagtggatttgtagttctttagtgtttttctctactattgttactcatttctgtaattttaaatctagttttgaaatgatattatttttgtttatggttcgaagctaggttaattatttgttttgtactgttaaacaatactaagtatggttattttcattttgtagttgatagagctactgttgtactgtagctccttacattttgcaatcttttgttttagagttgctgcatctcttatggttttagtatgtaatgttttcagcccacactaaggactctgctaaagcactggtggatactatacaaaggacttttcctggtgcaaatttggctcttgtagttgcaatagccagtataaagatcatgtacgctttgtgcgagagctcctctcagtatcaggtattgtactttttcttttttgctgaaataatcaggttttgtacttagtcgttctatcttttccgttttctggtgggatgttacaaagaccaacacatatgttatgatccaatttggatatttatagataggctttatctcttaaacttttatggtggttaattatggtaaaatttgaactctactcttccattcacatgttagttttttcaagttatctgtagaaaaaatgtattaaaccttgtgaatgacattgtggtaattgctatgtgttactgtgttttggctataaaatgttccatgcaaagatctatcatgctagataatcacatcttatcaagtggaaatatagaggctatccttttgattgaagctagcattgctgggggggaagtctcgcacaacttcaacttcttagaatttaattgtttttatttacatcgatcttgtctctatttttacaccaccatctttcaaatatgcattggctacagagaccacattttgctacttagaatttaattatttttatttttatgttataacttaatttctgctcaattctagattcacatatatattttgattagaaaaaaaaacaagaaaccaaggttagttttgttaatgtttttgtttccaaatatttgtagatcttttaattggttacttgtcacaccatttatgggtgccttccttgaagcatacttcgtttaaactgttaacttttattttataatgttacatgttgttggttcttgacatttatgtgacatttttaaaccgacgcaataagtttttcgtgacggtttcgaaatgccataaataattttgcgtcatttctaaaccgacgcaaaagataaaaaaaagagtgcatattttgtgtcggtttttaaatgtagataattattttttgcgtctttttaaagcaaataaaatactatttacgtctacggattatacgtcggttttgtagaccgacgcaaaatctttatatgtcaacttaaaaaacgacgaaaataccccttt

SEQ ID NO: 313112 - DNA, 623 bp, Cannabis indica
caagaaatgtgtttccatgaaaatattttccctttttagactcttaataaatctgatattggtgtcgatcctttctctcatttagtttttccatcttctaatatatctaacacaaatataagtgatttctctgcagaaaattattctgataatcctactgctgctataccagaagggactgctactattgatctttcagaaaacactgctgctgtcataccttcaaatatgcagacccaatcatctcaggatcctagcccttctcaggactctcctcttatccctgacacggttccagcttcacccaacagcaacatccctcacgactcctcaactcatgatctaccaagaagaacaacgagaacaactcgacccccaacatatctcagagactatgagtgtcactctatcatacaagatcaatcatccacaccacactctctatcaaagtttctttcttatgataagctatctaaatctcacaaagccttcgttcttgcagttactgcccttttcaaaccaaggaattacaaccaagctagacaacataaagtgtggaacgatgctatgaacactgagatatatgctcttcttcgaaacaagacatggactgtggtgaaact

SEQ ID NO: 313113 - DNA, 1500 bp, Cannabis indica
gttttatttataattttacaatccaaaatttttatttataaagatactattataaagttttaaaataatatactttgctgtttcactacaaaaaattgttacatttagtgataacttttagtcacaacataaattttttatgactaaatgtgattttttatcataacaaaaaagttacttgtgactaaaaaataatatttagttacaacttgtcactaatttaattttagtcacaataaatattgtgactaaaaacacatttagtcacaacaaattgtaatttttgtgactaatatttttagtcacggatcttttagtcacaacacaataatgataatttataattagccacattttttttatctttaattacaaattttgttgtgactaaaggtaaaaaaatttgtagtgtttgctcagcaaaaagtaagaaaataattaaaaatcaaccttacgacaactataaatcaaatataaataaattataaaacaaccagaaaaataaacttacgacagctataaataaactataaaataaccagttagttttatttttaggttgatttacaatctagttttagagttatttttaatgtttttatgtttaattattcgggtttatgtttatttttacttttatgttaattttaagtttcagataaagagagtttcactttttggtgaaaatatggttctcagctttcttggtgacaaaaatgatcaaattttgcaaaaatgaatgtccagattgaatttcttgacttggtgcatttcgaaagattaaaaattcaagctttcaaattttagtatcaagagtggcgaccttctctcaagagacacgactctccaatcgttacagagagcaaatttgagaaaattagaaagtcgcaaccttcctctgaaagttgtggctctcgaagaaaataaaaaactatcaatgtttatgtaaaaaaaaaaagtcaagtgtcgcagccttccctagagagtagagatgaaaatttataccgcgggaatgggtaaccgcggggacccgcccctaatggggtggggattcctgtcttggtggttaatggggcggtggtgggggacaatttcaatacccgaagcggggatggggcaagggcggggataatactatccgcaccatatccgaccccgatatagatatatataatttccttattattcttaacatatatatagtatatatatatgattgataatcaaaattactttgattatcatccataatcaaaattatatatcatatgcttaaattatgaagatctaatgacgatagtgaactgatgatcattgtggattacatgtgtaaagatattttcttctcgattcttaatttcatctttgtttactttttaatttgttgggaggcttgagaggtatgagactatgatcctatacttgattatgattttttttgtttttttttttcaaactttgagacatatttagtttttattttctactaggttatgcttt

SEQ ID NO: 313114 - DNA, 789 bp, Cannabis indica
ataacaagtaaattgtcttgtccatttacaaaaaatgaaaataaattgatgtgatgtgaaaatgacaaaaatttttttattgaaactcacaattcgagtcatgtgactgcacgaaattgatcggaaccctactaaaggctactagtgctcagtgatgtgttttaaccaattctgtgcagccatgtgaatcgagatgtgagtttcgattgggaccaaagactttttattaggtaccttcatgcattgacctcctagaagagtagagccaacaacagcaccatagcaaaccataaattgaatagggccaacataataacgaccccatttaggccctgccatgacatatatatatatatataataataatttgttagcaaaattactctatattttcatcacgaataataataacttcatctaattaactttgtttctcataataatctcatattctagttacttgaatttttaaattagtttatgtacaaatcacttaacaaatttctgtagtaaattcttctaagagattgttctggtaaatttttttatttattttggtatctagaaaagttttttaatttagttttttttcctaattgcatatgttgtagctatttaaaactatttgtaaacttttataaaattttgaatagtttacagttattgtaaaataatgtataaataattacttaccacaattataagaaaaaaacagtcgcacatgtaacaaaataatgtaaattttaattttcggtattgtaaattattcgaaattttctaaaaaattta

SEQ ID NO: 313115 - DNA, 1015 bp, Cannabis indica
gtaaaataatttccaacatgaatctcaactcatttcgtgtgaataatttcaacaagaaggcaaatgaaaaagtaatggcagaaaacttggatctcttggaggaaagaagagatgcaacccagatgagactagcagtgtattaacaaagtgtgtcacgataatataattcaagagtttgcatgcatgccttcaagactggagacttggtgctaaggaaggtcctcccaaatactaaggatctgggggcaggatttttgggggacaattgggaaggcccctattgaattgccaaagtcatcccgcctgggacctacaagttggcttgcatggatgacacggtgatattgagggcgtggaacgtagtgcagttgaagaaatactattgctaaaaaggtgagtttgatgtatcttttagctatttgagttttgaaatcaaggagacagcctgtaaagcatccctactagattaagcttcttcttaattttctatctttgcattctaatgtaatgaaacaaagggcaacccaggtgcccttcgaattgttatctagaatacaaggatattacattggaattagtcaaccacaccttattcaaggatgacaaagtgatatccctcctctttcattgaacaataacaacaacaatgaaggagggaagtatgtacataaaaaaaaaaattgtcgcacaaagtccaggggcgctggaccattagtaactctgcatacttggaaaggtaaggaggaagggtaataaagaaaaaaaatattttttctaagtcgtcaaggactagctatcctttattgacgaaagaaatacacttctcctcacaaaatttgccaagcctaaagagctcttgaaagacgcttgtagcctaatgttgaaacgagagggatgcctctcaaacgtaagcaaacacttacaaatcaagagggaacgcagttaagtacaataagcccccatccatccaagtaaaaggtgttagcccaagatatgtttccaagagggggggtga

SEQ ID NO: 313116 - DNA, 1189 bp, Cannabis indica
ttggtgactgcagcagcttgtgcaggggtcatggtttgtccatctagaaaatacaaaccatgtttcttgatgcccttcatgacaagtaaagacccttttgttattctcatagccctttaccagtcttgtactcgaacccttcatcatcaagagtaccaagagaaattaaatttctcttccgatcaggaatgtgcctaacatttctcagtgtcttgatagtgccatcatagcttctgatggcaatggtgccaataccaacaacttgacacttgtggtcattccccatcatgacttttccaccatcaatttgagaatagtcaataaaccagtctttatttggactcatgtggtaagtacagccactgtcaagaatccattcatcattgtccctttgatctgagctagtgtatgcatctcctaactttgaagattcaccttgttccttgatcacaataaaaatatcaccatctgaactatagtgatcatcaactgctgcatttgaatcatttcctttatcctcttcatctttgtgttgctttttcttgtcccttagctcccaacaatttttgatcaagtgaccaaccttgccacagtgatggcatttccttgtttcctttggtcttgattttgatcttgagtttcccttgtgtcttgagtgatttctaaacttggattgatccctaaatctggaatttcctcttcttggttgtcttcctcgaatcatcaaggcttcatcatttctggtttcttgttttgcagccttttgccagttgagttctgcatctcttgatcttagagtgctctttacatcttcaagcgtgagagtatctctactgtacattataacagttctcatctccttgaactgatctggcagagcatttagaattatcacagcttgatcctcctccttgattgtttctcccatatttgttagggagagaacaattctgttgagatcatccaaattttgttccaatagaacagtggcattcatcttgagtccatagaattttccttttaagaagattttggtggctgtcgatcttgccatgtacagtaactcaagctttttccagattcccaatgctgttttctcccttataacttgtcttaagacattgtcagcaagattcatgatgatagcagatcttgcttgcttcattatggtttcaacttcacctttctt

SEQ ID NO: 313117 - DNA, 943 bp, Cannabis indica
ccgggtcccagtcccggtcccaatctcaggtcccgatctcggttctgagtcttggtcccggtcttggtcttgggtcccgggttcgatcctggtcttggctcccgagttaggtcccaggtcttagtccgagttcggggccgggtcgggtccgtcttcgggtctgggtccgagtcagggtcccgggtcccggtccgggtccgggtccgagtctaggactgggtccgggtccaggtccgaagggattcgagtctggaattaagtttttttaaataaattgaaatcggatcagatcagatccgatccagaaaaaaattaggcggggcgaagcggatctgatccaagatccaataagtatctgaatgcttcgaatcagaggtgatccgtcagatcggagctccaatccactttaactaaatagatctttttgacatgcttagtattggagatgtgtctgtgtgagggtataatttcatcgaaagatgtgcaagtacagtaggacttttatataaaaataattttgttataatacagtattaagaattatttgttgtcatttttgttttattgatgtttttttagtataattttatttaattataaattcttaattagaatataatttgtttgattctcactgattctttctattttatataatatatatatatatatatatatggttttgacatacatcttactatgcccattatcctagctattctaatttcttcactacatttttacattttaacctatgtaaataaatatatatattttgaacaagctatatatatatatatatatatataataaagtaacgtggtggtaacttcttcttggtattattttcttactaaatctattattctaggtaggtgtaacgcgaagtaacgacataaagacaataatgttacataataataataataataataataatata

SEQ ID NO: 313118 - DNA, 1750 bp, Cannabis indica
atataaaaactactgatgacataatcatgcatttctgaattccataaataacagtaacaaattatttaaatagctataaataatttcataattaaacataaacaactactaatttccaaattaactaagcgggctttacactggctgtcttgttatggccttgataggtaagggtctagatttactttatcaagcggaagtatgcctgcacgacttagaggaaagtttagtagtttattttaagccttaaaatttctctacataagttcattgtgtcaattcaatgcgttgtatggtatgggtgccgcccaagcgaccatgcaggtaagtctcttggtcattttttattcaccaattttcacagacttttcttgggttcttccttggggtggtgtccatagtatgcatgtggaactaaaagagtaactttaagaagttagtcttgtgagcaagtggtttagacacagttggtctaacgtgtaacaaaagcttacagcttagtgtttgcttttgaaatcacatagtgggtacccctgcgcagcttaatgaagcaaaggccaccgttgaagaatgataggagatcacgccaagaaggccctaggtactagcgcttttatgggttcctatgcgatgaaatgttagaggaacttaattgacaagtttgccagtgagagtacttatcgagatgttcactatttcatagtttgggtagaagttctgacttcaagttctcgtcttactcgccagacttgtgtgcacctttactgttatcttgtaacatggtgtgaaccttcttagtttggtccaaacatgcttgatgcaggggatttgttgtcaaggaatattctttaaggagtaattctcttgtgaagaatttctttcctcaatctgtttgttgatgggcttggtaactccttgtgctcaggcatgctgctttaagttggcttggtctcttcttctttcccttctgtcaagggatcctgctagcaagatgttgtgtacctcttggtcaatgtaggccagagctatgagcgcagactaatggtggatcgggctagccagtgcaagaccaggtggccaaccatattaaaggagcattgcctgggtgattggatgaggccatggccgaccagcatgtggaggtggtggctgaccagaatgtcgattctatggccgaccaacttactgaggacatggtcggccagcgttctaaaggcccgatcgatgttgtggctggatcccatctacattcgattggctttcccccagcgtaattgatgtagagcctttgtgcacttctatcgttagctatctatcttctttcttggaaacactccttggtggtgttagagtacaacttctgtgtgttatgttgtgcaggattgggcaccttgtagccgtcctcccaatccctgctctttaacaaggtctttgtttaaaggtaagctgcgataggtgtcatccatgttggagtgtcatccatcatgtttaactcctcttggataataatgctaggttcttctaggaactagatgggcactaggtttgctttgtcagctatggtactgctcgctaagcgggtaagtgcatttgctgtggcattctattctttttgaaatagaacttagttcattaatgaactgagcaggtaccaaatttaccttggttgtcaaggcacaacttgctagttgaacgagtgcgttagttgttgggttgtctttgggggcttgccttctagtatagcctttga

SEQ ID NO: 313119 - DNA, 2406 bp, Cannabis indica
tttgattggttcatatggacatttggggaccattccacatcctaagtgtgaaaggttacaagtacttcctcactatagtagatgacaaatctagatttacttggcttttatgctcaagaacaaattagatgttcaacacattatccctaccttttttaacatgatttgcacccaattctccacttctattaaagcaatcagatctgacaatgctaaagaattaaacttacaatcattttttgcttctaaaggcatcatcaattaccattcctgtgtggaaagaccacaacaaaactcagtagttgaacaaaaacatcaacacatactaaacatagcacgggcactaggatttcaatccaatctacctttggtttattggtcatacctagttcaaactgccacctatctcatgaatagaactccctcaaaaatgcttaaaggaatgacctcataccagctcttgcatggtacaaaccccaaatacgatcatcttagaagttgtgggtgtttagcctatggctccacccttccttataaaagacacaagtttataccaagaagtagagcctcggttttcattggctaccctcaaggcatgaaagcctataaacttcttgatattgaaactaaacaaatttacgtctcaagggatgttgttttataaacaatatttccattgttttcaacaacatccacttctgaaattaataaaatactacctgatactgtcattcccactatcagaccaattcaacaacaaatttctgattccaacaatgtgctactgcccactgcatcacgagaatcagttgcacaccagcacaaccctgctgtcataacaagcaaccatatcagtccaattcaacctgatcttggcacaccagaaatttaatcacaaacaccacaaaaatctggtaccaatctcataccagattctgctgtaacaaaactcacagcagttggttccataccagattctactgcaacaaaactcacagcagcttgttccataccagcaaaaaaattatttctggcctccacactattgagcctataactgctcaaccttcaaccacaataacaaggactggtaggccatcaaaaaaaccaaaacacttgatagattacatctgtcatgcctcatctactgctcatccaattgagcaatatctttcttacattaaactacatcccacatttcgagcagctgttctcgcagcatactcacaaattgaacctcaaacttatgttgaggcctctcaatttaaacattggctattggccatggacaaagaaaccgatgcccttgaaaaaaaacaacacttgggttgtcactaaattaccttctagccataaagaaattggttgcaaatgggtgtataaagtcaaatataatgagagtggggctgttgaacggttcaaagctcgcctagtacccaaaggctacactcaaaggcatgacattgattactctcaaacttatgcccctatggccaaatttaacactttgaaattttttttagctcttgcagccatgaacgactggaatgtacaccagttagacatcaacaatgcttttctccatggggatcttcatgaagaattttacatgaaaattcccccgggttaccaagctcctcccaacacggtatgcaaattaaacaaaagcatttatggcctaaaacaagcttctaggcaatggtttagcaaactaagccaaattctcatttcagatggtttttctcagtcactttttgacaactcattattcaccaaaaagaccaacacaatcttccttgccattttgatatatgtagatgacattatcattgctagcaacaatgacaatgccatctctcactttaaaacatatctccatgacaaattcaagctcaaagaccttggaaccattcgtttccttggtcttaaagttggtagaacaaaaaaaggcatctcggtctcccaaagacccttcaccatccaattgctcaaggataggggatacataggtgctaaaccagcctctactcccatggagagaaacttaaaactcagcaaagacaaagggaacctcctccccgatcctacaatatttcgaagcctcattggcaagttaatatacttaacgatcacaagacccgacatctcctatgttgtcaaccatcttagtcaattcttaacttgtcctcgcattccacatcttcaggctgcacatcgtatcttgcaatacttaaaaacaacgcctggacaaggattattttttccatcaaacacaacaccatctgtttctgcttatgctgaaactagtttatctccatcaaatgttcatatttctttcttttctgacactaattgggggacttgtcaagacacaaggagatcaatttctggttattgcctattcct

SEQ ID NO: 313120 - DNA, 622 bp, Cannabis indica
acattctagagagaaaaagcctttacatatgttctatgatgatgcaattaatattaattattattaggtcaacgccaaaaacaagttaaaggacttacataaatgtcggtaacctcgaacttacataaagattataagcaataacattctcagtgcaagtacaaaataaaaagttagacacattaaggcttctacaaatcaaactaatatcattcaaaattgaaccataagttgtcatacaaaaatccttcttactcaaaagcttcacaacaacttgacaatctaattcaacctttatattatggtaaggccaataacacaattgaagtgcaactaaaatagtcatcacttccactacctgtggagaaagtagccccactgttacagaagtcactgaagcaacatacatgcctttgtgatctctaataacgatcctattacatgataaaatattacatatataaggatatgattttatttcgtgattgtactttcacggaatgcattccatgatatacagcagtcgtcagatggggaatttatttgatctgacggctgagattgatttaggggtaattagggttaaaaagtagaaacgtaccctgacactcatttaatgtac

SEQ ID NO: 313121 - DNA, 735 bp, Cannabis indica
ctaagtagagtccacgtgtcaccattctcgtgatgccacgtcagagtgccaaatttgggatgacaatagtcaagcttttaacttttttttttctgagtaatcaagtattcaacttgattgtgctttgcatggagaatttgaattcttattaaaagtttttcctttgtgtagaactttattttcctcatttacgtttgtcgaataattacaacaaccattcttgttctagtactgtattgattttataatttttcagtaaatatttgtgttgggaacctttttctttgaattctatccaaaacaatgcttaggctctgattatgccttagtgttgttgaaaccaattctctctttttttataattataattggtttttgagttattatttgttacttatttttactcattttgttgtggaacaggttctattttaatttatgtatcagtgtttttggaattgattcacctttttttaattataaccagtttctgagttactgtgtgttatatgtttttagtcattttattgtggaagtggttctattttaatttatgtcgcagttggttttttatttaagtcattttagaaaacaaatcttgaattatttatcttagaaaccagtttttcatttaattaattcaaagaactagtttttaatttagttatttcgggaaccgatttttgatttagttacttcaaattcaaggaaccaatttttgatttatttatttta

SEQ ID NO: 313122 - DNA, 1289 bp, Cannabis indica
attactcttacacgtgacatgactctaaatggctatagtgacacgcgtagagggactctaacaagttttagtgatacgtagtgaagggtcactaaatactacttttccagtcacccacattaattacacgaaatgaagtgtcactaaatattattagagtcactcaaaatgagtcactgaaacctatttttgtagtagtgtacactactacaatttagacttttagtgacctacactttcatgcgcgtcactaaagagttaggattgatttttaatgaaccgcatagttagactctaaatttcggtgttagcctcctataatgtgggtcactaaaaatttaaagtctgactaaatagtaatatacatatttttttgatttttttgtaataaaaaataccaacttatagagtcacaccaggaaagactaggaaagcgtatcccaactctcttggagcgtcactataagctattttaataaaaaataaaaaaaaataaaagatacatagtatatttggtaattcatatgtaattatatattctggatagctgaaaaaatataaatataaataaaaataaataaagataaatttattaataataagtaaataaaaaaaaaggaaaatgtaaatgatataattaggtttgcatttggaaactgtacaatatcacttagcaaaaaatcaatcgtcaagaaaatcctctttcttcttcatctccctcttgcgcttttaactgagctcttgcacgacaacctccttccaacgcccaatcgatcgctattcccagcctcccaaggccaagcgatgcaacggaaaatggattgcccagcccatacggtcgaacaaccagtgacaggtggcattgcgatctccgacccctcaaagccaaggtaaacgtcggtggttttttttaaacaactctatctcgctctcgttctctcctatgcaggtcgatggtcgtggtgggcttttgctgtgggtggttgctggagtcgtcctcagctctatagttgccaaagctagagatagtgagaccctatttggttgtatttcctttgtcttcttggatctttttttttagatttgactttgttttgaattatatttttctctctctacaggtctctcttcatcgccgttatcataggtggtttttggggtaacgctgtgtggattttgggttcgtaggcggtggtcggggttggagtttaggttcgtaggtagtggttggtgttggggttgggttcactactgtttattatttttattattttttcagttcataatca

SEQ ID NO: 313123 - DNA, 1740 bp, Cannabis indica
aagatactgcccacatgctatgtaaataatgcctacggttagtgacccattaactgacgaaaactcttagaatatgaagtgatctcagactgccccacgtgctaggagtttatcacgaaaaagctaagaagggctgcaagctctaggactacgttgcgtcccaaaagcttggaggtaaatgttatctgtattttatgcaagatatgacacatgtcatttaatggaaaaggctcaattaacgctccatgaattagagtccttcaaagatgccgagttgttaaaaggtctccacgagtcgaaaatcatctagggcagaaaaatacgaaagcatacttgcggcaacatttgcttcttgagtgcggggtaagaaatgtccctctcaaacccgaaagggtctgacatggaggtttgtttcaaatggaacctcaaatatgcactagaataacctaaggcagatatcgagcttcataggtgttcgtggatgttgactattctcatatgccaagtcaccaaaagtgacggttatgcttttcctgatataatatgatcttgtctcctacatctaagcgtgatagtgcgcacactaccaccatcctattaccagacggacattacagaattttgcttggaaaggaataagctttgagtgacatgtgtccattactttcaaaggttcaacctttgcgtgatacattctaagtgatacaaaatggtcccgattatccaactgcagtatgtacgggtataatgctttccacgggaccaaccagtcagctctacattgctagtagtttaccctaacagtgaaatttaagcaaaaatcctaggcaagtcatgagacgatccatacccaccgcttaggctataaataccccttcactttcatgcaatggggtcaagctaaaaacacatagccaagactctgctaaaattatccttgatctttttcttctttgaaaagatactaagggtagagaattagggtttcctgcaaaaatattgtaaattcttcaatattgcccttagaggctaatagtctgactcgtggactaaggttcattacctgaaaaaacgtaaaaaatcttcctctcttagcttctgtagtttactatttctttagctcttaaatattttagttttttaaaatatcagtaaacagtggtataaatacgtaactttaacttttggttgtaaataaatacccaagtttaatttttgacggtaataatacttaagttataattttgaaactccgtaggtagctgatcgttaaatgttaagttattatccacatgtcattttcttattggtgtattaaaactaatttttttaaaataaaaatttaatgacattgaccaattaaggattgccacgtggcaaattgcttaacacttaacagtcaggtacctagagaagttccaaaattataacttaggtattactaccataccaccaccgtcgcaccaaccaccatcatcattactgcgactccacccagatcccaatctcttattttctcgtttagatctcatttattaaaaattaaaatttcaggtgttgaccgaggttttcggcaactaataaaatattataagtttatagagctgtaagaaaattagagaaggatttttacgtggttggggcgttaatgagccttagtccacgagtctatcgtatttatggatgtatttaatacagagaatgtatttggtgaatgcttcacccttataaatacagaga

SEQ ID NO: 313124 - DNA, 646 bp, Cannabis indica
agtattaaaagattttgtatcttcgataactttgtggagaattaactcactttgatatttggaggtaaatgacatcatttggaatttttgaggtagatgacctcatttgaattttgctgaggtgaatgacctctttgagaattttagaaattgcgattgtacctaattttgacaattaggttgcctacatatccttttaaaaggaatcaaatcgaacgtagttcatagacttgcatcttcgtgatctctaattctttggagacataaagttaacttttatttttaatctcacttaaatttagagatcacatatttgccttgtgagtcgtaaccaaattacacatgcacgagacatggattgtttaatagactataaagggagacttggaattgttaatagactatagccctgtttatatattatttgtgaaccatttcttctcgctcattcatacatatatattggctaatatgaggcgggaaatttgattttctatacttacatatacttaatattttttttaaaacacataacatttaatatttgtgggatatgacacattttagaatatccctaaaatacccccatttacattaccgcctccccactctcctctttttaataaaaaaaaaaaaacttaaaagt

SEQ ID NO: 313125 - DNA, 2382 bp, Cannabis indica
cacattcataatttcttgcaaggtttacaaaaaaacctaagaaagtcagtaactgtgagcaaatcttatccacagacaagatgagttctcacatttagaaacttcaagaacaagtaatatagtagtggctttggacagatttgaaacgaattgcaacaaatgaggcatgggtaatactaggtgatttcaatgagattttaagcaaggaagaaaggataaggaaaaaggtgaaatatagtgaagctactgattttattgagtgtgttaattgctgtcagttggaggacattaagttcagaggcagttactttacatggagcaacaaaagacaaggaaatgaacgaatatggtctaagatagatagagtgcttgctaataagaagtggatggatctttatccgaatgctgaagctgtctttatggtggaaggtttgtttgaccatacaccagtaattgtctcaatttatccagaaattcgcaaaggcaaatcgccttttaaatactttagaatgtggtcctctcatccacggttttcagagattgttaccagaatttggaagtcttctgttgctagcgctaaaatgttccagcttgtttacaagctgagaatgttaaaggctgaattgaagagctgaatagaaaagagttctccaacattcaagaggcaactactcaagctaaagaggatttagtagcgattcaaacgaaaattcaagcagatccacttcaacacgggctgcttgaacaagaaatggcagcaaggaattaatatagtcttctacttaaggggctctcttccttcttacagcagaagtccaaagtaaattggattaaggaaggtgacgagaattcagccatttttcacgcaagcattcgagaacgaaggaagcaaaatagtatactttcaattgaagaccaacagggaataagggtggaggatcagaacaaaattaccgaagcctttctttcattctattaccaactattaggtagtaaaatggagaaaaggcaacaagtaattaagagtatcatgcaacaagggcctttggttacaaagcagcaagcagaaagcttaatgaaagagtatactaaggaagatgtcaagaaggtgatttttgagattccaggaattaaagccccaggacctgacggttattcaagcttcttttttcaggataactgggacatagttggggatgatgttactgaagcagtattatcattcatacactctgggaagattttgaaagaaattaatgcaattgtgctaacactagtccctaaaagtaagtgtccgaacacagtaagagactttaggccaattgcgtgttgtaatgttatttacaaggctgcaaccaagttgctgtgctctcggctcaaggctcttctcccagatctggttgcacaaaatcaaggaggctttgtctcaggccgttttatcgctcacaacattatgatatgccaggacttaattagacactatggaagaaaagcagctcgaccagggtgtatgattaagctggatttacagaaagcttatgacatatttgaatgggattttttagaagagattatgcaggctttccaatttcctggggagttcattaatctggtcatgacctgtgtacgcactactcggttctcgttaatgtttaacggatctcttcatggcttctttgagggaaaacgaggtcttcgacagggtgatccaatgtctccactcctatttgttcttggaatggagtacttgtcaagaataatgatccgaattggaaccaagccagaatttcattatcatgaccggtgcaaggaactaaagatgaatcacttaatgtttgctgatgatgtaatcctattttgccacggagactttaaaagcattcattatttgcttcaaggattgaaactattttcttgtacatcagggctgcaaccgaaccctgataagtcggccttttactgctgtggaatggaagaaagcgaggtgcaaaggatcatagacagatcaggtttttcaaagaaagaggcaccatttaaatacttaggcatccctatttgtgccaaacgtatttctggtaaagagtgtgctgtgttagctgaaaaaaatgacagcaagaattaaaatatggagttcaaggaacttgtccctagtaggtagagcggtgctagtaaactctgttttgatatctatccattcttattggagtcaaattatgattcttcccaagaagatcataaaagacattgagcagatttgtagagcctacctttggaagggccatcatacaacaacagggcctggattaatagcttgggagagtgtgtgttagccgaaggcagcaggaggcattggactcaaaaaaatagcagaatggaacttgg

SEQ ID NO: 313126 - DNA, 2358 bp, Cannabis indica
aaaaattatttattttttattaacaaaatccaattaaataaaaaaaatattaaaaataaattttaagggaacaagtttgagtctatatttttttctctaaaaatctagatttactttaagtaaacataacattttttagtttgattttctattcaaaaaatcttagtttgattaaattatttattaaatttttaattattttggtttgatttttaaaatatgtatttataaataatataaagtttgaaaatatcttttaggaatgattttagttttttatgtaaacttaatattaaaattaaatttttaataaaaggggagaaaattttgtatcggtcaaagtttagggggtaaaaaattaatttttaacggtataaaaatagaacctaacagaaaaagtataattatgtaactgttatattttagaaaaaaaatttactaagtcgtaaattttgttgtgtcgaaagttcaaggaggtaaaaatactaattattcttttatatatatataaacgagattttaatatttacatcaaatatgtaattatagtcgttacattcatttgttaaactattgtgattaatttagaaaataaataaaaataattaataaattatctgtaatctgatgctaacttaattttacttaaattctttataaatgaaaataaaaattatttataaatatttgttgaccgagaatttcgacaagcaattaaatagtagaatatgagaagagttgtagaaagttaatgcaggtgatttttatgtggttgggacattaattagccttagtccatgagtctttgttaattatgagagtgtttttacagagaatgttcttggtgaatctctctctctcttctttactctctttgattccttaattcaatcgatcgactccttttctattctgtttgtggggtatttatagtgtttttctgggggatccctagaaagggatcacttgtctttttgtgttagcttcttaggggtacatgttcctattagatacaaaataggaaatacatgacctataccgtaggtattttaggggttaggtggatataattttttatcttccattgaccaatgtgattcctcataatgtagccgtcactagactcgtcgttcgccgtgtaatcgccgtaaataagggcttacgccatctgtccaatctttttatggagtttctgatacgttttcttccatgcggcattaaatgcgaagtggctattcaaacaatctcttttcctcccggagatgccctcacatagttctagcctcccagagagtaaagacgtgtcttatgctctcctccgggaggctcactccatgaggtgtactttcttgccaagacttagttgatttcgtgaatggatactccacgtgtcactcttatccgtggccatgtatattggaaaaaatcaaaggcaacaatattaattgtgaaaaatatcttgattaaaatattaatttattttaaatatatattaatttgagtctaaaaataaaatttttacctattagtaatttgttattagcgttataaaaaaatataatcatcataattatatttttaatataaccattaaatagtcacctatacatataaatagtaaaagagaaatgctaaagggcaccactggtgcctagcaccctcttacgtgtcaatatcgctattggtgcaattaagtatcgggtcccatatagtttaatataataatttttatagggtatcgctaaccaattgcaagtcgacacatttagaaggtgctaggcaccactggtgtccaataacaatgctcatagtaaaattagtaatcaacactttattttctatgataaaatgtctccttgttatctttgtattcaaggcaccttgtaaagtagagaacttttatgaggagaataagcctttgggcttgtatagtagaaaatgctcccattttataagtcactacaagaataattttatcaaagagtccttgagcttctagtagcaaatgctcccattttagaagtcactagctagaataatattattaaaaacactctctcaaatcaagacaaaagagaaaaatgacgtttcatgtccttccattttgaattctattacactccaatggatctagtgtaaatattttattaaatttgtttcaaaaataaataaataaatattatattatattggattagttcctccaaatctcaactatcatataagaacatttgttacataagaagagtaacacactttgtaaaatcctttttcacaatttagtagttaaaatattagttaatttacttgaatatttgatataatttaaatgttatttttattgtaattgtttttttt

SEQ ID NO: 313127 - DNA, 1203 bp, Cannabis indica
tgttattgggcctcttccttgggtcgagtccacctctctaacagattctagatatgtaattttaatattggttttaaatcacttgactttagtaatttgtaatcacgacacgtgacgtttctctaagtaggatgttacaagccgccagagcaaactgagctctatgcagctgttcaaccttatctcccaaaagacacctcaggtcctgcggaagtctgtaagtctccaaatgatttcgtgcttatgttagagaagaaactaacctccttctataagaggaaaactattctcaccaaatttggtaacacgaatttacccaatgcggacatattgcctttggcaaaagagttcgctaaggagtactgactagcttgcaaattcaacaaggagcatatgaaattttacacttgatctagtggggaacttccataaagagaattgtcatgaaagaaagcactaacaagaggaggagtgttgaagttttctgaaaagggtaaacagatgttgactgacaagcaactattttccaagactgcacaagcggtgttggtgtatattcattactactacagcgtaaatcccgaattagaaggtgaacttacggctacaccgtacatttctaagttaataagtatttgatcgtttcggggaaatagggaaataggtgggttgagactagtcacacaagaactattttccgcagtcattgaagagattgttgatcactaaaccgactattaaaatgtaaacatgattacgatcttgcgaaggtcggaccagaaactatattggaagatggttcaaattctaacatttttcgaaatagctcaaattgttgatggccttacaaagactatttcaaagtgaaggtccaatcagttcagaactaaatttgaaattattgacattactaactttaaatttgaggaaagtgtcttagttagctatctgctacgacaattatgtgagttgttaggattcggttagagttagattggtagttaattggtcaactctattgagcttgtgtataattgtattgtgctctctgattaagtctaagactattctttcagtctcattcttccttcttctttctcttctttactcagtctttcttcttcttctatgttctgctctttatgttcttcaacaattgtgagacagaatcacaatgctaacaatacacaaaaaaaaaaaaaa

SEQ ID NO: 313128 - DNA, 2049 bp, Cannabis indica
aagatgaatgagctactcctctcattgccagttagttttgagatggaaccccattcatctcattccaaattctaacaggtccagccaattgaatgggaggcttactaatagtgaaggtaccctatagtggaagtgtagcttactttggcccaaaagaacttgaaaaataaagaaattttttatctccctttgcctcattttaacattcatttctttgaactaaaactgggcattaagtaattcatgactgcttatggacagctacgttatgtggttttatacttttagtagttgttgctaaactcttgatcttgacatgtaacatctcagatgaagtgagatgtcttctgactctgttacaagtcatacaaatatcttagccacaattttgttaaaatatgcaatcttcaaaccatgctttttctctactatttctaataatttctgtttttcttttcgggtccttagctgaaaaatgtcgacagttggttggagaagatgcttcatctcagagtgggcagtttacattcttgaattgtttcgacatgagttctggaacagtagcatgtactgtaaaagagggagtgaaactctatttctacaacatcagatctgctcatgtcgagagagcaaggcatgctgcaatagaagttgcattagttgattcattgtcacagggcatgtctgctcaagatgctgccaaacgagcacaactagagggtgcaaaagcagcaaagctagcaacacgaaaagccaagcgaattataggccccatcatctcttccgggtgggattttttcgaagctatatactatggtggtacaattactgaaggttttctcagaggcactggcactttgtttggcacctataccataggattcgttggggaacaaagatttgggagatttggttaccttgtgggaagtattttaggcagttgggttggaggtagaataggactgatggcatatgatgttgttaatggagtacattttctacttcaaactgttaaagtcgatgaaatttctgaggagggctccgttgcttatgaatccaacaaaacacctgattacgaaaattctgaagcttctggtgactcttatgcttatgaagctccttctgaatatgcaagtccagaagtttcagaagggtccaatttctataacactcaggctgaggagtcttcattctatataaactctgaactttaggtgacaatactatgtattcataggttaattctttatttgacattttatggaactatagatgcttatgtaaactagattccttactcaaaacttctgaatttacttttggatacctctgtcatacaagtgaatttttaattgcttttaccaaattcttttagaactcatgtatagtgtaaaagggctccttacctttttgttattttgttcttctcttcatatgttttgtaaaagtaagtttttgttttatttatctttttgggggggtttgaacatcttgataaattattattattattattattattattattattattattattattattattattattattttacttagtgtacaaaaatataggctacaattttaaactgtcgggtacaagagcctaataaaaaattattacttactttttgccatatttcccacgtgttcacttactttttttctattttccacatgcacctatttcttctccatttctcacaccctaaaacgaaaatcttaactctccaaaaccccacccacgcctccgtaccatcaccctcctctctcgtcatcttcctctgtctctcgatctccctttcttcttgtctttctggtccatcgatctccacccacccctcctcccgttggtctccctctcctctccatcacatatgtcaaaccaccaccacctcccgtcggtgtccctctcatctccgtctcatacgtcggaccaccaccacctcctgtccgtctccctctctctctttctctctctccgagctcggtataaatacatttatttatatactttttttatttattatatatatttaattt

SEQ ID NO: 313129 - DNA, 1828 bp, Cannabis indica
attgttattagtttgttaataacttagtcaatcctttttttttattgtagtatatatcagtattctttcttgtaaatgtacacgcctatataaaggctttttatcaattaataataatcaattgcttccatattcacagttaataagttgttctagggttatttttaagttgttttttagttctttttttattttactgtaacacagagtatttttgtaattgttaaactttaaacacattatttttgtaaagttggtactaaaaatataaaaaactttgtcacagtatttttgtaaactttctctcatttaatagtatttttataaatttctattttttaatcaagtataataaaatctatgaaaattaataaacaagtaaattttaaatttaaatattattttattatatacaaataaatataatattttttaatatattatatgtaattagactagatcaatttttatttaaatcttgaaagtgtcattcaaaaactaatcaaatctaataagaattcaactattcacatccaatccagtccacctataattggatatttaactttttgtaattgaattggattagttgaaatcttgtccacctctaattaacattgttgaagcaccattggcattctcccaccaccgaaacacctataaaagcaaaattatatatttctttttgcaacatttttatgttgaatgattaaaacttaaaccgaagaaagattcatggattttgaatacttttttttttttttttttgaaatgtacaagatttttatgttttgtttgggttattttttcttctccagttttggaacttttgaaaattgtagattttttttattaaaagccatgtctaataatattgtaatgaaaatttgatttttagatagaaaaaaaatatgattaatgatgttttgatgatgatggagtgacaacgcgttaacgatggtcctaaaaatttaatttttaggggcaaaaacgtgggttgtgcaatgaaatttgacaaaaactttagcaggcataatttccattcgattgtcggtttgagatgatttcttcgagataaatgtgtagaacctataaagaaaaacaatttgttcatactcgccagcgttgatgttagctgttaatagtggaaatgtatatattagtgagttgagtgttttaatggctgacattataaatttatcgtctaaatttttggagcaactatctcatgtggctctcaacaataacattgcaacgcatgattgctaagcatgcttttaggccagagaataaattatcctaatttgaagaagttcctgtgcgaataagtaatgtcttcatcgtgaattttattgcgattttattcactttattaaaaagaattgtacaacaataaattttgattattttagtctcaatgttttagtataacctcgatttgtcagacttaaatttgttgttacacttcaaattttgcatttcacactttctacacctataaatctcgaaaataataaattaaaaataagtaaaatttattgagtaaaaatttatgtttcgctaaagtttttctatcaaatttcatgcaacttatttaaaccatcatcttacatcgttttcatcgcaaaaattaaatgtctatagcactttcgttaagcatagttaaacatcacttttttctcttaaaaatcaagttttcatcgtaccatttctaaaacatcatgaagcatcatggttgtctaaaattaaattttcattgcaccatcaaattgaaaatttcaactattcaaacataaagatgttgacaaaaggaaaagaaaaaaaaaaa

SEQ ID NO: 313130 - DNA, 980 bp, Cannabis indica
ctaagtgttagatcctacaagcgtctaatttgaatgctctctaatatgcattataaaatacgagacatataaattgaaaaactactaaaatagtaagaaaaaggtttgaatggaccattattaatgatagaatgatattgataaagacatagtgtgtatgtggttccaacttccaatatcatttacttgcacggtagttccgctaggacggtgggaaggaacaattgtattgtattcacaaaactacacaaattactctaataccccttctcttgtcttgtctctacttaaaccattatcaccatcctcatttctaatttctaatgcaacctactgatatacgtggcagataaccatttttctttgtttgtttctttgcagcgcagctaaaaatttaaataaccatattaataacaagctataacaaatattttaatttttttttattttaatttttttaaaatatattattcatactctacatttataaaattttattcattattttaaatatattttattaaaaaaaatttatggcaaaccttttttaatttcaattaaaatacacttaatttcattttttttttttgcaaaatccccttaacttagcttttatttgcaaatccaataaatcagttaaatgccaactaagatgacaagttagattgttattgtgtacatttatgtacatatagcatatttttattagtccatacaattgtaattattttaatttttacaaattatttacaattataaaaaataaataaaattaaaacatcatatattttttgaggagatatttacataaatatggtaataagaaatataattttgcataaatatgataattaaacttaataggaaaaaatttggtatttaaaataaaaaaaatttaacatagatgggatatgtcatttatattaccataaaaaatattgaaatttctttcatattttttttaaaaaattaaaactaat

SEQ ID NO: 313131 - DNA, 681 bp, Cannabis indica
tagtgaacatgtatgctgaagagaatcggtggaaagaggtttcaaagatatggacaacaatgaagggccttggagtggaaaagagatgtcctgggtccagttggattgaaatacaaagcaaaattcaccagtttgctgcatctgagaatgctcatttagcttgtcccgaagtctacaagctgttgggtgaattagatggacaacttaaactctctaagtctgtaccagaactcagttttacctaaagaaagacaaacttaatgtgtacaaatgactctggctgaaaaggatgatgaaatggggtagctaatatgacttgagacaacatcttatatgctatagctttaaaaatagctgtagtgcactcagagagactctcctgcagacagacaaagcaagtgtagaagaaccattctaacatgactgatgctaagttggcaattcttcttgtaagcccttgttagccttatctttgcagtattcaatctaatttgacatctttgttagattaagggatggaaaatgataacttttgccatagtacttgagctttgaaaggaaactccgtgtacattcctgataaaagtgacataaatataaaagttgatattgaacttagaatcaattagacgaagattgttgggtggttgaccgaagattgcatcagacgaatgtttcaat

SEQ ID NO: 313132 - DNA, 501 bp, Cannabis indica
aaatcccaagagaacaaaactcaacgttgatgccttagcaaaactggcctcgcaggataacttggatgaactaaacttggttctagtggaaatgctaaatgagccaagtatatgtgaaaaggaagacatcgagatgatagatagctcacccacatggatgactcctataatcaattatctactcaatggataacttccaactgacaaaaatgaggcaggaaaactcttgtatttaatgcctcgctacacgatactagaaggcaagttgtacaaaaggggatattcgattcctctccttcagtgtgttcttcctgcagaagaaaatgagatcatcaagcaaatccatgaaggttttgtgggtatcatgtaggttggcaaagtctctcaaaaagatcattagataaggattttactggccaaccatcaacaaggacacccatgaatttgtcaaaagatgtgataagtgtcagagattctcacatatacctcgcgtaccatcaa

SEQ ID NO: 313133 - DNA, 778 bp, Cannabis indica
ttttattattaaataatataattttttaatgtatataaatgtaattgaattgaattaatttttaattaaattttgagattgacatccaataatcgatcaaatctaattataatctaacttttagcatccaatctaattcaattgtaaataaaaatctaattttttgtaattagattagatcagatcagttcgatttaatttgaatgttgctcactcctattaagaagtgacatatcctgccaaacacctcatttgctctaaaaattgttagctagacaaattaaaactttttaaatatttttttatatgtaaaatcacatcaaacataacattatataattaccaaagttctatcatggggttaagggcttggtagctactaaaaccatcaacaatcataacttcattttgaagcaactttatctttatttttccatcatttttaccttaaaattactattccatctctaatcactactttaaattctacttcaaccaagaatataggagtatttatcaaactcctcacaccgcataaacttcccttatcacaccgcatcgcataaagtatgttgtttaaaattctttgtagtgcggctgtgatttacatttaccaaatcgtgctgtgcagtacggtttgtggttttaaatttaataattgcagttcaaaaagcattgtactatatattacaaagttactaattttttgaagggtagatagttgcataagtacccaaagttttaaatttgttagtggcataatcccaatgtttatttt

SEQ ID NO: 313134 - DNA, 1260 bp, Cannabis indica
taccaaaaagattacaatctaacatgggaatcagaaaacattcaaagtgaagaaaagtttcatggaaacatgggaaatcaactaaaacaagtaaatagtgggattagaaagcttatccactactagaaacctttgttgaagaggaggggaagctcagattgtcaaaatgtcacaaaaatcccaggagttaaagcaatgtggggcgtcgaccactagtgagaaggaggagctttcaaaagtttctttttctagagagaatgaaatgtggaaagtgaagagagtttcccactatcaagcttatatagcttttgttggaccacttttttacttatcatgcaagtgttcaatcaaaaagcatgtagaagagcaatgcagttaacttactgcaacaagtgagatcagacagtcgacaataattatttcaaaggctaaatatgttgcaagtcttacccagttaaggttgcattagtaccaactaagctggaaagctcctatcagcacagaagtccgaacagggacttgggggaaaatgttatcccaatttttacccacctaatgtggcagtacaactcgccaacaagaaggccaagtcatctactcagcactttaaataacgaggagtctgaggactcaagcaggacgacgaatgatgaaccgaccatctacaagggggctagttatatttttgggagcgaactcaaggaaaatatgaagtgcagtgataacttggtatatctaccatattattattaactaaaatatgtttatggttaaccaattagcgggcttgaggaatagtcaaaccttggccagccctatggtcgaccacccctggccaaccctatggccaatataggtcggccagcttctagacatcctatggctggccatcatacatcctgcaggtgcctaaccagccagacaatggcctaacaagattttggtgcacaatttcacacgtggacagtaagctagactgtgaactaggccttaacaacccacaaaaacagagggaaaatatctattttcaaggggcattatagtcatttatattttactaatttaatttgtaaataatagcttattttacctatttctatgggattttaaggatctaagatctactatataaagagccttaatgaaaccttaaaaccctaggcgctaagtgctaagtgcaagttcaatgttttaagtgactaaaaccctagctctaagtatgataacttatctatctctctctttgtctctctctctctc

SEQ ID NO: 313135 - DNA, 772 bp, Cannabis indica
ttttttcttcaaaaaaaaaaaacaagacatcgatcttctagttagcacagttgtacctctatttactcaccaatggaaaaattgcgaatagaatggcatattgttttttttgtttttggttagatattttggaataatgtatatatgattatgttgcaaaatttgtggccacctgtttgttatatgacatatatgttactggataaagaaatgaagggatacttgagcacgtgaggtaatatattattattagtataatttaatattaaatattacatattttaatttaataagaatattatatttaagtattaatagtactcattattactataaaagtggcgtcttgtgagtagttagtcatatttcataaaaaatattatattaaactatataagatctgttattaagtatcacttgtgtcttttaacacttctctataaataatataagaaaccactaattatttataacactttatatgtcaatataatattagttactttggagcatttctaatagagagctataaatatagtatatattactattttttagaatattttgttacaagttaactctaatagtgatgtaaaatgtgtgttgaatttggctcaaattaaaaattgtgtcaaatttaaggcaaaatataatatatgccaaatttaacttacaataaataccatattcttaattacctatttgtcactcattaatattattcattaataaaaaaaatatttttatacatataagttattaaaataatata

SEQ ID NO: 313136 - DNA, 566 bp, Cannabis indica
atttaatgacctactcaaaaggtaatgaggttagtctaagggcgtacccttaaaccccccacatcttcatgatccaagtaacacattgcacctatatgagacatggttgatatatgacatcttcatgacgctaaggctacccacaacgtcaaagatcaagtgaaaggggtctcgggggtactacctcaaggtggcgactatcacccccttcacagtgggtctcggggtgtcaccccgaagtagtatctactagccccaaagaaagttaaactgtcaaaccatactctataggaccctcatcgtcagtaactaattaaaatattcaaatcccgcaagaagttcaatggtagttttaaacccgcaaaaataatgggatattatcacaagaatcagatttcacccacgaccgaaaaccaaggagacaattgagatatctctccaatggtcgcgttatttcctaaagcgaaaggtaccgaccttttcttgtataaggggtcatgaggattctaaattcataacttaaaaaagtgtaaccaaacgcaatttttaatcagtcttttattttt

SEQ ID NO: 313137 - DNA, 1392 bp, Cannabis indica
tctcttaaactttttgcactactaaattgtatcttctataatataagactcgttaataatacccttcaaatataacttttatagcaatgtagttaatcaattatattctatttatttttatcgtcaaaagagtggtagattgtagttgatttttagaatatgaaaatgtgtagcttagaaagtaggattaagtgagtgtatagtatgctaaggtgtaatgggttccatctcaaactaataagcaatgagaagagtagcccatacatctttatgtattgtatttagtttacacatattatcgatgtgggaatctctaacatctcccctcaagatagtggctattttttgctcactaatcttctactgctcgatcacaagtgactctttttgtcacgacccgagccctaggtcgtggcaattatgtaatattcataacttaggtggtcaaaagtcacactttgacccttgcaaaaaataatacttacaaatgatcccttatatatattacaaaattatataagacctataattaaaataatgtaataactactataattattagaaaataattgtcataaaataagatcactcatcagtatatacaataataatattcttacagttatgtaatcaccaaatagttagaattaataatccgacaaaatactaaaataatacttatagcatcaatcataattgatactgaccagtcatgacgatataaatgatactgaccatccattaataattatatacatttcatccaatctttaaagaagagttaattaataatcaaagtaggactaagctaatctcttcattctccatcaacgaatttctcacatccacaagaatcaaactgagttcctggaagggaaatataggggtgagcttataaagcccagtaaaaaaacaactatcatcaaaagatcagtaatttaataaaaatccctacatggttagctctgtaaaaaaaaacatctcataatcatgtagaaacaaaatagagagaaaaaataatcataagagataagctactcatgcatatcacactgtccactagacctatagctctggatacaaatcatacaaaatgacatcctaaattgggtagtcacgcctaataaccaccatattattagggctcagagtcaagtaacttcctgtacatattctaggtctttcacctacagatgagtatacacccgatctacctatgatgacatagagactaggtcgtgaaacaataatattcacaaaactatgatcagcatgagtctcatacgaaaactcattttaatataattagatttactaattaataaagatcaaaaatcgcatattatgttgcatggttcacatgatttatttcatgattatgtttaatgtata

SEQ ID NO: 313138 - DNA, 2891 bp, Cannabis indica
tacaaggggcagaagtgagaaaagaaaaaagtcacaaacgttcaaaagcaaaatcaagaactaaatcacaatctgataaccagaagaatcttagatgctaaatctttaagaaaataaggcatctcagacgggcgtgtccgcagaggcataagacgggtgactcaagatctgaaggagatgcaacagtgggtagtgacgattatgactcagctggtgctttgcttgtaacctctaagaattcagattctgaatggatcttggattctgggtgttcattccatatgacaccgaataaatcttggtttgaagaatttacatctgatacttatgggactgtgtatcttggcgataaaaagtcttgtaggatggtgggaattggaattgtaagattgaaacttcatgatggtgtggaaagagtgctgaaggacgtctgactagtacaagatctcaaaagaaatttgatctctgttggtatgttagatgatcaaggatttctagttaaaattgagaaagaaatcatgaaaatttgtagaggttcaatggtggtgatgagaggaagaaaataaaatgggatttaccctctggaaggtaccatagtgaaaaacatgagagcgtgtgttttaagcaagcacgtaaatgaaacttaagtatgtcacaagagacttggccatgttagtgaaagagggctgcatgaactgaataagtagggattacttagaaaagtaaagcttgagctattggatttttgtgagtattgcgtacttggtaaagcttgtagagtcaagtttggaaccggtaaaaggaataccaagggaacactggattacgttcacagtgaattatggagaccctcgaggacaccatcgcactccgagagtaggtattttcttcaatagttgattactcaagaaagttataggtatttatcttgaagaataagaaggaagttcttgaaagatttaagcactaaaagataatgattaagaatcaaactggaagaaaagtgaaatagctaagaactgataatggtctggaaaactgttcacatgagtttgatgtgttttgtaaaaaagaaggaatatcaaggcacaagaccatgaggaagactcctaagcaaaatggactcatggaaaggtttaacatgactatcatggaaagggccaggtgcatgttattgagtgctggactacccaaagtgttctgggcagaagctgtgtccattgcagcttatttaataaacaaatatccatcaatagcataagatttcaagacgtcggatgaggtgtggtcaggaaagccaacaagttatgaacacttgaaggtatttggatgtgtctattatgcacgcatcaaacaagacaaacttgaggtaagagccttaaactgtattttcttggggtatccagatggtgtaaaaggttatagtctgtggtgtttggagcccaaaatgagaaaatgtataattagtagggatgtgacctttaatgaatatgttatgggattcattgacaaacctgctggaactcaagccaatattgactgagaaaaaattgaagctctgggaattgagcttaaggtggagcctccatgaagcttggagactgaaacacctgtagatcacggaagtgatggttcagaagcgataatctgaagagctataaactggcgaaagacaaaacacgaagagaagtaaaggctctagatagatacagacatgttgatttaattgcattcacatttcatgttgttaattagattgtgcatgaagagcctactagctatgcacaaacagtgaagagcaaagattggaagaaatggaatggagctatgtcagaagagatgcatcccctgaatgagaaccaaacttgggatgtaataccgttgccagaagatggtaaagtcatcggatgcaaatggaaagaaggcattcttgatgtacaagaggcacgatataaatcaaggttgcttgcgaagggattctctcagactgaaggagtcgattataatgaggtcttttctccagttgttaagcacagaccgattagaattttgtttacacttgttgcatttcaagaccttgaactaggacaattagatgtcaaggctgccttcctgtatggacatctcgatgaaagaattctaatgaaacaacttgaaggatttgaagaggctggaaaggaacattgggtgtgcttgttacggaagtccttgtatggcttgaaacaatctctgagatagtggaacatgagatttgatgattatgtgaccaagataggtctaaagagaaataagtttgatccttgtatatatttttgagagagaaatggatgtactttgtatctgttgctatacatagatgatattctgatcgccatcaagagtgtacaagagatcaagcgcttgaagctctagctaaaaatggagtttgaaatgaaggatttcggtccgactagtaaggtcttaggcatggatataagaagggaaagattaaaaaactaatgtacttgaatcagatgaggtacatcaaaaaggttctagataggcagtgaatactctgcttgcacaacacttcaaattaagtgctactcggatgttgaaagatgatactgagaagacggagatgtcaagtgtaataccccaaaattaagaaatggattagcaaaaccctaattagataattatgtataattgaggaattatattattatatagttcaatatatgtgaaattatatgaattttattatgttaagaccccgttggtgagccaggggcattttagtaattatgacccgagaagggtaaaattatgaaattaatttgattacgtgcttaatggaactatattactatatagtatacctgtgttgtcttttcaggtgtgttctgaca

SEQ ID NO: 313139 - DNA, 745 bp, Cannabis indica
atacttgtgagtagatctaagttcctggtaaaataaattccaacagcgacttccttttgaacgagaccaacctgcgatctgtgggccttcttgcagacaaggagtatacttgtgataacaagattcccaagtattcttcttggcagcagattaccattccaaccgaggataaggcatgagattgcctggctcaagcacaatattctcaaaatgctgcccctcgggaagccagtgaaggagcatcctgaggtaatcaatgtggttggtctcccatagtacttagggctgaacgtagtacattagacactttccaagattcctgccttaatttttatattttggattcccttctcgtggactcccttgctcgtaagtttgacagctggtatcctagattccagttctagtttaactatcacgagtcatattattgtatagctgggcaatacgataccgtggaagatagggaaggtcatatagatgcgaactgagatttagaaccaatcgagcctttttatatattcaaaattacaggttgtagggattttagtgggtattatggtccctctgccccttcgtctagtgatatctcgctccttagtgactttggtaaatcccttaggtgaaaaattatactcttaccctttttcaagagcctcttttaacaattgtaatgtttggccttgttttgcagacatgggttatgaagatatcatgggccgaaaagggaagaagagggtatcca

SEQ ID NO: 313140 - DNA, 2273 bp, Cannabis indica
gcaccattctcaaaggaaaaactcaaacttcatactttctatacagaggtcacaagcaagagtgcgagatttcaaccgtacatggtgacggggagaactccatgtcatcaacaaatggcaccccaaaggatgagagcagaaagggcctattgcgaaacaagaacccaagagtttgctcaaagcaacatgaatccacccgtcggggtaagaccgcaaagagggaaacatcatgtagtcttatgaagggacttcaaccaaaaaattaccatgctagggtacaccatgcttacaccccctttttaagagtaaagcaagtgaaaggtgccacccatcaaccatagtaaagagttgcacgatgatgggataagaggagtactactgataggctccacgcaaactgtagggaaaacccaagtttcactcaccatctctcgagaaaggatgaacaagagaatgaaagagctagaagaagagatgcaagatctacatcgaaagatggctaatgcatcaaagggaaattttgaggatgatgagttcgacgaagaatcccctttctaatggaaattcaaatggaaccacttccacccaattttaaggagcctcacatgatgttatatgatggtacaactaatccaaaataccatctaggagcttttactgagctaatgaagatggaaaatgtatcgtacaaggcaaggtgccaatgctttgtggttacacttaaaggggtcgcatataagtggttcaagaggcttggactaggagcaatcacatcctaaaaacaattttaagaggaattccttcaacagaattaaacagagagggattacattattcatgtaacgagtatcaccaatgtaatgcaaagggaaaaataaagcttaaggagatacatccagtgctttaatgtcaaagtcaccaaagtaagaaggatgtccaacgatgaatataagtttgtcatagttgctagaatgtgctctggagtagattatgggggaatatgctaaaaagggacttggatggcattgaagacttctatgagagagcggaaaaatatattcgtgtcgaggaatgaaatagagtcttggagatggacacaagcaagtgtactttgggaagctttccaaacccctacagagtctattagacaataccccctatgctcataagccaatacatccaagtgaagtctttgctatacagcccataaaaattaatatccaagatattcctctaaataaagtccttatatgcgagaagaagttcctagcaatagcaagttcgctttaagtgtgctacaataaaataaagaaggaaatcatatgggccttcgagtaaaagtggatgacgttacacaattagggtgcaaaaaacaataaaaagagagagggaaatttttcaaatggataaggactagctacccttagttaacaagagaaatgcacttacttcttccaacaaaagttacttagctgaaagagaacttgaaagacactcatggcctaatgctaaaacgagacagacgtctctcaagagtaagcaaatgtttgcaaatcaagagggtagcccagtcaagtacaataagctccctcccatctaagtgaaaaggatgaagaaataagttagaggatgagatcgctcaaagagtaatactgcctcaaatgaaaacctgcttaccacactggggaaagtcacttggctaaagagtaaccctcagagttgctttgtcaacaatagttacaaaagtaatctggccaaagggtaaccattagagtctctcgaccaacattagtcactcagccccaagagcaactcaaagtcactcgacccaaagagtgacttaaagtcactcggcctcacagcgaccagagtcacttggccctaagagcgactcaaagtcactcggtctcctagtgaccaaagtcattcagccccaagagtgactaaaagtcactcagtctcgcaacgaccagggtcactcggccccaagagcgactcaaagtcactcgaccttgccatgaccagagtcacttggccctaagagcgactcaaagtcactcggcccctagagcaactcattgtcactcaagctcacagtgacctgaatcactcgtttaaagagcgaacaaaggcactcgacctcacggtgactggagtgactcagccaaagagtaaaaataattattattatactcgaccccaagagcgactcaaagtgtaatgtccccgcttcaagcctctattagacccttacacccatggaataatggctc

SEQ ID NO: 313141 - DNA, 1383 bp, Cannabis indica
agatctgagcggaaggagccattcatattccactgcacccaatgtaaggttttctgaaactttatatgtgtttactttcattgttttagaaattcatattaggatgttaaataacatacatggtagtaaatctagatcctggtaaaacatattccaacatgtttttcaatgtgttgtctattctattaacataatgccaactctagtaattggcaatattattccttatgaatgtttgtttcagcaacaacctgattacagtattcaaaagccctttgttgtgcttgcttccctcatttgaggccatactctcatcacaagatggaatacagatctgaggagtgtatctttcttggctattttcccaaacataaaagattatctttgtgaaaataatactttataactattattgatgatagtagatacacatggattcatttcattaaaaccaaatttgaagctcaaaaggtcattcccaatttcttacatcttatcaaaactcattttgtgttcaaatcaaagggataagatctgataatgccaaagagctacaatttacggacctttttagctctttaggcattgttcactaccactcatatgttcaaagaccccaacaaaaattttgtagttgaaagaaagcatcaacacctcttgaatgttggaagagctttattattccaatcctacattcttttgtcttattgggatgaatgtgttgccacttctgcttatctcatcaacaaaacaccaactcccaatttaaagctcaaaatatcttttaacattttgtattccaaattcccatcttatgaacacctcagagtttttggatgcctcgcatatgcttccactctatctcaaggcagatctaagcacacaccaaggtctgcaccttgtattttttagggcatcccactgcaatgaaagcatataaacttttcactaaaatatgctaaaatctctccaaaatactctaaatgcatgaatagtctttaaaataacctaacaaattaaaatcacactaatcaataatttaaagaatcaatttaaaaatattaatacataaattgatcatatttataagataaatatggactcatcaacatttgttatatatagtggcagatccaagatttaaagtgataaggggtataatttttttttcgtaaaataggggacaaaagtaaacttaaaataaaaatagtgttgttggtaggatttgaaactttatcctctaacatttatataaaataacttaattattacaccaaaaataattttatgtatacaaatattatcttttattataaatacatgttgtaaattataattaattaaaatacagatacattttttcttttttttttttcaagaaaa

SEQ ID NO: 313142 - DNA, 2973 bp, Cannabis indica
ctttattgatgttgaataaaatagattacattgaaatggagttttatttagggcataaaacccaacaaaaagcccttgggagtaaatgggcgtataatgagaattaagataaaaatagactttttcaacgattgaaagcactacttgtctggaaatcatcaagttgaaggcattaactacaatgagacttgctccagttgcaaaaatggtgacagttcgtacttttcttgcattaacaactgtaaagaagtgggaaattcatcagatggatgtccataatattttcttgcatggtgattaagaagaagaggtctatatgaaaattccaccaggatttgaaaaacatcaaactaatttggtatacaggttgaagaagtcattatatggattaaaacaagctctgagatgttagtttgctaaacttgcacaggcaccgcagaattatggtttccatattcagattactctttattcacgttgactaagggtacaatttagattaatgttcttatctatgtggatggcatgattatttcttgcaacgataaggtggccctagccattttaaaagactatctcgataaatgcttcaagatgaaatattttgggatattcaaatattttcttagtttagaagtcactcgcaacctaaaggacattttcatttgtcaaagaaaatacgctttagacattatttcagaggtaggtctcctcagcactaaacttgcagaattttttatggagaaaaaccattgattggcactagcaactggaagattacttacttctccataatattatcgtcaactagttgggaggttgatctattcaggtgttacccatccaaatttggcttattcagtcctatttaccgagatttttagaaacagaatataaataataagaactgaagaacaaataattaaaagagaatgaataaagagagccaaatatttttttacatagttgggacattaattaaccttagtccacgagtcagtattatttactagttcctttagcttgaaaaagccttcaagaatatagagaatatatgctctcaagtttgccttagaaaagtttgtaagagaattcaacccttaatctataggattttaggagtattaaagttttcattttccctctattggagagtttacagtaaataatacacttaggctatctcatgaagtccagcccatgaagaagatgatctactgactaggcaaatcaaatttggattgatttggtcaacactatgtgcactaattgtgggcaattaacctatgacttaattgcataatattcactataggaagtttctccattaatcctgatacaatactctgttacgatctggcaattggaattttcttatttggatgcaagaataaaatgggaaattagaagggtcttctgggaacgcgtagtcttatccttccagtctcgtggtaccagacatgcttccaggtatgacatactaagggcgaaaggctttgcgattgtggaactaggatacgttccgggaaggacttatctaagtgggcttagcccactttacctttgttgagggtcccactgatgggccttggatgctgacctggattctacgtgtccaatggcagaaatacggataacatttacccccaagcttctagaatgttgtgtatgggggaagcttgcatcactcttttaatatggacatgtggaggctgaggaataaaatcatgacattttgaatgctactcgactgcaaaaggtggcttccttctatgatgataatacatccacgtgtcaatcgcgtgaggatggaagggcgcaaccatcgaggagtcgtttctagaaacaactatattttttttacagctgttcacttcgtggcacaaaaattgaaaagggtcttttcatcattggtctgcgcctcaattcttaggaacattaattgtgaggatacgcgtggatcgtggaacctcctgaccgttagatgcaacttgtgtttctagaagtctaatcatagactctccattctcttgcttgacgaagtcctattaccacttttcactcatttcctaattttttaacttttcaaactttaaaccttttagagcttgaaacttttcctgcatcatttaatacgaagaacgtgttgggttttgtgccctaaataaaacccatttcaatataatcaaatttactaattaataaaagatcagaaatcattttatgttgcatggttcacatgatttctttcatgattttatgtttaatatataaattctatcaaatccagaatatatagttattcatgattatagtgttgtcgacatagtagaatataataatgattatatatttcaaaatttaagtctcatgatttatcaatatactagatttagactgacatgataataagcgagagagcttacttacaccttggataagtgttatgtcctttttagggtattggcaaagtatgctaggatcgatgtatggagtatacatcggactggaccgatattaaacttggataaaatatcataaacttaccgttatatctatctaagtcaatatcagttagtcgatcttagatcaatagatcttaatcctaatatggttaggttcgatcagttgtattatttatgttcttagagttattcgttaaagctcaatcaacctaatacttacatcttgagaacatgatagtataattgagtgggatcattgatcatagatatggaatctatagcttctataaattttagaagtgaaatgatgatttccttcgagctgacttaatagagataaatgatttagcctcatttcagtaattatattagtttactaaaatatcatttataggtagctaagtattttaagaataaaatacattgaacggtagaacggtaaatttgtccttattcgatgtagatcatctatagaggatctttgattatttggattagaacgatagat

SEQ ID NO: 313143 - DNA, 934 bp, Cannabis indica
agtaatccaatgacttaaaaaaaatgtaaccatgatggttataataaaaatgtaaccattgaaacctcttccatatatatatatatattgagtaatccttttgttctgattatttacttctatatttggtttgtttattttgagtttggttggcttgtttgtgccatatttttagctagtttgtgccattttattttggctattttgtactacattatttggttagtttgcggtagattgttggctcaatggtttgttgatacaaattttaaaagtactattacaaattttcacaataaattttaattttgtttttttaattttatttaaataaatttagagatatgatatttatattattttatgtcattatttttttatcttttacttgtaagctaatttagttttgttacctttttgacaaaatacttaattttagttagtatttgatgatttattaaatttgattaatttctcaaattttatatatggtgcaggttatattgattagtatatttttgcctttaaaacttagctctaatagttgatcataacaaattagtttcgatacaacagtgacaatcttaatcaaaaaaagccttcaaatataagttttcttgttaaaataaaaattgtgttttatcttaatttaaaaattcaatacattatcgttgtatagtgtgctaatttaattttctctatttatttgttttgtatgtagttttggtcaaattggttatttagatcaaatgtctcttgaaggtggtctcaagttattttgtctaaatttttgagataatttgatcttatataaatcgctttgtttgtagtaattcaaattctgactttgtatatctttagctagacaattagcttgtgtgccggaaattccattctaatcactctcaaaaaaaaaagtatgacatatttaaag

SEQ ID NO: 313144 - DNA, 760 bp, Cannabis indica
attaaataatttagaatagagaaagttttaacttctttatgtgggatgaattcctattagaaaaaaaaaatatgagcaaaacattatcaaactaaatcaatgtaataatggttaatacaattaagaattaattgatatatttaagtagctaatttagatatttaaattatataatatttataacactttatcttgtataaacattatatctgtttaataaaaaaaattgtggaaaaaatgtggttaagagaaaaaaagtacaatatgtgtttactctctttcattttagcactaaaaatccttaagtcgacgcaatcaaatctgtatcatcttttgcaaattaatgtgggatatggtaaaaatgattctttttgaaatcacaaactttgcattgtaccaatagtgtaaatagaattgaaagagtgttaattagtttgaggttttcttactttaaattggaatgtgttatgaaaataacaacatagaactaaattttaaacaagaaaattaaagcagaacacataaacagaacatcaagaatttcacttggttttgtagactaggcgaatgtactcagctacctactccaagtgtgaaagttagagtcccgtgatccgaaggaaaaagaccgagagttgtacaatcccacatcgcttgggaaaggtcatgtgtgatgatactgatgtgcaggtatgggactacataattgaagacggcttaaatggattgattggtactacctatatcaacaaggtgcatc

SEQ ID NO: 313145 - DNA, 2014 bp, Cannabis indica
tcttagacagatacaacaaccattcacaataattatctttcaatgtctttaaaactgcagtatataataattctatgaacatgtaccgaaacatgaaactctcctcattagatttttttttttaaacaacttgccttaatatattataataattaattccatatattaacaactacaaccatcaacacatgatgtggaaaaggtacaactaatgtgcagtgttatccatatttttgtaatcataatacgtggattttaatcaagaaaggctacaaagtcattagctctgactagcttcctcaattgatgctctaggaagataaaggcctcaacttcacgggaagaattgccgtgataggaagttccctgactgctagtaacatagagggtatccatgagtcgaagtctttcccagttctaagaaccaaagacatcagctcccgagaagagtgtggaatttcccagaagggccaaggtagtttgagatgcgtcaaaccaagctacacccttagcctgcggaggctctgcctatacgtgtcagactatgagcctagtgagcaagctttttcaggtacgacgtcaaaggttttctcccacgacacgctattgtacagagcatgtgtgtccttatgtacctgactaaatgatccaacggctagggataaggaaaattcaaaaaggaaaagccctaagatgacacgcgtatgaggcccaacctatacaatctggcactcataaatgccatatgggaaaaatgccacctagcaatctaatggttagatttcgccccaacgttgatcaatccaaggcagcacatgaagagaggttggcctataaataccgtggtaaagcacaagagtgggggacttttgggagagactcttttactggggcaagattcattgttcaccattttgggcaaacacacttgtattaagcgagatagtattacacttaaagaactccagaatattctcactaagcttcctcttcttcaaaaagagcacgggggaaaaggggtttcagtccattgtatctctatttgtataaatagtaatcgaccgatgggcctaataaaatagactcgtggactaagggcagctaacgcctgaaccacgtaagaatatcttatttgttatcttgttatttatatcattattactttcttaagctctaaaaatatttagttgccgaaaatctcagtaaacattttggtgttttcattgagagctgaagaaagaaacatgcacaatggtcgtcgatgcaagcctgtaaaaagaagggcctgtgcgagagaaggaaggccacctgaatgcctgttagggtccggccagaggttaggagggtcttggtcagaggtattgtcgagactgaaggcctatgccctcgaccgtccgaagaaggtgcagaagataaatgcatacgatcttaaaacactcactgtactcacgtttgcccctaaaatctcagatctggccagtaaactccctagagagatgaccggccactagcatcctcaagctcgtgtcctccgccgtccgctacggcataactacgcagacacgacgaggtgcaaaaggtgttggtgttggagattttcttcccaggatctagatttactaccatgtatgttgtttaacatcctaaacatgaatttctaaaacaatagaatttattcacatataaagttcaagaaaccttacattgattacaacgaaattaaatgactccttccactcagatctctaacccttgatcctttctgtcgtagagtattatcaagatctgagcctaattctttttcatgtgttggattcttcacagtcttacacgctatgattgagtactaacttgctatgtgtgggcatgtactcactaactaagaggctcgaaactctcaagggatttcgaaatagaaaaaggaggtctcaaaactctatagttgtctgagaatttgtaaactaggttatgagtcattagtttggagaatgagatctgttggaaatttatttta

SEQ ID NO: 313146 - DNA, 795 bp, Cannabis indica
ttttaacaattaacagtaagggtcttgtgtcttgacttttctcgtctcaatcagtcgatgatgaacaaaaatgggtaagggtcctgtgtcttcattgagaaataaatgtatgaattttcgaataacaaacaaatactattaatagcattatagtaatatattgatattacagtacaactgcagagaaagagaagtaacgaaatcaaaattgaaaaatatacactatttaaatcatatttataatatatataatgtatacattatgggctcgtttagaacgtcgtattaggtcgtattgtattgtattgtattgtattattaaattgaattatatatcatatttttatataatactatgttaaactttaatttatactaaaatattatatatttagttgtccataaaagttaataccacacatagttttacataaaaatattgcataaaatacaatttaatataatacaatacgacctaatacgacgttccaaacgagccctatatataatttaactttaaacttaaagaactgaataagagagaaagaagatacctaagtacttagtagcggtggacaacttgcttggaggaatcgaactgagccgatcccaggaatgagaactcgctggagaagatgagatgatgactgatcaattcgattcaggtctttcttcttctcttctgtttcgtttggggacgaatcgattaggatttatatttactaaatactaatactttttacttatttaggtttacttactatttattagggtatgtaattttttttttttttt

SEQ ID NO: 313147 - DNA, 2910 bp, Cannabis indica
aaaagtattattttttattttttatattttttttattaagttttgccagcgcatcactcgccggcaaaagtattttctgatatctttttatatttttgccggcaaataaagtcgcctgtaaatcttaggcgccaaattcccgccaaaagttttaccggcatcataactcgtcagcaaaacgtcgttaggggcacatcagccagcggacctgttgccgacgatgaccttatgctggcaaagaaatgcgccggtgtaaatacttttaccggcgcatctactaacctcgctggcaaaagttgttacgctgacgagctattgctggttgcttttgccagcgagaaaaggtgtcggcaaagctgtgatctcttagtcattgtaatactattcggagatgttgctcatgctcattttctgtctaagattacacaaggatatcgtcgataaacactatgacacaattatcgaggaaatccttaaagactctattaatgagatccataaaggctggtagagcatttgtcaatccgaatgacatcaccaaaacttgtaatgaccatacctggtctgaaatgcaatcttcccctagagttgattggataaatcattaatcttgggcaatggatacctattcttgattgtcagcttgtttatttctcggtaatcaatgcacattagtagggaaccatccttctttttacaagtaaaactggagctccccaaggcgatacactgggttaggtaaatcccaaatccagcatcccctgaagttttatttttagctccttaagttttgttggagccatcttgtacagcgcttttgaaacaggttctactctaggtgccaaaccaattacaaaatgtatctcttgctgtggcgacaatctcggtgattccttaggaaaaacatcaagaaattcttttacaactctgacattctttggtccaaattttttaggtctgctagagtcaattacaactcctaaaagtcctacaaatccactgtgtgaaaattgaaacattcaagattagagacccctgaatagatccaacataaacaaatggatcttcaccctctagctgaaaagttacaattttttgcctgtaatcaatactggctgaatacttggacaaaaaatccatcctaagtatgatatcaaactttgttagttccagctctactaagttaacactcaactccctattttccaccctacttggcatagacctaattttccttttggagataataccttccccgctaggcaatagaatcccgaaccctctctcaatgaaatcataaggcctacccaactgattaattactcgcgaaaccacatgtgagtgtgtcgccccagagtcatttagtacattaaaataggagttgttgacaagaagctgacatgtcaccacggaaggactggctgcaacatcagcttgagtgatagcaaacacccgagcaggtacggattttgcttcatgcttatgttcttctttcattgtctgaggaaaatcattcttaaaatgccataccatgccacattagaagcatgttttccaattgcactctccgagatgatatttataacgtgggggtaagaataaccctagcatcaacctctaccttagttccctcagaagtgcttgttctgtctcgatccgccagacaccggggtagtctttcttttctggtcagtggtggaatcaccattattcctaccttatctaagagtaggaagagcgggggttctaccaacactaggagtctctcgatgctcctgaagaaatgtcactgcaccttcggctcgtagatccctttcaactatctcggcataagttgttgtttcattagttgtaattaccagatcttgtccaatctttacatttagacctgccacatacttctctttcttgttgaagtccgtgggcattatacccaaagccaacatggttagacaatcaaacttcattgtgtactccactactgacatgccatcactctgaaccagatcagtaaattctttttgctttgcactgcagactacctcattataatccttgtcattgaacaaatcccgacactctttccatgtcataatggtgacgtcttaggtgagggacactaactcctatcacacgagtgcgtcttcctggaactaaaaagtgatgcaagtcactcaatcattctcgatgactcccataaaattcaagattccttcaatcatagtgagccactgtacgaacttcataacatatgggcctcccaaaaaaactagagacacctacttacgaaacctctcatatatggctccatacagttgctagtaacaggttgctccgctggcataggaacaataacagccagaacttatggtggaggcactgtaggaagaccctactgtcttaacctttgactctcttcatcttgttcgagaatttgatcctgcatttccaccagtctttgctcccaattcagaggagcttcaggtgggttttcatgtcgaccaccctgaaaccttctagggactcagccctgtccatggggattcgggggattttgatctccgtaaactcctccagtctcaactttgttaccctaactcctcaaattttgtgggacgtccatttaataggacttagcctcgaacccataagtcaagtaggtgagattgtgatcccaaaaactttatgtactacactttatggattttaaggcaatgcacttaaaaaattaattataaactattatacttcttaacatgcttttctaattataataattactaattaagtaaaggcttattaaatcgtgagtcaagattttctctgacaatgattgtacatgtcctgacaatctttagtagacaaacctggcgtctctcataccaaaattgtaatgccctgatacctagg

SEQ ID NO: 313148 - DNA, 1901 bp, Cannabis indica
catcatgttgtttttttttttttttttttttctgttaagtacatcatggttacttactggacatttttttacattctattggagtatattcaattatataaataaatttataattatttaaataccaaaaataaaaatagtgccccaaaatgtctttccaagacaaaatctaatcttggttaaggttcttccaagacaaaatgaaaaatcttgcttaaaatttattaagtttgtttatttatttattttaaaaggatggtttattaagtttgggcttgactttgtactttatttatttattttaatttttaatttttggaataatcggttaaagagacataaaatacaaaaattttgctctctcaacaacgaaaaatacgcttatttgttatgtagccattaccaagtgagtaactgaaacttaagcacgttcgtttgttctttctgtgaaaccttaaaagataattaataaaagaaaatgatgaacattgtaagtaatattagttaatagttaatagggattagagaggaaatgaaatttaatttaatatgtgaaccaaaaagcttccaaggcacaagtccccaaccccaatattgattaatatttgggagttatgtgtgcctgcatattctgacccaaactagttttatattttttaccgagcattgttattgggcaccagtggtgcctagcatcttctaaatgtgtcgacttgcaattggctagcaatactctataaaaattattatattacactatatgggactcaatacttaattgcaccaataacgatattgacacgtaggagggtactaggcaccagtggtgccctttagcatttctcttttttaccatttttcttgtgtcctacacacacgtaaatcacaagtttttgactcaaacactcacaatgtgtcaagtaattaatgtttaaaagccatttgggtgggaatccccccacgaattaattagtactatttttctacaaatatatacatatatatattatttatattcaaaaagaaatagaaaaatggagagttcatctaaaatgcattagtacttctaacttttgtaatttactactcaaatttggttctataatattggaagtgaacataatctcattgaaatcaaattaagtgatttaattactgaaatatgtatttgattagatatatatatatatatttatatatttacaacagttattacacccaaacattatttaaattctaatcacaagtaatataatgagatatatatatatataataaaaaaattagtcattaagcattagtatactgccataaagtgacatttttaagaattaacaattttcattataattattaaattagattatgtaaaattttaaatttaattacactaataatcaaatgttaggattaagctaagaaactactccacgacatgcttgacctaaaccagggagaacaggtggtccaaaaccaagaggaggattggaagagggagcacctcgtgagtagcctccattgggatgagatgaggttggatacatggaaaaagtgcctcgagaggtacttgggaatcattggcttcatttcttggtgatgtcaagctccttggaaaccttgtcaatccgtacttcttgagccatgagaagggactcaatttaaacaacactataggcatccgttcttgtgttgacagaggtggtgaaaggctcataccccctaggcctttgtttcaactgagcctcctacagagcatgaaatattaaaactacatgtatctttaagctctagaggtagtttcttctacaagatagcacttcactctgagtaaatgctacaacctcgtaatcctcaaatctcttcttttttgataagatttccttcataaacttcacataact

SEQ ID NO: 313149 - DNA, 1085 bp, Cannabis indica
cacacacacacacaaaatacatatttataaagttacaaaatgggcatcaagacagcttggggatcaagacattccaaatcttccttaagaagactcatcaaaacttggtcaccaagacttttctttttcccaaaattaataattacccaaaaagaaattacaactttacatatattgatgaataaataaagaaataaataatttgagtcaaactctaatattgcagcacccacaatacctgaataatgtcattaattctccaaactccacaaatataaactacaatatgagaatcatccggatgaagtgcttcaaactccttcttcacttccttaaccactacattatgatcagtagacaaacgctttgcaactacatgagttttctagctgttggaatctttttagccgaggagagctctggagtccccaaggttggccatgtacagaaaactatttaaaatagtccctaaggtcttaaaggttctataatggagttgctccattatcaaactccaaccaaattaaattatatatgtattaatatttttacataattaataaataaaatgtataatgtaataatgttataagctgtaagacaacgaccagagatgaaggtgggattgagaaagaaacagattaagggagtgggtgagacagagaacctcagggtatgttccggtgtgcaaggaagccggtacgtgatcctcttcatccatcaatagcaaaaatagctttgctggagctagcgcaacggccgcccgctaggactgggttgattgaaagaaagtgagagaggagagggggaggagaatcaaactgggaaactagaggtcgcagcgagaagggggtgagatagaacgattgagagagcgagagagagagaaactcaaaaaaaaattaaatatagtatttcaaattaataataacaaaaaattggtaaaataaataccataaaataattaattaaaggctaattatgatttttgccccctgaagttttaaggccattgaaaatgccccctgaactattgagattgttggatttaaggatttttgtctaattttattcaattttactat

SEQ ID NO: 313150 - DNA, 674 bp, Cannabis indica
ttttattcggtatataataatacggaatgggttgtattaaaaattaaagttgtaatatttattacaatacatgctcccaccaaacattgtaatattataatttaatacaatacagggtccttatacatggacccaaacgaacccctaatttcttatattatttaaagaagtttttatcaacaaataatataattaaaatttgatataattttattacttaattatcataatcaaataaaaaatataatttattatacatatgatttaaaatttcttaaatattttctagtttaaacttttttgagcgtgttgtttaattaattatatatactacctactaatatgtgacttatttaaaacacaccaactataataacttaattggtacatttgataatcaactctgatataattatgttttgttgaatttataagtgacatgtttgaagtttactttttttttcacaaattgatttatatttattttaaaattaatacagtaaaatttctttctttttttactataaatttaattgcttaatatatatagatgggtaatagtattacttaataaatttaactatatataataattttaaaattattaaacttaaattttgatccaatgacaaataataaaagaaaattttgaatttttatacttaatttagcta

SEQ ID NO: 313151 - DNA, 881 bp, Cannabis indica
attattattattattatgacatataacctaaaatcttaatagttataaaaagataaaataaataattcttaattatattgctctaattatattttttgttgagttgaaattgatttcaaagctgaatattgaagtgttgttttgttcaccatcgatcatgatgaatggacaatgaacatggagaagtattggacaactcctctcattatcgacaacttgttaagaaacttttatatcttactctatccagactcgatattacatttgtcgtgaactttctcagtcgattcatggctagtccacgcactacacatctccaagctcttcaccatctacttcgctatctcgaaggcagccttggacaaggactcctctatttgaattcgtcaacattgcacctccgtagattctctgattcagactgggcatcatgccccattacaagccgttctaccactgatttttgcattttcttaggagattgtctcgtttcctgatgcataaaaaagcaacccactatctccaaaagctcagccgaagctgaatgtcgagcacaacaagcgaaataacatagttgtaataccttctacatgactttcacataccacaaccatatccaaccttcatctattgtgacaacaactcagccatacatattgcaaacaacccaatttttcacgaaagagccaaacacatagaacttgactgtcacttcatcagagacaagatcaacaactcttccatcattcctatatccaacacacttcatgtaacaccctaaataattaggcacgctacccaaaatacttatgaaatcataattccctaaacggattactaataaaattagcacagaatttaaactttaataacaataggaa

SEQ ID NO: 313152 - DNA, 764 bp, Cannabis indica
aagtagttaaattaagcatagaaattcaaatttgtgatttcattattcgttattagatcaaaattcgatggtttgatatttttaaaattaatatttatagttaaatttgtttagtaactattcatgagtaatatccatatatatatatatagatatccaaatctttttattattactattatatgtaattactatttcactccttaatttcttaatctataactcatatatttgtaaacagaggatcatccaattaaaataaaatactaagaaaattctcttctatcattttttttctttaatttatattgttttattatatatatatttttcaaaacaataaaaataagagaggcaagaaataagaataattgttttgttgcttgaatggaagtattttctctactaagaaagaagagaatgatttataatttgataagtaaaatgctaattaattgtccgctaagtatgtttgttatattagtgaatgattataatagttttgttgactagttcattgcaaattgcaagtatcttaatttaatttagaactaataatatgtatacgtatgtatagttgcacatggtgccagccagatacgagatgatcatatgtgaaaaaccgtagtctcaaacaatactccatacaaactgtcttctacatcattgtccaaaatatatttctattttacttgtaaataataaatcaaataaacaagagattttttctataataaactgaaaatggaaaaaatttacattta

SEQ ID NO: 313153 - DNA, 1537 bp, Cannabis indica
ttaaaaagggataaattttttttgggtcccctgagctaggtgggccctaggcacaggcctagcccgcctatgctcagggtcggcccttagagggactaatcctgccaacttgatcaccattaaggcaaacattgagagttgtagttgagatgcattaatcaatccaattataaaattcatccgggaccccaaaacatcttaaaacatgatcaacgaactgccagctaagcttgtcataggctttcataagatcaattttgatagcgaagaatccctctctgccttttttcatattaaaactttggatgatttccggaactataacattgtcgtctttaatatcccttccaagaacgaaggcagcttgagtagggaaaataattttgaggagaggcttaattttatttgtaatgatcttaaaaattactttgtaagatgcaaatagaaataggcctaaagtggtgagttctttttgggttctaaatttttaggatgaggactaatttatgcataatcccagtatcatagaaatcttcaatcgttgtacaaaagtcctttcccacggtttgccaatagtgcttgaagaaaaagacagacataccgtccggaccaggcgttttattgttgcctatattaaacagagttttacgaatttcttcaaaatttgggagtctgacaagctcctccaaatccacaagataaagacgatcaataatcaggtgagcacacttcagccttttcccattgttgcaattgtggaagattgcattgaagaactccaagaattgtttaccaatcaggttcctagcgtggagccaagttccatttttgtcttggatactttcgatattattccgtctccctctaaaagaagtagagagaaagaaaaattttgagcatttatctcggggggttataatacccattcatgtaggagtgtggtatccacatattgtttataggaaaattctacaatgcacttccttaaaagggaagcactaatgcagccctatctgatttggtatccaaaataattttttagtcaaattttttcgcgtggtcatgtacgttatagttatttatgatatcttgcaaaattttaaaaaatttaaaaaatttaatatgccaaaaataagattcaaatagcgtattgcacccgtgactattttatattttacgtgtgtaaaatagactatttgaacactgttttttatattgtaaattattctgaatttttcaaaattttataaagtattctaaataacatatataaatataaaaaaataattagactaattttttttatatgataaaataaataaaagatgtatcaatacatttttttggagagggtgtactctatttatatgaaaataaaatttaatacctttgatacaatatttatgatatgggagtgttgtaaatatgggctacacacttgggtggctcttaaaattaaatggcctaataatatatttcttttttatttcttttgtttttttacattaaatattttaataaactaaaattgtctttt

SEQ ID NO: 313154 - DNA, 488 bp, Cannabis indica
aggccagcctaactcagcatagagaaagaacatcgccgaaagatactttataccttttagggtgattggagtcgggcacactctgaagtatgtagtgatgtctctaaagtagggatgtaagggcaatactgctccttgcttaatgtggtactctgaccatgccatccagttgagggccaactgatgcgcttgttggtccctcgatggctgctcacactagacatctcctatcagtgcactctccctgatcctgtcaagtgtcttagtgctgataatggatggaggagagatccatcggtcaagaacctaaggctcggtagcctttcctagaacatggtccactccaaccactgaaggatgaccaagcctattcaagggctgcccagcctcattgtacgagcccaaaagagctgttgaggaaaatagaacatgtcttgtactgtctcctcctgacagtacaacctcctcaactattggaaattatttta

SEQ ID NO: 313155 - DNA, 1534 bp, Cannabis indica
taaacaactgctaatttccaaattaactaagcgggctttacagaatcaattctttcgatccccttcatagtgagattaggccactatttatagggactaaatacatgaggaattatttccctttgtctataataaataaaacagaaaactacattaattctataattacaatgtaaataataggaaactaaagtgagttgccaccattctctgacttaatccaacaattatagggattgtctttgtgtcttggaaacaacaagattgatctctagaatttgtatcttacatgctttgctcggcataaatatgtctgcatcttggtcggacatcttctcgatcatcttgttcaggtatccgaatgtcacagatgttaaataacctattaacaggctgttaggaatactttccttcgcccaagtatcagaaacgtgggacaagtgtcatccatttgtattgccatgccaaggtgcaaaaaataggataacatttgtcttataagtctgtgtcaacctggagtcttgtccgtatgggtgatgtttgtctttgatgatagatgatgatctaatgtgactctggctagttgtctcttcaaaatctgaccatttaatgctaattgacggttgtacctcgaatcacaacttgatgcttaagcacgcttggcggttgtagtccctgcaaggagtacgtaatgtctattttttgggggaaactcaaaaattcgaattttaaaatggttaattcctttttagattacttataaataggaccaggaacccttggtaatccttttagccattttaattctcttaaaccatagcaaaggattttcagtcaaatttcctctcaaattcttcgagaaattcataggaaaaccttttacaataccatccgagcaggataagaaagcttcaaataagtgagtaagttcttcattcctttcttttccacatttgcaatgaaatgcatgtatgatttctaaattttttgctgtgaatcttgcctgttcttgaactgttctaggttaaccatagagtagctaggtttaggacttggatcatttatggctaaccataacatccaattatttgattgtgtttcgaatttaaccttacaacgttcatttccacttgttcataagattttagcgaaaatcagattccaattcaaagttttgaacttccaagattgaaaattatgtttctggatgaaacctttgcttttgattctcaatcaggtctggtcgacatattcaatttgtttttcattcgttactttgaccaactccctggtgattttggggagcaagcatcatatcgattaagatttacttcaacttctatatgaagatcaccccatctccatgctagcccatcctcgtccagtcacaatctttcaaattctagctttgaagattgggaaataagttgtaatacccctggaattaaggaaatggattagcaaagccctaactaggtaattgagtattattgtagaattatattatattataatttattatatgcgaattaat

SEQ ID NO: 313156 - DNA, 1786 bp, Cannabis indica
ttattgatgttgaataaaatagattacattgaaatggagttttatttagggcataaaacccaacagaggacagtccacatttcggtagcagtgtccaaatacatgatgttacttttaattttaggagaaacggagtggagaatccaacacatcaccatttgattgcagctaatccaagagctaaacaaggaatctgtcggaggaggttgagggagagggccatcaagaaatggagttttgttcctggctatggagagtttaaaatcgcgtgtccaaggctagaaattgcgatctgtgagacctggtgtggccaagactaaccccggatgatcagcattgctgagataataaggtgaacggacatctttataggcaggtcgatcatgagaaatggatcgagaatgttggagagaatcgatcggaggtgatcgatgattgggaagagaatcgatcggattggatcggtgatcttgattagaatcgatcggatgtgatcgagaattgggaactggatcatcagttcgattggagtgttcttcagagggcaaagatggtggtggagctggatcagcatcaaccactgacggaggagggacaatggtggtagcagtggctcgagttcttgccattgatgaagtctttgaagttggaattaagttcttgaagctttagagtatttcttctgataccataataggagagaaaacagagaaaattgatttgatattgattaatttgaacaaaggcattacagggaatatatatatagtgtagtaagtcagttaagactaactacaacaacaataactaacttccctaagatgtggcaactaacataacagatcctaaccacttaatctaatagtataccatatatttttaccactaagtcacgatataactatatatctattggacaaatgacttaactgagaacaagaaaaaatagtttaaaataaattaaatatggaatacttaatgagcttacagaaaggtcggaagtcatgctttaaagatcaaacattattgagaacttattttatatgtagaaatgacagtattttatttttcttatttgtccttattgtatgcctgttttattgtctaataatttgaaactaacccttttccctttaaattaacatcaactataaaaattcaataaacaacactatttactcaaatattgacctaccaaacacattaaataacttttaacctaacttagacattgaataattaagtctacctaacaactactatctacttaaataacctaccaaacacataaaactcactttctactcttttttttccaacaaactcactttctagttatcatgaaggaagcacaaataaattgaaggcagcatgtatccctccccaccatcatcctcatcgggtttaatcccctttctttttaatagtttattgctcttgtgttttatttaccctaaattctctaaaatcttatttttgattaatttttttattgaattagttgagaccaatagttattttcattcacttttccacattgtaactttccaatagttgagaccaagaaggttgatccgatatattttttttaatttcacataaacatgtgacacgtgttgaaataaatataaaacacaagttacgtggctttaatgcatgaattggattagaagtgtattctctcttttatttatcaaattgaacccccagtcatcagaaaagaaaataaataactgtatttgaattttttttttcatcaatagatctctttgaataaaataaaatc

SEQ ID NO: 313157 - DNA, 773 bp, Cannabis indica
tctcttttaattatttgtttctttagttcttattatttataatcaatttccgaaaacaatggtaaatattttggtactattattgagagttgaaggaagcagtgagaccatttatagattacattcaagtaatcatggccctcacctgcacaaagtatggtcttcgttttactgcaactagcaccaaagcaggggacattaatgatccacatgaggcgactagtcgtcagaagggccacctggacgaagatcataatcgagacaatcctataatcgaagatgcgaaatctagggaaagcagttctgatgatgttgaagacaacactcaagacacacccaaggatatgcttgtagacgaccctcaggacaaagtcgctgataataatgttagaaagaagaaccaacttggcgagtcagaacctgtggtcatcatatggctaaataacttcaactggcagaaagcgggttgacccgacatgatcaattcaaggagttgctgctcacaaagattacaagaatggaggcggtaatgactgccctgaccaaaaaggctcctaacgtacaagcttctccaacaactgatgcccttaaaatagtagatccaaaagattctaaaacctcacgcatttgcaaagacaaaggcaaatggatagccgtcgaagatccaaagaagactcattccatcaagcagcataaaaagttataacctttctcaactcttaatatcaggcaaagagttttaaaggcatcaaaagtgtcagatttttctctta

SEQ ID NO: 313158 - DNA, 784 bp, Cannabis indica
  modified_base (773)..(773): a, c, t, g, unknown or other
aattgtgttatatattatatataaatataaatataaatatatatatacataccataaaaagtaggcaaaatcatagaagatgaagatgaagatttgattttatttgttgaacctttgggtcttcctctactcctcttggttgacattattattttctgatcatcattatcatcattaatattattatgattattatcatcaataatattgtattttcttggtcgacctcttctcctaataataatattattattattattagcaataataattctgttctgatcagggtctgaagattgatcaagatcagtagtagaagtattattattcatgatcatcaccaaattattttgatcatcttcttgattagtatgatcattttcttgattgttgttgttgttgatgattgaaacctcacgatcatccgaagaatccattagtgttaatttctttgactaatatttgtgattaattagaataatctaatttatttctgtttatattcctaaggtttacttacttatatatagaatgatattaagtcggtttagggattaataatttaaatttgttagatatttattaaatggttatttatatatatatgatattaagtcggtttaatttataatataaaaaacgattttttatatagaaaagtacaattgcatccattttttgttaataatttatatgtataatttatttaatttttattttgattagttattttaactaaaatttgagacgtatggaaaaaaaaagcttatacntttttttaaaa

SEQ ID NO: 313159 - DNA, 722 bp, Cannabis indica
cgacaatgaaagatgaattgacttagattttataccggaatagtttagaatgttaggttgttgtgttgtcgagtttaacaagaattaccaaattatccctaagtgtgcttttaggtttatcggttacctaaagggcaaaatggtcatttgtgagattactatttcgtttctttgtcttatatggtcaagttaaagtggctggagacttagtgttattaggttaattaataaaaataaaaaaaaaaataagaggaaaatcattatcttcttcttcctccttcgttctaccattcgaagccctaagatgcatccacaaccagggatctctctaccatttctgctgggatttatcaaagctaagagtgtttatacaagaggtaagttcttaacaacccttctctttggatttcttaaggttaagactaggttttggatagggttttaggtttgtaggggctatgaagttaaattaaggttagggtaagtttttagaattgtttttatgcttgtttgagtttgaattgagtagaagtaggggctgtttagtttgatttgacttaagtgatgcctaaaatttagttttcttcacttgaatatgtgattttgattcgatggttgaattgatgcgttttggagcttggaatatattgtattcatgatatacaactgttctgtgaagtttggaaacaattggttaggttgggaacaagttttgggacttt

SEQ ID NO: 313160 - DNA, 885 bp, Cannabis indica
agactataaattaccttagtaaacctactattgtatagaaaatggtaatagaaagataatcatattagaccataatcaatagatacaattgaaattgaaagccctaacatttctttttttattatgaattatttggcatttggcttgaccccataaagaaaatgttattaattgacaacagtcaatagttttagttctaggaatggatatattgacaaactggtttgattcttggctaaataacaaattattgcaatcaccataacattccaaaccagatatcaaataggagtcctctgcactaaattgaatataacgggcaacaaccttttcctaaaaaaaattcagattgggttgattaacctccttcaataaaacgatgtgagcagtttggggatggaatttgtactctgaaatgttcaaaatttgaccgaactgtatatttcggaacatctttaataaattaccagaaatagtattctttatgttaaaaataacagaataagtgtatgtagtaacacagtttgatatgtaataatcttaaggactaaatttgtaaacgttctatggtaattcttatgtttagtccttgatattatagatatgcatgaattccacagagaacataagcagaaaatatgtgaagaatctaaagaggaatatgatcaagaataaacaataatgtctataaatacttttaaaattgtcaaaaaaaactacaaaataataataaaaatacagtcacacataacaaatgtataaaacaaaaagacaaagccataaagatatatggaaacaaacctaatataaacaacaaaatatataagaacactaaaatctgaaaaaacaaaaaaaagaacataataaccaaaacataaaccaatt

SEQ ID NO: 313161 - DNA, 533 bp, Cannabis indica
aaacatacttatcctgaattccacggacatatcaaccattgttcaggttgcatacccatcattcgctgacatagattctctgaacgttgtttgagtttaccagcttcagttgatactgaagcaggattattaaatgcatatgtattcctcaacccaccaagattaagtgtgtgttcttgcaaataactaaattaaaacagattattaataaacagttgtatatataatttttaacttagatattaacttagttattaactattatacctgcaccaaagagacataacaatatttccaatcatatggagcttagttaatagttaatagttaacttagttattaactattaactattatacctgcaccattgcatatatattaatttgatgatatataaatgaatttaaatatttatgaaaagggggactaccctagccctttctcataaaatcaatgagagacccttctttttaagtgtatgttgggaccttagtgggatatctcacatggggccttatttttttttttttttt

SEQ ID NO: 313162 - DNA, 1018 bp, Cannabis indica
acttcgccaaacaaagcttgggttattacccaactgagcagtgaggtagttaccattagcaaagtatctagctcaaaaaattttaaacaccaaaaagtctgtccgagtaagcaaacgcgaaccttgcttccctagaagagcaagattaaactccctaagattacgaaaccccatgccgccaatacttttgtgatgtgtaatcttttcccaagaaagccaatggatccctgattctttcctttcgatgttttccaccaaaatttggccatatgttgctccatatcacggcttatatatcaagtggtaataaaaacaaacacactcttcgcgtaactggggagagcttgtgtaacaattttgattagtatttccttccctgccttggagagatacttggagtcccaactttgaacctttttacgcaccctctccttcaaataaccaagaaccgatgtcttgtttcttcccattgtactcagaaggcctaaatacttactgttatcatctccaaatgttcatttggagcaaaccacatagttgttgtcttgtcaactcatttgtgttggtactaaaaaagatagatgatttccccaagttcactttttgccccgatgcaccttcaaacttcctgagtaactcctcaacacaagcatcttcctccaatgtagccttgcaatataaatagctatcatccgcaaaaagcatatgagaaacccgaggagcctcattcgccactttgcaaccgcatgaattctacccatgctttcatattttttaattaaaggtgataacccctcagtgcacaaaatgaaaatataaggcgacaatggatccccttggcgtatacctctcctaggcaccacagggcccatttctctaccagcatgaacaatcatactaccttgctcaagtgacacactttagaataacgccgaacccaataagcattaaaacccatctccataaggatagcttgcaagtagtcccattcaatgcgatcgtacgctttactcatatc

SEQ ID NO: 313163 - DNA, 2295 bp, Cannabis indica
aaaaaaataatatctatagttgagattcatttttatttatttagtatttaatttttaaaaaaagaaaaaataaataaaaagaaacacaaattttaagtttttatggcattactcaagactttttcccatatttgtaagtttttaaaaaaatgccatatttagtgtaattaagttttatgccatatatatcaaaacttatctttattttcccatattttgtaaatagcccaacttttaactaaatataataaattttagtattaatttattatttagtactaatatatatatatatttatattatattgggtgttggggattcgaatttttgatatattttttttttgtgagaagaagtgtgaattattaaactacacttatgaatacttttttttttttttgatatatagtactaaaatattttgctaattaggatttttattcttgaattttaatatgcaccaaattatgttttttgaactttttaagtcgttaaaaattcttcctgaactactgagatggttggatttaaagacttttttttttaattttatttaaatttgttaatatgacgattgtccatatactaaattttatccctaaaaattttatatctaccaaattatatcttgacaatttaacatgtattaaattgtgctccttaaatttttacatacatcaaattttttttaataaaatttgacaaaagtgtttaaatttaatagttcgaaaaaaaattttaacgataatttaatacatatcaaaattaaaagacaaaaatttaaattagtcaaaatatttataaaagtatgggaacatttgaaccacatgtaataaatttgatattaatgtttggagctaatattttactgcacatgcaacaacctaggcatatgcaggataaaatgatctaagtttgatgagttaatagtatatacgcaatatactcatcaaggcaatttattattttccttttttttttcatgtgtatatagaataataataggtcactaactaaaattaagattttttgtggaggaaatatatgcactagataataaataatcaatgttgttaacagtagctatctgatgtttctttctcataatttgggatcatgaataaatgaggacatttggcgttataaatctgctttgcatgttatttaagtaatttttttttttaattttcttggagtaataaaaatatcaacactccttacaaaaaaaaaaaaaaaaaatcaacataataaagaatatataataaaaaaactgagagtagttaatacacaattttcaatgctaacataagcatcgggaaattatataagcatatctatggtttataattaaaatctaaatgttccacgtaaaagctacccctcacactcttttcactttcctctggacgaaaatctctgcactacaagaaatttgatttgtctgtggcaataattttggctacaaaattaatgagtcatgatacgataacaaactgaaaataatacaaaataaatatttgggtgacaggtttaataaatatattgtgttcatattatttgttttgcacttgtttaataatcgtacttgtcgtgtttgtatttactttaatcgtatcgttttatagtcttattgatacatttaataattatttcgtcttataattatattgacacgataggacgaattaattttcataagtattattaatttttttaaaaaaattatttatttagataatcgttgtgtgatatgcatattattatattaatttatataatataatatttaaattaaataattaaatattaaataatttagtacgaaaaataatatttgttaaattgtaacatataaataggaagttacaaatgcgtgaatgatgatctaaaaggagttaaaatcatatatattgatgattataataaaaagagtttttggcggctaaactctctcaactatcatttcacttgcatttaactctccaaacttaaattttggcggcaaaacccttcaaactactgaaccagtagcaaatttaaggtgtcattcgattaactgccactatggactgcttatatgcatactcttgtacatgtggtatgtttatattataccgaatatttaaaaaaattataaaatttgaaatatttttatattttttaaatactaatattaggtgtaccaatataaacctgtcatctgtataagagtgtacacataagcagtctatattggcagttaactgtaaaaaatgatgacaccttaaatttacaaacagttaagtagtttggag

SEQ ID NO: 313164 - DNA, 489 bp, Cannabis indica
ggttccatctcaaaaccaattgcaaaagagaagagtagcccattcatcttatatatgtcaatttatttccacacattagcaatgtcggactaactctaataatcctctagctttgaatacaaagagaaattatcatcctacccatgcgaagacaccaaaagccaatcgatatcacaccagtgacccaacatgaaacataagtaaaatttctcactgtaaacaaaactaatcctactacaataacaataattgagaattgttgcaacaccattattaaaactaaaaatgacaaaaataatatatgaaaaataaactaaacgtgaacataaaccaagatccaaatgttagagccacaaccttattgagaactcaaaaaccccaaaacttcaatggtgaacttgaaccgttcaccccctctaaatccaaagggtaaccctgtcgatgagaaccctagtcccgcacccttggatagtgttgggttttatgccc

SEQ ID NO: 313165 - DNA, 1000 bp, Cannabis indica
taaaggaggatcactttgattccttgtagctccatcaataggcctttgagacaggattggcatgatttgttgatactgcatagacaatcaattgaccaagtcttgattgccatctttattttcctcaggtttcgtttccatattactggtagtattagcagctatggaaaaatggcaaagactccttcgctgatgttaagctctacagaacaacgattgggaagcttcaatacttaaccattacaagaccagatatcaatttctagcaactcatagatcaacacatttagttgttgcacaaaggattttacagtatgtaaagtcctcaccaagggaaggattattcttttttgcaaagtcagtgcagctcaaaacttacactaattcggattgggcagcttgtattgatacaagaagatgcacaattggcttttgtatttaccttggagaatcgataatctactggaagagaaaaaagttacaaacagactctagatcatctgctgaagcagaatatagagccatggcaaacacagcctgtgtgagcttgtgtagctactctctttgctcaaagaattgaaagtggaacacaaggtaccagccaaatgtattgtgacaatcgttgagctcaacacatagcttctaatcctgggtttcatgagggaacgaagctgatggtttgagaataaatttctattggtttagatttggaataggtggatatgtggttaatggtttgttgtggcaatgtagtgaagtagtgatgttgatgagtagttgttgatttagtatatgaaattagtttggcttagaagagagggttgtatgataaagcagtaaacctttattgatagtttgcaacttttggatttttggtgttggttacaacttggaacccttgatgggtatttatagttgctagccttcaatcatttgaggctagaattgttttctctagatctttcaagttcaagaattttatccatacatttctacatat

SEQ ID NO: 313166 - DNA, 531 bp, Cannabis indica
ctaggtcttttggattaatccatgctccagcagtttccatgaatttcttgaaattgagtgttcaaggattttcttgatttttgtaatataacaattatcaatgatattattttatactctcagttggaaacaaaaaacatattatatttactacaatgacttaggaaatacaagtttatgctaagtttaagaagtatgagttttggttattttgttaataaagttgaagttagtggagatctagagaagattgagtcagtgagagactcgacgagactaaagacagttaaaaaagttagaagctttctaaatttagttgggtattatcgccattttttggaaggactttccaagatctccacaccattgacaaagaaacaacggttgaatacaacttcagtgttagctgtgacttcaggttgggaaaagttggtagtatattgtgatgcccaagactctagtctagggtgtattctgatgcaagctgacagggtcattgtatatgctcctcgtcagttgaaggaatatgag

SEQ ID NO: 313167 - DNA, 1729 bp, Cannabis indica
taaacaactgctaatttccaaattaactaagcgggctttacatgtgcaatcccacatcgctatttggagatgatttaaatagattgattaatactacctatatcaacaaggcacatcatgcgtatgagttgggacaaaacacgctgaaaatactcgtattagtctgcacaacccaatagaaacttaaagtgaaggttgtacatgcacgttatttatgcaaaatttgagataacattaataaaacttatttatttgctttagaaaaaatacatataatttttcattttgtgaataatttattatatatattataaatggctctttaaaaattactcttattatatactttttttatttttaaaattagaagagaaaagaaaaaaaaaattcaaactttgaacaacttgtacactacgctaatgatgtgcttccacattttacactaaaataacttacattataatttgtcttagtttcagtggtctagcagttctataatttgtaatttatttatatatacatatggaacactatatgtatatcatttaaatttggtaatttaatctaaatggttggtttaattgttttttttttccattaaaattgacagttaaaattaacaccgttaaattaattaattaattaattttttttttaaaaaaatttaaatatctaaatttgattcatttattaaaatattaacttaaaataattatttacatgtatccacaaaattaaataattatttttataacaaagtatcttaatttaattgattaatcatattttataacaaatttattagtacaactctaagcaaacatgcatatctattgttggtttaatacgacgattgtctatatactaaactgtatctattgatttttttttgaaaaaattgtgttcattgaatttttttttttgagagagaattgtgtctattgaagtttgatatgtatcaaattgtatctcttaaatatttatctatgtaggcgcccgttagtaaaattgaacaaaattttttaaattcaataatattaatagttcaattaattttttttttttaaccacatgaaaaattggaaacaaaatttagttggtgacaaaatccatattagtcttttaataagtaattagatatattaatgtagtcaaatgatatttaatatatatttaattcaagaactaaactaattatggaaataacttttgtttttaaaagaattaagagaatattctttagaatattattttcacaaaataagaaagtagtatgaaaaagattgttagaaaagaaaagtacatggaaaaaagtacactacattttgaatagagggtgatacgggacactaaaatgtccaagactaatacttttatgatataatttttttataattagttagtgttgtttcatcatttttattaaaataaaataaataagattaatatgggacactaagatgtctaagattaatatttttatgataattttttttataattaattagtgatgttttataatttttattaaattaaaataagtaagacctgatattaaattatacacttatgagtaattttaatcactacataaaaagttcctgatattaaattataccataaatgcgagaaatgctaaaagccgatagttgtgattatcacttttatatatgttaatattattattagtctaattaagtatcatgtcctatataatttaatgtaataa

SEQ ID NO: 313168 - DNA, 609 bp, Cannabis indica
tctctctctctctctaatttatgatttcaaacacaattcttgggaaaaggcttgaattctagtgttgatattgtgtattttcttacttcgagcttgaagaacataaggtagctatctttaatctcttttacttgatttattttctggatttaatcttgttaatggtgttttaggtgttcttaagtatcgtggttgcatgttaatgaaaaattatgtgaattttggtatgattttaggttggatttgaatacatgaaaattttgattttgtgtgggttctgggaccatcgccgcggccacatcaaggcttaccacggcgagggcttggagccaccgcagtgagggccctattttttcccaattttttgttttcttatttttgccataacttttgactttaaacttcgttttggtcgtttttgatatcgctgaaaagctcattttggggtctatgtgttagtctataattggagctcaaattatgtatattaatttgggattaatccgtttcgtaaaatctcgagaatttgtgactaggattacaagcgcttgcctaggaacacctaaagatgtgaaatctccacatacttggattaccaggtaagatagt

SEQ ID NO: 313169 - DNA, 1076 bp, Cannabis indica
ctttaagatcctcccagaatgaagaaaggacctcactacattgcaaatatcctctccaaactaaattccaattatcttggaataaatagctagagtagccatccgggcctggtgcttttgttccaggtatgtcaaacacagcttttttttatctcttcatctgtgataggttgtaacaagctttccctttgttggatagaaactattggtccactatttatcacacctgctatgactctctttctatttggcgtacttgtgccaagtagttatttgtaatagtctaagaagatcttagatattctgcttggctcattaactctgttcccttgagaatccagtatggagaggattctatttttgttgtttctggctttgacactcgcgtgaaaaagtgttgtgttgtcatctccctccttggcccaattgattttagctttttggtgtaggaaagattgatacttcttgtgagcttgaataaaactattcatggcttcagcttctgcaatttgcacttcctggtttagtggctccaaagtgagtttgttttggcaagtattaagtacctcctgtgattgaattgttgttgcatgtaggtatgtgaacccttcttggttaattttctttaaaacaggttttagagctttaagtttggcaactacttgatacatctcagtgccacggatatcctgcttccaaatactgctcacctgatgtgcataatcaggatgtgaattccacatcctgaaatatctaaaaggctttttccccatctgtgctagttgatgaaatgaaaggagggctggtgaatgatcaaacatcccctcgttcataaaaattggctcagcaccaggaaacatgtctaaccattttaagttagccattatcctgtccagctttgagtatattcgatcccttccttgttgtttgttgcaccaggtaaaaaatttcccactacttttaatatcttctagatgacagcaagaaacacaatctctgaacaactgagattgatgttctttaacccgatccccaactctttcctcttgattcaatatatcattaaaatctcccaa

SEQ ID NO: 313170 - DNA, 1524 bp, Cannabis indica
gtagtcccatacctacgcagtctcagaatcatctcacttgatcttccctaggcgatgtcggattatacagcttacccggtatttcccttacagatcacgggactactgactgtcacacttcaagtgattgatctctaatattcagtatattggaggcaggcgcgcattcacctaggaccgtctcaaacattttagaggccatattctaatcttaaaatcttggcccctaacaaaaataagaagtacaattaaattcaagttcaatctttttttttatagatagtcactagtgcctggtgatcttgaaattaagaaaagtacttgtaggcaaaatcaaaaatagaatagcttatctaacgtcgccaatgatggaaacatgactcaaactaatattcctttgagggattatgtactccccgctatcacgggggttattaattcatgtattcggccacatgctgtagaggcaaataactttgaaatcaagtcccccataattcagatggtgcaaaattgtgtttaatttggggactgcctaataaagatccaaacagcagatcactagttttttggagtttgcgtgctacattcaaaatgaaccgagcaagtaacgatgcaatccgttacaagctacacccatgtatgagatgtgtggtcgcacaaagtccctctctcttcctctcctcatgtcttgtgccaaccccgcccctgaaccagcgagcctagccccaatatgttctcgttctctttctcgatcttatttttgtatttttttttcaaggatgcccaacctaggacatttgcgatcatgatggattcaaaaccgtgttgaatattttgattctataaccaatctcatctcttgtttaatttgtgttttgtttaagctgaattattgcatttattcactacaaatttttttactattagtcacaataaaatttgtgactaaaagtaaaaaaagttaagttgtgactaattataaattaacattcttatgttgtgactaaaaagtctgtaactaaaagtataaaaattacaatttgttgtgattacatgtgtttttagtcacaatatttattgtgactaaaactaaatcagtgacatcttgtagctaaatactatatttagtcacaaaagtaacttttcattgtgactaaaactcagatttagtcacaaaaaattatgttgtgactaaaaagtgatcactaaaagtagttgttagtgattgctaattttttcttctcatcagatttaaaaagttgtgactaagaagttatcactaaaaatagttattttttttatagtgattgttaattttttcttctcatcagatctagttcagaattgtgtttatgaatattatgttatattcggggtcatttctagcccgatctatattttttttcttatagttacttcgattcaaaattgacggtaattaataagaaaaatatattgatatttttgttcacacttacaataaaatgtcacttttgccagcacatttttgtgctggtaaaa

SEQ ID NO: 313171 - DNA, 1558 bp, Cannabis indica
acctttgcaagtacagcacagtggagctagtcctaccttgatgatctaattttgtcttagcaaattcacaaactaaaagggtggattcgtcatcccctagaaagctatccgagggaagaaaccagcttgaagttgtatacgaggagtgatccaggggaattggcatgggaggaccagagcccatctgggaccgacccaaaaagtgacttaagttcaaaaaataaaagttttggcattatcacccagcgggaatggggcattcgaaaactatacaatctgttatcaaattccactggccttagcacagtataatcctggacagaagggacgaagtgaatgttcaaaggagacttacaggctctagaagtactagcacgggggccccaaagttaggaaccggaaatggaaacttgagccaaattgagggtttctcttttcctgccttctcccggaagatcctccccgaagcggcttgcacctgagcaaatggaatctatacttattgtatttttcctctgcagacgaaataatgtcctcccagagcgccttctcactcctaggatttcgagcgttagggcaaagaaccttggacaaattaaattcatccatagactggctctctaggatcaacttggccctttggcagttggccgtagtgaccaggtcccccacgttcaactctttctttttgtaacaagcaaacacttgagcgtggtttagaaagagttgagtaggagcagtgcggtgcatgagaggaaccttaacccagtctgtcagcaagtttgggccctcgaaggctttgaagtcggaagaaaagaaaaatcgtggcagtactccttcacgttcttctgaaaattgaaggatactggaccttcattggccggatgggcttggagtttataaaaaccatctttaaacttgtccccctttttggggactgacagaagttcataaaagtacaaaatctcagtcggactgggcagagcccagttcctggcaacataaaaaatatacaagcctaataacaggcggtaagcttgcggaataagctggtagggtgaaaggctgacaaagaccaaaaaatcgataaagtaatcttgaagcggaagcatggccctagacatcaaatgggtctggctccacgtcccgaagccgttgtaattataatttggcatctcgtcatccctagggagacggtgatagacccccgagctggagggtttgttcctagagatagtgatgatcttttccaactggtgggctcaagttattgtcgaatggagctcatcggcttcctagccattggagcaacaggcaaactttttgtagaccaccgggcccttcatgacttcatctaaggtggccaacttttttggccccttcttcgaagattttgctccagtagtatcagggtttaacatggtatggatatggtgaaggttgataatttcttggtcaaatccaaagaaaccgtacgtgtgaaggtcacagagaacttcactcatctgaaacagaaaatctagcagttatgtaacgccctaatgctaaggcacgctac

SEQ ID NO: 313172 - DNA, 2054 bp, Cannabis indica
tcacgattgctatagcaattgtgatcggaatacttctcggctgcgtgttcgctgtgctctccctatggataatcgtttccgattcgattatcaaaatcgtcgaatcgatcgccactcggatcttcagaaaagtttgccatcatgcgagtcatcggacaagattgatgccctgaaattagagagtcaatcactttcgaatacgaacttagagttgcagaaacaggtcagagatctgagtgggaagatacgactagctgaacaattaaaggatcatgctgagaaacaggttttggtgcttggtaataagcctcataaagctgggccaatgggtactgtcaaagccttgaggaccaatccaaatgtcagtcctgatgaatctgtaaatccaagattggctaatattttaaagaaattcgcagttcaaaatgagattatagttgcacttgcaaattcaaatgttaaaagcatgttggaaatctggtttaatagcatcaaaaaggttggtatcacaaattatttggttgtagcccttgatgacgagattgtagatttctgcaaatccaacgaagttcctttctaccaaagagatccagaagacgctattgattcgattgcaaaaacaggaggaaaccacgccgtatcaggaacaaaatttcgcatcttgagagagttcttacaattgggttacagtgttcttctatcagatgtggatatagtttatttacagaatccatttgattatcttcatcgcgattcagatatcgaatctatgacggatggtcacgacaacatgacagcttatgggtacgacgatgtatttgatgaaccatcaatgggttgggcgcgttatgcgcatacaatgagaatatgggttttcaattctgggttcttttacatacgtccaacacttgcttcgattgagcttttggatcgtgtggctggaaggctttcacgagaacccaattcatgggatcaagctgttttaatgaagagttgttttacccttcgtatcctgggtatgaaggtcttcatgctgctaaaagaaccttggatttttatcttttcatgaacagtaaagtcctgttcaagacggttaggaatgattctaagttgaggaagttgaaaccagtaattgttcatgtaaattaccatccggataaacttccaagaatgaaagctgttgttcagttctatgttaatggagaacaagatgcactagatcctttcccagagggttctgactgatcatcttctttgttttgtttctgactttttatatgctttgataggcttacaaattcacgtgctacgacaaaacttgggtcaattttattgcaggtttgttcatggggcccttccaattacttttattagttttttaaagaagacttgcattgagatctgagtgggggcactgccatcagccaccactgttttttgtttttttcttttgattattataaaataaataaataaaaaatatatatttcgtgtaagttgagaaatacgaaataggaagtataggccaaacttgaattttgacttgtcaaatgcgaatatggtttttgaatattacaactctgcactccttttttatttataggttgatatattaattttcgtacatatctgcattttataccagatgaatcactttaactaagttagcactagttttgtactttaaaagtggcgcttcttcgagagtaacagatatttgtgtgtcctattggttaggccatattatccttgattccttgcgtgagagggtctcgatgagcaaccatcttagaaatagtgtacaaacttcaattaattattccgtagtctttgggattactattaagtcgaaggaagagataggacctctaccacctgatttccttttagttataataactattattagctaatagatatagggtgattctataatgcaccacttcaaagagatgtactgatacacccttgatttgtttcggcatctagaaaaaaaatttagtctaatttttttcatattcatgtacgttattaagataacctacaaaattttg

SEQ ID NO: 313173 - DNA, 570 bp, Cannabis indica
agggaaaatattgtggttaattgcaataagttttcccaacaatcagaaggttgtatcccttagtaaggctcacaaaatagctcattatgtactgcccatcaccagtagaggttgatgtgaagactgccaaagtagtggtcagtggtgtggaggaagtagtattattacattccaaggtggaggagctgccgcagtctccagtgacacaagaggatagtaagtttgatgatccttgtaatgaataggtgcatagtgttcgaccccacaccctacctgaccaccctggtggcacggccaccgttttggactcccccggccttagagggaacaagcctgatttggtgttaagtagctgtggcgaattagaaccgggttttgtgagtattgctggccatgtattgtagctacatgagtttttgattcttaatattgaattctttgttgacgttattgtactgctacttgatgtacctatatatactagcaaaaagttacgtgcgaggcacgtatactaaattttatgttagtttttttctacgttattaaaaagtgatacaattaaaaataaaa

SEQ ID NO: 313174 - DNA, 1423 bp, Cannabis indica
ataccactagtaccttttagcatttctcataatataataatataagtagttagattaattaatatttatatattgtttctcgtgcatatattactagagctcaaattcattgacatttatttattatacttatatatatgaacagttgggcatacatatatataattgtgtaagattagtccgtgaaattttgatattattattttattaatttagtttttgtcacacttcttgtatatatatgagtacgtaattataattgttgtcgtaatatataataatacactaaaggtaataatggaacaaactaattataattaaatatttgcttaacctgataaaacaacaagatcatgcacagtaagacctttggaggcaaaattttgcttgagttggtgaagttgaagaaaggtgctggaatattttgtaatgcttcactcatttgtgatactttcccatctcttctaccagtaagtacttcccacatagatttcttaaactgaataattaatatgtaacaaaatcaattaccaaatacaaattattattattaatttcatcatataaaattatattatgtattttcttactgagtacgaaacagagtctcttgctgccaaagctaaaatatcagcgcatgaaacgactcctggacatttcttctcaacttcttctttaatatcatcaattacatcgaaacccaacaaagtttggtttggaattgcatctttttcagcattattgtttgttgagttcaaaagaactgatccatcacatccctaaaataccaacatttaattaaattaaacatttttctaaggtaataaaaaattaacacataagtggtaaataataaaatggcttactctaacaaagcaatcatgaaaatgcattcttagtaatcttgcaggtacagctggattactggccacatgtttctctgtggtctgttttataatagtctcagcatccttacaagttttcttgtagaaatttttactgagattaccacattgagaaccctccaagaagctaattagaacaacaaatagtaatataagagagttgagtttcatcattattaatttagaaatctttgaactgtttgttagtatgaatatgaatgtgtattggcacatccttaaataggctaagtatagatgaaggttgttcatttaataatgttctctgcaaatataatattgatcaaaattatgtaaaataattcatgtacgtccacgactattgccacctaaattgatatgacaatttatatatatgcttatctcatgctgtaattgctctcaacaaacaattaaaaatgtgttcattaattaattgacaaaacatatatatatgtgtagatcataggaggaagtttcttaaatttgaaagtgaagcaatgagaaatgctaaaaggcac

SEQ ID NO: 313175 - DNA, 2935 bp, Cannabis indica
ccaacataaacccacataattcacatattttttcaattactaagtccactaaaggacaaaacaacaatggggcaaaatgaccaatttgcccctccatactaaaataacataatgggcactaaaggggtattttgggaaattctaaattcccgaccaatcccgacattcccaatgtctaaataaccgtcccctaatactaacatactaagttgtgattttactgagccaaacaccgagtttcatgttaccgggcaccggaaatgcaaaattatgaaattcactatatgacataaaatgcatttcagaaatcaatactaacagcataaataattatttaaatatctataaataattttcataattaaacataattaactgctaatttccaaattaaactaagcggtctttacaatgacggttgaatgacactacacacgtgacatctgccttttttagtgaatacttacgtttctttttggggggaaacccaaaaattctaatttaaactattttcagcctttttaatcacctatataagggataaaaattggctttaaattcttttagccatttttattcttgcatataaccagagcaaaatctttctttttctctcaaaaccttcgaggaaccctttgctagaaatcatttactgaagctgtccgagcaaactcaagagtctacaaacaatgagtaggttacattttcttctctcttatgtaatttcctttaaaatcatgcattatttttttcgaaatttttgctgtaaattatgggtccttgagtttgttcttgactgactgagatttagaggacactaaggctttttaacttcttactagtatacgcgttgatcttttaagtttctaatttctcgctattttggcttaaaattatctaaaattacccattcataggcttctaaatatcaacattcttttaaacttttgggtttagggattttattattggaatgaaattccttctttttttaatcgaccttatcagcatatcaaatatgttttgccttctatacctgttgtaacaccctagtaggttaggcgtattatcatgatttaaagttaattgtgtaattcattgctaatcaagggtttgttggataacgtgtttaattaaaaatttacttaattaacttttaattaaaataataaactttacataaattgggatcccgtgtttaaaaagttacaaccatattataaattattaactacaaaagttgtcacctagcgactaatcaaaatacagcctgttgtcttgaaaatcgaatactccaggtctaatcgcctcgatatgtacaatcttcatttgctcgcactcacttcactgctgcccagacttagctttgccattacctacacatgcaaacgataattgtaagtcgacagactcagtaagaaaagtatatttataacataacataaaccagattataactaggggctcatacacccaatcataaccctatctcgcttcccacgcgtactgagtctagaacgttcatacgttaatactattgactagaatattagcctatactcggtactctagtcataccgatgtgatagcgtcaatcagtatttaagccaaacatacaatcatcgatattcaatacagctctatgtatattgatgtcgttattttaatatgttatctaagaggcattcataaatatacacgttaaacatgtaatcacatatgcatatcattatactaatcttaccttgattctgaattcacgtgtgtcggtcaacctgagtggaactgctgctagatggtttacaagcacttaggtcacaacatacgcaaaactaataagtgataagctaaatcacttttcggggacttagactcaaaactaaaagttttcctatcgataactagcatgactaaaacgctaaaaaaaatgaggtttcaggaaaaactacccaaaaaaacggcagacccccactataaaaacgacatgttgtttttctagatttttttgcctaaaaaaacacgaggccattttcctagaaacggcatgtcgattctacagcaaaacaagccctaaaacgtaaaactcaactaatttgaatccaaactttacccaaagctccagtacacctaataagaccataacaaatatattccaactaaaactttcatcatcaagctacaaaaataaaaatcaccatcaaagaatcaagtttgagctttaaaagctcaaacaaacttggttcaaacctgctacaacccataaaataattcaaacaacctcaatagaacataaacaactcaattctaatcaacccaagacccaatagaagctagaagtcaaatttgcatgttgaaatcgaactttttcttgaaaaataaaagagaaatgagcaaaaacttaccttgagctgattctaccctaagctacaataaattctgttgaaatccctcactcttgatcagaaaaaagttgagaaattacttggtttctcttggtgctcttgtggccgaaccatagagagagagaaaggacaagggttgtttgatttttcttaatttttgtttttattttctaagtgttatcaagataactcttttattcaacttattattattgataaacttaaattaatcaatttccactcacaaaaattaataacaaaacctaaggtaaaatgacctttttacccctttcttcaccaagaagtaacttaagactttaggggcattttagtcaaaactataacccagaataatcctgacattcccaatatctaactatattatcctgctaaaaccaagatactaagctattagagaatgtgttaaagaaaataaagtggtcattcaacacattagcattgaattgatgattgccgatcctatgacaaaaggcttgccacctcataaattcaaggatcatgtagagaacatg

SEQ ID NO: 313176 - DNA, 747 bp, Cannabis indica
agtatatttgattttgaccattaaataaactctgatatatttgacttaaatcactagatgagtatgtgattcaatgttattcaaaattacatttttgagttaaatcattagattattcatctttgaaaactaaagaataaattggattgtcctcctccaaattagactattgtagaattttactcaaagttttttattacaaaaaaattctcttaactataaaaaatcatccaaatatcttttctagttacattatgtttatttagagtacattaacatcacactagtgtacatcaataaattgcttccaaaaatgagcagaatatcactaaagaggatagatatttataactatttttatagaattaattagaatttttcttcttaaacttaaacatatactaaatcaaattcctttgaattttccaagctgtttaaaattctcctaaactattgagattgttagatttaaggatttttatctaattttattcaatttaccaatgttgattgtccatgtaataaatcgtgcccccgaacgttgatatctactaaatcatatatctcaaattttgacatgtaccaaactatgcactctgaacttttattcacattagattttcgttagtaaaataagacaaaaatctttaaatctaacaatctcaataattcgaaaagaattttttaacagtctcaaaagttcagagaaaataattttagtacatgtcaaaatttagagacaaaaat

SEQ ID NO: 313177 - DNA, 1750 bp, Cannabis indica
cccactagaaattttatgtttttactttgtaaaggcatgacctgcaaggaagcgaggtgaaggtggtttctattacctttgaacatacaccaacgatcacaagattatcgtgagacttcccaataaaaaggagatcaaagatgacttcttttggacctcgggtctctttcccatcaacaccaccaaatttcaaatcatacgtaagtattgccttttctcaaaagcttagttttgagttttaattcaataaatgtaggttttattttactactttttttattttctgtgttgatagtgatcactaggaggcccgtccccactctcgagatcaaaaaaaggcataagatccttcttggcctttcttttaggttgcaagcagctaatttcttattgcacgagaacaatctaaaggcttgtgctctcctgagtagagaccaatctactaatgacttcaaagttctaaagttttcagattggtgacaagttcctattcctacttatgaggaagatagagattatgtgtctcgcacccactatttgaagaacacgacccctcaggaagctaaagatgatgcctcatgaggtaataattctgtagtttgtggatggtccctgaccgttcttagagccgagcgaacaactgtagttaaatttagagatagtcgatacaacttttacatttggaactgtgtagatcttatcactcataggtttgatagttgataccccgagcatcatgtccaattgagttgtaatagttcttacttcaggattgccaatcagtatggtactaactttgatagcgctggtcatccaaattgggatatgtcttcccttaacccctttgacctattcatgattaccgattctacgaagtttagtaactactatagtttttcatcctcctctgatgacaatggtaattttcttaagtgggagattatctcaccacattttttctatttatattgcataagtattgatctttatccttttgtcttgtagatatggactttgaatatctcttatccagccctttgggttccaaaaaagggaagaagtaagctgttgcgttaaagactgtttttgggtcgaacccagaatcgttgaagacattgaaaaaaatcgacgactaacaaaaagcgtgtcttgacccagattgtaagtgagctagagatgcccccaacgacctcttcggtacctgctgctgtgaatactaatgaataggcttaagggactgttcatcaagttagattctcgggatcacaacccgggatggtgttcttggagccttcttgccctctgccaaattttgcaagcattaagggttcgcaagtttgccacagtatgccaccacctgctagcatctttacaaatatcttcaacaagatgattgggaccttattaatgatggtgattttcaaagtttatctgcgaggagcgccgatcttactctctctgttagtatgcaccttcttcttttacttttaatttatacctctctttttagttattctttcctgacttcgttcttttgcatgcatcttttttatctcacgtggctcaacaaagggtcctttagagaatcaaccagttggagactgagctttgcaagtctaatgaacaacgtgaagttgttgcgaggcaataaaataattcttaaattgagatttctcgattgaagaaggacgtgttggaactattttaccaggatctagatttactaacaagtatgttattaacatcctaa

SEQ ID NO: 313178 - DNA, 784 bp, Cannabis indica
agatcctggtaaaataaattccaacacgagtttagggtccaaatctgggttggggtctgagtccgggttgagttcaaatttgggtctaaggcttcataatctcaagactaataccctttgaatttactgcagcattattcatagtacataatgtctctcatgttgcgaggctgaagaagtatgtgtcagatttgactcaatcttgagattatgaagctttagaactagaataacttttcctacgagaaacaacccattcaaattttaatagaaaggataatgtcctttcactacaaaaaaaatcacctttaatgataacattttagtcacaacataatttttttataactaaatgtgatttttagtcataacaaaatattatttgtgactaaaacatagtatttaaatacaagttatcactaatttagttgtagtcctcacaagtgttgtaaccaaaaatacatttggtcataaaaaatttagatttttgtgacaaatactttaagctacagaccttttaatcataacgtaagaataataatttataattagtcacaactttttatttttagtcacaaattttgttgtatctaaaagtaaatttttttgtagtgtttggaataagttcataacgttggtcaaagtattctggggaaacagtaaggtggaggaaattacttgaaagttagagtttgacttgatgattcagtgtctagagttgttcagattagattttgaggacgaaatttttttaatagggagataattttaatgacggcatact

SEQ ID NO: 313179 - DNA, 617 bp, Cannabis indica
acctcacttgcgtgagctactacttgactgcgtatacttgcgtagtgtttataattttcgtaacacatatgctatattttgtattaaatttaataaatttttaaatatttatcaaatttaaaccacataatacattactatagttcaatcttataaaaaaaatgcatataggcaacattagcattctattggtgatattagcattttatggtaaaaacttttaaatcaaaaaatatttaatatttaattacttaattaaactaataacaatatggtaatgctattaacttttaagtaggttaatttgttaatatttttctttccatgtacaaactatacaccatcatttatagtagaattactttatatattacttttttaattttctttttaaatttatgatttggattgctctgataatttttatgtaggttgttatataaaaaaacagtctgtcatttttactgaaatgacttgtcattttttaggcagtttgtttaaatttttgattggttactttttaatatttatgaaaaaaaaatatatttttttttcacataactagcaataaaataaaataaataatagttattttatgtcttcaacaacaaattaaa

SEQ ID NO: 313180 - DNA, 1548 bp, Cannabis indica
atgtatctgatccgacacatgtgattaagtatgagaaatttaacgtgtagcaggacatgagctttatggcacaccctgtgcgtgtgatggaaaagggactaaaggtcttacgaaataagactatactcttagtcaaaatcctgtagagtgatagttctaatagagaagcgacatgggagttggagtcagacatgtagaaaatagtatcccgagttattctctggtaagtaaatttcgaggacaaaatcttcttagggtagattgtaataacccaaaatataggttattactcttagatatctcgatgtggaatagtaatttttttataaaatttcgattatttgctagtggtaatagaaagtagtatatttccctattttatatataaaaagtgatatttatttaaattattggcctttataactttgtctaaagatgttaggatcatgttctcatgttacaataaaattggtagctcaaaatcctagaacgtgtaacaagaaaagtttaattattgactttttttttctatgcatgcaatgtgtagtaattttgaagaaatagagataactagtggactacgtgacagtcatggttactaatagaccatttcttgtaagttatatgccatttgcatttaaggaataaattatgagaggtaaaagaagtttatgaagcagtgtgcaatctgtgcatgaaaaatcagttagtacattcaaattttaaataaactaaacctagtttaaagaagaggagcacatggagatcatggagagtaaacatctcaaccaacaacaactaaagacgatagtctaagaatagcctctcactatgaactagttgaccgaatcatatggtgaagttataaattttagttattcatttgaattattcaaaagttaacaataaccacgtcatatggttagtaggagtttagttagtgttagactatataaatacaagtcatgactctcacatttattcactcactcaaaaaccagaattagatgtcattctctttccactcaagcattcttctactgacctctctaatttccttatttccaaattctctttgtttcattaagggccaacacccatattcaccatcaaggtcttacatatatatatataaatatatatatatatatatatattctctttcccttaacgccatcctattgtcatctcctccaagcttacttgttatttcaagggccaagagtattatctctcatacatttatatatatagatatctttcatcttatcaatgtcaccaccaccattttcacattcaaattttagtgctctgccagattttcttttgaagctaaggtatcattttataattttgagtgtgtagattcaaggttaaaatttcatatattacatatttatcattatgacaaatcctaattaataagtatgcaatttaggtttctcataagtaattattgtttctcaaggatcactctcattccaatcaaggctaggactccacattcgaggtaagagaattaagtagaaaaacataaattttctgtat

SEQ ID NO: 313181 - DNA, 1133 bp, Cannabis indica
tcagaaatgatatagggtctaagggttgcatatttttattaaccatttcacaacactagagttatagaaataagaattgacttgatcagtgggagatcgatccaggaacataacttttgaaaaagatcattcattaataccataaacgagcatttcatcagaaatgatatagggtctaagagttgcatatttttattaaacatttcacaatactagaaataagaattgacttgatcagtgggagatcaatccagaaacataacttttgaaacagatcattcattatttttaaacttccacgtgtcatcaagtattagattaattatgattcacaacaacccttaagtttaatggttattgtgaatccataactaatcattaataatacacaagtcattgataaaattataataagtcatgttatttagtatttgcttacaatttctaaacgtacaacacatatgttgtaccatttgctctttaaagagtttgttggtccatccttaagatgactcattaaaacaataaaattaatattttctagtgattacattatgtacaataaaagttcaactacgatattaatttaagacacaaattaaaagtgtggaatgcaaagaattaaatttgtggtacaatatgccacgaatgaagaaataaatatcctaaagagcaatgaagtctatctttagtaaagttccctaatagggtggagaacattattaagcataaatttttcaccaacaaatactcattagacgacatggaaaaacataaagatataaaataagattcattgctaagaaatttattttgaattaagaatcaataacaaaggagatttacattctcacttgtctatataaaagattctattaaagtaacattgacttttgttgctcgtttcaattcttcatcaattctaaaactgtaaaatagaggagaaggtacacagacaatcataaatattttcctctgatggtggtgaacatatacaagcttaaagagtctacttttagattaaaacaaatttatcacaattggtattgcatcttgtcactttttctttatttttgaaaagagttgtggattaatttaatataccaaaaggtcagtgggagtaatatttattt

SEQ ID NO: 313182 - DNA, 366 bp, Cannabis indica
ataccaaaattatagatgttcctatcaattgggagaaattaacaccctactataattgcctcataaatatacataagaattttgaagattactccataatagtcacatttccaaaaaaaaattgtctataaaatttgaagttcattttgtttggcaggaattggtagattgggattacaagagcaagattgatggaaaaatgcatgcatgtggtcatgatactcatgtagctatgctacttggagcagcaaagttactccaagcaagaaaacattcccttaaggtaaatataaaaactatagtgccgtttgataacattttttttaatcagttttctgtttttaaaattgaaaaagtgaaaatatt

SEQ ID NO: 313183 - DNA, 784 bp, Cannabis indica
aagtgttttgttgatgaccttatgattagttaagctcttgcctctccttttttgatatcaagaattctagcattcttgtcgattcttgcaaattaagccatgagtaaggccttgatctcggcaacagagtatgtatctttctggaggcagcagatgtgacaaacacatcatatttaggaggaaggccattgaaaatggatttgatgtgatcttaagctgtctgtttgtgaccaatagtggcaaggaggtccacaatacatttgatcttcaacaaattgtcatttaaagatcctagcatcttggtatttctcagttgagacttgtatagcttgacattagcaacattaaaagtagtataatactcatgaatagctttccaaatttgatatgtggtgtcataatcaatcatccgatcggtagttttctcgaaaatggaagaaagaagccaagaaactaaaagattatcttgttgtttctaatcctcaaaggtgggattgtgatcattatttcgttcacctgctggtgtgagaaatttaggaggaatatgagtagaatcaataaatttatgaaggagactacctttaattgaaactaaaacttgatggcgctaggggaggaaattgtgttcatcaagcttgatcgacaaagaatgtgtaaaagaaattggatgactttggtaaggggacctactagtttaggagttgagcggtgttcaatcttgttcctactccattgaacaattcaacatactccatttgtaacaccctaactaacttaggcgtat

SEQ ID NO: 313184 - DNA, 2709 bp, Cannabis indica
aagagttcttcgaatagtccaaggattctggtcacagaatatcaaaatcataatccatacgttaacatacagtttaaatttattgttggaaaatcgatattcacaacttgtgaaaattatactgtattatcaaatgtaaactggaaaatcaaatttaaaatttctgtttggaatctaaaatttaaagtcaaggagttaaatttaaactaaatatttctcgagtagttattttttcttggatcaccactactaatctaactctaagtttaagttgcctttagtaagcatatacaagtagaagattctctaagatcaaggatttatatcatttcgtgatagaatatctagaatatagtcatctaccatattcaatttcataggagaaaatagaatgacatataagcatatgattctatccaatgatattctttctacacaatttcttaaggaaaaaagctaagaagaaaaataaagaataatttcaattaaaataagaacctaacgatatcccggtaggcgagagtcaaaattattcttattttatcaacttcttcattgtttcatattgtaaacacaagtcgaagttgtgagtcaactagatgttgcatttacaaatatttatctatcgagatctaacactactttgttgtctaacggatgacaatcctttgggatttgtctcgttataacaacaaattatgttagaccaacaatgaagattcaaaaattttactacaataattaataacccagaactaacctgaagaatctgaagtttgtttggacggatcggtgtgagaaaattttctagagttaaagcaacgcttgattaccgctctagtatatattaactcttccttctcatcaggaaaagtttgtcatttattgtgatacctcgagacaaggtctaggctatgtacttatgtaaactggaaaagtaatagcttatgctttttggcagttaaaagagtatgagcagaggtactgtactcacgatctagtgctcacagcagtagtttttgtgctaaagatttggtggcattacttatatggtgagaaatgtgacatttacattattaacgcagatttttgttaaacaataataaaactttttcgtaataaatttaacacagaaattataaaaaattaacaaagtataaaaagtataataataacacaagatatttttacgtagttttgtagttaaatctgcatacttcacgattctatcttattccagatatttctgagtatttaatacatacaattaattatgtttctgtacttttctctaagatttttcgttccttttttttgtgggatctgcccctatttataggaatataagtttgcagttatttacatatatgtttaaaatacatagccattttaatgaaacatggttaatacatgataactgctcaaccgcttgtcatccttatcctcaaaagatgaataatgctgatttggacaatagcatctcgcctaacttgtagatggttaataccaatttggactagcatatgccttccagcaatgacatgagcacctaatgtacattcaactgttatgcttagtttctataatgtacattatacgctaagtgttccaacagttaacatgtctcgcttacttttcttcatacgtagcgaggttggtgcctcactttgtattaatgatgtagtcattgtgatctgtaagatttcaagagtgatcttgaaatttgagagatcttgaaccagaaaaacaaagagaaaacagagatgaacaaaatgatgagaagcttaatttctttattgatagaagagatatttatacagagcctttaacagagaaaacaatcctaactaactaacagacaattcagttagagctattaactaactacagcttgtacatcttttaactaacagtactaacatcccccctcaaaatgggacaccattttcagtttggctttgaggtacaaaaatctgtctgtagttagggatttagttaataaatcagcagcttgatctattgcaggcacatatcgaacatagagttgcttgtcaaggatttgatcacgtacgaagtgaaggtctattttaatatgtttagaccgtgcatgaaacataggattagcagccaaggctgtggcactctagttatcaacccaaattacaggaggttgagatagctgaatttgaagttcagcaagtaaggagcgaatccacttcaactcagcagtagcattagctaatgctcgaaactcgctttcagtgctagaacgagccacaacttgctgtttcttggcataccagctaatcaagttgtcccctaaaaaaaccagatatccacctatggaacgacgatcatctatgcaagatgcccagtcggcattagagtaagcacagagactaaaaccagagtcaggccgaagatgaatgccctctcactacaagaaaaggcatttttactggcgcagttcgtcaaatgcgccggtaaaggttgtcgagatagagcaaaatctgaaatcccacttgcatttaggcttcacttttgccggcgcattattgcgccggtgttaaaaggttttaccggcgcaatactgaatatgtgccggtaaaagttaccaaatgaagcgccaccaggcacgagaagtttgccgcctttcatttcacttattgtggtgcttgtttacttttaccggtgcacaattgcgccggt

SEQ ID NO: 313185 - DNA, 1116 bp, Cannabis indica
ctttacaaaattatgttatttttaaaatataaaaaaataataatttaataagataaaatgataaataattatcatttttctaatctcataatttaaatttaaataactaacttttaaaaaattaataaatatctggttaattttttgaattatctagattatcttttatttaaaatatatcatattttaattctaaataaggtcattttacaaaattatttaaataaattaaagaaaaatttacagcataaataatatatcttttcaattttatacacttaaatactatatctttttctttttttttttgcgaaattaatatcaaacattgtattttaggcctctccgttactaatattctgttagttgtaactcagtgtacacgtgtaaggctcagattaaatctccatttttttaaaatgtttagttaaaattaaatacttaccttttttatctaaaatatctaacttaaattttattccataaaaatattttaataaattaaaaaaaattaaaaggaaatattttttttgtgggggaaatacgaaaggcttgaattgaaacccttaatattatccatcttcttcctcctcccttcttcaaccataagaaaaaaaaattacaggcagttgaaagaaacccagaaactaaccccaaattccattcctttcatcttctctcccggtttgttcttcgaaccaaagaaaaaaatgtaattgtagcgaaaaaaacccaaaaatcaaccccaaatctcatcgtttttcactcatagacgagctagacggaggaaccaaaagcgtcaacaaaccagacccaccgaatacgaagacaaacccgattggtaatgggagatgcttcctcttcatctcgtgtaagtcgtcgaagccatttgcaaagatttagccctcgtagatactctgagatcatgaaaaatatttcagaagctaggaatcctaatgtttgtgactgtggggaactatgggttcagaggacgtcatggacagacactaatcctagaagaaggttcgttggttgcaagaagatgaaggtaatgcctttttattcttgaattgttttgtgatttaatttggatattcaaattattgtgtgacaatt

SEQ ID NO: 313186 - DNA, 1307 bp, Cannabis indica
cactcctctaaaaattttaacttttttctttcttgaagtgtttcatgtagatatttttttttttcttgtccacaatcaaacaaaatattttgtcctcttttactttcttaacagctttttgtaaacatgtcttcatctgaatcacatgttggcttagatatttcaagaaatgagaagcactaaagtgtggtagggtaagaaaatgatggtgggtggaaggtgtctttagttaaacaaagaccattcagagaaaaagttattgtccattgaagataatatgtaccttgctttttttttttttccacacatttaataagaaaataatagctatagtttcttggaaacaatcaaaaagacttttcaaaattgatgagcttttatttgttctctgtttcctctgttttttgtcatagtaagcttttaattttttcaagaagagaaatccatggaggctgcagctattggtggagctcttctctctagttttcttgatgttttgtttgataggatggcttctaaggaagttgttaacttctttagaggaaagaaattagttagtaaactaatcaagaagttgaagactagcttgttgtctgctgctgtgttgctaaatgatgcagaggagaaacaactcaccgattcgaatgtgaagaagtggcttgatgagcttaaacagcttctttatgatgctgatcatgttatggacaagatcaattctgaagctttgagagttcagttggagaaaggcgaaactggatcgagcaaagcgagtaagttgttgagcattttcccaaatgtgtttagacaatttgagaataatgtaaggtttgagttggaggaaattcttggttctttgaataatctaatacaacaaactgagtttcttggtttgaaagaagttgatcaaaaaagaccatcatatagattgtattcccctttggtagaagaaaatagtgtttttggaaggaatgaagaaaaagaagctattgttaagttgttgttgtgtgatgatgttggtgacactcgctataggatatctgttattcctatagtgggaatgggtggcgtcggcaaaactactcttgctcaacttgtttacaaggagaggtgtgttcaaaaacatttcgacttgaaagcatgggttactgtctcagaagagtttgatattttcaaaatactaaagacgattttggagtctgtcaccttaaggaaatgcgagattagggatgtacatcaacttcaacatgagttgagtaaggctttgacggggaagaaatttcttttgttcacgatgatgtatggaatga

SEQ ID NO: 313187 - DNA, 2589 bp, Cannabis indica
atccctaaaatcatgggatttaattacatatcgcgtagcgtaaatgctgtttatgatttgaaaatcatatagctgtgattttcccgcttttactggatcaaaataatcatgtattaaacacgtctttaattattggatctggagatgtctcgacagaagcttggttcaattgatgcatgtcttagtacgaccatggttcttaaagagttcttcgaggctcatttgaatgtcatcttttggctcgccaggattgtgagcctcgctgatgataacgagatgaagttatatgaagtcttcccataatgcgacaggcacctcgcttacttggtcttgagcagatccgtcagtagcacttaatttgtacactaaggacttttgcaattgatatatatcgcttttctcctccaatgtataccgtccttgatgcttcgcaactcgcattcagtgacatatagtttctcactaatatgctaagtaccagtttgtatattagctcctcgcctaacaccttacagtctataggttacaaatatactctgatactcatgtaattaacgagtaattccatataaggtgattgcatcgattcatattccccttatcgtgacacgtgtcctccactgagatggcagcaaaatttctggtataacaggtggcagtcaaactggaagagaggaatagatttggacttgtcagtgccaagagaaaagaaggaggcatgatattgtttggagaggagagaatgagaagagggtagaaaactagggttaattatataaggttatagttgtaattttatcattaaatttttaatcaaatggccattttcctaaatgcttataaaagggacattaactaacttaatttctaactttagggctattttacatttcaacccacctgtgttatctcaacaagtgaggggaccatgagcttatataaccaagctttcaataaggaaatctagaatttacaaagtaaatttgttaatttattaattccgccatgcgccactatagatttggaattgaatagcactctcacttatgtagaacactctatatgtaccaagatatagatacgttatgattatgcattgttataatcctaatagtcaaagatcctctatagatgatctacactgaataagaatgaatttaccgttctacccttcaatgtattttattcttaaaacacttagccacctataaatgatacttcagtaaactaatataatagctcaaattcaatccaatccggataatagttcaaaataaaataaaacaaatcattgttatttgatgtcttcaaaaataaattaaaataaataaaataataaataacaaattgaaaggggtaaaatgtacgtataaagaagtgtttaattttattttaaattgtatatataaaaacaattatatacaagaattaaatatacatgtgatctattaagttttggaatataattgtattacatgtattagacttttaaattactattttatttgttaaaatgcattaaaatgttatttgtatatttttaatttttttataaatatttgtgaattggattggatcagttatttttacatgtcaatcaatatccaatttgcataagtgtggattttgaattttccaatctaatccaatctgtacaagtttagatatccgcactttgcgaattggattggattggatcgtgcagatgaaattgaatccactattttataaatacccctattagaggacactaatttcaccattgttgtgttgttttggagtgtattttgaagagtttctctaatagtttccattatatggttcgttttacattcatctcttaatttcattaaatttattggtaatacataattgtgtgtgagtaaataggattagaaaaaggaaatttgaagcttcactaaaaagcttctacattcaggctagcgggtgagtactacacctctgcagtactatggccaacaatatccaacaaaatcccataatatcagcggacatttttcaacaaaaaatttcttttaattccaactagggccttcgaactattagtaacaagtgggctcatcactaacactacaggaaaattataacaaatgaacttaaatttcactgattaaggttaatgtctatttttttcaaaaatagttaaatgtccttttataaatttaatacttaaaatgtccttgattatgaagctcacctccattttttttcaattttttttcctatttgcttcaacgattcctccaaaatacaaaatacagcgattcccaaacaacaacaaaaattattctctcattcattttttgccaactaatttcttcaatcatttctcccaagcaatgaaactctcctctatttgtttggattcattttacattgccttgccggatttattcacctgattcttcaaccaaatcctcccacagtcagacattcctccaaaaaaaaatttcaacaactgattctcccaaatgaaagcggtagtaatttacgaacgctataccgtaaaccaatatagaagcaatatatctcaaggaaagcgcggtgaaaaaaaattaatataccacc

SEQ ID NO: 313188 - DNA, 2743 bp, Cannabis indica
agggcataaaacccaacaggcttggtctcttttttcttctacttcgtcaagggactccaccagcaaggtgatatttacctcttggtcataggttatcctcttgtgagacagtggcactagctctacgagcaacatcgcttcatagccataagctaaagcaaatggagtttgctcggtggtggtcttctcaatgatcctgtgcgactaaaggacgtctgggagcaattctagacaatggcctttgcctcttcaaggaactttttcaaagtgtccttgagggcctcgttcatagcttctacctgcacgttcgtttgaggatgggccatggcagagaagcttttaatgatactgccagttgcaaaaatcagtgaacatgtcactgtcaaactgctttccgttgtctgacacaatcttatgtggtagtccaaaccaacatatgatgtttttaacaacaaagttgaggactttcttggaagttattatcgtcaggggttcagcttctaccaacttggtaaagtagtctacagtaactacggcataccgcacccatccttttcccttttagagttgactaatcaagtctattccccatatggcaaagggccaaggagactacatcattgtgagctcgttaggtggagctctcgggatctttgagaatctttggcacttgtcacattttttaacatagtaaattgaatacttaatcatggttggccaaagtatctctgtcggagtatctttttagacaggttttgccctcaacatgatttccatagaagccttcatgcacttctatcagcaaatgctcagcttctgtcatagtgacacaccttagcagtggcattgagaagccccgtttgtacattacttcgtctaggattagaaacctagcagcttttcttctcatcttttttgcctctttttgttttcgggcaagactccagtttggaggtaagctacaataggtgtcatctaggttagactactgtccaacatgtcgacttcttcagggatggtaatgctacgttctttcaagaactgtattggctccaagtttgccttgtcagcaatggttctacttgccagacgggcaacaacatctactggggatctaccttattgtatagcctttgagctgacttagcaagtcttggatcctactcaaataggctatcgttctttcatcttgagttgtgtattcacctaggacttgattcacaactagatgagagtaattgtatattctagttggtcagcccgtacttcatgcgctagcttaaggccaacgattaaggcttcatattcaacctcattgttagaggctttgaagccaaatttaattgccccgtgtagctattgcccccaggtctaatgagggcagtgcatgccgtggacagttggtcagtgcagctagggctaagcatcggtcagtttggtcggtttttctctatatagaaatctaaaattcaatttttggtctggattggtgcaatccgaaaaccaacctaccaatccagaacctatcttaaaaccgaccattttgaacctcggtttggtcagtttaaaccgcccaaactgaacttttaaaaaaaaaaatgaaccaatttattctataaatgcattattttacattttacattttacaactacaaacatataaattaattgttcaaaactaattatcgtattcttttaactttaatattaagaaaaaaaataatatatttattttatataaatattattaactataatacatgcaaaaaaaaacttaataaattaatatatatagcggtcggtttcggttttttcggtcggtttattaccaaaaaaaccgaccgttcaatggcagttttaggtcgttttaaccgttagcgtttttttagtttttgattttgtcagtttcgattccaacggtgttcaataggtcgatttaaatggttttttcttggattttaaacaacctctctacgtctagccaattcgaaatcttctcccaaatccacgtgaggctcgccaattcctggtcctatttcccaagtataataccgagggccagagttagttgtggtgcccgggggttgctccatgttggccaaaccctcagtacaaggtgccaatggagggtttaccctgggcggtagaggctggtcattgggaccaaccgagttggcaatgtcgacctgaccagttgtattggtcaagtttgttgtgcctgtcgggttggcaaggttggccaaatccgtcagattcacggagattccagtggtggctagaacacgaacatcgagattagtagtcatggggtcttgaggaagatctgatgaggcaatacttgtagccgaagttctccttgttacagccatggtgatatatcagatcaatcaacaacactcacaatgaaagtaccaaattgttgacctaagatttggccaaccgataaaagattcgtatttatgactaatatcaccacgtttacacaataagaacaagtaaataaagagacacaatatttttatagaggttaaacccctttagttagcgggtaatgacctactcctcttttagttgtattgataccagaaataataccactcagatcacaagtactgtggattctgaagtggctctcttaagattacaataatgagaatcagtaggcaaatctcaagtaagagagatgagagagacttcgtttcttctacaatgcttggggcatgtagaagagagagagagagag

SEQ ID NO: 313189 - DNA, 1742 bp, Cannabis indica
gggcataaaacccaacacttccctccaaaatacacgcacaaaacctcacttttgactcccttcttccaaacacccaaattcccatacatgcagacccgactccccccacatgcacatacggctcgcatgcgagccccccactcgctcacaccacactttccctcacttgcattcccttccccacatacactcacgactcgcatacgagccccccactcccacaaaccacactccccctcacttgcactccctcccccatatgcactcacggctcgcgtgcgaggccccccactcgcacacaccacactcccttgcccacacgcactcacggctcacgtgcgagccccccatgggctcccatgagagccccccactcgtacacaccacactccccctcacttgaactccctcccctacattcactcacggctcgcgtgcgagcccccctgggctcgcatgtgagcccctaccccctcgcaccttgccaggctcacctttcaccactcacccacggctcgcatgcgcgccccctgtgaattcacatgcgagcccccatacactcactccgacattcaccacacatgacgcctatccacacatgtataacctctccctctttcattcacaagtcgaacggatgctccaccacttgcatgaaggttccatgactcaccaaaattcccctcgactcacccaatggctcatgggcttgcacaaccccccatgggatcgcacaatagctagagagccgctcaacagcctgccggcttgcatgtgagccgtcaactcgcataccaaactgttacaatttgccagtcttagtattttggctataactttctcgatatacattagaatcaaacgattcaagatgcattggaaatataagaaatagatccaattctgaacctattactacgaaaatcctccaacaattgtaacctagtatgttgatcttactaacaattgtaacctccaagttgcgcagatataccccaagacttgtaatcatggatttccaagattaacgagccttaggccatatgcattgactcaatcattcttcgaccgactcttgcaatcgatgtctctcgactgctggggctgattgttgactaatctcaaaaatcaattatgtcgattattgaggttaacatagtgtaatttcaaacgacactaggatattatctaagattaaacgaccaggaataaaggcacttagattagcagagataattgtgttcatgaatggcttcattctattaatcataacttttgtaataattttatacaaaacactacacaaagctatgggccgaagatcagtcatacgttcaggatttttttgcttcagaatcaagatgaaattagcatcactatagacatactcaaagaaaccattctcaaagaacttacacacactgccgatgacatcacgccccacaatattccaacacttttgatagaaagcaagtgtcataccatctgggcctagactcttgtcaggatgcatttgaaataacgccttcttaacttcatcatcgataactagctgactcaattcaaaattaaaataactgtgtacaattgaatccacacagtctaagacctcactgttggaagttattttaccaggaacttagatatactcacaagtatgttgatttaacaacttaaatatgaacttctaaaacgatggaaaattaaacacataaaagtatagaaatcttacattgggtgca

SEQ ID NO: 313190 - DNA, 1674 bp, Cannabis indica
aaaaactaaaaaaaatgaatgaagaaaaagaagagaacatcaatggcgattacaaataataagaagattcatacggcttataaaacacactataaaacggtataatatcgtatattataaaagcaaaatctactatatgacagtataaaagtaaaaaaaaactacccaaatacagtataccatgtaaaaccctttttttttcttccttttaacacataacttctctttctcatctttctctctcattttgttaactttaaaaataagttctggtcacgtcattactcggttgaccctaaaaaaatagtattgtgatttactctttaatgtgacatttgaaggagtgggaagcatatgttctttggtaatttcctaataagaaaccatttaattattaatatagtgattaatggctgtttttttttccttaaattttggtttacatttattttagaattttgttaattaaattatattatacaataactaattagttttcaaaataagaaaaatgtatataaaataattgatatataaaacttatagcttattatattacattgctactcattagtttcgaaaaaaattttcaaggttacccaaatatattttaaattataagttaccataatataacttaaaaataattaattaattactaagatgtatacaaataagttttggaggtaattgatatgtaggtcaatctcaaattatatgatataaaaataattttttttatgaaaagttcactaattggttttttatcaacactattagtatccaaaaagttacttttcaaaatgcaagaaaataaaaaaaaataagaaaatgtcagatacatcaaatttagctgacacgtcatgttataatagtaatgttatttttgtaaattagataaaaaaaaggatatgttattgtaaatttttcttaaaaaactatatatatatttaaatttatttaaataaatttaataaagtttatgaattaacacatgacattctttttgagccattaaaagagttgttaagtgggtaccaagtaccaacaagagtagcataaatacactatttgaatatttttgccttatttttaaaatttaggtattttttaagcaacaaaataaataaaataaatattcatgccaaaaatttcatcttcaactttttttttttttgtataattatttcctcttcaactttaaaccccaaaaaatgaggatatgggattttttttttgtaaccatattggatctaatttccaaatccacaaaagagtatgaactttgttgaatgggtcaacaagttctaaatcttgggataaagacacaaatgctttctttttgaatctaaaatggtattttccaaatatttttagggactatgatttatttttctttacaattttttttctttaatttactatttgttacgaaagttccataaaaacaacatatagaccacataatataaatataaaaaacaaatgtgcagaaaatataaaaataggagaattaccatattatcattttttataattttaatccttatttttacgtttaggtttgttccgtatagtttttattatgaattgttatgtggatttggacgttgtggttttagatttactctgtaaataaaaaaaagtaaacttaaaaatgtaaaaataaaaaaa

SEQ ID NO: 313191 - DNA, 1592 bp, Cannabis indica
ttctttttggtttttatcagattttgctgaaaatgcacatagcaatgaaccatttagaaaaaaacacacaaattcacaaaaggttgcagatattcatactgatgaatcaataaaaaaagaaaaagaattacagcaacaaatacaacatcaaacccaatcctcagtagagtttgtttttctgctactattcttactgctgtgttgtgctaattgctactggtttggttgatcgaaacagtcttatcactttgtttggggtatgcaaatcaaaggggcctaaggagcttttctcataatatattcaatataattttctactgttttgctactgttttcttgagcttggattacttggttctcaccacactattatccaaaaccactagaattgaatttggaagagtgataagacatgaaacatcagaattaaaatcctaaacatctaagttgtgtatagacaagacaacaaggttgttaagattcagacaatgacaccctattatagctttcttcttcttcttcttcttcttcttcttctatttgtgcctaaaagtcaaagagacagtttgttacagtaaaaccttcgccatcaaatcaaacaagcctaaattctcagaaaaattccatcccaggtaagccattaattagttgagatttgagaatttagaaacattagttgattcttcttggttcaagcccacagtagctcaacaacaacaattatataagtggttggagttggatttgaaccaatagagtaaagactcttaatttctatattacaaccctaattttcacccaaacttttattcttaaaaaagactaaatcatactttttaagttgaggaacacaaacacaacgagaaaaataaaatcaaattaagaagtagaaaattcaaaaccctaagtgaagaacaaaacctgaatctttatattgaaagtattaaagagcatagtgattatccatgtcgaccattaccctaagccaccgtcacaagctgcttctcttgtcggacactctcctccgccgcgggctccggctccgtcagtttcgatctcagaataaaaatctgtttttttgttccctaaatataattaactggatatcgggtcgggtcataagcccgccgcgaccaattatcgggttttttttttttcctttaattaaatatttttttttgagataaatcttaattaaataaataagtgacaagtaaaggtactttttttttcccattagtgtaaagtgatgagaggtttgaatttatgtaaacttttcttggtttttgtcagcttgttaattctaatgaaaaagacatatatatatttagggtacacaatttttctatttaatgtacttatgtattctgtcatatacgacagtcgtaaatggagtagttatttgatctgagggctggagttgagtctaaaggtaattaggggttaaaaaattgataacgtaccctgagacacattattacgaacctgtcgtacaatggaatatattccgcattttgcacttttgggtaaaaaatcgattgcctatatatttatatatatttttttggttggatttgaagatttctatttag

SEQ ID NO: 313192 - DNA, 1932 bp, Cannabis indica
ctatgaagccaaggaatttgcttgagcgtactccaattgaacacttgaggggattgagcttcatgttgtactctcagaggatcttgaagcattcatttatattttccatgtgccccaagctttttggacttgaccagcatgtgtccacatatacttctatgttttggccaataagatctttgaacatcttatctacaagtctctgataagtggccactatgtttttcagcccgaaaggcatgactttatatcagtacaggcccaagtctgtcatataacttgtaatctcttggtctggtgggtgcattctgatttgattgtaacctgaataggcatccatgaagcttaggtctcataaccagctgtagcatctactagctagtcgatccttagaagtaggaagcagtcttttggacatgccttattcaagttagtaaaatctatgcatactctccacttgttgtttggtttgggcaccaagacaggattggatacccagactggatagaaagcttcaatgataaagttgttgggactcggccttttgacattgtctttcagagcttgtgctcactctttatccaataacctcattttctattatacatgtgagaagtttggatctatattcagggtatgagtcattacagatgggtttattcccaccatgtcttcatgcgaccacacaaaggcgtcgaggttcgcttttaaattttttatctaaagtgattttatttctagcgctacaccatttccaatctttaagtttctagtcagaagggtgaggttgatctccacttcttctaactcctctaccgatctaaacttttctggaagatcccctagtctgcctccccgctttgggctgagcttcattgccctttgcctggctcttggtcaaagctcttagcaagaatattttctttcttggctttgaacaaagccaagttatagtagtgtcaggtagattattgatctccgcttaagcatcccatcccatgccttgttggaaactttaggcatatgtggtaaattgacgctactgccttcaggcgtacaaggctgtctggcctatcattgcattgaaggctgatggcacatcgattacttcaaactaagtcattaatgtccttgttatgggactttctccaactattagaggtagtcggatgtatcccaagggtgcaaggccttggccgaagaaggcatacattagttgtgtatagggtgttatatctgttaattgaaggcccatcttttcataagttgatttgaaaagaatattagaagaggctccattgtcaatcgtgcaccaagccaccgtcatgttccttatttgtgcaattatgaccaggggttattatgagggaacctaacctgggcagcatctccttctctgaaggatatggcatgctctctaagcttaagatgcttggaatctctttcttccacgtcaaggatgtcacttttttgttcatgaaggggggtctgagcataacattccatggttttgcttgttttgcctgatatatgtggtctgccaattatgacccttaggtggcccgccactggtggtggcattgggtctttgttttggacagctagtgtctgatcttggtcattttgcacataacaacgtagatgaagaatttttttcctaatcaggaattcaatctatcttttcaaatgcacacttttttgtatcatggccgaaatcattatggaattggcagaacttagatatgcccctcttactaaagcccttcttgatgggaggaggcttcttgtatagaaaacaactttggtggccatgttaattgtttcatgagtttttgttaagagggtgaagctgttgggttttatgccctaaataaactcatttcatataatctagatttacttattaataaagatcataaataacattttatg

SEQ ID NO: 313193 - DNA, 537 bp, Cannabis indica
aaaaaatattaaatatatatgtaaaaacatcatatatattaattaatttattataaatgttccttacttccaaccatgcttgtccttttgctggctcccaagctgttatgccaccatttttactctgccaattaatgttatatatgatgaattgatcaattaattctttcttatttttggttgagcataatcattgtatatatctaaatgcgttttctaagaagtatggatgacaatttacaatgtcatagagatacaattattcttgtatgcaaagaaatttttacctgcaaagagagtataacattaacagcttcataaatgttttcaagctctatcttttcaccaactatttctggtggcatcactgagaacagcaagcagcactgtgtatatataattgtacaaaattgggtcaattagtgatattccttttgtgtaccattttcattcttaactctatcatttacgaaacaatatggtgatgtttagttggaaggaatgaaaacataggaatagaaatgagaatagaaatag

SEQ ID NO: 313194 - DNA, 626 bp, Cannabis indica
gtttggtttggtttgaaaatttattggtctggtttggtttctaatattcaaacaatcgttatactgttttggttcaaaaaatatgaaaatttgaactaaaccaatccgtgaacattcctagtagctcgatcacttttagctttattgttttaggtaaattagttttgtagaaattataatttatatatacatgtatgtaattataacaaacacttactaatttttttttttaaaaaaaatggaataatttattgagaaaaaaaataaactcaaataagtcaattacacttgtactaatttttattttacatgagtctagtctgtttgacacaacttttagaaaagttaaaagctactttttaaaaaaaattgtgataaaaatgtgtttggtaagaatttaaaatacaactttttgaagaatttttagagaagctacaactaaaagctaaagctgctccaatccaacttttaaaaaaaaattattttgattaaaagattataataaatttatttgtactaaaaccatatttacttatatattatatattaaaaaaaataaaaatatttaaaataaattaattataataaaataaataattcttaaatctcttatttttttttaaaaa

SEQ ID NO: 313195 - DNA, 1137 bp, Cannabis indica
atcaaactgggaatattaaaatacggaatttcataatttataattagtcacaattttttttatttttaatcacaaattttattatgattaatagtaagatttttatttgtagtgtaaaaatattcttataagataatattggagttaattttggaaagagagtatatacgagaaatgatatgtgtacacaaatatatacgtacacatagtagtttctactttttggctgaaaaatgtctaatattgttttagtgtatatctatcttatgtaatatattaggatttgtattttcagaattctgatatacattaaattatggtttttaaaattttcaaatcattaattattttttttaaagtattgagattattaaattaattctaggacttatgtttaattttactaacacatgagtatttaacatgaacaaaagttgaaaaagtataatatagtacatgtaaaaataaaaaaaaataaaaaaaaaacagaatttgactatagaattttctagtataaactcataatactttatatattttggattttatcaagaaagtttagtaaaaataaaatgtccacttttgagtgtatttttaaaggacaattatatatgtacgtgtgatattcaaattatattgtaaatttcttttattttaattcaatttagtctcacaaaaaaattgctgcctatttttgtttttataaattagttttatttatttgtttcataataatatatttattaattatgctttcttcgctaattaattattatttgagagaaaagttatatatatatatggacatgttggggccaaaatttagaagctttttataattgtcattattagatacatatctttactaaattatgttgtggcctttaatgaatgaaatacatctatcatgtatcctagtaatattgattaagactgccaattctaactgaaatatgcttagagaaaaatttataataatgtatattatagaacttaatttattatattatatgtgtaaaaaaatttatttataaaaaattataaatttttttaactattacaaatatattcttatttttatgtacaaattatatatgataataaatttatgtactaatttaatactgttaattattt

SEQ ID NO: 313196 - DNA, 1644 bp, Cannabis indica
atttggttagaccttgtgatcttagtagttttttttaaaaaaaatgatacaattaaaaggggagtaaactattaccactatacggagctgaatttctataaatttcgtatgtcgttttatattgttgtttttaccattaatttattatcattcttgttttaattgaatttgtgtcattagccaaaagtgagatctaacatgttaaaaatattaaaatttattatagatatggaaattgattaatcaaccgcataatatatgtctgttcaagggtcaaatgtcatgtggtttaatgcacttcaaaaggatcaatctttaggttcaaaagaaagaaaaaaaaaagaatcaaacttaacatgtatatatatgtacgtaattagtgaatgttcaattaaatgtaattatatataaaaattatcaaaagcaatatgtattattttgagatcatgcctcatgtttatatatattttattttataaaatatataaaggagttcgcaggctgaattagggaacacacaataacttttgcattgtgttttatatagattgttgggttataattgggagtttataaaaatcattaatttgttaattagatgtcaatacaactacatatcgtggaatataatgattgccaactcatacatataattatatatatgtttacaagtgtaagaattccattgattaagaggcaaagaaagcatagtagtattatttctttctttctttctttaataaaaaatactagtagtaaatagttatcacaatatgcaaatgagatgcaactcatcgcaaatcctaaagcatttggacttttaactttgtaatacgaaacattcaataaagccaaatataacaaatgaatgaaattcaaatgggctacaataccacaacaaattaaggatggagtacgaaagtgatgggccaactcatacatattatcattgatattgatttagatacacatttcatgaataaaagatctccatatatttatatatagcatgatcatcaaataagactaattataatgtattatatattagtttggttagtaagcaaagtactctttctctctctattaattagcaacgtacgcttagaccgttcttaatgcaaaatggtctgcagatgctggacataatgtcaaaatactaaatgtttttagtgcaaattaatttttgggttgaactaggagaaaaaaaaataatgtaaattagatgaaacaagaacagacaaaatttaataaaacaaaaacatagtactaaataatgactgtatatgcttatgattagataatcatatcaaaaattttatttacatacaaactccaaaaagaatttatagtgtagatttatgttcgagcaatatatcacatcacatgcaacatacaaattcggaagtattggaaattaaagagattaataagaatttagtaaaagtaggactgaaaatttgccttaggtttaactcggacgtattacccgtttggatccagactcatgaacccgtactatagaagaatccattcaaatatggaataattacataatgcattattttttataaaataattacatttttacgtttaaagaatgtttttttacatttttacggttttttaaaaaataacacgaaa

SEQ ID NO: 313197 - DNA, 2090 bp, Cannabis indica
gtggattttaatcaagaaaagctaaggagttattagctgaccaagttcctcaattgatactccaggaagataaaggcaccaacttcgcgagaagagttttcatgataagatgttccctaactactagcaacacgaagggtatccgtgagcctaagtttccctcttgttccagtgactaaagtcatcgactcccaagaagagtatggattttctcagaggagccaaggaattttgagacacattaaaccgggcttcgcctttagcctaaaaaagctttgcctatacgtgtcaaactacggacctagtggccaagcttttttaggtacgatgtcataggttgtctcccacgacatgctatcatacagagcatgtgtgttcttgtgtacctgaccaaatgatctaacatcaagggattttggaaatccaaaaaggagaaaccctgagacaacacgagtatgagacccagcctgtgcgatctgacgcccttaaatgccatatgggagaaatgccatctaccaatccaacagtcagatttttccccaatgatgatccatctaaggaagtacatgcaaagaagttggcctataaatacccctaaaaaaccacaagcaaaggggaccctcttttggagagaagactcggtctttgtgacccaaaaacaaacacatttgtataatattccacctagaaaactccaaaatattcctactaagcttcttcttcttcaagaataacacaggggaaaagagttccaatccattgtatatctacttgtataaataatgacctaccaaagagcataataaaatggactcgtggactaagaatagttaacgcctcaaccacgtaaatatcttgcatttgttattttgctatttatattattttcactttcttaagctctaaaaatatttagttgccagaaaactcgggtcattgagagctgaggaaagaaagaaccatgcacagtggccgccaatgcaatcctgtaaagagaagagcctgtgcaaacaaaaaagaggaaagttgcctgacagcctgtcagggtctggccaaacgtcaagatggtctttgtcggaagacctacatcctcgatcgcccgaagaaggcagaggatgaacacatacggtcttgaaacactcaccgtactcacgctcaccctaaaatctcagatttggccagccaactccatgtagggatgaccaactactgatattctcaggctcgtacctcccgtcgtccactaagacaaaactacgcagacacaacgaggtgcaagaggtgttgctgccaggcagagaggctaagactcgatgtagttacgatgactaactcatgaagggtcatcagatattacaactctatccatctcacgaattcggtgccggtgctgatgtgaggacgagatccattaccaatggctaccccccctgccttttcactgcgtcacgaagctgatcaaagatcgacattgcaagatcatgtcgtgacagtagctgagaggagaccatgagtcttattagtgcccactgggtttccagcaaagcatggtgtagcattattggttaaagggtaggttgtctaacggcaaaaccctttttacggtcgaaaactttagtctgatagggtagtctctgtcattacggtgtaactacagccctcggagtaacatcaaagaaagtaacttgtgctgtcaaaaaccagataaggaatctctaccggagcaacattcatcctactgggggtctgagtctttgccaaaaaagcatctaagcaccttgccatctgctggaggaaatagaatttccaagagatccggggcgcatgcacgcatctcttagagcttctcggagcttgagaaatgcattcgcatcattttctgagtgtgaaaggttactgggcgtacgacaacgtcttcaaccctccttccaagaatggaaggactgcttgaagtctatcttactccccatgatgctttcaacctttgatctcttcaagcgaagccatcacttgaatttttatgaaccttcagtcttccctcgcggaggccgaaatgtgcttcaatgaaaattcaacatgactctcgcatg

SEQ ID NO: 313198 - DNA, 1187 bp, Cannabis indica
acaagatcagattacacagctggttagataaaaatgaaatgggtaaccaaacttaccatatttaccttttttttcaaaaataggaaagctagataactttccttccaagtttgaatacactaaataggaaaccatattaaagtataccagccgaaattatacaaagaataataaaatttttttgtcaattaaatatgccaaaaatagaattaacacaaaataatacgaagaatacttgattttcatcttgaattaacatatgtgatagatcacacctattaataaaaaattagtcaaggatatttcaataaaaatttgataagacactccatttattcaaactagaataccacacgactacttcaactagaatctcgacgaacatgaagaggagccactgaactaggcaaacatgagcgtacaaacctctcactcaaacaacaatagaccctcccaattacacctccaacgaaaccaaatcaaagggccagtaaagtctaactgggatgaagaagatcagaagaaggaacccttctccagtggcccaagggttacacgatagaatcctaaaacagagtgaaaagtcgatttttttcttgattattgtcttattattatggtctatatataaaataaaaatagtgtttaaatgtaacatcattttcataagtgatttatttatttttgagagaaaactagatttcattacgataaattaactattatagaagaactcaaacattttggacaagaattcatccaaatacattctcttatactataataatagaagtttttactatatgaacaacaccattcgcaaaacatgacacgacattataagaactatcgccaacaacaactaccaaataattaacataaaaataatagaattgaactaatatttaaatgaggattattcacccaacccacaaccacagttgaatcacaattaatactagcaagattaaactcaaaatatgtgtgccagcattagccccatcttgatagcaagaagctccgccacaacactaaagtctctcaagagtccaattaattaaaaaattattgtctgtcaaattttgtgtatattaattgggaaatttgcaaaaatactgaaatttgggtaacttttacaaaaatactgtgacacggaaaaatttacaaaatactatgtttttataaaa

SEQ ID NO: 313199 - DNA, 935 bp, Cannabis indica
tttaataaatatttaataagatttttttagtaattaatatttaaaataaataaaatttatacccctaaactattactatattcaatttttaccccataaactttacatatcattataaaatccccctaaagttttcacaataagaaaaaattatctttctgttaagattgattttttttaagtagttgttatgatcgttaattttaagtttatgtgtcatttattaatagatttgcatttctatccaccaattaaaagggatttatagcatatttagatttaatttaataggaaaggaattgtattagtgtaaatgtaaacaaaaaagagaaaaaaattaagagtaagaaagaataagtgattttggggggaagcggtgattagaactttttggttgttttttttgtcagtgtcgaaggaagttgataacggggaagattaagaccaattattgactttgctttacttttttcttcaaaaaaaatctttgccttttttttctttctttttttcataaactaatagctttttttattgtgtcttaaaatctacctcagatattatatgtttttataataatgaaatgtcatttttagtgctaatatcgtttttagtttctacctaaactaatttttgttcaatttaatattttggtagtgatgattaatctattatcattttaaaaaaatttattatatcattgttaattgattaatttgagaatactcatttgtgaatataaattttttgtttgtttcattcaatatctcatgccaaaaaaatattcttaaaagataaaaaaaaccctccacatacaaatgaacaacgtagaagacaaagatgatagaggttgaaatgtttttttttgatataacattaatagattaaagatttgtttcttcaaattacaaaaataaattgataattataattaa

SEQ ID NO: 313200 - DNA, 1433 bp, Cannabis indica
aaacacagtatttttgaaaagatttttgtgcgacagtatttttgtaaaaattaactcaaattctaatatttttgtaaattttccgttatttattttataggtacataaaacaactaaaacagctaatttattgattcctactatataataatttctatagaattttatgaaattttacaaaatcatgttttaaataacactgtaaattatattaaagaaattgaaaaattatataacaacttgtaacaattttttatttgttctgaaaatattgtttacaaagttgtaacatgcatgtacggttattaaagcttgaaaatttagttatatatgtatttcatttaaaaaaaaattgtattattacaaatttataaattttgttcacacaaaaataaactttgtatttacgactatgcccctcaatgtttttgtaaactttccatcttctttatatatattagacttattttcaaaattatacatagtacacttcttttatgggtacaccataaaaataccctagatatatttatatacattaataaatgaaattgagtggggcataaatattaaacttaagggcactagctaggtcctccattatgcatgattgagctttatatatatggtgggcgattttcacttaaaaatgggcaatagatttcttgggctccatttcccactctactctctacaacattattatatcaagttgaaagagatagataatgagttgtgaaatgaccaaactacccctatcaaaaataatttgtaattaaaccctaaccccattacaataatttgggaatctaatgtattgattcatcaaaagtagtatagcttagctcctcatcctttatgggaagctctttgttgttagttagtccaacttttttctttctttctttcttctaaagattttgtagattggatagataaaagggtaattaatattgttggaaattaattaatataaactcttaaagctgctaattataagtagattaagtttcttcatatggatatattgataaattatatgtctttttattttatttttcattacttgattttccaatgtcaagttgagtaggactgtatatatatgttggaggaattgattcgatttgattttttttttcttgtgtgacataaagtttagtgtaattaattaatttgtacaaagttatacatacttcttttcaatctattaaatcaaactgccacatacagaacacgttggattcgggattattgacttggattccacaatttatgttctttcttttgttgtttttgttttacaaaaatactaattaatacttaaaaatgaattatatacttacatatatatgtgtatatattatctaaagccaatgaccaaaaaaaaaaaaattacctaagttataattattcccttttataaagttggg

SEQ ID NO: 313201 - DNA, 708 bp, Cannabis indica
aaaatattattagttttttattgcaatttttaagagcctaaattttaagattagaacagggcctcaaaaatatttaagacggccctgtaagtagctatatggtaaagaatattgtacatgtgtgtatatatatgctgacacagaactatagttagtctgaactcatagaatcgtgtttgtagtgacaaattgaaaaaccatataaaaatgacaaaaagacaggataagaagaaaaaagagtcttgaagaggtgaagataaagtctaaagtttattggtagacattattattattattgttattatttaatgttgatgttaactatgtaataagttgtgtaataatttatattttgtttattaatatacatttcaaattcaaggcacaaacccaatatatatatatatatattacaaattgcaagttgcaaagaaaaatatgtcattgggactttagggccactaacaagttgttctagtaggttttgtcctttattaaaacactttgatcattcgatctccaaaaattaaaaaatggttagataaataatatatatatatatatactagcaaaaagctacgtgcgaggcacgtatactacattttatgcttaattttttctatgttatttgaaagttatacaattaaaattaaagaaaaaatattattagttattcggtgaggattattattattatgtgtataggaa

SEQ ID NO: 313202 - DNA, 582 bp, Cannabis indica
ttagatggatcagattcccaatttctttgggcaagataaattcattgctcaacatcccatcaataatcaaaactctaagcatcaaaaagtgattgcatacatgtctcaatactccttttttaaacacaattcttaacccatgtagagcaaagaatctcagagagccatctatattttgaaccataggaacaatgtcataattacttctttcattattatagatggaaactcttcgtacatttgtttctattggttcttcccattgattcctacaatcaattgaatgtagaaagttttcttcttgagccttagacacgcacaattctctcatgagatcatgaatggagaaggattttatccttccttttaaactcatttgttttacctgaatcatgctcctctccaccaactcactcaaccaatcatatgccacatcctccaaagtttccacacaacctcttcttaaccatataaaaccttctgcaatgagtatatgacaaaaccattttactcttatggtgacatcttcagcgtaacgagccaagtacaaaaaacaaggcttcaagtgagatggtaactcac

SEQ ID NO: 313203 - DNA, 1113 bp, Cannabis indica
aataatttccaacaattttatgttggagtaataatatgatttttttaagtaataatccaacttaagaaaaaataaaagaaaacctcttcatcacctctctcttcctctcttttatttttaagaaataaccagaggaatcctaacctttccttcatcaaattctgtagaattcatcaatcattcaagatttaaaacccaaagaatgactctagctcctttctttaaagctttttgagagttttggttaagttcaagcttgtaaattttggttataagttctttctgaaccttaagcttttaagagtggttttttttgggttaaatttagggtttttggtgtttagttgatctagttttggtggctaagtgagtggttgagcaagtttggctcaacaattgcattttttgattctatgtgttttgctagctagtgttgcttggattttgcttattgttgcttaaatcggtgttttggagcttggtttcaagtttggggttagtttgagctcgaattgagacttggtgattttctgcagtagaaaacggtagactattttttcagaaatagtctaccattttaactggcaaattacccaaaaaaatagtctgccatttttacaaaacaaactaccctttttctgacagtttttccaaagtcttattttttcgtgttttcttgatattgagggcattgccaagttatttattagtagggaaacttctaattttgtgtttaggttcacgtaaaaggttttagtagttatttacctgttttatgtgattgagacatgggcctccattaaacgtgtgaattactattcaagttgatcgacacacttgaatctggaaacgatgtaagactagcataaaatatatatatatatatgtatatcacatccaatatttttaggcccatccagatccgatccaattatatattggatgctagattttaccatccgatccgatccaattgatttcagtcatccaaccgatccaacatccattggatgttggattggattggttctatccattggatatatttcatatatatttattggttcaattttaatttatttaatattttagactagtatttttggatcggat

SEQ ID NO: 313204 - DNA, 2201 bp, Cannabis indica
cagggattacttggaaaagtaaaacttgagcagtttgatttttgtgagtattgttttcttggtaaggcttgtagagtcaagtttgggactgacaaaaagaataccaagggaacactagattacgtacacagtgacttatggggaccctcgagaacatcatcacactccaggagcaagtattttctttttatagttgatgattattcaagaaagttatgggtgtttattttgaagaacaagatagaagttcttgaaagatttaagcacaggaagataatgattgagaatcaaactagaaggaaagtgaaacgacttagaacatataatggtctggagtactgttcaattgagtttgatgtgttttgtaagaaagaaataatagcaaggcacaagaccgcgaggaagactccttaccaaaatggactcgcagaaaggctcaataggactatcttggaaggggtcaggtgcatgccattgagtgctggattgcccaaagtgttcttggcggaagctgtgtccactgcaacttatctaataaacaaatatctgttaacaacactaattcaagacgtcaaatgaggtgtggtcagggaagccaacaagttatgaacacttaaaggtttttggatgtgtttgctatgcccacatcaggcaagaaaaacttaaggctagggccttaaagtgtattttcttggggtatccacaaggagtaaagggatatagattgtagtgtttggagcccggaatgaggaaatgtatacttagtaaggatgtgacctttaatgaatctgttatgggattcattgacaaacttgctagaagtcaagccaatacaaaccaagaagaaatcaaagttccaggaactgagcttgaggtggaggctcctggaaaggtggagactaaaatatctgtagatcacaaaagtgatgatttggaagacgattccagaaatgataatctaagaagctataaattagcaagagacagaacacgaagagaagcaaaggctccagaaagatacggacacgctgatttaattgcattcacacttcatgttgctaatcagattgtgcatgaagagcctactagctatacacaagcaatgaagagcaaagatcgaaagaaatggaatggagctctgacggaagagattcactccttgaagaagaaccaaacttgggatgtaatactgatgctagaagacggtaaggtcattggatgcaaatgggtgtacaaatggaaagaaggcattctaggtgtacaagaggcacagtataaaacaaggttggtggcgaagggattctctcagactgaaggagtcgatcataatgagattttttcttccgttgttaggcacagatcgattagaaatctactggcacttgttgcatgttaagacctcaaactagaacaattagatgtcaagactgccttcttatatggacatctggatgaaagaattctaataaaataacctgaaggatttgaagagactggaaaggaacactgggtgtgtttgttgtgaaagtctctatatagcttgaaacaatctctgagacagtggaatatgagaatttatgattatgtgaccaagatatgtctaaaaggaagtaagtttgatccttgtatatattgctgagagagaaatggagatactttgtatctattgttgtacgtagatgatattccgatcgtcagcaagagtgtacaagagatcaagcacttgaagctccagctaaagacggagtttaaaatgaaggatttaggtccggctactaagatcttaggatggatgtaagaagggaaagacggaaaataatattatacttgaattagatgagctacatcgaaaaggttctagaaactttttaaataagtaactctaaggcagtgagtactctgcctgcacaacactttaaactgagtgctactcagatgccaaaaaatgaaattgagaagtcagaaatgttgagagtttcatatgctagtgcagttgggtccttgatgtttgtcatggtttgtacgattgaaaatcaatagaattttagaagcctacatcaatagaattttagaaagattttagatgaaatattgttcaccgagcattgctcccattgtgacaggtgataaattgaatttgagctagtgtccaaagaatgattttgaacgagaagaaatgaagaaaattccttatgcttcta

SEQ ID NO: 313205 - DNA, 912 bp, Cannabis indica
ataagaaattaatcactttgtggtaacacatatatgcatgcaaagaataattaattcacaatgtatatatgcatgcatgcatggttttcatgctttttttatattattattataattatatattatatgtatttgaatcatataattaaatatatatatattaataatgggaaaataaacaatgaattccaatatatatatattgtcatggtggaggaggatgttcaaagcaagaaattaagcttctcttggtgtcaataacgaatcaatattattttcatgtatattataattaataaatattattacgtacacaattaattttgattttcatattctttcttcccataattataatagtagtactactggtcagtatgtggacactaatatatgataaattaatgttatactatatatattttcatatattattactaaagtatatatatacatatactccgcgccaaatgtggctccacctgtgtacttaataattatatacaaataattgaacccttttatataataatgtatttataaaaaaatcttattataaaagctaggcatccatatatattttggtgctcctttttattatgcaggtattttatatgtatatccatattgaacatttttacatatacaaactttgttttcttctcccctctcatgatgatattatttattaagaatctttgttaattaagtatctatattatattaattaattatttgatatttgtgatgaatattagtcaatgaaggaacagtagtactgctggtcaattcaacttttaaggcagaaagacacattaatagaaatacaatatatttaattaaaaaaaaaaggcctagagaaaaaaggattctctatattgagaagatgagctatagctatatatatatata

SEQ ID NO: 313206 - DNA, 923 bp, Cannabis indica
agccaccatcttgaggggggatattggagaatattgtcccacatggattaaatgtgaaagtattgagtcatatataagaacatgggctactccactcattgtcaattggttatttcacttcccactaaaccaaaccctcctttagtcttggccatacaaccaacataataaaggcagagagagatattcatattgacccatttaatatgctttttaaagaggaagagcatacggtcactaggtgttgctttattaattaagggggtgtttgttataagtttgatttgcatgggaatgtgggaatcacttgtgaaagagaattgttagaaaacattactggtggttagtacctttctcggtgttatactactatgatataataaagtatcgggtcccatataacttaagaaaatagtttttatcaattatgaagcgccacctataaaaggtattggacactattggtgccaatagcaatgctccttgtaaaactgtaaaaattaagttttcatattagagcatctccagtggagtgtcaaacagatggtgtattgttatatttaagtacacttaaaagaaaaactactactctaatattattctaaaaaatgtgctaaatttgaaatatactaaaagttgtgctaaatttgacacaaaatatattattgtgcaaaattaacccacaataaatattatttttttatttagtataatgtcactaattttgatttatcgactcttactaaactttacattttttacttatttagtatattaccattatttaaataataaaagactaaaaataataatttttgtatattctcaataaaatactaaatcaccatcaatatactcatgtcatttttacctctttttttaaatattgtaccaattttactcctgtcacttcaagatactct

SEQ ID NO: 313207 - DNA, 810 bp, Cannabis indica
aaataacttaggctcaaaccatttgttgggttttgagagtacagagagtgacagtttgatgtgatcgatgccatgttctaagaaattaaggttatatataacttgatttgccgtactaacatcaatatctatttatatattaatgagcatgttatatgaaactaaaataatattttgggaatgatttttagtattttatgataattattaaacttgaaatgaaatacaatatttaattatactaatactttcgtaaggtaaatataatatttatccttttatgtacttttaattactaaaataccacttacactatcatcacttacacaatcagttgatggttgcagggtagttattgcgtggttgcgcgatgttgcactagacgaagctttcaatcagacgatagttgcagggtagttgctcggtggttggccgaaagttgcatcagacgaatgtttcaatcagacaaaagtttctgggtggttgctgggtggttggccgaaggttgcatcagacaaaagtttcaattagacaaagtaacagttagcaaaatgtttatgtaactgtaatgcaactgttgtgaaacattaaaaatcagaacagtgtttccacgtacataactctatctacatatctctttatgatttaatatgaacaaattcaccattagaaatttgaaaaataacaaaaatataccaagataaatattttactataatattgatgtaatttttttgtatcatacttgagttagattgtttaggaactccagtttaactttttgtagatctacctttcatggatctaaaa

SEQ ID NO: 313208 - DNA, 755 bp, Cannabis indica
tctctctctctctctctaggatacacacacacattgtaccagtcggacgtcccaccggagctagtgttcggtcgcctaacgtagaggaaacttgaaaccaaccaaagctctaagaaagtcattcctttaaaaaataatgggtatgtaatttctttagtaattattgtttgatttagttgtatttatgttgatagtaatagatctacacatatccgtgtttttatgtaccctttttgtcaatgaaacacgaaatacagcaagtgtgcgtttttactagttttttgcgattttagcgatattttacaacatggtttgcgacatgtagggattaagtgctggcatgaggttagggatgagttttattgatatgtatcaatatgttgcgacgtacgtcgcgacacatagaattcttgtgttatgttgtggatatttttcatttttctcgataattttatgacgtttgtcgatatgtgttgttttcgacaattttcacgatgagttgcgattagtttcatgatagtttgcgacatttttgttttccataatttgtggtcattttttttttgcagattcaaatgtgtttgtagttgtactgtatgatggggcttgggcagttgaaggtttcaactggatattcaataatccaaaaagtaagatgttaatgtttgtagttgacactactttacaaaagatgaattaaattttgtatgaagagttggatatagaccctctcgtgtatgaactgaaaatagagg

SEQ ID NO: 313209 - DNA, 2456 bp, Cannabis indica
tctttgaagtgtgagtgcttacttcctctcgaagtaataaggcttgaataagtcttctctagaagacctttctattgttcaattaaaatgttctaaccaaccctaagaccagtataagaacagatatatagacactaaaacctagatgaacaactaggttctcacaaaaaaaactctctcttcacaaatgagaatatgcaaaaaatgaaagctagaatagttaaatcgattggctgatctttatgttctatttattaaacataggaaccctagagacagccacaaagtcgattccacggctgtacaaactttcctaaaagaaaatcctgtcttacagcatcaaagacagattctgcagcagcaaaccagaccagaaaaggaaacttgtcaaaaatgtgtctgatcatgtacatggacttgatacctggcaaaaacagtgtgcttgatctgatcttatcaagacacaatcaaactcattaaagagaaataacaatagtcaaagttttcatgtaaagccaactttccataagagtatttcttctcttacaagaagtttccaaacttagaaaatagatagctgatataagattctttcctatgatagaaaagagcatcaaaaatatattattaaggtgagaaaatcggtttattaacacaaagaaatctcaccataaataaaaaatattttggcatctaaattgccaaaaaaaggactttacacaattttcaaaaatatttttttgtctaacatattatattttacattttttctcacatactcagatcctagacctggacttggatcccaaactcggacccagatccggacgcgaacccagatcctagaccccgaaccctaaccccagacctgaacacggatcccaaactcagggctaggtccgaggtccttggctgggtccgggtctgggtccggggtcccgatcgggatccaagtcaaggtccgagtctgagttctggttcggggtctaggtcaaggtcgggatccaagttcgggttggggttcgagtcgagtctggagtatgatggattcatgtcatgatatggtgtagaatattaattttttttataagaagaaatctaaaaatagttttaaaaaaacttgagccaaacaccataaaattttaaaatgacaaaaaactgtaatctaatcttacttttgaaaacacaattcaaaattaaaaactgaatacataaccaaacaacctctaagttccatgaaaacttgtaaaaaaacaatgcttaataatactttaatgatagtgcattggaaattatcgtcttttgacattttttttggcttcaaatatcaagtttttataggactattgctagactttaaaccatcatcattaaatatcgattatgattcttattactatgtaagtattgagaagggacttgaatctcatattttatagaaaggaaccagcagatttatttgagctactctgttttattaatttttcttcaatatattgattcctagggttgttcataaaaaatttcaatctaatttaatatatacgatccaatttaaaccaattcgcaaaatgtgaatatctgcacttgtgcagattagattgaattagaaaatctaaaatccgtatttgtgcgaattggatattgattgatacataaaagtaaccgatcaaattcaatccatacatatttatatatatatactttttaaaaaattatatatacaattaatattttaatataaaaaataataattgaaaaatccaatacatatgatataaatatatttcaaaatatagagattaaatgtatattttatttttatttacaagaagaaaatataatataaaacaaaatttaacatttctttatacttataatttttttttgcttttaatttttttaatttttattttatttattttaatttgttattggagacataaaacaataataatttaatttttattgttattaattatgtaaaaaaaatatatattttttgaaaaaattaaaaattatatattaaaaagtaattattctaaaataactgatctaatctgcacttttgtgaattgaatttgatttgatttgaattgatatgaggattagattggatctaaaacataaaattcacacttgatgcagatcgaatgcacaataagctaaattatacaaatcggatcaaatgaacactcttaggtggcgtttggtttgaggtaatgaaatggaatggaatagaaaaaaaaaacaattttcattctatttatttgtttggttgcatttaaaactattggaataccattccgatggaatgacatttctatcattttggtggaatgactattccattttgaaatggacaggaaagctcattccaattcaaaatttgaaaaaatttaattaatttttttaatcaagtttttttttaatgcattttaaattttcctatttca

SEQ ID NO: 313210 - DNA, 2934 bp, Cannabis indica
aaaaaaaaaaaataacatattttctaaaagaagtgtggtgattggtgacacgttggctcgggataaaattctggccacctaactcgggatgaatagcatttctctttttggaccctgtgttttgtaaaaattatcaattatactctctgttttgttaaatgacaaaatggaccttgtatttttcaaaattatacaaataaaatcctaaattgattttttgtcaaaataaaacttaataataatctaatctaaaaatattatgataaaattggttgtattttctgtatttgttcgtattaaaaattatcttaaagttagttatattaaaaagtaaaattattgaaaattgagctcatagtcctatttttactattttagaaaatataagatttattttgtcatttaacatagggtccaatcggtaacttttgtaaaatggtatttaccctaatttttttacactaccaagtcgtgtccttcattgtgatcttaaagctgaaaatagacctctccaaaatgcaaaaaacttctctctctagggtttttctctcttctctctctaagctagggtttaatctctttttcttcccctttctcagcttgagacacagctacaggctttgttgcgcgtcagatgctctctagccgaaagggaccgttgatggtggttctcatggtcatggccatggttcccagcacaaatagaatgagaaagtcagctatgagtatggcttttcgagtcgctgttgtggggaggtcgagcgtgacagtcgactttgctcggtcgtttttggtatttttggccctttgcattttcgtttgaagtatggggatgggctgaggtggataggtagtccaattttgcgttccctccagtgccaagagcttgctggtggtaggatgactcttcttctccagttcgtttgggctctatggtcatgtttttattttttgttattattttgttttagatctattttagatttgttatttttttctttggtttttcattccagctatggattttctcttgttagagattttggggtttgtatccttattttagttctttaccttctatttatggtggtatgtatggtacttgaaattgaccgtgactacgatagacatatgtgtctcgatttgtcaatctgttagccttgttgtcgtttgctcgcctttgtcgatattgattagtttatgcttatcgttgagctttgtaatggactttggacccttattataaaaataaatagtatttttaaaaataatcaaaaaaatatatatgtattttttaaaataagataattttttatttggggccctaagatggatgggctataggcatagtaaagctgatcttaaaatttagaaggtcaaagaaaaaaaaaaatttgaacccttattttgataaatatgtggtttttttaaaataaataaaagaaatataattttaaaaagaaaaaaaaatgtgggctcctgagataagtgagctctagacacaggccgaacttaccttaatttagagtcgaccttatcaatttagtttaatttttaagagaagagaactacaattaaattggttgttgttaggacaacgttcctgttattatcttttgattttttttttttatgattttaatttaaattgtctatcattggagcacttttgtataaaaagttgttaaatcgtatgtaaataaatgagaaaatttaaaaataatattttataataatgtgtgcatttttggcaacaatagagaatgtacttttattagagatgatcttattatattgttgttcgtattttttaagaataacacgtggttactcgaaaggccaaaggacatcaaaagactaccaaatgatttagagcatctccaatcttgacacgaaatttagtatcacaccaatatcaaatttggtgtcaaaaactttttttactttaatcacaacactaaaaattgcactaaaaaagaatattttttattattatattaattttttaataaaataaaatattttttttactattatattagttttagtctaatttttttcttaattgtgtacgttataattatttaagatattttgttaaattttgagaaattcggaataatttacaatatagaaagtagtgttacaaacaatctatttcacaaacgtataaaagagttaagcgtccaatagactattggcttattaagattttttttctccgaactttgacatgtaccaaatcatgtcccctgaacttttaaggtcgttaaaaatacctcctgaactattgagattgttgaatttaaggacttttgtccaattttagtaaaaaaattctaacatggatgaaagttcagggggcataatttagtacatattaaagttcgaggaacatgatttggtagatatcaaagtttggggagcatggtttagtacataaagaatcactgaaacagtaaaattgaatgaaactagacaaaaattcttcaacaatcttaatagttcaggagaaatttttaataataaaaaaagttcaaggagcatgatttggtacatgttaaaatttgggggggaaaatcctaattagcctagactatttgaactatgttttcaacgtgttaaatttgtctacaattttccaaattttagaagatgtctaaataactataatatacacaattattaaaaaaaaatgttaaattaataaaatctctcgaatatcaaaatagataaataaaggtgcattagtatactctttttacggtttgtattttagaattttctataaatatatatatgaactattgttattataaaataaaaaataaaaaacaagagagagagagagagagagagagtaatttttgcctaaagagctcttagggaaatactaaagaggacttcctaattaataaaagtcaaacaaaataa

SEQ ID NO: 313211 - DNA, 1766 bp, Cannabis indica
acccacgggcccaacaattcctttttgacttatgtgtccaaaagaaacccaaatttttatttctctgtgaaactctatgcactaaggatgttgtggaaatgtttagattaaaagtgggctttgagggttgtttctcagtcgatgtgtgtggaaggaaaggtgggcttgccatgttttggcgtatctctgaggaagcacatctcaaaaattactccaataatcacattgatattgaagtaacaatcccagggacggctaaatggagactttctggtttttacggagaaccaaacaagagcttacgatttcatacttggaatcaacttcgttctatggccgctgaatccggactcccatggtgtgtgataggagacttcaacaacattattagcagtgaggacaagaaaggagggagaccttatccagcttctttgatttctggtttccaggaagctgtaaccgactgccaccttattgatttggagcttcgtggttatcaatttacatgggaacgcagccgagggacgtctagaagtgtggaaattcgccttgacagagccatggttactcaacaatggttggacatgtttaatgaggtatcacttactaatttggcattttcatcctctgatcattcccctatttttcttgtacctgcttctatggatagtgggaactctttggctttacttcgttacgaaaattcctggaatagagaaccattttgtgctcaacttgttgctgatatatggcattcaagtcatcatgttcagcttacagataagcttgccatttgcctaaagcagttagttaattggggaagttcaatctctggtaattttaaatcacggctttctaagagtaagaagcttcttgccaatttgaaacactcatctactccagccgatgtggaaagttatgtcattgaaaaaacaaattactttgaaattcttgctcaacaagaagtgtattggaagcagagatcaaagcaatattggcttcattcgggggataaaaataacaagtattttcatgccactgccagtgcaaggaaaagatcaaatcagattcaacagttacaagatgtaaatggtgtttggaggaattggacaacaggcattgatcatgttatcaatgattattttttcaatcttttccaatcgtccaatacttcatcccaacaggtcattgacaacataagtgtttcggtttgtgcttctcaaaatgatgctttgttacaaccaattcgagatgaggaagtaaagtcggccgtgttttctatgcatcccgataaagcacccggtcctgatggtatgtgtcctggcttttttcaacatcattggcaagttgtgggttctgatgtaattcaagttgtgaaagatttctttgtttctggggttcttcctgctagtctaaatgatacccatcttgttttgataccgaagaagaagaactttgtcactatgagtgatcttagaccaatctccctctgcaatgttctttacaagatcatttccaaagtgcttgctaatcgaatgcgggatcttattgaccatatcatctctgaaactcaaagtgccttcatacctggtcggcttatctccgataatattatgatagcttttgaggtgatgcattatttgaagcgtaaaagaaaaggcaagaaaggtttcatggcactcaagcttgacatgagcaaagcttatgacagagtggaatggggctttttaagagcggttatggttcgaatgggttttgctagtaga

SEQ ID NO: 313212 - DNA, 1134 bp, Cannabis indica
ttaaatatttttgattgctcgtatgagtagttaatcccctattcatactttagcttgcatattagtttttaagacacgatagtatctcgtttataatacatgctataatatgtgagctactatttattcagatcacacttagctttttgttattttatgagaaaaaatatcacttacaactgctattttaatttccacttgaagaaaggtttcaagatactagattttataatgtcctaggatagttttttatcaaatatcctttctttcgtaaaaaaaaattaatttctaggttttagcaacctaattttcttttgcatatatttctaggtggaattatacacatgtatgcccccaagtaagtttaaagaaacaaaactttatgattacttgaaatattgaaatctttattaaaaataaagaacaacaattacaaagattaattcaacattacacgataaattactggtaatacgaccgtaaatgctcgctcttccagtggtcttttattagcgagccattaagcaagaaatttgtaaaccccgattctaactatagcttcaataatatatgggctttcccagttcgggttaaacactccagctgttggatcttgcgtatttgcaaatacatgcattaacactaaatctgatactttaaaaagtatttttgaactcttttattaaagtatctggtgatacagtgttgataagcaacattggttacttgtgactctgtgcattttttaaacagatccaaggagatacttagaagttcttaattttgttcttgattgtagaattcacgcatgttggtcacaatgtttacttctataggtagcattgcttacgagccaaatgccaataaaaatggagtgtgtcttattgctatttttccccaggtgatgtggaattatacagctactagtcttttcgttacagatcacggggctctaacagttgcagtttgactcatgtcccccttgatctcattttcccctggtagtgaatagatcaacccacataatcgtcacctttaattcacctatttgttgagttttatgccctaaataaaactcatttcaatataatcagatttactgattaatatagatcagaaataacatttaatgtt

SEQ ID NO: 313213 - DNA, 1565 bp, Cannabis indica
attcaaatttgagatattcttactttttattgacatcttattttatagatcaatcattcttttggattgttataaacaagattggttgtattgttattttattttatttgaatttaaataataaagttgttattacctaatttttattggaagatttttgttaatagtcatatatgagtgtgatttgtcacatgtttaatcggattggagacctagcatttttcacacttttttgatgcttcaccgcaggcgacttattagtcttttagttgaatgcgtttttagagttttatttcattttattgtaaacgacttaatttacctattttcgttgattctccttaatagactttttataatttacctattaatagaaatttctatttttctttaaataataataataacttatcatagaaaaattgtcataaaaattagcaccaattgtaaacaatataaaaattatataaataatgaataaataattcgaatttaacacatcacagaaataggatgagaaatttatcaatcactacggcgcccctgtcaatacaataggatgtgtttatttatctatctattgacttgaaatgggagcagtcttgaaaaattatcttagaggggccttaggactctattcaccttttggagcttctattgaatcgataaataggtttgattgaattgaatttaatttttttattttttattttttgaagaaaaggcctcatgattagaacctctttagtaaacccaaaggaagaaacctcaattgggaaaagaatgccaagaaatatcattaatcaataaagatcgtatgcaaagagatactaatacaatcagaatagccaagccaccacacatagtgatcatccaaagaaagagtaagttttgctaatgatgagccacactattagagattgtaagacaataaaagaaagacaactcgctaaaattgatgcaaagagataaaacatctctaacaatgcaacctaaataagaattatccaaagtctgtctaatcagaacatttaacaacatttaagtaatcagactctacaaccacatataagtagccaaaatggatacaaaacctcaaactatcaagtatagccatagcttaagccataatagtgcaaagaaaaaaaaaggccaagcttcaagttcaattgttaaatttttattattgattgaacattttatatacatacgataatttaaatgtaaagagtaatttatttttttttaactctgttaaataatagtttatcttatatgataattttttttggtaaattagtaatttttgtattcacaacaaaactcaatttataaacaaagttgctaagccataaagaaaacaattaattacaagctcttatgagtatccccacccaatcttgatcttattctattaaagttttgaatattcatatattgcaatctagtacaaataacatgcataattttttatagagacatgtactgatggaagcttttgctcccaaagaattatggtggcgtttggttgaaatgaatgaaaacataagaataggaatgagaat

SEQ ID NO: 313214 - DNA, 4032 bp, Cannabis indica
tgttaatgaaacatacttggtagtaaatctagatcctagtaaaatatttcaaacaagtgatggctgctccatggatggagaactgttctctatcttagagtcctcaataaataggagtggattcttgaatctgcatgcacttatcacatttgtccgattcgagagtcattttttaattataaattaattgatggaggtaagatttgaatgggaaatgatcattcacacaggatcattagaacaacaaaggttgccataaaaagtatgatggtggaatcaaagtgctaacgaacgttaagcacatcacggagctcgaaaaaacctcatatccatgggtgatacggatacaagtccatgcacgggaacttaaggatcccaaaaggttctttgatagtgatgaaatatgaaaagatcaatggtttatatatttcctaggaggaccatccacaagcaccaaagttattacatcgggaggcatctcttcagcttctcgaggggttgcattcctcaaatagtggttgcaagccatgtagtcccgatcctcctcatcggcaggcactggaacttgttgcttgtctgaaagttttaggaccttgaaaatcatttgtagactgttctctatcgagaagggtgcaagccttcaaattgttctcatgcagcaagaagtcagccgctcgcaacccatagggaaggccaaggagaatcctgtgcattttctcaatctcagaagttgggatgggtctcctagtgatcattgttaacacaacaaagaacaaaattagtaaagtataaaaaaacatatatcgaactaaaacttaaaaccaagaatttgagaagagttatacatacgtataatttgaaattttgttgtgttgatggcgaaaataccagaggtccaaaagaagtcatccttgaactctttttattgggtagccttaaactgatcttatgatcaatagtatgagtcctgaggtagtacaagcctcccactccgtgcttcctcacaggaccagctttgacagagtaaaaataaagaatttctagtggctcggtcagacattcccactccaggatcctatatgaatttggtgacaactgaaatggggcaatgctgaggtagttgcaaaagtctttaaagtttaccttgagaggaagaattgtcctagctctcatatatttgaggctccaagcacctattctggaaggctcactgatactgaaaccttcatctcagactagacgtttagggggataacagctgaattccccctgagcaataggcctaatgcaacatccctgctcattcctgatgccacatgatcttaaaacatccccaacataaggtccaatggacctacctttagattctattaactcagtttcaaaggtaattgtgggatcttgaggagtctttgatttatgagctttcagagccattatctcaaagtgtaagtcacctagcgaatatgcaaaagtgactggaggtgaaaacatgggcatcgctaagggtatctcaactaaattggagggttggccaagctgcttctcgcaaataatggcacctacccttaataacctcttgtaagaatcacctataactgctagaggtttcttcctggccagatttaacgaggtgtttcctaattttttcatcatttatttcaagtatggtttgagatctttaaggtttgggcttaaattctatggcagaaaattaaggacaaactaattctaagggttctgggattgtacactatgggataaattaggacatgattatagataataatgccccaattcctggaaaaatagagcacaaataaaagctaaaaatctccgaattgtataaccttaaattttctagtcttaggattatttaaatattcaaaaacaaattacccaagcagcaaaataatgcagacaggaaaacatataccaagaaattaaaatttgaaagcacgaaggaaaaaagcaacaaaaaagagtgtcacttactgttttgatgaggtattatgggtagagaagagtttcgtgatggaaatttcaaagatcgaagagctgggtcttgatgattttgaggaaggggaatgcaatcagataaaacccgcagaaggaatataagaaacaaagagggcatgcaaatgcatatgagaggttggttgagattttttgaagcttgaaggttcgtggcttgaaaatggcaaaaatagtgcacagtttcaaatttatacctaaaggtggcaatcgtttgatcaaatgaaatctgatcaaatagatgggaactgtacaaaaaaaaagaacagtcaaagccttaaataaacgaaatcgatgtgccttgaaattttgaaccgccgaattctaagcatgcaaattttaaataggaaaattataatagcacccttgaagacatttaaaaagtcatttttttaattaaaaagcacttttgagggggcaattgttatacacaaaattcgactatcacccagaagctcacatgtgtactttagaagaaatatgaatcagcttaataaatgtactattaaatgcaattaaaataactcgcctaaggtattatggttgatagaaatattcaaactcgctcctacgtaagcagatgcaagataagagtaataactattacccattgagattggcaaaataataagtccatctcaggatagacatagtacataataaaagttgttcaagacgagataattaagagcttgcagctcattcacccacatacttgcgaataagagcttgcaactcattgacccacatacttggaaataagagcttgtaactaattgatccacatatttgtacgtggagagaataactacattcaaccatctcgccctccatacgttgaagtaagcatctcgctaatatcatcatagtaaaagaggacatgcgagaagcattatatttatacttagtatttttcctataaaaacggtaaagaatgacaactcatacttagcaaggaataaccagcataatcagcataaccatttaaggataatgataaaagagcggttaggtagttattaaatattttcccatgttcataaaaataaaatgtggagaatgtccacgtttaattaatagttatgaatgattagatcccaaggaataattgtcaccctatacccctataaataggaacagaatccaaggtaaaaaagacgatgaatttgagagagaaagctagatataatatttatttagattatcgtactctgtatcccaattattatccctaataatatggactcgtggagtatgtatattttaactacaaaaccacgtaaaaatatttggtgttcacttattactataattaattatgtggtatattattacaaaaaatgtttaaatatttggttaatgaaaatctatgttaacaataaccaattaacacttactataccatgagttgaacgagtttttatagctaatgtacatatccaatcagtcttcaggatctttaaaccttagtcgctcaaataccatattgcaatgccctaatcgtaagggcaccacgtgtgtgtacttttataaattagtttgcaataataaactaatggtttaagaaaaaatgaattaattaaaactttagaaattgttttcttaaaatttaacttaaaaactttttcaaaatattacaaagtcgggaattccctttgttataaacttttactaaaattccactctattactttattacaaaagattaaacatattaaaaaatattataaaagttggatcctgtcaacttagcacaaaagactagggctgtacaaaaaaaattgtaaaccgcccaaaccgaataacctgtccaaaccaaaccgaaaaaaccgataaaaaattacaaaccgaaataacccgaaaaaattacaaactcgtccaatctgttaattgggcgggttgaaaataggtccaaccctcccaattaaatcgaataacccgaccaacccgattttgcattttattttatttttttactttttagtttttattatatat

SEQ ID NO: 313215 - DNA, 1188 bp, Cannabis indica
catcacttttctcttggacacgttgagagaaaaattagttttcttgcactaacgatcgttttaatcgaaaaactgttgaatgatgcctgtttgggtaagctgagaagcaaactcaccagtcatctccgcggcgaaaggagccaaggtgggcccgaggaagcgacggaacccaatgctggagtcagttttctgtattgataattaaatgataaagattacattgaaatggagttttatttagggcacaaagcccaacagttaagccagaaggaagcaagacaaactacttactccaaagatgttggtgaagcatctttgagctatgatgtatggaggcttagtgctaactaatcgataatattgcttatgtgaaatgataaaacagcaaaattgcaaaaatgaggcccatatccacaagccatggccggccacatgcataggtttttatcatttaatattttcattattttaatgccaagtaattcaaccctaaccctatgtggtattctataaatagaaagtaatgacttcaggaaagtaacacaatgcatctcattcctttcagagaaaataatcagccacctaattcttagctcgtttgacaagtaaaattaatttctatttgttgatttctattattttgcaagctgcgtgaagaatagtaagtaacggatgatctccttggagcttgaccaaacgaaaataaatggtggagatctcattcacataagctgaaatatcatttctacagggttaagtgttttaaggattaaatatattgtagggtgtaacagtaatctaatccctttacagtgtagatcattcatatagaggatcattgatcctcataactaattaatagatatttaatatttgtctttctatttatttacttaactgattcaattttttaaattagcagttcatttatttatttattttgaaatgatccattaataaaataaataattaattcttattccacatactaaatatattaaaaattagtacatatatcatttaaaataatgtcttcacaaaggcaaatttgatttttgattccaaattaagccttgcggaaaatattaattttatatatgaaaatattaatctatcatacagatttttaaccaaggtaaacactaaagtgaggacattattttacttaattataagattagatatttt

SEQ ID NO: 313216 - DNA, 3936 bp, Cannabis indica
aaaaacgaaatgggtaaccaaacttaccatttttaccttttttccaaaaataggaaagctagagaactttccttccaagtttgaatacacaaaataggaaaccatattaaacacataccagccgaaatatacaataattaataaaatatttttgtcaattaaatatgccaaaaatggaattaacattatcaattctctaatctatcaagcatgtataacaaagttcaaatagtcacatttacaaatcatattcatttttccaacaagcgccaaagttaagcacaaaaacaatcaaatcaagcacatggtatgtaaagaccacttaattttaatatgataaataagaagataattagagcttaattatgaaattagatctctaagtacgatttattaatttatggagattgatttgaattcttggtttgctatttatgctatatgtgaaatttcatgtttttcatattttatgcccaacaatattggaatgcgacgtttggccgatagaatcacattttcttatggtttagtattttagttttagcagggaaatatagtaagacattgggaatgttgagaatatttgagattttgaaaatgaccaatctacccctaggtgacaagtatactttttggcttatgcaagggcaaaatgatcatttttccatttaggttatttgtcttttagtgacttttagtatgttaatattcaaagtttaagtagtattattaaataagtatagtatttacctattattaggaataaattaaggaaacacataaaccttctctcttcaccctctttctctctctcactctcgagaagccagcaagggtttggagattttcagcttggttctgagtattttatcaagtttatagtgtatccaatccaaggtagaatctctagctcttctctttgttatttcttaagctcaaagttaagttattgcatgttttttctaaggttaggattctgtggtgttatatagtgtttgattttgtattttgtagttgagttagtgttatttgaggttttttggagttgtttggtggcttggaattgtgtttggacaaggtttgagctttagagctcaaactttagtctttaatggtgatttgtgtttttatggctgattcttgattttattgcatgttttttgtttattgtgatgtaattaggaggttcggaagatttggtagcatttgggatcaaattgaggtgtttaggaggtttctggggtttcctgcactgaatcggtctatcggtttagtggaacctgtaggaaccagaattccaattggtccataggaaaccccacagaaccagtcttccggttggggcaattttgggaaccttaatttttcctattttcacgatagttagggtatagccatgttatccatcgatagagaaactttaatttcaattctaaatcctcgaaaagtgatttagcgtgtcactcattagttttgtaaataatgtgatttaggggcttgtaaatcgttgagcagcagttccactcaggttgaccgacactcctgcattcaggtaagaattgtataatgatatgcatatgtatttacatgtttagtgtgtatgtttatggagcctgttagattacattgatagtggtatcagtatacgaagagctaaagtacgagatcaatgctatcacatcgatacgagtagagtatgactagggtactgagtataggctgatattatggtcaatagtactgtcgtatgaacgttctagactcagtacagtgttggacacatggatagggttatagttgggtgtatgggcgtctgattataatctagattatatttatatttatggttatgcttttcttactgagtttgtcgactcacaaatattatttgcatgtgtaggtcagggcaaggttaaggttgagcagccgtgagagcgagtggatgaggattgtacatgtaggggcagttaggcttggagcgtacgaactttgggacagttggttgtattttggctagtcgttgggcgacaacttttatattacgaacttggtaatgtttgtaaatattttatactcgggatcccagttatatatatatgttatttattttgatatttatgagtattgaagcaaagttttaattactcacagttttcaataaactcattgattagcaacgagctgcacagttaatataaaattatgataatacgcctaaactagtagggtgttacaatttggtatcagagctaccaggttgtcttctaaagatcgtcatgacatgtactatcatcatcagcgataagctcaactcacgattcagtaagcctttattgctttagtagtttattttattagtatgttataagaaaagcataataggaagcatgttagtagcttgatagctgactatgcgcatgttttaatttctaaaataagcgataattagtaaattattcttgatcgcgatctaatcgggctagctcttggttttgtaggctgttctattagaatggatgccaagcaaaacacgaggagccaaggtaactcggttgggtcctctggtggtcagggagtttagattcccctgaatatacgggctgaggcagaggccctagaggcagggcacgcggccagggagatgttaacccaccgcaggctgctcaggattgggaaaataggtatgcaggaatgcaagccagaattaatgaacaacaagaagagatcagatgcctgaggcagcagggtgctactgcaatgcctgttctaaagatgcaggtgtctcctaccccggctgttgtgcaggcagggtcgattgctgttatgaaccggatggaaccactgtacgaaaggttctgcaagcaagcacctccaatctttttgggaggtcccaatgtgatgaaagccgagaagtggctggcggttattacacgaatcctgaactttatgggtgtcaccagcaatgacagagtggcctgtccacattctaattccaggacgaggccctggtttggtggggatatggtggccccaactcgagacgttactaccattacctgggaagagttctaggaattgtttaatgcaaagtattataacgaggcagtcaaaagtgcaaagagaaaagaatttacccagctcacccagaaggaaaatatgtctgttactgaacataactcagtttgactgattggctaggttggcctcaggaattgtgacagccaacttcagcaagaaagaaaagtacctgtatggattgaatcccaaaattatacatgaccttatgattaccaccgatgataacaccacctatgccgatatggtgggaaagatagcgagctgagggcatagttgagtgcatccaggagtcccgagggactcaagttattagtggatccactagtcctcctacctctggttatggtagggctggtagtgagttgaccactgaccagaagagaaagacaccatttgcacctggtggctcaaatcaaaaaaagaggtttcgaggaaaccaaggttgaggtaaccgccagggtggtttcgaaacctaatacacttacccagaatgtcccagttgtaagaagcatcatctaggtgaatgtagagggtgagaatgtttctagtgtggtttgcttggacactataagaaagactgtctgcaacttaagaaagaagaatagagactgcatcaaagcctgctccagcaagggtgtttgatcttactcaagctgatgcagaagccagcccctcagttgttacaagttagctctcggttaacaactcttacttctctgtattgtttgactctggggccactcattcctatgtggcggccaaattttttgataaattgggtagaccgtatgatagctatgataaagggtttggaaccctattgcctggcagagaattagttatctctaaaaggtgggt

SEQ ID NO: 313217 - DNA, 2344 bp, Cannabis indica
ggaagtttaattgatttggggtttattggcgtatatcggggtatttggttatgacctaaatacccctaggttggtaagtacttaagagttaagtaggaggggcattgtggaatttgtatttatgtaagagataaccttttttatccttttgtttcttttagttaggctaaatattattattagtattttatttaattgtcttaaagatagattttagaaggataagtattaatcaaccaacacttatccatcaatctctttccctctttaattgtacgttaagaagaaccaagagaaaatcccaaactaaaattcttatttctcctcatctttagcaagtttcagcaagagtaattgataaagcttgaagtgaagaaataggtaaggctctagttcttccttttattttatttcttgaataaggataggtttcaattttgaattttggtgctgcaagtttagacaaggctttgattgagttcctaggtttaaattagagttgttttgaagtttctaagcttttattgcaactggttttgttggatgaagcaagcttgagttcttggaactcaaagcttgagtgttaatggcagatttttgtttgtgatataatttaaatttctattaattgggttatgtcatatggatgatattgagttgttctgtgaagtttggtaggattcggttgagtttcgaaaggttagagatatttgaaactcagagttttcgcttcttgcaaaaaatggcaaaccttttttgggaaaacaatctaccatttttcagggcagggaaacctaaaaaaatgatctatcattttgggtgatgctcatgaacctcgttttttgtgttttcctaatatttaggatattttcacgctatttatcgatagaaaaacttctggttatgaatttaagatttagaacgggttatatcaagttgttgatcaatttacagttgttgtaacatagggccaagattatcgggcgtttctccactcaagttggctggcatgcatgagtttagattaaaggtaagaaaagtatgatcgtacaacataacatgtcatgttgagttacaattattatcgtttatgaatcattagttatcgagattaagatatggtaattaccgttatgtaatgaaaaggttgtctctttagataatggtaaaaaatattattttattggataactctaagtcgatcatgactattgatggaaattattgttaggtttcttacttgtcagttatctcattaggtaatgaaggtgacatatggaagttgagataggtattaggattttcttatgaggcaacattagttatatgaatgtttatatacttgtgaatgtgtgagtgtgactacttgattgtgatttatctgaatttgagtggatgatatttatgtactaatttgtgatattatattatttcttttcttgttgagtctttgtgactcataggtgctatgtggtgcaagtaagtgatatgaaatatttggcaaccatgagtaatgaatcttctccaacaaatgtacatattatcttatctgacaacttgagctgagttgttgggatccatgttttacgatgttctaaaatttgaattgtattttgttaaaatagtataatgacatcttttgtaatattttaaaggggatccccgatcttaaaaaatttatgccaagtaattttatgttttgaattttattagcaagattttaattaaatcacaatttttcttaaactattagtttatcattataaactaatttataaaagcacacatgtggcatccttaggaagcagagcgttacaacttggtatcagagcagccacggtcttaaaggtcctgaagactgactagatttatttgatgtgaagataagcttgactcatagtatagtaagtattattttcttacctctattatgtgattaattgtttatatgatattgttagaaatttgttttaaaaagtatgagttgagattatttgtgttatattaattatatattgattgagaaagcctggtagaaaatatgtgttaattgctcaagtaaagtatagagaaaatgattattagcatcgtaactgcttaagaactatataatcagtgcaagtcaaagatcggtgaagtattgagcaacgtgtctaaggtgatttgacagatttaacgaagagtgacagctcgggaatgatcagagaaatgcactcattacaactgcaaattgcgagaagatgtatgttatcactcagtatattatttggtgaagtgagtatataagagaactaagagaagtaagtgttgaaacttattttagcaagatctagatttactaaca

SEQ ID NO: 313218 - DNA, 2053 bp, Cannabis indica
aaagagttttatttagggcataaaacccaacatatataagatattcaaactcttctataaggagggttatagtgtattcctttaataattctaagaaaacttacaaattgttgcttatctctaattccaagattatcaagcagatcttgtacctcaacttcactctcactctgtactaagtggaaaaacctttaaaattcaatatcataaatagcaaagcaattatctgtaacagtgtcttgagtgccttggctcccaacttgcatgtaaagcttgttcaaaattaattaatatacattttgtgtttttatatccaaataattttcttcattttatcaatatggccaatccattttcagttatgcaattttattgatcaaattcatgagtaaacaaataccacattcaattgcaattgtgtaaaatcgttcattttctaagcctagcactaactagctactactactactagctgcattgagtattgatgcttcttaaaggggataataaactcattcatcttcaagaagcaagacccaaaagttaagatctgagtattcctaaacaaagttaaaactttaaacactatcaagaataaactgaaattttcatttctatgttgcttttaaagtacaccactaagtctaaatcattgtacctataataatgttgacaggcagtgcagagataccaagagtaattgatattaggacatcaagcattaagtcaccaatgagagtggaaaaagccacctagagctataatacctaagactccaagtttatccaaacagacaaagttgacataataataataataataataataataataataataataataataataataataataataataaataataaataataataataataataataatagtagctagtaagataagccagaataaaccagtgcaaagcaattttcatgaaaggacctattaaatcaaaatgaataccaaaaggaaagattgatcgaaaagggtacctaaaaacatatattaaaatgggttttggagtaataacatggcttgataatgcatgagaaatctgtgtaagaagaaaataatgtgatgtgattctaattgaagaacaacaagaacagaaattgcatgcccacctacaataatcttgaagaaaagaatggaatgagacattgaaatcaaaagctctttctttaactcatatcgtaatatgaacaacacatacgaataagattgtattttttttgtttagttttgtttaagcttttacagtataaaactcagaccaatttcatttcctataacaataaacaacaatatgacaaactcagaaagagcttaagacgaccagaattttcctaggcctttcattagtattagagtcaacatttcacaggcaaatgaaaccaatataggtcgatcttggaataccttaaaagaagttcttcttttgaacaaccagcttacgggttgtctccctttcaagattgggtacttgaactagacaacggtgtttgatacggggtccaatctcttggttggaatggagacaggctatgcgctagggcaggcagttggagatttgtttggtgtggcggtcggtggctagggcgagctagtgagggcgatcgtttgaagttcgaacgaggtcggctgccgacaccagagtggaggctgtttggattttctagggaaaatgaggagaagccgagaagaaaatgagatttggtgttattatttttatttttttgaaataggtgaaattgggatttaatttagggtagattcaaatttcctttgattcaaatttccttttttttttaaaaaaaatatattaaaaagttaaaatgtttttttttaaaaaaatatattttaaacagattagatcagatctgatgcgtaaaaaaattaagcggggtgggtcggatatgatccaagatccaataactatctgaatgtttcggatcagtaatgatccgtcggatcggatcaatgacccagtccgagtgaatggatctttttgccatgcctgaaagagagagagagagagag

SEQ ID NO: 313219 - DNA, 3206 bp, Cannabis indica
tgtaagagctttgagagaaaaatattgtgttctttgttctcgagttaatacaatctaaggggagtaggctattaccatactaacggggttgaacctctttaaaatctggtgttctttattatttattggtttttgctctgtttctattatatatctaatcgcttaataattgactcattattgttgactaaaagcgatgtcaacattttggtgctttcattgagagcaaaaacccaagtttgttctttgttgcatacaaaatggtggtgcaaactcgcagaggcctggtcgatcagagccacccaatggtgatggatcctaccgtagaaatcactgggaatacgagagtaccaccaaggaccaatcttgaacaggccaatacacagccacctactgtaggccatggtttgacttcccctctgattaggtacacatcaagtgtgcaagagactaggaatacgagttctgctgctgaccaaaccactcccaacactggaatcccatccaccaccaatgctcagaggacggtgggggatgactttgagattcaaaacctccgtatagcccttggactcatgcaaggccataataacgccttacatcatgatcaaaaggatctccgtgctgctataaacctctcttttgatgagcaacaatgccaattcatagagtggagggacaaggagatggagacattgaaagctcagcaagcagacatcaatgatcgcacaaggcaagccaccgcactgatacggagggcctaccaagttgctaatcaggaaccagttaccgcatctagtatcccactgagcggtacagaagagtatgttattgggcataccacccaagttcataatggtcagccatccaatccccggccacaggtccaacttgtgtaccaagcggtagacagctagatcttacctggccactcttcaggtggagttatacctaataacttcatctaaattgaaagtttttgccaacccaccagccgaactagtcagacaccgagaccacctagtacctcagtatttaataaattaggtgcaacccatgacctcagggctgacctaaacaaaagaagaggtttagacgaacaatacgtccaaccagctgtccaactaggcatctgcatccaggacccaactctaagagatcctgatgtgacaaaggttggtcaagaggctgaaccagttcatccatctgtgcaagcacaattggatcaactgaaaaatatggtacaagacctaaccggtccaaaactcaccgatcaccagctggaccaagcacatggatcacccttctccctagagattgaagtccttgaattaccccttaaattcaagatgttgacctgtaagatgtatacagggaaagaagatcccttatcacatcttaaatatttggagatgtagatggatctgcagggggtacggggtgatgtgcggtgtagaatattccctgctacacttgtagaggccgcccaacaatggtactttaagctatcctcgggaaggtttaattcatggaaagccttctcctcagagttccacgcacagttctcttcctctcgtcaactcccctcgcacgtagaggacctggtcgaagtaaaacaagtactaggtgaacccattcagcctacataagtagattcacgacagaggctacaaaggttacagggttaaccgaggagggaaggttggctgccatactggggggcattgagccactcggagaactgtggaaacacatcgaaaggtgtggccccgtggggtcgatggtagaatttctagatcgagcaaatggatttattaagcttgaggaggctattcggcgagtggacaccgtcgggcataagaaaggccagcaacatatctcctcggcaggggcacctgcctaaaatccataatatattagcacctcaactccgagcgggaaaaggtctaacaacggtggtaggcaaggcaatgggaaaaaaaagaaagttcatagccattaccgaacacaaccctagagaaaattcctccaagtttattgccttctctgtcctaacagacgacctagagacgatctacgcaacaactcagtctatggtcccgtacaaaaaccctgctcccatgaagaaggacgtaagtaaaagagacacgtttaagttctgccactttcatgcagattatggccatgacacaaatgagtccaataacttgaagcgggaaattgaattcttgatcagaaagaataacccgcacttgcaaaaatacgtcaaggccgaccagaatcaaagggccacccaaacagacaataaccaggatctactaatgcccccgctggtggacgtgcatttacatgtcattattgggggcccacatccagttggggactcgggcaaagctcagaaaaagtatgcccgagccttacagcataaataaaaggaaagagttttagttgtagaggagagaaagctaagaataccatgggtaggggaaaccactataacattcacataagaagatgttatccacgttcacctcccacgaaatgatcccttggtcgtggaagtatagatagcaaacaagacagtgggcctgaccatgatagacaatggagcctcctcaatttaagataacatatgagaagatggggctccagcttaaagatttactcccctatacccaactggtgtatggtttctccagccagagtgttgcacctttggggaaaatctgtctacccctcactgttggacaagctccgaggagcataactgtgatggcacaattttcgataattgatgttccatcagccttcaacgtcatattaggttgaccggccctatatgacttgaaagttattacatcagtttttcatttgtgcgtcaagtttccaacaaagaatagggtagggtgcctcaaaaggaagcaaagaatagcacgggaatgctataaccttgccctgaccaaggtcaaaaaggagaatacctccagccagagttcaggcaaggagaaaagtattacctaataataagttttccaaggcggggatgaggacgtggatccccgactttgggaaccaaatacaaatgtagggccagtggaagaactagaagaggtagaaatcgacccaaatatcctgaccaagaaactcaaaattggcaaaggtttattcctcgaagcaaaattagctttaataaaaattttaagagc

SEQ ID NO: 313220 - DNA, 731 bp, Cannabis indica
attttaatgattataatttaggggaaaaattatagggtatttaaagcatggaatttcaaatttcccttgttatattacatatgatatgttcttatatataacaggcatggtattagacaacttcgaactgggtgggctgatgggcctgcatatgtgacccaatgcccaattcaaacaggccaaagttatgtgtataattacactattataggacagagaggcactcttttctggcatgcccatatatcatggctcagagctactctttatggtcccataattattcttccaaagcgtggcattccttacccctttcctaaaccttacaaacaagttcccattatatttggtaatcaacaaaattaagattataagtagataaatatctttattcaagtgaatcaactaataactagagtaattgttatataggagagtggtggaatgttgatcctgaagcagttattagccaggccttgcaaactggtggaggcccaaatgtatcagatgcttatactataaatgggcttccaggcccattgtataattgttcaactaaaggtacatattgcttctattttagacaaccaaacatattactcttaaaattaattgaataaattaagggaaatttacatggtatactaacttttgctaattttttataaaaatactgtcagcggtatttttacttttttactatgttttttttaagtttcatactgcagtat

SEQ ID NO: 313221 - DNA, 1050 bp, Cannabis indica
ataattcataattagccacaactttttttatctttagtcacaaattttgttacgactaaaagtgagattttttatagtgaatatgagatactctaaattctttttccattttaaagtttctttataatttactatttcatgctcaacattacatttatagaatattattacattacattaatagtgaatattttattaattgtttagggttttaattttttaatattaatattatattaagttatatatatttgaaatgaataaatatattaaaaattaaaaaaaaaataagttttagtaatgtattttaaaaaattatgtatgatataatgtgaaaatttcaggtaaaatagaaaaaataaagtcttaataacatattttgaagaatacatattgtcaaaatttcatgataattgcttacaaagtcgagttgggttgggaaacaaactgaaatacatatttaatgatgggcaataaccatccaataaagaatgttaagccatagattaatgtatggttacagaatgtatgttgcaccattataaagtgagggcgggcctaagcatgggcagcttgggctattgcacaaggccctaattttttttaggcccatttatttttaaagaaaagacttattttttttttcctattatatatacataaataaaacatttataattaaaaatttatgaatgaatcttaaaaaaaaaaatagtaatagaattgtagttttaatgtacacggttttttttttttaaagagtccaattttaaatttttttacacaaggctccaaaatgcttaagtcgggccctttataaagtgacactctttattggtggacttaggatgtcactcaaagaaagatgaaataaaatattgaaacaatataatatagaaatgttattatatatatatttatttagaaaaggtagatacttattttcttctacataaggtttttttattttttttatatattaagaagaagaaaaaaacacaggcaagagccctcataaagatgctacgtactgtacggactatgggtgtt

SEQ ID NO: 313222 - DNA, 1060 bp, Cannabis indica
ccattagagtcacatgggtgaacttagaactttttatttagggggaaaatcatatgcttaatttttggatattaggattaggcaaaattatggtgttcggccattttattatttaagctttgaagtaagggtaaattcggtatttttccttgaggataagtggattattccactaaatggcagctggccactattttgtgaatagataaacttaagtttatccttagttatctaaattaagttaataaaaaaacctaaattgaaagcaaaattattttttgctttctttctctccctttcggcacactagaaccagaggaggaccagccaatctcatcaatttatagagatttcaacaaggaattgaggtggttcaagcaaaggtaaaccctagaaaacccttatcctttgaatttttgaggttttgctaagtttaagtacgcaaaatgagaattagtttttgtatgagttaattgagcattattttagttttctcagttaattctacattagttggagctagtttgagtggtttttagtgggttattgagtgttgagtaagtttgagttgaaaaattcaaacttggctcaataatggttttttgagtttttgtgtatttttgttgctgcttttgcgtagaaactgttcttggatgatgttacaagtattttggaaagtgtggttgagcttggggaaaaatttaatgtgttttaaggtttttaggcttttttgtagagaaccggttaaccgttttccaaacaggaccctagaaagcagtttgccgtttggaaatttggtttaccagtttgggcagtctctagagccttaggttttgtgttttttagatatttagggtattgccatgctttttatcgataggaaaatttttagttttgagtttagatcccaagaaggttttagcaagttatttaccaatttatgtgattgtggcatagggccttcgctcagcgcgtgattttctattcaggtcgactgtcacacttgagtttggaaacgaggtaagattagtatagaacatgtatatgtatatgtgtatgt

SEQ ID NO: 313223 - DNA, 971 bp, Cannabis indica
caaaccccacgatttcaggggatgattgttgtaaagattacaatcaactctataattaactgcctgactatgtacttataaatagaggcaagttagactgaaaacgggacgaaaaaattcataagagaaaaagcccaagaacagtatcagaaatttgataagattgactcatggactatgcagaattttaactgcaaaaccacgtaaaaaaaccttcgtgttaatcattttcttcttatctctttattgtttttatttttctatgcaagcttatcactattaaggctaaaatttagttaacgaaaatctgcgttaacagtttggtgctttcattgagagccttcgtgtaaaagctcagaaaaaaccctccttacatataaaaaaacaatctccttcatggttaacatagagaacgttaacacaccacatgaagaaactcatcaccgtcctgaatacgagcccacatgctctagaaggccttccaactcatagtctaaatagaccacatgatttaagaccacgaggcagacctcgtggctcatgaaccaggagacaggaaaatactcaagaagaacaacctggggaaaatgagattccccttgaaaattcgaatgatcagccagaaccctctcatagaattgagaatgggaggcgaccagaaactaacaaacaggaaattcctcgtggaaatgatgaagaccctgggacacaactcgggggacgtaggtcaccggtgaggaatcatcaatcttcttcccgaacccatagagagagagagctcgtacaaaccctagtggggcaaaatacgacaaaccacgcttagagggaaaaccgcgcatgaagaagcaagtgtgatctcggagcgctcaaggacccacagttgatcaacccgaggaagagagagtacccgtcgtgctaatgatcgagaaagtacatgaaccagtaaatctgcaagtcactcaaggacgagg

SEQ ID NO: 313224 - DNA, 3178 bp, Cannabis indica
gtatactccacacatctgaatggtaaactttgccaattccctagaaaggacataacacttaacgaaagtgtaagtataccttatcgtcgattaccatgtcagtctaaatctagtgaactgacaaatcatgggaattaaacttttgaacatataatcatgattatattccactgtattgacgacactataatcatgaacaaatatatacatatttatatatgtgttctggacttaaatagaatttatacattaagtataatcatgaaataaatcatgtgagccatgcaacataaaatcgacttctaatcttttattaattagtaaatcttattatattagaatgagttttatttagggcacaaaacccaacacaaaagacacctactgattgatgaacaaaagtattatgacggatggttctactacgccgtgataggttatgttcacgcttgaaaatggttcaaatgatcaagtcttgtaaagcaagcgagaagaggagatcaagtgccataactatggtgtgaaggacgaaaaatttgaaacaaaaaatgatgggcgttgtgactatttattgagtcctgagaagaggtgccttccacaagaagaaaatgatttagatcattcactaaagtgacacttgaaaacctaacaaatggggagttgagaaggttcatcgattccaaacgtttaacctccttcatagcatgcatcgtaaaaagtgcttattaaatgaaaggtctacttaatggattcattctcattttggtgtttccccagccaggcacctagtacgcgcgtgaattacaagagtcggcacttaaagtactatcagtgtacaacgaggataatttcttctactagtgacgcgtcagatgacgaccactcgcatgacatggtgaaaaacttgaagatatgccatgtgttggaagccaatcatgagaaagtaaagaaacacttcaagctctcgaactataagacatcccagaagcttgggggtaaatgttatatggatatctgaagcttgacacatggactctaatctaggaagcctcaatgctaattggtcgatcaatacctttgaccatgattcttagaacgtgggagccctaacttgcggaaagcgcctccatgaaggaaacaccgcatgcaaggcagcactgcgggtaacatctgtgatttaaaatctctcccagttccgagtattgaagccaaatgctcccacaggactgaagtcaatttctcccgaaaaggacaaggtcttctcacaaagcgcccatataagtcgtggaagaagtctagatgagttgtaaccctattttgtatcacggggaagctcttcatgtacatgtcagactgcacacatggtagctgaggctttttcaagttcggtgtcaggatttgtcccccatgttatgtcgtagtacaaagcctgcgcgccaagtcgatcctgcctgagtgatctgacgaccattgataagggcaattcaaaagggaagaccctagggcaacacgtatatgatgaccggactgtacaagctgacacccttgaataccatgtgatgaatcagccacctaccaaatgaacgatcagattttctctaagtatgatcagtctagccaatatgtgaagggaaggtggcttataaattcccctacattccatatgatagggaaactctttgaagacataaacactatatactacttatttaaaaactctacgaaaaaaaatttcctattaatcttcttcttcttcaaaaggaacaagaggaataaagagtttcagtccattgtatattggtttgtattattattcgcctgccaaagtggcatttaaatagacttttggactaaggatagttaacgcctgagctacgtaaaaattttgtgtctattatttaatatgttatttctttcttaagctctaaatattcagtttttaaaaatctcggtaaaaagataccaatttaaattcttttttataattaccaagtaaaattatcaaacaatttaaataatgcataactgtagtaaaattatttgaatagaaatgaactttgttctatcagacacaaaatctgacaaaacagaattaaacaatagaaaataaaatgacacacaatattttatacgtggtatcaacaaccctttcaagttgctcctagtctacgggaccactccaagagaataaaatttattagatgaatctaaagtgattgcaaaataaaattgacttatataaataaagactctctttttgaattttccgtaacaattctaatctattcttctaatcaaatttctgaagtgtcaagatcttgatctcccttcaaatcgtagcacttgcacacttcttctgaaagagtgactcactggcaatcttcctcccaaagagtgtctaacttgcacttttcctccttaaaagtgtctcacgaacaagacttctcccgaagcttgatgagcgatatccaaggtgttcaaactgcacaattttaacaagaaacaatacataataacacaataataaaaatttaagtgcctgttagactaacgttcttcacacaataaagaaattctctctaaatttgaaagtaaatttagcaaatgatataccaagagagataaaggaagccaacgacctaagtgtgtatttatacacataaaatctctcaaggttgtggtcaaagaactaagaaaaaatcaagtcaataaatgaaaagatttcccaaataagaaagtcaaaatctatttaaacatacaatttgtctgttcgaataggtacattgaacctcgacagtttttcagcaaagtttccatataaaataaggaaactttgacaatctttattcatacacatgtacacgatttttttgctaagaaataagataagaatcaaataaatataatgatgattttccttcaaaatacaaagataatatcaattaatctaaataagaaaaacttatgtttattcaaaaaaaaaattgatttgagagacttttcatacaaagcaaagagagtacatttttgaaattcataaatacaaatacaaaattatttttgaaaataccgtaaacattacttttatctattttatcaaatatgccaatagagaattttacagaatgtaatggaataaaagatacattgaccaaaatattcctattacttttatttt

SEQ ID NO: 313225 - DNA, 703 bp, Cannabis indica
ccgcttaactttaatttggaaattagcagataattagggtttaattatgaaacttgtatattagttatgaattatcagtttacggagatttatttgaattcagaatgcattttatatgtcatatatgaaattttataattttgcatgttttgtgcccgccaacattagaacgcagttgtctctgctctgtttgtgaggctgaaactgagactcatgaccacctatttttcaattgtatattcactaaacaggttgtctctgttatcttcgagtggttgggtagctttacttggccaagatcgaccatggagctgctgaactggtgcaggaatttgaaccagcagccgcattttagagtgctgaatactgttgtggcagctacattgtactcggtttggaataacaggaacacttgtgtgtttgatctttcttatgctgcgccaagaagagtgagcttagaggtacggaaaattatttagctgaggttgttaatcaagggtccttttgatgattgtaagaaacatatgtattttcttaatgtaattaaaagttggtagttgtgtgttgtagctgcctttctccggctgctgccgtgttgttgttggccttgtgcctttgtgtgtattggcttgttttttgaataaagtttcccctttttcaaaaaaaaaaacattggaacacggtgtttgactattagaatcac

SEQ ID NO: 313226 - DNA, 1151 bp, Cannabis indica
tttaatcccaatctttttcttccaaacacacctaaaaatacattaaattaattagaaaactaaaataaaattaaaaataaataccacataacaacttataacaaaataattataaaaacacacaaaaacatataaaattacaataaagctaataacaaagaccaattaatgaataaaaaaaatgtttatgttaaatttattgtgtctaaaccacttgctaacaagattaacttcttaaatttattctttcaattccacctgcgtacaacggacaacaccccaagaaaagtcccatgcaaggtttgtgaaacttcgcgaatagcaagtgaccaagagacctaagtctgcatggtcacttggggggcacccacaccgtacaatgcatcaaactagcacaaagaacttttgttgagaaattttaacgcttagaataagctactaaacctacctttaagttgtgcaagcatacttcggcttgacaagtatatccagacacttacatgtcaaggccataagaatatagctaggattaaagaccgcctagtcgatcgcacaatacatgataaaaagtaacagggtcaaacaatagtagtgttcaaaaacagagggcctatagggcaaatatacaaacatgaaggccctagggctgaaaataagtaatgttgtaaatgtaaaaagccacaggccatacaacatgaaaatattgtctatattatagaactataatgttgagtactaataattgaaaaatactatacatgtgtgtaggggcaggtggagccgatctgaagctgcaagatcaagattgtcggagtccaggttttccacagcatcaacaagctggtcagcctggtggtcaatatcttggccaactacctcctcagtaagtgggccagacagcctctcatcatggtttcctgaggatgacccctctcaataaatgatagtctggtctgctcccaaccggctctcgcagagcagctttcctcaagccaactagctctctaagaaagcctcactgcccatgtatgacaagtcagctctggggttatgcaacttgaactcatagatgagttttgaggacaagatgattgtaatacccggaattaagaaatggattagcaaaaccctaactagataattatgtataa

SEQ ID NO: 313227 - DNA, 1448 bp, Cannabis indica
ttaaaaagctattttttgattgtttaccatacacatttataatccaactaataaatgtaattatttactacatttttggtagcaagaaaagttaatttgattaagataatgtttaatttcaaaataaaaattattcatcatttaaataagaaaaaatgttgtacaaatataatttacactgaggtaatagaagaacctatattatataaatgaacgcacattattactcttaaatgagatatgttactacagtaaagatatctcaactagtacactttttattcactgagaaatttctcagaaatttatatagacattaatctatataaatttctaagaaaattttgaaatttgacaaaaaagttacaaaataaatagtataaattacagtctacaatcatgaataactctcaggccatcaacaacaacacactgatgggatgatcggaagatgaagcgatcctgcaacaaaaacaaaatatataaacccataataatagaattatcaaactgaaatctaaacagctgccaaaacttagtacagtcaacaaactccctgatataaacatacagaaaagtcattgttagaactttgaaaaacagtaaaacctgtttgcaaagcttaaaattttgaaaaaaaaaaatcattatgacacactaagtacctcagaattgcagaatataacatcaaggcttaaaaagccatttcagtcccgaaagatggtgttaattggtaaatgatatcctcattggtactgtaaaagtttgtacaacttagcactataaagaaataaaaattaatgaaaatgcctcagaattgcatattaacagcaaggccaaaaagagccattcagtcccgaaagatggtaattgatgattgatatcatcatgggcaatatatatatacatgtaaaacatcaaagcaaattaatgaaactgtcgtaatacatacaaaaacagtagcaaatagaaaaagataaaaacttaatagcaaaatgtaaggcccatggcaagtccaaagtagtaatggcagcaaagccgctctacaaggtgatggaatatgagacaaatcaaaacggaggaaatccaaaaaggaaaaccatcacaatgttgatattgatatttgacgttaactaaggaaatatacaaacataacatgtttgctcccgtattgtaaaggatttcttcgcagagatcctccgtcaaaatatgacacaagaactaaataccaatcgaaattataataaagaaataacaaaggagaagaactaaggtggcgtttggttggaggtaatgaaatggaatggaatggaaacaatttttattccattcctttgtttggttgcattttcaagtattggaatagcattccaatggaatgctctttccaccattttggtagaatggctattccattttaaaaataaaggaatgaccattccaatgta

SEQ ID NO: 313228 - DNA, 707 bp, Cannabis indica
tagtataatacaaaaaaaggaaaaaaaggaaaaagaaagataatatattagtaacacgtcatgcattgccctttctgaatagatatcaataatacatgcattacaaattttgtatctcgattaggagaaaatcgataacaatacaaataaaataacttgtattataaaatttgtataaatttctcgatataaattttgtattatcgtgcaaatgcgtttctcattaattatattgatgggttgttgggcaccaagccaaatgttagattgtgtgaaagaaggggctatttataaatttaattttttagaggaattattatttccttcaatattatattaaaattcttaattagtatatatatatttaaaaaaaacacaccacaagatcttccaagtaaggtagaataaaacttcagttttccacaagatcaacggtgctttgcgttcacattatttcaaatacataaatagtaaaaaagaaaaggataatagcatatttatatatatatatttctaaatatatctatatagggcaagactatggtaggacctagcaaaagttccctaccggtagggaactttttatgaccattgattttagatcatgtggttattatgatgtaaggtgtatactcttacgataggactgcttgtatacgattaaaactttaaacatattataataatatttaatgatatttattttt

SEQ ID NO: 313229 - DNA, 799 bp, Cannabis indica
tttcttcattttatcatggtatcagttgcataaaacccaagccatctttcttcttcatcttcttccatggctccaaggactaggaactccatggccgccgcttctgtctccgaacctaccaccatctccagccacgaactctcctccgccgaaaccatcatcgtcgacgtcgaagctccgccctccctaccgccgactactcctctctcattggacacgatcggagctcctcctcctctgtccgatcctcccacttctggtgttttcggctccggtcacgttgccgatctccccattagtggaacgatcggaccaccctacacagctccgatcagttccagcatggcgtcggccccatccttctcgacttccctaccttataatccgcttctaccattctctgccaccaccacgaccccgacagttcaacagacagctcctcttttttccggcactgccactatcccggctcccaccatcgaccaatcgatccccgccagcttcggccaaccgaacccttcttttctggtggtaacattcctaaccttggacatcaaggccatgtgccttttaatgataactctttgtttactgctaatcacggcttttctcgtgccgttctttatcgaccttcctatgatgagcgtactccgcttcatctaggaactagagatcatccaaacaatctcattgcttcatttctcttgactggtcaagaaaatttcaagtcatggaagcgtgcagcctctataaatattgctgccaaaaacaaaacccccttcattgaaggcaccatacc

SEQ ID NO: 313230 - DNA, 777 bp, Cannabis indica
gggcacaaaacccaacacaggcatccaactctcccactctccagcccctgtcccaacttcaatacaaccaaataacaccactacaccagcccctgctgcatcttcccatcagcctatacctgaaaacaactctctctcctctgcccccactcatatacagcagccccccactattataacctctcttcatccaatgcaaacaaggtccaagtcaggtattcataaacccaaggctctagctgctactataactagttctaaccagttttttattgtgccaaaatctgtcaaaaaggctcttgtagatcctcattggaataataccatgtcaactaaagttagagctcttctcaagaacaagacttgggttcttgtgccttaccatccagaaatgaatgtgcttgacaacaaatgggtgctttgaataaaatatagagctgatggatatgtggaaagattgaaagctcgtcttgttgcaaaggggttccaacaaacacctggagtagattactttgacacctttagtcctttggttaaaccctctactcttcgaatcatgttcacaatggctgtcacatataactgggacatacaacaggttgatataaacaatgcttttttgaatggggatctcaatgagacaatctacatgcagcaacccaaaggttttagaagacaccttataccctacacatgtttgcaaattacaaaaagccttgtatgggctaaagcaagccccacgggcttggtatggcaagctcaaggctgctcttctct

SEQ ID NO: 313231 - DNA, 773 bp, Cannabis indica
acaagtagatttgttgtctcttcctatctctctccctcctctcctctccatccacccacctctccctcctaccaaatatagtgtaatattaagattgttttatgttgttttaatgtatttcaagtaataattaatttgtatattaaattattatatttgtttagtactttttttattgttatttagttgcttaacataaaatatttttacataatttttatttaaaatataataataataataacaaatgatattatactatttataaagtatatttttttaacaaaaattattatgttatttattataatattttttttgacattataatacaaattggaattaacttatttttagtacctagtaatttaattaaaataaatatattttcaaaataaaatatcaaattaaatcctactaaatgagtatgagtaatactacaggcacaaaagttgcacatatttttaacatataaataattatttaatttctaccatagataattatatattagataattgagattaattattctatgtagataatgtgtgaaatttgagtgtcacaatcattatttattcattgagtacatgttcaatttttttatgttatataggtgattaatataagaatattttatgtatggaaataaattttttatttaaggaaatgattttctatttaaagaaataaaataaataattgattttctaataaatgaatattttatattcattgagtctagacaaaatcaattatgtaatattctatat

SEQ ID NO: 313232 - DNA, 1217 bp, Cannabis indica
ctaataccatggatgtatcatattattacagagtggacgtagtaagaatctaaaccattgtagattttgatcattaattaaaaaaataaacttagacaataagataaataatagacataaacagaataaaaataatatatatatatatacatttatatttatatcatgagtgtatgcacttcccaagagaatgtccataataataacaaccaaaggaggacagcaatactctacccacactttcgtcgcaatatgacaatcttctcaaatctctacaatcgttttctaatagttttcgcccatcatagccaagccacgatgatcggaaaccactttggataccgtgcccggcggagtggctagggcaaatgaaacattattaagcacaaataatgttatcagcaatagtacagctaaacatcttataacttgtttatgcttttttacaatactccccatcttcaaatttttctttgatgaactaaataattgtgtaattaagaagttgtgggcttcatcttattatgtagaatagtcccttgccaatattaaattattgtatgactttggatctaataaatgatcatatgaacaaatattaaaatatatgactcaaataattaatatttaatcttatccttaatcatcaattagatccataatccatgctaccacacgtagtgaaattaaatgtgttgtgtgtgattcaaattaatgaaattcatttttcatcattattagttgatttaatttattttttcatatttcttgtggctttattatctaatttttttgggtatctctttctcatgttagcggcaatttcaacattgcggctcatggattggttaagtatgctcttaggatagatatgatgagcttttttccaaatcgttttgttaagtggactagctcttgcatcatggtggaggagatcaagctccttcttaatggtacagtggctggaaaattcacaccgcagcgagggttgagacaaggagacccgctctccccggctctattcatccttagagttgatgagctgatgttttatccaaattgattatcgataaggtcgagaagggtctaataaaaggttttaaaatgagaaaagatggcctgaccgtaagccaccttctcttcgctgacgatatcgtcctctttggacaggcaacagtacgtgaagcaagtcaattcatggacagtttaaatgaata

SEQ ID NO: 313233 - DNA, 976 bp, Cannabis indica
aatatttaattaattattttaagaaaatagtaagttataattaaataattctaaaaaaggaatgtctatttaattaattattttaagaaaatagttaattataattaattaaatctaaaaaaagaaagtctacctattagtaacctgctattacaggttaaagaaaaatataactatacggttacaataaaaatgtaaccattaaatagtcacccatatatatatatacatatttttcataaactttagtactaaggatggaggattattgttgctaagaaaatcaaaatgagagtaccaatttgtcaaaaataaaatttctaagacctacttatggattgagataattttatttttaataataatagaaaaattatagtagtgtacaagtctattttaataataataattaatgataaaacttcaaattatgttttaaaacaatatatgatgattaaattagacaattttgtacaattatagggaaaaaaaaattggactcaaatatctatatcaaacttttatccaaaaatatttttaattttggactcactacaaaatttatgaaaaaagtatatttttgccttgaatttcgtagatattgaaagaataatttgtgaatctcgataattattttaattaattaagaacatatttatatcaaacattgaagttataaagttggataggttaatattttgtaactaggattaaattaagaacatttaaagataaacttttatgaataaaaatgatttttactctaactatttcaataaaaaaaaaaaaaaaaaactttaattgaaaagtttttcaagtagttactcaaagctcctaaatgtcatttagacattatttttgcctaataacaaatgttattacatataagatttttttatatatatttttacgttgttttatataaataaaacaaaaagataaataaattacataaaagtaaccgaaaaataacata

SEQ ID NO: 313234 - DNA, 1438 bp, Cannabis indica
cacgggttttcaattttttggtttttttggcagcgggtcggggcgggtagtcgggttttttgggtttgcatgtctaaatgttcagccctagttctgagggctgcttcgcaagctatttgtaaagttcttaaggctaaaagaattccaaatgaggttgttcatttaggaatccctttgttcactcgaagaaggcattcaaatgattttacttttgtgattaaaagagtgaaagcccgtgttcaaggatggaagtcaaagatcttatcgaatgtagggaaggctactctaattcattcagtgggtacctcaattgcttcatatatggatgctgcctcttttatcccatattttgctgcaaaaaaaaattgacaaactccttagtggcttttagtggggtgacaagaaggaaaaatctactttacatctgatgtcttggaataagttattgcggcctgagttggttggaggtcttggattccaacaaacctctttaactaatcaagtatttttggctaaaagaacttgctccctcttatggaaatccattctttggaccaggcgttttcttctaaaggggttatgtatgagaatataatgagacgtccatctagtttgataattgggtgccaagaggggagaaatgttctaagcctttacgtgttgtcgctgaaggcgtctcttcggttagccttttcatctacaatggttattggaatcatgatacgatgaacctgtgtgttgacactcaagaggcatttagagttgctaatattcctctcactagacttgattctcgtgattcttggttttgggagtcgaaccaaaaggtttctgtaacaccgtaactagcataggtgtgttgacgtgattttaaacgtactgtgcagctcgttgctaatcaacgaggttattgaaaatcgtgattaattaaaattttgttatttaattaaaacttatatattacatacaaaatatttcgggatcctaattacaaaacactttacaaaagttctagttctttacaaaatatttgtcgcccagcgactaactacaaaagcgctgttgtcctgaggatcgtacgctcctaacctaaccgccccaacatgtacaatctttattggctcgtcctcacagttccttagctctggccttgcccttacctacacataaacatagcactgtgagtcgacagacttagtaagaaaagcataatataataaaacatactaaatcccgggttataactaagcgcccatacacctgaccataaccctaactgaatcagggacgtccatgacaaagtatgattaactgcgaatccagcctatactcggtactctagtcgtaccgatgtggtagcagttaatccatactacttgatagcctagcatatatctgttggcatctcggtgcaactctatgtacacctcactgttgc

SEQ ID NO: 313235 - DNA, 1888 bp, Cannabis indica
attattaccgaaaatggaagaaagttacaaattctcgcttccaaaaatttcagtattttgcacgtttttttttaaaaagaaaccttttggttgcttttgatgtaaataatatatcaatttgttactttttattaaaaaaaaaattgattcaagataattttttttctcatacacatttagttacttatgttgatctgtcaattttaaaattaatataaatgtaataattttcataatgtaactaattctattatgtttaagatactatttggtaactttataaattttcgtattaacatattaaaatttctttattaaataaatttgttattaattattaaaaaactaattattagtatactatattgtaacttttaaaagaagattttatggtaatttatgatgttacttgatatgttaaagtttattaaatttaagattttattactttttgttacaaaatataaaaaataaataaaaaagtaacttttaatacaaatcgtccttttcaaagacagtaaaaaataagaaagatgtctaaatgttagatgaaaagtaaaaaaaaaactaagagaaataataaattaagagaaaaagacaaaaaaaaataataaatgaagaagataataatgttaaagaagaaaaaaaaagtaaaaagataaataatggaagaggcttataattttttttttagattttaagttatagtgtattattttgttgtttaagaaactttatagtctaataactcttaatttatttagtcagttttttttttagcaaaaaaatatatgctttcaaaataataatcttaaaaatagattacaatagtgtaataattgtgtctaaataataacttgtgtggctaaaaaatcttttgaaataaaaaataaagaaataaagaagtgaaagaatgattatactgatttgtttattcacataaaaaaaactgattgtatatcaattaggagagtgaaagacatgtaaatgaaaaatatataattaattttgatttcggtaagcctataacggtatttaagacaataaattagtcaaacacaatttcataaataatttgtatttaatgttgatatgtgcaattatttctatataattctctactttcatatccatttgtgcaattagcttcttgttggtctttgtgtctatttgaatggtaatcttttctttaattatatgagtggtcttgtctatcattcatggacttattgcttattttcaaatagtagcaatctctccacatatgtcctacccttccacaatagaaataactatttggatccttaggacctatggacggtgaccttccctttccttggtttggtccttttcttggtccacgactttgaattctacccttgcagggtgttttcttgaacttgtttctcccctgactaaaattcaactccccatttgagttttcagatatttcattcttcatttttaagtccttagacttcaaagcaaaatgacatcttctagtgtaattttagttctgtaattttacttccttgtaagattcttggagagaattcaagataatgatggcttgattcttcatcactcaaagtctcattttcacccaagtttgctagctcaatgtgcatccttaagaactcatataagttcagatccagagactttgttggactcatcttaaaatcaaagattctttcctttaagaaaatcttcttagttagagactaagggcccgtttggtacgcaggattagactcgattggactgaaaagtattggactggactggacaagattggattatgctgaaagtaatcctgtgtttggtttaagaatggactggactattttatttatttccttttagaaaaagaaaaacttaaattaaa

SEQ ID NO: 313236 - DNA, 833 bp, Cannabis indica
tatctctctaacaaaccatataaaataatacatttttttttttctagaaacataaagttaaaaccaataaatagatcatatgaaaaacttaccaatatgaaaaacttaaatagatctatctaccattattgttgccgttgctcagttactggattcttaaacaaaaactactaaaacttatataaaattaatatttacgtggctcgccacgtaactctcatctagtatataataaagtacgtaggtattatttagtaatataatattaaaggataatgtttgctgcgcttttctgtttgtgttcaccgttaattaataattaaaatgtaaaaatatattggttggcacaatgtatatgcaaaagattctaaatatagtatcttcgagtaataactaatatagataaagattttacttattattgttaaaaaaataaagaagaagaaagaagttttacgtaatgaaatattgatacttgttactcccaaattaattgggttggacaatgttactctctagatctattttgtgatattattgttctctctcatagaatatagtgatacaaatatatatataatactagtggcgtcttacgtgcctcgtgcctcgcacgtgtggggctcttaaaaatatttaagcacaactattttgaaaaataattagtattgtatcttcaaaacttataatactaccaaattgtatcctctaaaatgtatatcataatgataaagttttgtgaactattctatttacaaaaatatagtacttttgttagctttgattcttttttatcatttcacaattgatgtgttataacgtccccgcttcaa

SEQ ID NO: 313237 - DNA, 921 bp, Cannabis indica
atcggatgacaaaattcaatatctaaaaaataattggattggatcggttgtgtccaaattcattggatgtgatctaatgaacacccctaattctaactttccaataaggataattagaatcattgagcaacggcggtagagaaatcaaacttccttctgcaaaaaatgacatattgcacaaaaatacacagaaatgttaatggaccacattaagagtttagtgtcccgccctgataccgattgaaaagcaaagtttttgctaatgtcaataattattacagaaaaacggtaaaaatttaactgtaacagtctgcagcaacagaatgtgattctgttactacagaacacagttttgtggaaacaaaccagaatcaaaacaataaattcaacagaaataaaaataatagcagaaaataaaatcacttgacacaagagatttgtacatggtatcagtattctttcgaacactcctagtccacggggccatgctcagagaaagaaattgattagtaaagtctcagaaattacaaagacaatggacttatataagtttagattccctctaaatctttgccgcaatcctttgtaacacacttcacgaatttgatttctgaaccaccttcaaacagcgaactccctttgtctttgaggtgtgagtgtttacttcctcccgaaataaggcttgaacaagtcttctcatgaagacctttctcttgtttaatcatgttgttctaaccaaccctaagaccagtataagaacaaatatataaatactaaaacctagatgaacaaatatgttctcaacaaaaagaactctctcttcataaatgaaaatatgtaagaaaatgaaagctagaagagttgaactgattgactgctctctaggttctatttatagaacataggaaccctagagacagc

SEQ ID NO: 313238 - DNA, 1319 bp, Cannabis indica
agggggcaacttggatcttctatgtgaaatctgttaccgatcacagctcttacagggagagcccaagataaaatacaccaccataagatcttatgtcgttccagaattttgctattccagagtttgttccaaagctttagagcgacatcgcagtggggtgctctttccaaggcttgagctagataggcagatttacacgagaattgcccattactttccagtgtccagatccatctatctatgccggtacctgtgggttggcccccttttagaataactgtaactgattcatcgtcaaaacaatgtttcagcttgggaatatcccattgcccattttcacaaataagctcagaaactcgataaaggttggaaggagtaccccctcttggtttcggacagaaacctttatagtgcggaatccaaggatcccgccagatattcgtagactctctgtttgctaccaacttgcaggcccctttcctcaagatagaattggccttaatgacactcttccaaaaccaagaatccgaacttttatacctacaggtaagaaaatctttgcccctgaggtactttgcaaccagaactttacaacataaagattggctcccattaagaatattctacccccatttagctagaaggcctggttcatttctttggtttttcggaatcccagaccacctagagatttagggaggcagagcttgtcccaggactttaaatgaagaccatgattacttttctcgaaaccccaccagaagtcacggactaacccatcgatccggttaaccatgcgagtagagagctttgtggtttgcatggcatacataggcaaagacagacccacagattttataagagtagctcgccctgccttcgacaaagttttcgccttccagccctgaagctttgccgtaaggttgtcaagaataaaattgaaatcagcatccttttgcctagacctgaataggggcagacccaaatattttatgcacccttctggataatcaattcccaatgcttgcttgatatcacgacgcgagtccatcggagtgttattgctgaagaaaatggttgtcttgagcttattaacctgttggcctgaccaagaacagaatttttctaagcagctccagtaaccctttgcctcagttaaattagcttttcccaccaaaacttaaatcgtccgcgaagaaaatatgggatagaaccggacctcccctgctgagtttaattcccttgatggcaccctgctcaagggtattggaaatcagtcttgaaagaacttcagcagcccagatgaacaggtaagggga

SEQ ID NO: 313239 - DNA, 768 bp, Cannabis indica
aaaaattaatttaaatataccattaagaaaataacatgtagttatgactagacattttacggccggtaacttacaaagttttagaaatataacttaaatatcattaccgttaaaaattaaacttaggtatttatttgcaaccaaaaattaaacttatgtatttattccataaattactctaataagtatttagcacgtggcttagtaatatgtggacatgcgttaaagaatctagctctcactcaatagctaaaagagcactattattaacaaaattgcaatagaaggtctcttgtcacttttttagaagggttaattagtaagattataattgcaaatgttaataggattttaccacaattaattttatttttattctgttattttgtctactctcaaaaacctccaccacaaaaatagggaccgaaggattcatctcttaattaattaattatatatattattacgccaacttgttattgttggaactttgtatgaaattatgtaaaaatagaaaagtgaagtgtgtgagtaggagtcccacatgggatagaaacactacattttaagtgtatatctagtgcaagtttgagatatgggtttgggccccaaggggtacccagttttgcgcgcatgggtgaggactcacacactggaccaccacacgcgcgcgccgccgtcgccgtccgaccgacgccgggttgggttggcgggtgaggtgtcactttatttttaaagaaaattgtttaattaaataaagatttattt

SEQ ID NO: 313240 - DNA, 4350 bp, Cannabis indica
ctaggttcgggaccaagttttggtctaggtttttgtctgagttcaagtcttaagtttgggtcaaggttcgggtctggattcgggtccgggtctggattcgggtccgggtctgggtcctgggttccgatgttggtattagtatgggtccaggcctgtgtctaggttggggttttgggttttgtgtttagtgttaagggatttagggtttagggtttagtggtaagtgtaaagagtttaggatttaggatttagggtttaagggtccgcttccagtttcggttccaattttgggtaataaggtacaagttaaggttcggctgtgggtttgggtgcgagtcctggtctgggtttcggtttttgtttgggttcaggtctgagtcttggtcccaaatcaaaacaccaaccacatgtcgactctagttcaagttcctagtacgggttaaggttcttgtctgggtctgggtcagggtcgaggtccaattccaaaatttggacacctactgtgggtggggtccaaggctcgagtcttgggtcatgggtcccgggtccaaatccagatcctagtcgaattctagctcatctcttgggtccaggttcgggtcttaggtccaagtttttgtctaggtttgggtcttgggttctaagtcatgggtccggaacaccaatttaggtcaaggtcctaggtcttggtctgggttagggtcccagtccgagtgtaggtctcgatctgtgtttggtactggtccttgtctcgggtcttggcctggtctatctctaggtcataaatcagttctcaagtccagggtttgagcatcgggtcttgggtctcggtcgcggtcccagtcctagtctaagttctagtcccagtcctggtttaggtctcggtcgtagtttgggtctgggtcctagttttaatcttaatctgagttcgagtcccgggttcgagttcgagttctggtatgagtccgggtctgggtccgggtgttcgtctaggtctgggtataggtctgggtttcagtccatgtgtaggtttgggtcttcgtctggatttgggtctgggtgtgggtccgggttctcgtacggttcttggttctggtccatgtcccgagtcacgggtcattggttccgagtttttggtcgcatgtcctggcgcaagtcaaggtctgggttcaagtcttgatctacatatcgatctcgctcttggttcgagtctgtgttcggttctgcatctagatatggttttgggtcctggtctgatttcaagttctagggtcctgattccggttcttgttctaattttgggtcctggtctagaaattgttcgacgttcatgttttggtaccattctaagatctaaacgccgactacgggttgggtcgaagccccgagtcgtgggtaaatatcccgatcccaatattgggtcatagtctcattccaattaggatctggggttccagtccgtgtccgtgtctgggtccgggtctgggaccgagaccgaggttgggtcttggctccagtcccattcatggctcccaattctggtttatttttttttgggtccccaatctatgtctcggtcctaggtccaggtttgagtctccaatcccagtacgagtccttggtccgggtcttgcctcaagtccgtgtctgggttgtgtgtttagtcccaagttcagtttttatttgggttcgtgtcccggtctgggtctgggtgtgggtcctagttagattccagttctcggactcaaatccagactcagactcggacctaggtctggggtacgagtctaggtctgggtcagggtatgggtctgactctgggtctgggtttgtgtccgcgtatgggtcccaaatcaaaacactggctacgggtcaggtccaagccccgtgtccagatttgataacggtcacgggtcccagtcttgttcctcttcgggtcccaagtcccagtccgggtcctaggtgagggtcagtgtttgggtctgggaccgggtccgagtctaagacacggtcggggttcaagtcctggtttgagttttggtttgggtttcgatctcggtcagggtctgaatctgggatcgagtctaagtccaggttcaggtccgagtctcgagttccgatatgcgtcagggttagaggcccaagtttgggtccccaatctaggtctgagttctaggtcccaatcttggtcctagtcccagtttctatttcgattcagtgtttgggtttgggtttgggtccgggtcttgttcggggcgtgaatcctggtccgtgtcttcgttcagctcaaggtccaagtctgaatcctagtttgggtctaggttcgagtctaggtccaagtttgggtgccgagtgcgggtttagatctgggtccagatcaagctctcggtcaagatataggtcctgagtttcgatcctggtctgggtctaggtttgggttcgagtccaggttcgtatccagatccctatcttggtctgactttgggtctgggatcgagtcctaggtctaggtatgggtccgggtttgggtcagggtctcgctcacgaactagtcacatgaccatgtctggacccaagttcgagtctcggtttgggtatagggcgaggttcgagtttggttctaggtctggctctgggtccttgtcacggtcctagtcttttttgagggtcctggtctggcggttcttgttcacgtttcagtttttggtcccgggtcaggctcagggtccaggtttggatcttggtctgggttggagtcctggtctgagtctcagatctcgatccctgtcacgtgtcccagtctagttctggttcaggtcttgagtcccaggtcaaagttttgattcgagactgagatttgggtgtggttctaggtcccggtcccagttttgtgtcccaagtttggttacatgtttgggtctgagttcgggtgagagtttggatctcgagtcaaggtctgggtagggatccgggtctgggtcctagttcgggtctaggtcttggttagagtctgggtcctggtccgactacgggtccgggtcaaggtccaggtccagttacgtttccaggtccaggtcaaattcctggttcgagtcccattcccaggtcctgctctacttccattttcggttccaatttcgggtcacagggtacgagttcaggtctaggtttaggttttagactgggttcgagtccaggtctaggttcgggtccttgtctgggtcgggtctggggctggtctcaaatctagacaccgactacgggttcagtccaagccctaagcccagattcggatctcgatctcgggtctcggtcatgttccattttgactgccgggtcacgagctgggtcctaggttcaagtcaaggtctgggtcgggtcttgggtctcggtccttgtttcgctacccaagtccctatcctgattctaagtctaggtcctgtctggtctggttttaggtcccgatctagttttgggtttgggtcatagtcacggttccggtttcggtcttggtctgcgtttttatttaggtttgggtcttggtccttgtcctggtcctagtcctggtctggttctagttctagttacgattccgagttcgagtttgggttttagttcgagtcggggttctggttcctagtctagttccacttcgggtcccaagtctcggtctgtgtcttaggtcagggtcagggttcatgtccggggtcaggtctttggtctcggtcccaatttttttgtccgtgtcccgggtccaagtcccccatccaattccgagtcctgggttttggtgcgagtctatgacatggtcggggttcaactcgtggtccaagtttggatttgggttttgatctcggtatgggtcctaatctgggctcgagtcttggtcatgttttgggtccgagtcttgagtttcgatatgcgtctgggtttgaggcccaagtctaggtccctaattcggttctagctcctaggtcccggtctgggtctatgtctaggtttgggtcctattcccaattttgattttgattcagtgtctgggtttgggtttaggtccgggtcttgtttggggtctgtgtcctggtccgagtttgggtttggctctgggtccaagtctatatcccagtttgggtctaggtttaggttaggtccgagtgcaggtccaggtctcggtcagggtcagggtcatggtcttagtctttttcgaggatcctcgtctggcggttcttgttcaggttccaattttgggtcacgggtctaggtcagggtccaggtttgggtcctggcctgggttcgagtcctggtctgagttccagatctggatccctgtcacgtgtcccgatcttgttc

SEQ ID NO: 313241 - DNA, 1206 bp, Cannabis indica
aaaacgccgataagatccttcccggtcggggtccgcggctccagcggcgagttcaggttactaaactggcagtggctcggaccagcggcggcgatcaccgtcaaaggtctgattctgaaaccagaggtacggaaattgagagtggagtactgtcgaaacaaagtattacaattattatgatgaccaatcgaaaatggcttcagagagatcgaaaaattggggattttgtggtacgagagacaagcgtccatcaaatgattgtgaaaagttgtcaaaggaaaatcttgaaagatcagagtgaatgaattatgatttgggaaattgaagaagtgatattacagtgttcttgggaagaaggagaccttatatttatatatattttcttctttatttacatgataaacactagcctttattggatagggttttggatttttaaggtgtctcttcttcttattgaatggaaacagttaacgtgtatcgcggactagagtaattactgtgtaatcgattgttgacttgataaagtcagcactaataacggtaatgatttattttaatttaaatctttgaatttggtgtggcgttaaatgatgatgtggcgaatagtttggtacggtgtatgttggtacatgataacagggtattcgcgcctcttatatatggattagcacgaattgacgggattgggtggctcctctgtctgtagaccactaagcatatttattatttatttttatttaattttttttttgtcccctccaatcacttaattctactttttattattaattattattattattattaatattttcctttttctttggctagttttgggaaatgccgtatttgaattgataattattcattaaaccatcatgaatgcgtaggggatagagaggatgtaaatattgggtcaaaaatgcttcataaccaaaaaaaaaataaagaaatttatagcaaacttctcaaaaaagtttactttgtgtaaattagtctacaatctttataaacgaagataatggtatccaaagtcacatttttagtaagttgattagtccttattttgaatgatttatttacatatttaaaattgttacgtgttgaattgttattagttcaaattattgttttaattttaaataaataaattatttaaaaattataaaaattatcttttttaattaggatttttatcctcta

SEQ ID NO: 313242 - DNA, 796 bp, Cannabis indica
ccaacatatacactccatcttgaacgggctatcaagattagggtgttagttaaagtttagttaagttagttatagtctgttataactaactattaggcttcttgattcagttggttcagttagtcatttgtctactgctatataaaccagctccttgtatcgagttctataacagagtaataataataacagaactttctcttcttctctctctttctaaattctttgcttctcataagccgagagcacgtcaagttaaaaaagttgtaatttgataatcgtaataataataaatattcaaactttaatagttttaaataatttcttatatgatttttgtacaatgttgttgaaaaattatataaaatacatatagtttagttattatctcattaattataaaataaaatgtgaaaaagtagagtattgatttgaacctatataagaaaatggatgggtttgagtaaagcacgcgagaacacaacccatatttttttagggatatttacaccatatactaacttttctctaaagattacattaatacttagacaaaaaacaaattacatttatacttttcctacttatatttttattttacttttttttattaattttttatttattaaaatttgtataaagtttttttgtcttccttattatatcttgtatttttttcttagttgaattctctttttttttttcttatatgagcttgattgaatattttttttttctttttcttctctctatttattttttatcttttttctttttcaattctctctctctctct

SEQ ID NO: 313243 - DNA, 780 bp, Cannabis indica
atgcaaccaccgcgcaaccacgcaccaaccaccctgcaactatcgtctgattgtgtaagtgatagtgtaagtggtattttggtaattaaaatcacataaaaagtgtaaatgttgtctttatcttatggaggtatttttattaataaagtgtcaatttatattttctatgtattaattcctaaaaattagttgagtattattaatttaattcattattttcaattatatatattagcaacaaaaaaggtcctattgtcagaaaaaaagcattagtattataatttttcgtttatagagattttattagattttaggtgtgctatgcacgtcatttataaatttagcatttttacgttttatgtctagaaattgtgaaaatcaacgctttggtcatgtatgtcccttaaatacgatttagtattgtaaaattagcgagacaaaatttatggatagtttgaatattgggttgaaggaagggcatttttgtaaaatgccactcaagttcaaatatttatccttagtgaattgatgtgttttgaggataaaattcatatttattattagatttattaagtaattaattgtcattatcccttaaaaaaatcaaaataacatctctctctcctaaacctctcttattctcggccacaaaaaaaatcaaacatgctaagctgaacccaattcatttttagagtaattctttaaggtggcgtttggttgggaggaatgtaaatataggaatgaaaatgtgaataggaatagaatgaaataaaatttaaa

SEQ ID NO: 313244 - DNA, 699 bp, Cannabis indica
ctcccatgcagcattaaatgtgaagtgaatgttcgaacaatctctttcccttccggagatgccttgttacaactccagcctcccggagagtaaaggtgtgtcttatgctttcctccaagaagctcactccgtgagatgcacttctgtgcctattactttactaatttttgtgagtggatgttctttgagatctacgtgtcgcatgcagccgctgccacgtattttaggaaaaatctgaagtaacatgtgtatgtataataatagagtggacagtattcttttgaaaagatgtaatttgggatctaatatatgtttcgaagacaattttgtcacaagggaaatcaaaataaaaaatatataaattcaacatcgagtagtacaagttgattatattttaattatattaataagtaatactatttattttgtcttgttctatgacggtttggactggagtttatctctagaaagaacaagatttttctaaacaattaaagaaattaataatatccctttcctctaaaatattgctttctatattactcctcacaacaaacaaacaaaccatgcatatacatatacatgttttttaaattaaaattgtaaaatcccaaatgggacttaattaatattattatgattgtgtatctataaaccttataaaagagagaatagatttttgggcttttcatagtgtat

SEQ ID NO: 313245 - DNA, 1686 bp, Cannabis indica
tacgatttaaatatatattatttttatttgaaaaatatttttttatttaattcttaaattcttaaatgaatttttaattaaagtattaattaatgatgtggaccaataagagcatgacagctggactcttacctgtcatttaacggtcaggtacctacggaagttccaataccttaacagaaggtatttttaccgccaaaaatttttgttaagtatttatctgcaactccgagttaaactcgggtattttcaccgcaaattactcttacttgatttcttataaatttatgcaaatcacctaatgatcagtttttccttcactgatcaattatttatttacttgtgttgccttattctccaatattcaatttcacttgaaatatataatatatttttatcaaagcacaataatcatcatttaatttcttaataaataacttgtaaattaagtaatatgattttcaaattaatgagttcatataataacatgaaattttgacgttataagattattttaagttatatataagattgattctcatgataattatttcctcatgaatttttttaaaaaaataatcaatgtttttggaataggtttatacttgtaatcatagtttcaaaaaggaaaaatgacttgttaggtgggaagcctcattttgaataagagtttttcataaatatagaaaaatttggtagaatttacttttatatggtataaataaataatattaaaaggtataaaattaaaaaataattaaaatttaaaaaataggaaaaaaataataaataaatttaataaaatttataataataagttttgtcaaaaaagtcattgaaaaagttactggtgctgaaaaagtcaccgaaaaaattattatcactggaaaagttgccggaaaagtcgcaagagaagtcatcgtcgccgaaaaagtcaccgttgccagaaacgtcattggaaaagtcactcgaagtagatatctcagatataaataaaaatagaacctcttctataacatagtgaataaaaacaaagaactcaaaccggttataattaaaatataaccggttctgtaacataatgaataaaaataaataacacaaaataacttaaactagttataattaaaatataaccggttctagaacagttttataatgaataaaaataaataacatgaaataactcaaatcggttataactaaaatagaacaagttatacaacatagtgaatacaaacaagtaacgtacgcaataactcaaaccgattacaattaaaagacaaaggggaaattagttcttaaaacactgaagcataaattaaaaataaaaccataccctccaccaccatctaatgtctcaaacaaatacaaattcaaaagaggaagagagagcgaggaaaagcttctaggtctttctcagtctcagttcgtggtgtggcggcgccattcaatgagcttctggttgggagaggtttaggtgggtggtggcaaatggcgttggtggttgagagaagccgaggaggaggaaaagagagagttgggtacgtgagatttgggggttgttggattgagttttgggtagatgagaaggttcggtggtggaggagaggaggttcagtggtggtaagtagttggtggtctcggtgcctgggtctgggtgtcttgatggagagagagagagag

SEQ ID NO: 313246 - DNA, 1665 bp, Cannabis indica
ttctcagttggagggaaagaggtcctattgaaagcagtggtacaatcaatccctacatatgctatgagttatttccgattgccttctactttttgtagccaattggagtctatgatggctaatttttggtggggttcaacaaaagatggctcaaaaattcattggcgaagttggaaattgttatgcaagtcgaaatttgaaggtggaatgggctttcgctcttttgttcattttaataaggcactcctagctaaacaagcttggagaatctttgagatgcctaattcactactcagccgcttgcttaaacatagatacttttcaaataacaatttcttggaagcacggcttggtcactcaccttcactcacttggcaaggcattcattggggcagggagttacttattgaaggtttgcattataagattggaaatggctttaatgtgttagctggttttgacaaatggattctgggttttactgattttaaaccagttagtttcaatggggctgcttcaatgacagtatctcacttcataacagaccaaagagaatggaacgtgtctcttcttaatcaatattttcaacctattgatgtcgacaaaattgttaccattcctcttagcttttttcctaacagtgaccgtttgatttggcaccatactactacaggctgttactcagtgaactcgggcttccatcttgctgagaacctggcagaaaaccagcaaacaaacggctcctcttctcatagcacctggtggaaaaccttttggaacttagatctaccatctaaagtaaaaaaatttgcttggagagtgatgtaaaatgcacttcctgtagctactggtctggtccgaaggaaggttataaattctgctatttgctcattgtgtaataatgcatgggaatcggttggtcatgccttatttaactgtaccacagcaaggaaggtttggagagaaactaaatacatcattgatcacacacatacacataatatgtacaatggtgattatttgatacatttatcatctctacattctaagcaagatcttgaattaattatttgcacaatgtgggctatatggcatgaaagaaataaggtcattcatggtagtttgtctaagtctagtcaagacattgcttcttttgctagtacacatctggaccaatatcatcgggcaagaagtaaaaaccagcagcagtttcaaaactgcaatgttcctgccacagttcaagcttctgtaacagtccccaccagtaatgttcctgcatcagtccaagcttctgcaacagttccccttcagcatcaaaattctgtgatatcttggtcccctccaggcttaactggtttgaaattaaacgtagatgccgctgtcaaccaagaaaagaaaatactaggggtgggtgctatcatccgagaccatcatggcagtgttgtagctgctatatcaaagccaattcaaggttgcttcaagtcggatgaaatggaagccaaagcgctatttcattctctcaattgggctatgcaattgcaattacaccttactaatgttgagacagatgcattgcgtgtttcatcagctctaaattgtccatctaggaatttatctagttttaatgatttaattatggatgttagttatcttttatcctttttc

SEQ ID NO: 313247 - DNA, 1831 bp, Cannabis indica
tggtatttacccttttttttttcatcgtggaccttgattgttgataaaaatataagaatcatttgttagaaaatcaaataaactcaattaatgactgcaaatttagccaactaacgcgaagtctaactaggatctaattttgtttatggctgtcacgtgcagaatgatattaaatataaaagacacgtagatttataaaggttcgacccctttaattaggtaatgacctactactcttttgctgtatttattcttgacatacaccatgcagattacaggctgaaatcttgtaatttttagctacgactctcttcagtattacaataatgagaatgtgtgttgcaggtggtagggctgagcataaaatccaaaaaactaaaaaaattgttcaaaccgacctaccgaacaccgttgaaaccgaaactgacggaaccgaaaactgaaaaaaccgctaacggttaaaactgccattgaacgatagattttttttttggataataaaccgacgttatacatatataataaattattaaagtttttttttttttgctttatgtattgtagttactaataatatattattattttattaatatgaaagttaaaagaataagataattagtttttgaataattaattgtatgtttgtagttgtaaaatgtagaataatgagtttatataataaattggatcttattttaaagaaaaaaaagacgttcggtttgggcaatttaaactgaccaaaccgaggttcaaaacagtcaattttaagataagttctagattggtcgaccagtttttggattgcaccattccagactgaaaaccaaattttagattttttatagaaaaaaccgactaaaccgaccgatgctcagccctaacaggtgtgaagacttgaaaagagagagagagttctatgccttagtgcttctaagctcttaagtgcataaataaactcaggttgaagtcctgagcgtagtccttttcacatagggttttgatcctttatatagttttaggatttacaaagttgttatttaaaaatatataaaagatggaaaatatccctacaaagtagtgttgctacattctggtgttgaattcctaaaattgtgggtagtttgaattgtttcgaagttataggagcacttggaggtcttttagaaagcccgtgggagaaaacacgacccattcaggctgttcgaagcttggtgcactcgttggtcgaccaaccttatttgtatgttgtctggcgcatggtgccatccttagccggccaactagggtccgtccaggtcttgaagacttgttgcttcttcctagttgattccatctttgtctcttgacatcttgatggttgaggaatcgtacaacactaccctgcccgattagtgatgagctgttctccacgtgtcttctgcttttgactatgtggacataccacatcaggtgggcaaaaattaggataacatttgcttcccaagtctctgtatgaatgtttgtccagataggaactttacactctaattggtattgtaatgccctttgccatgtaggtatgcacaaccaaatattggtctcttcggctgacgtaattttatgacagttattaactttattattaatcattatgggaaatcgtgtgacgactgtatacttttccatatttgcctattttagtgatattaactccccattaaatttttttttggggaaaaataatttttcagaacatatataaatgtcttgttttcttttttcatttttcacttctcctttgtattctatgaacaaactgttgggttttatgccctaaataaaactcttt

SEQ ID NO: 313248 - DNA, 1006 bp, Cannabis indica
ttagatgctgataatgcagtcaaggctggtttttctactcctttctctggtttggtgccgcctgctgttgctgaagctaagactatttttcaggcaattcaatgggctcagctgattcgccttcctgtagatgtgctgctgacggattgcaaatcaatagtggataggcttacctcttgtaattggaataatagtgtattggatgatattttgataaatgttaagaacttgttatctttcagtccaaggctagctatttcttttgttcctaggaatagtaatgtacttgctcataaattagctaagctaggtcttggattagataatgagttagtttggaatggttctttaccttccatgtagcttgtggctttgtactgctggttgttttaataaagtacaagttctttcaaaaaaaaaatatattataattagggatccacaaggggcatggaatgatcgtaggggcatggaattgcgataactatattatgtaatgatcttgattctgttatcaactatttcgataaatatattatgtaatgacggtgaggttaaacagtttttatttatctaagtatgctttttttcaatcaaaaattagggatccacaagaggcatggaattgcggggagtgctctcgtcctcattcacgttaacaattgtaattcctacttctatcttatttcctcttattcttcctcgagaacgtgatgagaaattccctaataagaaaataaagtttattttaaaaattgaaatataatattaataaataatataaaattaaaatattacacattgtttattattatatactaattattatacaaaaacacaacttaaaatcaaaattaatttctcttcttcctccatactcaaactttcaaatcattctttgttaggatttaggtcttgaaaagcctgtaaagacattattgtttataactattagttgaacaattttttttttttgacaaagtgatttaaatcactcatgaattta

SEQ ID NO: 313249 - DNA, 1301 bp, Cannabis indica
tgtttaaacaacatacttgtgagtagatctaagatcctggtaaaataaatattccaacagaaagaaacacttttttatctttatgactataaaatagtccacccctagtctccttagaaattacaagaaacatgcaaaccttagttcacctttcaagctttccttctttctttcgtaagatatgagcagggcaacccccagattttgtaatagtgtaagctatgcatacgaccatttcataactctacaggtgtcttgggaactaatttagatatgatgacatttaaaatatcattcgccattgttaaagcatatccctagatggatactaacagagttgaatagctaagcataaaccaaccattttcattagtgtgcgatttcgatgcttcgaacaccattttgttatggagtggaggggataatatcttccaattcaattctaggttcaattaaatgatccttgaactgtatatttatatattctccacctctatctgttcgaaagatccttcacgttttacctaattggttttgcgctagagcatgaaattcttgaaacttcacaaatatcatatttcttatgcattaggtaaagaaatccatatttagagtaattgtcaatgaaagtgacaaagtactcatatttatcctgtcatacacattcagtggtccacagacatctgaatgtaccatttcaagtgattttgtggtacgacttccctttctagagaataatgtttagtccttttgccttttagacatgattcgcaaacatgtaattccctaagggggaaatttttcaatggaccacccatggttagtctacgtaatttttcatacccaatatgacaaaatcgtaagtgtcataggtatgtttcttaattattattgatctttttctttttatggtttctaagtttagcaatactaaaatgttcgttatttagtgaaattagtccttctggtcgcagaatataaagcccattatccatataagtaacatataattgaatatatttaagagaaatcattaaattaaaactcgaaaagttcaatttataatgttacaattgtaaactggaaacataacttgaatttcttctaaaatttggaataaataaaaaatcgtctaataacaaaaaaaaatatttccaaatttgagacgagattttcctctagcttggaccgacacaattttgtcattaccaactttaagtttcaactcgtcgggattcaaagctcccaagtttcaagcagttactgtaacaccctaactaacataggcgtattacgtgatt

SEQ ID NO: 313250 - DNA, 705 bp, Cannabis indica
tgaaaagagcaaacatatagatattagactctactggattagagagaagatagaagaaggactggttgatttagagaaggttagaatagaagataatcttgctgatgttgggactaaggtcttaaccttaaataagttcaagcattgtttgaacttcatcaatctcagaagatagtatattgagattcttagaacaccaacaaatgatggctgcattctttcttcatcatcttcattcttttaatttgaagtaagtaggtggaatttgtggtatagttccttcaaatgaaaaggtcttcccaaacgtcatttctagaaaattgtttactcagggttgctagtcctacaaggagtcttttggaatgacagtcgggtccgaaagagagttcccagatgcttatcatttccattccgggtctagtcttcaagaaaactagcctcactttgggatggagttctggttggccagttgtccctcttgaaatggtagttttggatagtcgactccaggaggctctatcctatccgaaagcaccttcaacaagtgtccttggtctgtgagtccagaagctcatatatgttctcgaaggtcttgattctttagttgacatggagacttctgttaggctattttttagcctatgtctcgggtcttattgataagcattttctcgattattgtcgtcttttggagcagttttacgc

SEQ ID NO: 313251 - DNA, 3380 bp, Cannabis indica
gttggtgccatggcaaaaacgagagcaagaaatgtggggaaatcaaaaatttcagctaaaaaataaaaaagaagggaccatcgtcgactgtagatgctaagaaagcaaaatccatcgaggagattcttggagttgagcccatagaactcacagacgaagatgaaggggaaggaaatcaggatccgttgcgtgatctttccagcctccgttaacacctaagtcctccttgagatcgattctacaacaagaagagatagttgctgattttggacactttcttactgcaaataaggagtgccaagattctatctcgattgggaagaagactactcctccaatactcagattagggaacgttattaaaaatctggaaggctcgttttctacctagaagacagagaagaaagtgcgaattacagaagaggatatagaagaggagatcgcttagtggaattcatctattgtctgctacgtacttggtgcgagtccccctctctcagtcctggatggctttgctcgaaggatttggaaagacaaggtggataaaataggtatgatttcctatggcatcttcattatgagatttaatggctgtgaaataagggatgaagtattatcagggggacacattttctttagtaagaggccagttataatgaaagcttgggatcggaattttaatctcaagaaggaggacaattaaaactgtgccgaatttgggttcaatcttgaggatttagaacttaaatattggggcgagaaatctctctttaagatcatagggcagattgggaagcctataatgatggatgatgttaccaagtgcagggacaaactggcataacccagtgtattgattgaagtttccatgaaccaggagttccctgatatgatctattttgagaataaacatgacagtgatgtttcagttggggtgaattatgagtggaagccaatcatttgcaagcactgcaatggtatggggcataacacagaagaatgtaagaagaaagtaggtaagaagcaagaatgggttgtgaaagagaaaaggaatgagaaaccagcagaaactaaggggaaagcagtagatgaagaaggtttcagacccgttgcaaaaggatggaaacaaaaaattcagcatatagtagcagatcctcaaacctcaaatgcttttaatgtgttagaagaaattgcaggacacatacaggaacatgggggaattgaatatagaggaatggccttaagttggagacacaagaggagggggagatcctcctcttatccacggatagattactcagctggaacgtctagggaatcaacagtcctcaaaagcaacaggaagtgaagaaatttattgagaaggctccaaagcttgaagccttgtatgttaggatgtttagtaattggtgtttcacaacaaacattgcttgggcaaaagggggaagaataattgtgtcttggaatcctgggagttacaatgttgacattattttttgttcaagtcaggtgatccatcttcatgttacaaccttatacaatagaaacgatttctatgtctcctttgtctacggttttaataatgaggatgggaggagtttattatggaaggacttaatagagttaaagaggcaggatccatggatagtccttgggaactttaatgatattttggaaaaaggagagaaaattgggaaaagagagcactatgcccattccaagtttaaggaatgtgtgatggagtgtcaattggaggatgttaagcaaagtgggagtttcttcacatggaataacaagcaaaaagaggaagatagagtatattcaaagatagatcgggtcacggaaaatcaaaggtggttggatacttatgagaatgctaaagctctgtttcttaatgaagggctatttgatcatactcaagcactattgactgtgttacctactattcaaaatggtaggaagcccttcaaatactttagaatgtggtctagtcacccttctttcaaacaaaaggtggaggatgcctggaaggttatggtacagagaacaagtatgtttcaagtagtgtccaaaatgaaggctttgaagattgttctcaagcaataaaaccagcagtgtttctcagatattcaggctttagacatgcaggccaaggctcacttggaggtttgtcaggaagatatacaaaagaatcccagggatcgggttctgcaacaaagagaacatgaggctagagagaattatcaggagtttcataaagcatacatttcattcctgcaacaaaaatccaaagggaattggatcaaggatggggatgcgagcacgactttctatcactctagtttaagggagaggagagttcaaaatagaattatttctattgttaatgctagaggtgacagagttgacaacccagaagaggtaacagaggccttcttataatactacaagcaactacttggaacaaaagtgcaacaaaggaaaaaagtgcagtagtcagtcattacaaaaggacctgtggtaactagagtacaagctgaagccttgctagctgagtacaccaatgaagaaattaaaaaagctgcttttgacatccctggaaacaagagccctggtcaagatgggtttgggagttttttcttccaagacaactgggatttgattggacaagcggtgtgtgaagctatcatatcatttctgcattcagggaagcttctaaaggagataattctacagtgatcacactcataccaaaggtcaaaagccctaagttagtgagtgactttcgacctatttcatgttgtaatgtgctatataagattgctacaaaactgatttgttttaggcccaagaacattcttcctgatgtagtttctttaaatcaaggaggtttcataaatgttaggtatatagcatataatatcatgatgtgtcaggacttaattagaaattattgaaagaaggtagctaaggccaattgtttgattaagcttgatctacgaaaggcctatgacacattggattgggatttccttgaggaaatgatggatgctttgcaatttcctaggaagtttactgaattagttatgacttgtgttagaacactaaagttatctcttatgtttaatggatccatgcatggtttttttgaaactaagagaggggttaggcagggagacccaatgtcgcaattgttctttgtgataggaattaaatacttaagtagaataatgaagaaggttcgtgctgggaatggagtaccttagcagaataatgaagaaaataggtgatacagaagactttcagtttcatgaaagatgtggggagttaaaaataaaccatttgagttttgcggatgatgtcttgttattttgcagggg

SEQ ID NO: 313252 - DNA, 1272 bp, Cannabis indica
attaataattaataaatatagaaatcaaaacgagtgtggcccccacttaggttgcattggtaaactgcggaggtcggtatgtagatgaatcaatacggcgcataacgccgtcatcaccgaagtcgactgtgtgtatgggcccaccagcccattgccaactgacacagaatcccaaacctttatacacaagttttcctgaaattacgattatacccttgcatgtattaaacttaaactaggtcaagtctgacaagagggattagggcgtggtggaccaatcgtaaagaaaagtctagacctacaaaaatagtcgaccaagttaatgttttttcaattaatttatcttttcaggaatttcagaaaaaataaattactactgttaagtgttcagtatataataatactcttttttttttctcttcgtgaatgtattatttgacggttaattaagatttttattttttaaattttatcatgtattaaattatgttttttgaatttttttaacggttaaaaataaaatatttagatttaaaaaattttatttaattttactatttcaataattttttatatacaaaattatactctgatatctatcaaataataattcttgaactttaatatatattaaattattcctcctatttttgttacataaaaattcttaaattttagttcaataaattattttatttggtgtctttacacagttacggtaatgtagatatggatcagactaaattaaatcaagctgactatagcaatgtgaattagtggagccaggagtcacgtcaggggtttgagttcaataactggagaaacacgttagaaattggattggataggaaactattgtaccaaacgatactaagagaaataatgaaagagatatcattgcattattggaaaatattggcataatggtgtgaaaggtgttatgatatttaattagaagaagtgctgaatcgagtttaaacatgtcgtttcattgtggacagttcagttcaatgatatcaggttgaggatcaatacaacttgtccccaaaattacaacttcacctaacgcgccaaaacaatttaacatctccaaataagtgtgatgcaaatttagtacaaatgttatattaaatttggcactaacgtattttttatagccataaataatacataattttattatttatttttatattattttatcaatatatttaagttataacattaatcgtgaactatttgtatatttttttttattattttatataataa

SEQ ID NO: 313253 - DNA, 1025 bp, Cannabis indica
ttgaagcggggacgttacatgatcccccaaattatatgtctccttaatctatgtcaagtacttctagcaaaatcccaacagttagttgtccatacaccgttgagttcttattcccttatgatactgccactaacacaattgtttctatttttattgacaattgtgtttctgagaatagtgaaggccaaccattacatgatttcagttctgatgcctctccaaggatacaagctcccactataactgttgctccacaaaaaactcaaataccagtgtcccattcattttctgttctcacttcatctgttggtcaattaactgaaccaattcccacgagtgtagctcctgcagtaccagttgtagctagaacaacaccaattgtgccatctgaactaccttcctagctctcatctgaggtttctgcacctagcacatccgctcttggtaaaacacatagcatgcaaactcgtggcaaaagtggcatcaaaaagccaaaagcttatttagctactcaagttcccacatctctacaacaagctcttcaatagttatagtggaacaaaatccttgtagaagagattcttgctttaaaaaggaacaaaacatacactcttgttaaattaccacctggtagaactgcaattggatgcaaatgggtgtataaaatcaaagaaatctctgatggcagtgttctcaagttcaaagccaaaatagtttcaaaaggtttccatcagtaacttggctttgattacacagagacttttagccctattgtcaagcctgtcactaccagagttgttcttactcttgctctatctaaaggttgggatattaaacaacttgatgttaacaatgcatttttaaatggtgaattgcaggaagaagtatacatgtttcatccttttagttttgaacaacttgattctcctaagcttatatgcaagttacataaggctttgtatggcctcaaaaaattccctcgtgcaaagtttgagaaactccactgtaacatccccgcttcaagc

SEQ ID NO: 313254 - DNA, 792 bp, Cannabis indica
aaaaaaaaatggggccttttaattttgggaccttgtgcaatggcccaagctgctcaatgcttgggccgcccctgattttcactatgttaacaaccatatacccttaacacgacccctcaaggttacaattcaagtcgtctgtgaaagcagagagatcttaaattgtgagcttggatcgaaagaggggaaatcgttcactggagattgctttggtaagaccatctgcaagttggtcaatagctagaacatgtttgacatgaaccagtttctgcagcaccttttcacgcacaaaatataatcaagctctatgtgtttggtgcgtgcgtgcatgaaggacatgattagccgtacgtaatatggtgctgagattatcacactacacaacgggtggtcttggaaaaaagaatgaatccaagtgagttcagcaacagtgcttgctaggctttgaaattcagcttcagtgctggaacttgaaatcgtatgctgctttttacattgtcaagccacaagattgtttccaaagaagatggtaaagctagaggtggatcgacgatcatcaggatctattgcccagtcggcatcacaaaaaacaacaatatcaaggtctgtagacctttttagatgcagcccgtgttggggattatttaccaggatgtagatttacaaccatgtatgttatttaacatcctaaatatgaatttctaaaacaatgtaatttaagcacatataaagtttaagaaaccttacattggttgcagtggaattaaatgactcattctgctcagatctcta

SEQ ID NO: 313255 - DNA, 1576 bp, Cannabis indica
ccatctttacgaggctataaatatctctaactacattcgattaaggggtcgaaaaaaatagggagaaaccttttgtaaagaactactgcatttataacagtgactcgtagactaagacttattattacccgaaccacgtaaaaatcctttgtattaaacttcttataatcatttgaaacaactctaattaatagatgccaaaaatctcgacaatattttggtgcttttattgagagttgtaggaagctttccatagaaggaaaatcataaatagattcctgatacgatggtgttgaccagaaacaactcgcatagaccacatccgcatgaatatcctgtgggtcctgatggagaagaagtggcttcaagggtagatgttgaagaacaagacaaaatggaagaccccgagtatgaggaaaaccaagaagagtatgaggagtacgatgatggtagctataccaaactaatcgcgttgagacaaaaagctactgaccacgaggctgagttggcagagcaaaaagagcaaaacaagcgaatgcaagagatagtaattgccataaaaaaagtgatggaggtcgtaggcattcacatgcacccaaatgttggccttcttagacaagacaagatggtagaagggccttctcagccatcaagaaataaaaaacaaaatagttgagagtcgagccctatccaatacccttctgaatgtccccccaagggaaatcctaatgctaatccagaaaggaacaataaggctcgagaccagcaaaaagttcgttccaatctccctaaagggaaaagtctgcagggagtagatttcctaagggaaagattggtcctcaagattggggtgatggaggagcgtgttcgtgcatcaagaacctggggagagaaagggaaaaagccaaaagaaccctcgagttgatttaaggcagagactcaatgcaaagcatgggtacctcaggacccgtttagtgcaaacaaaagaaaaccataccaatttcgaacaacaccttaaatcaacgaattctggacggactcgccattctgtgaaaggacatagccaaagtctctcaaaggaaaaatggagatgattcggaatctgactgcgaggaccgagagccttcttccagaaatgtacttgaaccagagctccaaaagaacttcaaaatgcctgaaatgactctgtatacaagaaatacaaatcctagtgatcacttgtgaaggttcaacaaggtaatgatagtcatgagagtcaacaatgacgtgaaatgcctgtgtttcccattgacattaaggggatttgttgaagaatggttcaaaaagctcgagcccggatctgtggactgttggaacaagttacaaattaatttcagaaggcagttcgtagcaaccagaaaagattaatcttgaagttagtgtcctgactaacattaagcaactaccggtggaaatgttaaaaaaatccattaaaagattcaaggaagaggcttccaaaaccaaaaaaatggatgatggacaacacataatattaatggatgtgtaagaaaataaagctgaaactttaagcctgaat

SEQ ID NO: 313256 - DNA, 1270 bp, Cannabis indica
tgaagctttacagtagtggcactatcagaaatttggacaaatgaagagagatatctctcacgtgcagaagtctgttgctgcactaaataatgcagcagtaagatcgcaatctcatgtctctcagcttaaaaattctgaggcaattcttgatgagttgcttgcaaatgaagaggaatattggcatcaaaggtctagagtggattggttacaatgtggtgatcaaaataccaaattttttcatgctcatgcttcatcaaggagggcaaaaaattctatcaaaacattaaccaatgatcatggaatctcagtcagtggcaaatctgatctaaccagagttatatgtaattattatgactctttatttgcttcggagggagtcaatccagatgcactcctcactgtgcttgatgctattcctgccaccatcactccagcaatgaaccaatctctcacccgacccttcaccagtgatgagatagttgcagctttacaatccatgagcccagataagagcccgggaagtgatggaatggatgttctatcaaaattattggaacattgttggtgattctgtcactgaaattgttcttggagttttgaatgaaggtactgacatgtctcaacttaataagtcaataatcactttaattcctaaagtccctaatcctactggtatgagtgattatagacctataagtttatgtaatgtcatttacaagctcatatcaaagacaattgttctccgatttcaaaaagtattaccgtttgttatatcagagacgcaatcagcttttttatcaaacagacttataactgataatattctggtcgcttttgagcttgttcatcatcttcggcataaaactcaaggaaaggttggttatgctgctctcaaattagacatgagcaaagctttcgatagagtggaatggaagtacctggaagctgtaatgttgcaaatgggatttgcctctcaatgggttactcttatcatgaattgcatcactacaagttcattttcattctcactcaatggagaagttgtaggacatgttcaacctcatcgtggtttgcgacaaggcgatcccctctcaccatatttgttccttatatgctctgaaggactctcaaggctgctacactatgaagagactattgggaatttggatggattacgcttaacaaggaactcccctgctgtgtcacatctcctctttgctgatgatagtttgttgttttgtcgagctaatgaccaatcggctgttgctat

SEQ ID NO: 313257 - DNA, 1393 bp, Cannabis indica
ttgttgcatgaggggtggtggtggatttggcctttctttattgctttgctcaagtattttctcaacaccttgggtagagatagtattcgacaaactttttttttttgaacaagagaacttttttattcaaaaaaccagccaatacacacagctaagacaaaactcagcacaacaacacaaatgctgctgcaacaaacaacaacaaccccaacaagaacaactaccaactattaataatactaagtaaatacatatttttttgacaaactttataaggacccttggtcttaactttaatttgcacaactttcttgacatcttcgcttaatctacgagcaacagtacacaccatatcgaagatgcatcagtttctgttcttccaaatcaaatacaaggcagcagctacaactacattcaagactcgactttggaaatcatgaggcatagtcttgaaccttaagagtaactcagcaatagggttgggccattgaatacaaccaaaccatttacttatgtcttcaaaaacctatttagcattaacacaagtaaaaagcacatggtcatgagtttcaaactcaagtaaaaacctgtttagtatttgacaaacttgaatatactattttgtctaccttttctttgtcattttggattaaagtaggctccatttgatactcaaagatttccccacacctctcaaattcttcattgtttttccaagtactttcttcatcatcttgccacacatttttcattttacttggaagtacaccttgtggtctattatgcaactcccaagataactcctcaacttgcttctctagattctttaaggatgtggcattgctatgaattaagacatcatttttagccatatatttatctatcttatccatgtatgtgttcactttctccatgaatgcactcatcattgatattcgatctcttaataaatcttcttcccatggtccttgagtgtcattatcaaaagtttgctccatgtgggtataggtttctcccaaacttggttagttgttgaagaattccagcaacgctcatcatactccgccatgttctctaacatccaataggcttcatcaatagatagttggtagaaattggtggtaccatctcctccttatacccattctcttatgcttagatgcaacccatttaggaagacttcaagtacacactctttagacaaaccatggttaggaaaccgtattagaaaatccttatatctctacaatgctttatgtaaagactctaagtcatgttgaatgaaattagtaagtacttgttgacgaaacatcttaagtaccttgcaagaaaaactcaaacaaaacaggcaaacgtaaaagcaaacaataaaaataaaagaccaaattgaaaa

SEQ ID NO: 313258 - DNA, 791 bp, Cannabis indica
cgggatgatgtgaccttgacagtgctagtcgcattcgagtagctcgcacgaagcaggaccaaagatcaggttaagactcgcatataccaagatatatgcgaggactataaagatcttcctgctaagaggtaaagatcgcttctatacccaacgagttggtctggatgaccaacaatctcgataacccaataagaactcacatgtcttaagttatcgacttattgcaggatgtccatataagcgactcgaacaagacgcagacatctcaaactcgactagtcttgtacacatcttaagcctgcaagcttatgcgagaatatgaacagtcaacttgtgctatagaagtcgcatacgttgttgtatttagtgaattgggccgaaattgttctctttatttattgtatttatgtttttttattgatttaaatgttatattcaatgtacaaacggattgatgatgaaatcaatctctgtgtaatcaaaggacacttgcttagtatataaaggagtgatccaacatgaaatggataagacaaaaaatccttgcaacagtggactaagcagaccgtgatctggttgaaccagtatacttcctttgtgttctttatatttccagtacgtctgtgtatccatagcttaaatacttgccattctaggttgagtactcgcacatttctgtttatttttaatatattatttatttttgtgttatttaaattcctctaacaacatattaagagaccattcttttctttttatactaattcgcttagggttaggattgaattatt

SEQ ID NO: 313259 - DNA, 1037 bp, Cannabis indica
tctgtccattttgtgaagaagccgtctgctactactgcgtattttgtccttcctcagcctgtgggtaatgccccaatcaggtgaattcccatattgcgaaatgggtatggtgaggtcatcattcctaattctgttggtggtacacgaggtatatgtgaaaacctttggcatttgtcgcatctcttaacaaattcatgtgtgtctttgtttactgttgaccaatagtatccttgacggatgattttctttgagaaacttttccaacctgcatgatctccacaaaatccctcataaatttccttgatcattttattagcttctgctggtaacacacatcgtaagagaggtatagaataacctctcctgtacaatttgccttcgactattgtatagcaaggtattaagtacaaaagtttgtgtgcctcgattttatttgcaagaagttctctgttgagcatatacttggctatatgtgtcagccattttggtgaagtatctatcgtctcaacctcttcctttcacatatacttgggtcacttaagaattcaaatggtacccaatcaacttgtcgagttcatattgcgattctaattttgctaatgcatcgacattagagttttgttctcttgggatttgttcaattttaaaataatcaaactttttcaagttcttctgaactttttctaaatattttgccattttcatgccttttgcttggtattcccctaagacctgttttacaattaattgtgagtcgctaaagcatacgagatttttaaccttcattgtctcagctattctcaatccagccaacaaggcctcatattctgcctcgttgttcaaagtatcaaattgaaatctaaacgtgtagtggaatttgaagttgtcgggcaacatcattatgacccctgctcccgagccgttctcatttgaagccccatctacatttaacctccaagtttttgtatcgtgttcaccagctgggtcttcttttaagtttactccttcaattagaaaatcggccaaagcttggcctt

SEQ ID NO: 313260 - DNA, 688 bp, Cannabis indica
gaataaaaataaaaatgttatggtataatttgagtggtagagaaataaaagaaaggcgttaagcacataaataaaaggaaaaattaattaactaataataatattatctataagatcgaagaatagcaccacaaaatgtacatataatagctctccaagacttccaataaaatgggacgtaacaaaatctagtagcagtcttcatatcggccacgcttgctccgccgccacaccgtgaacatgttcccgccgccggcttgctccgccgcactttcctcttctgatccaccaaaaaacagaacaccaccatttttttaaaaaaagaaattatttatttatttgtgaaatttggtgatgaagaacaacaattgtctgaaaataaaatcttcttcttctatatggattttggtgttgtgtgagaatttggcgactgagaggagtttgagaacaaatatttctagttttgttggttgagttgaggagtaaaaggggttagctgcatttatatatacacgagagaagttaaaggtcgatcaagtcttgtccgagcaatgggtttgtcaccgttgattttgaatattagttaaatcatgtttattgtctccttctgactgacctgtagttatttgccacgtgttgagagcagttgaaatattaattagagaatggattgtggtgattgaatcgt

SEQ ID NO: 313261 - DNA, 1141 bp, Cannabis indica
ttaattgttcctttaatcacatttcactaattaatttgtaattaggttaagtaggattataatcctactttgatacccacttaatcacatatttaataaaatatgcatgcccacttaattatcataataattttccgagatattacaactattccctccttatagaaattttgtgcttgaaatttgtctaaacaactcatgatattgttcctgcaacttcgactttaattcttaagtcgcctttaatcttgttgttccttcacaacgcttttactaacattatagtctttatttcgcagtacttcctcttttctagtccaaaaacttgaatctactattccttagatgacaagtctaattaaagttccatacttttgtaactcagtatacgaatcatatctgcctcatacttctgaactttgaaataccaattgtaaactccaggtaagccagagggtatggctagctgataagctacctaatcttcctgtttccagaaccccaaacataccaataaatctgagacttaactttcctttcttcccaacttgaaatttaatatccctatactctagatcagcatagctctttcattcaaactataaagtacacatacgagcttgaatctttcctatggcctcactcattcttagatcgcttcagatctgaggttccttcgttcactgactttactccaacaaatgggcaaatgatcattctttccataaagcatatcatacggtgccacatcaatagtactctaataactgttattacatgaaaactcaatcaacggaagatgcttattccaggaatcctcaaaatctatttcaaatgcttgttacagactctctcagcatttagatgtaaactttcaatctcaatcaaagataattactttcggagcatcataggtttgaactattctcttgacaaatagattagtacaccaatccaccacaaacatattccactctgattaagaaactgtactgatcttacatatcttagttactcccaagtataaagagtatagtgtaatacaaaactcatttagaaccttctattcaatatccttatctgactgatacaccaaccttattttatatcataaaatccttcaaacaaaatcaaaagtcct

SEQ ID NO: 313262 - DNA, 930 bp, Cannabis indica
agggcatgatttagtacatatcaaaagttcggggagaaaaattgctaatgagcctaatttttttcttcttctcatcgtttattgctcttcaagagatctggtatagattctataacctacaatattttgacagtattttaacaattcaacattttaacaaacaaacaacaatagtaaaataatagtaaaaagaaccatcgacgtttgttctttttgtttcggtggtccagctattatttgggtgtccatttttaatttatatccctagtttccaataaaatacatgtaattaactaagaacgactctagaataacgttgaatattttaaaattcaatgcaaattactaatcgatttttttctcaggcataatatacattaatccccatttattttaatcacatatgtatataaatacaatttcagaaactacacatagtttttaatattgaattcgagatttatttttgagcatttatttttaattttgcatttaaaagaatttgaatgtgtttaagtgtctaacctttttgattcattaatttttggtcttgatgaagctgttgggtgtttatttgacgtcgatttcactgtttttacttgatctcgccgaaattaatgattatttactgattgttctcgtgctgctgtgacagttctgtcagtgtgtgtggaagatggaggtgccgtatgtgattttcggtgtgtatagcataaaggaaaaaaacagccagggcagtaattttgtaaagtttgtcgtttggctgtataaatgtaaaacttacccaaaatacaatatttatgaaaaatgaccatttttaagggaaattataataaatggccccaaatcataggactatgttagtttatgtcctcattttaaaaaaatatagcaaatgaccctaaatcataagactatgttaataaatgt

SEQ ID NO: 313263 - DNA, 643 bp, Cannabis indica
aatgctaccttaatgtaattgaaagattttaaagtttaaatgtcatgaaatagaaactattttatatattatgtcaaaaaaataaataaaaactattgtcttaaaggctagaaatactcatttttagttggtacaactgcataaatagctagatataaaaatcatcatgaatacaatatactgtaaacaacaaaatcataaagcacctagaaaaagaacccaaagataaattatacatattaaaatctgtataaaagcttctcaccaccatgcaaaaatgttgttataataatcaaatatatctaccaattatacaagactttttaagtaagtggcaacttaccaaaactgcatcagaacttgcagacttctctacgctctttctagtgaattataattttccatagttcttcatatgttgtaaattgtagcaccatgaaaaacctactgaaacaacacatagatctttaattggcatactcaaacagaaagtcatgtctaaaatattcttgaccccaccttagaatcttgtagttttgtaatatattgtttaatagttatatgtatgcatctgtgttgttaccagaaaacaaaatgagcaataggaaagatacacacatacgtcaaacaacataccaaaaaa

SEQ ID NO: 313264 - DNA, 836 bp, Cannabis indica
atttttgtaagttttcctttaagaaatggtgtagtttccatcagttaaacataagggtccatttggtacacaggaatagactgtattagacaggctaatctgtccagtccagtgtgtgggtatactggaagtttaaataactaattcaactaatctcatctgtttaggattatttatcacattcagcaggggggataaataatctcatacaagtgagatttctttttatcgttttctttattttggttttgctaatgtattttaaatttaattaataattttaatgagagagttattacaaatttattcatagattttttatcaaaagtttattcattaaaattagtaaaaatgtataattttaaatatcatacaaaatcttttaaaatttaaaataatattaattaaacaatagttgctttaattaattctaagagaaacaatatgataataaaattatatattctttttaaattattaaaaaaattatatcattaatttagaaaattaatatttgtattaaattagtggttaaattattatttagcataaataattttatattatttaaatatttttattttactattgtaattatgtatattaaatataaatgtgataaatttttttattttatatttgattatatactatatattattttattttattttataatttaattatttttattattcctttttattttattgttgggatttactgatttttatttatttattattatatatttttatttaatttaagttttttttaaaaaaaaataaataaataaaatagttcaatctattattaaaccaaacataaaattactt

SEQ ID NO: 313265 - DNA, 1181 bp, Cannabis indica
tatgtgtgataggagctacttgtaatctgttgagatgtttttgttgtttttcttcttcatatcagaagtcagactttaaaagagtatcttctttctttctttctttctaaatgaatcaatggacctataaatttttacactttggattcacactattaaatcaaaatgcttcaattcaaaatatgcaaaagtgttattccacaataaaatatatacattatgtgttttcactttactagtgataaagtataaatactaaggtgagattaaacacagctaaatgagattgagtgagctgttttgtgaccagagaaaaagtgtttgatgagaccaagaaagaaaaagtatttgatgagaccaaaagtttgtctgaaaaataagccaaacaatattacttctatttgctttaacttttcctcacaaattcactctgtaaaataatagtgagcggtcagtgggcagtggcatatctgataagcttttatgatcatacaataacatttaatactattatcattttctctcttagctttttattgaattcttatagtaaaagtactgcaacaactgagctactgaagtgaattaaaaccatggctgaacttgtgattggaccctttctctctacttcctttgattttttgctggagaagattgcttctccttatgttgaggaatttttatttaagggcaaaaatgaaacttcttctgttgtttctgagaggcttttcaagttgaagtcaaccttcaattctcttgctgcaattcgcttcgaagtggaaaaggaatcaaaaaccctgctgtggagaagtggctggacgatcctctggatgttgttgatgatgcggaggacttctttggcgatattgaatacgatgctatgaaacccaacaaagtgagtcaaagaaagaaaaacaaaaggccattagtaagttactcacttgtttctctaagccgtttgggcttagacaactcacctcacctctttggatacatgtaattgtcctctgcccaatgagagtggcttttacaagattggtggcctaccctcccaagtttcaattgcttgatcatacaatccaaaccaaaccaaacagcagctcccattaatttttaattgaggggtatgcattttccttgacaaagtctatgatatcttggaaaagtaagaaacacgatac

SEQ ID NO: 313266 - DNA, 1496 bp, Cannabis indica
tctttgagttttaaactctgatcaagtctaatcttaagtagctccatttccttcaagttgttctagcaattatgacatcatcaacatagacaagcatagcaatgaagccatgctcgaaatgtttgatgaagaatgaatgatttgagttagatgtgagaagccctcttcatcaaggacagtggaaaatttctcaaactacttccttgatgcttgtttcagcccatataaagatttctgaagtttgcatacaacattctttggcatctcccctttaggactatacccaggtggtagagtcataaacacatcctcatgcaactcaccatgaagaaaagcattatttacatctaattgatgtaaatgccagccatatatagcagccaaggctaagacaagaatgacagttgcaagctgtaactggagcaaatgtcttatagtattcaacaccgtcaagttgattgtaccctttagcaaccaaactagccttgtgcctttcaacagatccatctgcattaattaatcttgtacacccatttgcaacctatagcatgttagtgtgcaggcaaactaactacaatccaagtgtgattccttttaagagcttcaatttcagtatccatgacattgtcccaaacaggtataccagcagcttcattgtaacattttggtttatattggctagaaattgagcagatgaaagctttgaatcttggagataacctggagtaatcaagaatctgagaaagacaatgcatagtagaggaattagaagacttttgtgaaacataatcatctttggataagaaacaatgatatgatagtcttatagataagatcgcttagtgacattcctaataggtctaaaagtgggggaatgtgactcagttttagtgataggttgatgtgtgctttctgctgcaatagtattatcagaactatgttgctgtgtgctttctgctacagcattagcatcagaattatgctgaacaggttgtaaaggaaagaaatcagcataattgtcaggcagcccctcattagaaatgaaagggaaaatgaactcctgaaattgcacatctctaaagcaaaatattcgattagtattgagatcaagcaatttatagcctttcattcccatgagatacccccaaaaaaatacaagagacagctctaggtgaaaatttagacctgttttgatttaatgttgaagcatatgctagacaaccaaaaggtttcaaatgatcatagtgttaggctatttttagcctatgttttggatccaatttatgtgcattcttagctgtgttgggacggaattacgcttgttttctatgttttcaggttctttggagtaaaagaggtctcgggtgcagaaattcattgaaagacgtgctgagccgaagaaaaactcaaaaattgagtttttctatatctggccgcggcgatgaagaggctcgccgcggcgagatacgagaaacagaaagaggctgaaattggca

SEQ ID NO: 313267 - DNA, 1794 bp, Cannabis indica
caatacgacctaatacggcgttccaaacgagccctaaagtcaatatctattatgagagctttcatgttcttcctaggagaagttacactaaaatttgtactgggcaaaagcgttttcatagatgttttcaattgtatgcatatctcaggatataaataaccctttgcaaactggtgttttcaggaaaggaaattggaagaatattaaaatcaaaagagataatgttaacgttttcatagtcgaaattttaatcaactatggcaaactggtgttcaactagaattgtgatttatataaatgggactctccaaaaagaaaatgttccaaaactgtgctttgagttatatttagaaaaaaatcgagcagtaactggcacattattaaatgcatacttcagttgaacatattgggaagaggtctcactgccataaatgcatccaccatctgtcaaaagaagaaaaaatcagtattaatactaagggaagtggtggggtggtgggttccattgcaaattctatgatccaaatgcttccttgaaaatgagaaatggatttccattttcttggataaacacacatttcttgaaaatgctgttaacaggtgagaaagaatggaaaatatatgtttaagtgcaactacatggtgttgtaattaagatcaggaggatgcagaagcatacctcatctgtaacagcagctcttgatttactgtgcctttctactatttcagacagaacttgaatgagccgttgcttcacctcaccagttagcatgcggcccgcaccatactcctagaaataggaaaataaattgttaaacttgtgcaagcagtgctttcattatacaaaaatttgaaatgcatgagagcttataacgtttactaaacgccatacatgcatatccatcacgggaccagtttacaggaataagacagagatcttaccgtcctaatgtgttcaagttctgcatcatcctctaggaaaaaaccaaggtacttgatgggtatatcaacctgaaaaattgtatgacaacaataactctatcaattaaagactaatcaccatttctagtttaaatttcaaataaacactaattcatttggtactttaaaggaaagttaacatgttgtagcaagcatgtaacgatttctactatcattttccaagaaagggcaggggagcaacaataatacctcgagattggctcctaactttctgtgtttctctatagaatcttgtccaccagagaatgcatacttgtttacctgcatatacagcaaaatttagagctttcatagagctgtcacagcaatataaagccagagataacatgaattcattgaatatgattcaaagaaaaggtgaagaggaaccatgcaaaccagaatcagctgctactaagggaaccatgatagagatgattatatgagaaaatatgcagttgatgttacagaaacaatcaaacaaccaactacatgaaccagaaattaaccttgttcttaatatcctttgcagaatcagtgacatatatggcagaatttggatcactagcagacatttttcctgtctcaccctgcagttgttaagatgaagataaaggcataagcaattacttgggaaaataaaaagcaagagagattgcatagaaagttatttaatttgtaaaggaaaacgaaaatctcataactggatatttacgattcaagagtagcacagtaagtttcttttctttttttttttcccttttttttttggttaaacaaagagtagcacagtaagttaaaaaaatgaaaaaa

SEQ ID NO: 313268 - DNA, 999 bp, Cannabis indica
taagagccattcattccgtgggtgtaagggcccaatggaggcttgaagtggggacgttacaaagaagcatggtgtgaagagcctgaatgtgaggaaatagtggagagggtgtggaataatgagggagtggtgaattctacggggggatttagattgaagacgaggaaggtgggggctgccttacatggctggaataaaaagaagaagaaggcacttcaagaaaagacgaacaagctgaaaaaggcactctcggaattgtcatctcgacaggactctagttcatggggggagttgaaaacactagagaaacagttaaatgtggtgcttgagaaagatgagaaatattggcgacaaagaagtcgggcattatggctcaaatggggtgacttgaatacgaaatattttcataggaaagcctcagccagaaggaagaaaaatgagatcaaaggattgatggatagcatgggtatttggcaaaccgatattggtatgattagaaggatagtggagaacttttatggtagtcttttctcggcctcttcccatcatttggatcaagtagaggaggttttaagaagagttacacctaaagttacaaatgacatgaatgaggaattgatgcgtccgtttgttgctgaagaaataatacatgctgttaagcacatgaatccggttaaggctccgggagtggatgggctgcctgctctattttatcagaaattttggggtaaattacaagctgaagttattgcggtgtgcttgaagatgctgaatgacggggctaatattgagtgcttgaatgaaacaataattgctctaattcccaaagtggagaaaccggtccgagtggaagaatttcgcccaattagcctgtgtaatgttatttacaagatagtctcgaagtgtcttgcttgccggatgcgatcaactatgagtgttgtcattttccgatactcaaagtgcctttgtacagaaagattaattcatgataatgctatt

SEQ ID NO: 313269 - DNA, 613 bp, Cannabis indica
tctctctctcggtaatggaaaaccgaaccacaccccacaaaccttcaagaagcattcaccattataataggtaagttgtattttaactatttttttagacattaataacagtatgtagtttgttctcgttatatgtgtatggtgtttgtttgaactagggttatattactatttttttgctgaaatggtagatctaattttctctcgaaatataattttttttagagtttatcgattatttatcaatagaatatcgatgcaatgtcgataatatacaagaaaaggtcagggatgaccattatcgacatgatatattgttgactatatacctaattttagatttaagcattgtttgtcaacagtatattgacagtatgtcaataatatttggaaaatatattaacacacggattgtcgattatttgtcgatattttgttgatattttgtcgatgatttgaagaaaaaaaattatttctcgtcgtaatttttgtttgtcgacattttatcgatagaatgttgacattaatacaaaaaagtggctgaaacaagtgaaaacttttaaacataagtaaagaaaaaacaatcaagataactgttatcccaaatttggca

SEQ ID NO: 313270 - DNA, 1783 bp, Cannabis indica
  modified_base (18)..(18): a, c, t, g, unknown or other
ttttttggggaaaaaagntaaatcatctctaatcaattggacttgatgttcagagatggcgttgaatacagaggctcaagttgaaagcctaatctcttgggtcatcactctcaatgacagctttaagaagttcagttgccattactttcccaccaggcgccttgtctaagttcttagatttgggcactgtaagcttagctctaatgaactgagtcatatggagatcatattcatcaggaattcttctgcttctcttcatttgaggcatgacgacttcaacactcagttacttacaactcaagaaatgtcttttaagctttggaaaggtaaattcaaggtaattacaagagaaattttagttcaaagttgctcacatggaatagggttttagatttttgaaggtcttaaatatggaatttaagggtttctggagagttctaggatccttgaaaaaagtttagaaaaggacaaagaaggaagaaaaactaaaaacaaaaatggcactgaaaaaaaaaaaggaacaaaaaattgtctaccttagcagatgaagaacacttgaatgaagatgaaattccaaggctctcaaaaagacttgggcgtgggaagaagtatgggaagtgagaaaaacttgattgaaggctctcttatttataggtgagctaaatcccttaatcctaatgttattgagagtcttttaaattttaagcttaaaaggaaaagataaatgataagaaaaagataataatattttctcttctccttaatgaattttgaaattcctataagaataggaagagaaattctaaatttaaaatgtaacaacaattcctaatacaattaacactaaggtaaatttagagtttaaaaagaaaatgataaatgatatgcaaaatatcaaaaatcttttctcttcttatttttctctaaattttgaatggcacatccaaataagagtagaatttaaatccaattaatcctaatgacatgagaaatacatgaaaatcttaagtttttaaagaaaaagataaaagataggcaaaaaatgattagtttttcctctctttttttgcttaataaattttcaaaaatttccaagtgcaagatcagggaattcaagtccttgttttattgggaatgcttgaagaacaaaaatgattgcctaagattgtcaaaattgatgcccatctagtagttttgagagaaacgagctcagtacacatcataaagtcaactccacactagtgtaaagttgacttgggagaaaatgttaacccagaaatattccctagtgatgtggacatcaatatttgacatgtggcaagaaagataacatctcaaagttaagtagtcttgagttattgaggtcgacaaaccctagccctctgcccaggttgattccgagaacttcgaattgggtgtttggattctgataagtcatttccaactcactatcattcagtattatttaccatgaatacatggagtaaccaaatccaggcatcaagagctaaaaattcacgaatcagcaccttagaaatcaacctgggcacttagggtttcaccagtgcccaagttaacaaccctaactagggtttcagtttacgggggctgtcttagtgcaaatgggtcaaactttgcattggaacatgaactagacataccataaacatgtttgaggcattagaatcaaattcagagaactttcattttcgagcactcagacaccttgtgacagtcagtagtcccgtgatccgtaaggggaaataccgggtaagctgtgcaa

SEQ ID NO: 313271 - DNA, 2668 bp, Cannabis indica
aaaaattcttacaaaaaaaatatttatatactaattaaatttatatattaacttattaatctttttctaattttatagacaaataatgtataattttttatcttttaatttttaaaataaaaattatatatattaaaatatttattaattattatttatttaaaaaataaacatattagtaatcattttgtattaatataatttacattttaataaaaaatagagtaatgccaaaaggcgctattagtgtttagtacttttctaggtgtcataatttattagtacaattaagtatcaagtctcatataatttgattaataacttttaaagagtatcactaaacaatcatagggctacatctctagatagcgataaacaccactaatgctctataacaaatgtaagtagaaaataaataaaattaatgattaatgattaatatttaatatttaatataaattttctatcttatcaacaaaatatataactattttttatgatttttaattagcacataaataataatagactatttatgatttttaccaaattataacccttgaacttttcaagccgttagaaattctctttgaattattgagatcgttggactcaagaacttttgttcaattttactaatagaaatcgaacgtgaatgaaagttcaggtggtacaatttggtacatgtcaaagtttggggacactatttggtagatatcaaactttagaaggcacgatttagtacataaacaatcgttggcttagtataattgaaaaaaaaaattgactgaagtccttaaatctaataacctcactagttcaggagaaatttttaatgacctaaaaagtttgagagatatgatttggtacatgttaaagtttacacaataataatcttaattagcctaaacaataaaatacaaactactaaaaaaaataaaatatataattaaattttaaatgtggtccctagatggaatgatgacgaaccctacaaacgaagatgcatcttattcatataggtaccaatcaatcaatttaagccttcttcaactatgtagtctcatacctacacaatctcaaaatcatctaaaaaaccattacttttttaaaaaaaaaataaaataataataataatatgtaacccttaaaacataatgcaaaattcttgactaaaaaactttctgaattttttaaaataataaataaatcctaaaaaattctaattatatctccaatagtaatggaccaaaacatattgatgataattttattccttatgatcgaaacatctgtattctctattataatcctcatgatatgtcaatgtcatctcataaaattaaagactatgcttcttcaacctaacctacactacatgatcaccgaaaggtaaagccatgatttgcgtaattcaaactcaaaaggtgatgatctttctttctccattgtcctagctagaactagaaaaagaatggtgttgtttttaattgttcattttattttagaattttttataaaagaaataaaactatactaaattaatgtcatgtcattaagaatttgtttgcaacttaaatttaaaaaaataaaataaattaagaggtaaaattgtagaaaaaaatagtaaagagaaatattttctataaacatgatgtgaaactttttaatatttttgctctaaattttataaaattatactacactcatattttatatttagaaaaaaaaaagatttttttttgagaaaataaatgtatctattatagacaaatcacaatatgtagatatagctcaaagagcaaaaacaacaataagaaaataacacgtgaataatagcttgacacgtaatggtcaggtacttacggaagtttcagaaatataacttaggtattattactgtaaaatataaaacttaaatatttatctacaattgagagttaaatttaagtattttatgccgcaaattacttaatggtgaatccaaagacaaatatcgtttttgtataaatacgtatttattataaacacatcaacaaaaggggcggtggcgcagttggctagcgcgtaggtctcatagcttagagtgatcctgaggtcgagagttcgagcctctctcgccccatttttgtttcttttttttttttaaacataagaaaagatttaataattaaaatgatcaaatattatttgttggttttctgagattcattttcactgttatgttaaactagtattgataaatatctcattggattggagcaactttattatttttttttacttctattctagctctcacacactctatccaaaataagcaatgatgagtatgtgaagaagagttgatttgtaacttgattttttgaataaaataattaaaaaaaaaaaatcaaagttcatactgcacttgggtacaggctggggcctgagaatgtttttttgcaaggaaatatacccttatatataataatgaaagttaagataaaatacttaaaagcttaaaagaaatatttttcaaatctaaccaaatataatttgtaaccacttgaggctagttcaagcctcaagtagccataggtgggtgtgtgtgttggaagtcctggttcgagtcccaagtaaaatatggttgtaatatataagcgcttaaatccaaaaaaaaaaaaaa

SEQ ID NO: 313272 - DNA, 2774 bp, Cannabis indica
atcaaactgggaatattaaaatacggaatttcagtagatgttgattaagttatgtttctaccaaaaaatactaataataagttttttaaatgagagatcataagaattagggctcgaaaatgcatatttattatgggataattacataagacacaaattttttgtaaaaaaattatatttttacgtaaagaattttttttttacatttttacggttatcatagaaacaacacaaaaacaataagaaaattacataaaagtaacataaaaataacatctaaataatataaaacaacaacaaaaaataacatatagataaaaaaaaaattaaacaacaaattaacaagagtacaacataaaaagaccgtattttctgtaaataaaatcaaaaaaatcgtaaaaatatttaaaattctgtgaaaccgtatttttataatttttttttttggttatttttgtgtatttgtaaaataatctcatttattattcttaaatatttaaataaattaagtattaactaatttattttaataaattaagtttgatatatttattattgaaatatttaatttttggctattttgtagggaaattttgttttggaaatatgagataaacaagaaaactaaaagggaaatttacatagtatactaacttttgctattttcttaaaaatactgtcaggcggaattttttacttttttattgtgtttttttataagtttcatactgcagtatactgttttaagtttacactggtgttttactggtgttctactgttattttgagttgttctgctatgtgttttactggtgttttataaaaatacagtatttttgaaaagatttccgtgtgacagtatttttgtaaaagttaatctaaattccagtatttttgtaaatttcccaactaaaagaactaaactaaatcttaagatccagaatatagaaaattttgcaaggaaaataaagcccaataagtagcaccaaacccaaaaggaggagcttctccttggaaaaattacactaaaatatgtttttttttttagtttgataaatacatgagatctttaaatttgtgtattttttttatgcattttttttttgttacattttgatggattttatttctcatgttatttttttttttttttttttaagtaaattgtatagcattacaattataaaatatgtgcatgtcgggctgggtctgtttgaattagtgcacttaaaacgtatttctattaaaaagtagttacctgtatatttaaaataaagaaattatttatcattttgtttacatatcatttatctagaaacgatcatttcttattcattgtaacataacattgaattaatattaaaagttggagttttgatattaattaagattatgagtacaacttatctattgtcttgaacaaaataatctatccaagttattaagtgtagttgacataataggatatgggtgtcgtatatacacaataaatgattgtatgagactagggacgatgaaagctttttttttttttttttttttttttttttgatttaagcgtttatatattacatcatgcataacttgggactcgaacccaggacctccaacacacacgcaccccctatggccacttgagctatcctcaagtggtttcaacaatattcctctgtttgtaactttattttgcttactctgttccctacactccccttcctccacgtcttcactaggacgatgaaagcttagaactcctaataatctccattaaaatatagaagttcatcatttatcacacgatggtcgtatggactttatcttaatcctgaagtgacttatgaactcatatttatagtcttataatttttcgacttatcgggtaaagtttataagagagaacatagatcatatcttacagttataggactatatatagcagggaacatattgcacagctatattttcttgattgtggtgtagattaaatattccttacagtattgtaataacttacagaaatgttcatcaaatatcaactgattgataaacacgtaattagaaatgttaacaagcgaagatacttagctctaattatgaatattttgtggaagatcataacttatgtaatgattaaatcaatggacataaattaacgtaattgattgcttcaaaataatacatagactatatgttttgagagtgcaactattatttattagtgagccaaaattagtgagataattaagttattagagctcagaactacagctccatcagtcatcaaactagcttcataatacaaacaaagtatttggtaaaactagaaaataataatggttactatttatgaaaaataaatctataaaatattaatttatttagcacaataaaataataaaatattatttatttatttattttagaaaaataatttgcaaaataaatgttatttttgaaataataaatagagaaaataaaatataatgatatttttatagaaaattaattatttatacaatttattttttagaaaaataaaaggtggtataaataaaaggaagagaaaaatatagtattagacggtataagggttcatttggtacgtcatataacacggtattatattgtatagtattatattgaattgtattttatgcaatatttaaaactatatgtggtattaactcttataaacacttaaatatataatgttttagtataaattaaagcttaacatagtgttatataaaatatgatatataatccaatttaat

SEQ ID NO: 313273 - DNA, 997 bp, Cannabis indica
ataactgggtcaggaacgttctcgataaagtataactaaccgcgaatctagcctatactcagtactttagtcatactgatgtggtagcaattaattcatactatttggaggcctagcatatatatttttgcatctccgtgtaactctatgtacacttcaccaataccctgatatgctaatctgatggccactgatttgcctaacatatatttattggtacctcagtgcaactctatgtacacctctctaataccctaatatgttattctaatagcaactaacatgcacactaaacatgtatacatatatgcaaatcattctactaatcttaccttaattctgaatgcaagtgtgctggtaactctgagtgaaaactgctactcgacaatttatggccctaagtcacaatttacgtaaaacttgtaagtgatccactaaatcacttttggggacttaaacttgaaactaaaagtttctctatctataaataacatgactaaatcctacatatcgagaaaatggctgaaaaaagggattttgagaaaagtacccaaaaaattggtaggccatttctgtgaaaatggcagtctatttttttttttttttgttttttgcctagaaaaatggtaggctgttttcacagcaaaacctacccaaatttccaaacttcagtaaaccacaaccaatctatcacaaactgtctataacttcaattaatgctaaaataaacctatttcatcaaaaaataccaactataaagccttgaatcaaaaactacaattgttgagctaagtttgagctcaaaactcaaacctagctcaaatcttgccaactacaaacaatctgctcaacaccagttcaaacaaacctaaattaaaccccaaaactcatttaaaacaacaacaaaactcaacagaacctaaaacaagaaaacaccataaaaacctcaaataaaccttgaaattaaagagaggtgaatatgttgggttttatgccc

SEQ ID NO: 313274 - DNA, 1359 bp, Cannabis indica
aaaataatttccaacaggaatttgttcaattttgaagtaatcaaatctttccaagtttttttgaactttttccaaatatttggccatcctaatccccttttcttggtcttccccaagtaattgatttacaatcaattggccactaatttgcctaacatatatttattggtacctcggtgcaactctatatgcacctcactgataccatgatatgttattctgacggtaactaacatgcacattaaacatgtatacatatatgcaaatcattctactaatcttaccttaatttcgaatgcaagcgtgtcggtaactcaagtgaaaactgctgctctatgatttaaggtcctaagtcacaatttacgtaaaactggtaagtgatccgctaaatcactttcgaggacttaaacttggaaactaaaagttttcctattgataaataacatgactacatcctacatatcgagaaaatcgctgaaaatagaattttggaaaaagtaccccaaaaaatggtaggttgtttctaagcaaacggccggccatttttctgggttttctgcctagaaaaatggtaggttgttatactagaaacgacctcccatttttacagcatgttttcccaaaaattccaaaactacctcaattcgaatctaaaccttcccaaactttccaaaacacctaacttaggtccaataatcatatttcaacaaataaaagcatctacaaaactctgaatcaaaattttccataaaaaaaaccaagttggagcttgaaagctcaaaccttgcccaagcctaacaacaaccaccaaaaacccattaatcaacataagcaacttagaaattacactagaaataaactctaggcaacccaagttcgaacagaagatacaaccccaaaatcacatattaaacctaactttaaactcaacaaaaatcaaagagaagcaaaaaggatcttaccttgagttgaacctagctttaacgtaacgccctaaataattaggaacactacccaaaatacttttgaaaccctaatcccctaactggaattactaaccaaaatggcacggaatttaaacttttataataaacagaatgaaaataaaacttgtaataattaaactttacaacagttgggatcccaaaaatatttacaaactttattacaagtctttttctttcagccgacctaagcggcaaaatagagtttcaaaatacatcactagtagacccttaacccgcttggtatggtgtggcccggacatgtacattcttcgcccaactcctaaactcatggctgatcagctaaagttttaccctttcctgcatagtagagcacccgtgagccaagcccagc

SEQ ID NO: 313275 - DNA, 1188 bp, Cannabis indica
tgttatctcaatttttgcatagggtgacgtggcacttacttatatgacacgtggagcgcattctatgatctagacaggcggtatgttacatgatgtatcgtccagtgtgatttatcatttataaataactcgtttaataaataagcaagaatattcgaacaaggtacattgcatcgtctgaccaatcttaacgttgcagccagcttgcatacacctaccagggtaaatgcgactggaagatctttagagatactttcgataaaaagttcaagcattcaattctcgatcacatcttaattttgtgggagagatttggtacttagaagagtaagagaaaacatccatagtttccctttttactttatttaatttaggaaagtaactagtttcctttttcattctttatttcttttaggaaacttaatgaatgtaattattccctataaatagtggagtcatttcactatttagggatctaaaattattcattcaaaagagcacttaagctgctaaaatctctataagctttcgagagagatcaagagttcttacttctcttctcacaagtaatacaagtaaaatgggaataggctattaccatcatcacagggttgaacctctatgagaaatctgtatttttattttgcttatttcttattcaaattctataattttctaattattttaaagactcagtgttgttggctaaaagcgatgtcaatattttggtgctttcattgagagcaaagaacacgattgttgttttgaatctcttcaaaacacacaaaaatggttgtgaccacaaggaggggtaatcccactgaaacaactgatttaatggctacagatcctaatgtgaaaactccagcaaatcagtgagatccagtgaggacaaatcctgatccaactattcctcaacctcaaagaggtccccaattagtgggacaaggagtgacaacccctctggctgggttcactctgggaacgcaagaagctggtgttgggttttgtgccctaaataaaacccattacaatttgattagttatcaatctaagaaatttgaagtgatttatgtttgcatgaatttttcatgcttatggtttaatatgtctaatatatgcacaaaatctattaagtccagaacatatatttattcacaattacagtattgtcaacatagtggaatg

SEQ ID NO: 313276 - DNA, 2317 bp, Cannabis indica
atatgaattttgtcaagaataacaccacaatcagaggctcactatttttttggtctaagatgaactcccaaagaattgaggagaaaactaccctcttccatctagatcaactccaaatttgagttttgtagtcatctttcacaccaccaaagtaggccatagacttggatttattggcaataagacatgtagtcacaaaaggttttaaaagcctctaggacatgaccaatagatctttcatttcccttgcaaaaaatgatcaagtcattcgcaaaacaaaggttcactagttttaaagacctacgaagggagtgaaacctgaagcccttcaatttggacgttttaatcaacaatcttgtcagatactccgtagttaatacaaataagagaggagatatcgggtccccttggcgaagacctttctcccctttaaaagagccatgtaattgcctattcatcataatgacataaaagcaccatggatgcaacttaaaatcaaagaaattaacttggaaggaacgcgaaggtccttaagcaagtcaaagataaaaccccaatgaaaagtgtcatatgccttgctcagatcaatcttgaatatacttctagcagaaatattcttccttgtgtagcctcttaagaggtcttggaaaattaagatattatgggtcgactgtctgcttttaataaatgcacattagttgtcatgaaccaggctcggcagcacctctgagattctcacataaatcatctttgagatgcatatatagagtgtgttgcagcagacaatcagtctataatcactcacattcttaggactatctttcttgtgtataagagaaatggtagtctcattaagttcctttggaaggctaccattttgaaaaaatcccaaaattgcgtgagaaacaacctctccgatctcattccataattctttaaaaaagccagaaccaaatccatctagaccctgactcttggaggtgtggatactaaacaaagccttcttgacatcagctttattgaaaggtcgaatcaattaaacctgttgcagtaaattcagtttcctcccatcatccaaactgttctcttcaatccttcttgtagctgagcttttcttccccataaagatgcaaaaatgttgaaacaattctcaaccaatttgggatagtcctcaactatagtgtcatcattcttgtaagccacgattttattatttgattttcttttttttttcatgatggcatggaaatagctagaattttcatccccatatctcaaccaggttattttcgaatgctggtgaagatagctgatatactgctttttattggaaacgtatctctgatacattaccttctcattttgagtcataacagggcaattcaagttgatagcaagacctttctgggccttgttagaaacctcatttgctttcgtgtactgagttgttacacatcccttctcagctttaaagtttcttaataatgttaaagaggttagtttccttagagtccttccaccttgtgagaactatctctttaaatccttctttgaacgcgcaataattgaaaaatctaaacgatctaggaccagaattattactttcaacaagcttaataagacaataactatgatctaaaatagctcccagttgtacctagctttagtgttcaggaatacatctaaccaggcctcattagagaaaactctgtcaagtttcaagtagattctcacacccacttcattttattagaacaagtaaagtaagcccccaaactttttagctcatcaacttgactcaaagcgagccaatcatgagcatattgaacttttgaagcttttacttgtctacctccatatctatccttatagaagaacatggcattaatgtctcctataatgatccaaggtttcgacaagttaccaaaacttgcaagtttgttccaaagatccttcctctcagttaaagaattacttccatacacagccgtaataaagaaatcatccttgaagcctaccattttaaccttacaatgcacaaactgcatatcttccataaccacctggaccttgaccaacttattgtcggaattatttttaccaggatctagatttactaccatgtatgttatttaacatcctaaatatgaatttctgaaacaatgtaaataaacacagataaagtttgagaaaccttacagtgggtgcagcggaattaaatgactccttacactcagatctctaacccttgtatcctttctgtagcagagtatcaccaagatctgagtccgaaactccttccttgtgtttggattct

SEQ ID NO: 313277 - DNA, 1253 bp, Cannabis indica
taaatggaagatgatatggaaatccgcgattcacccccgtatgaagctcatttggtggcagctggagagggatgcatttccaactagaggtaaaatagccaactttatggatctaaataacgtttgctgtcctgtgtgtggtgaagaagtggagacaatttttcacttgttgtggaaatgctccttggccaaagccatatagtttaactcatccatgggactacgagtagacttggtagatgtgaatggatgggaacagtggaaagattggtttatggtggacatcaacaaacccccaaacttaaccttccttgagattattgtcactgctttttgtgtggtggaaacagtttggcatgaaagaaactctatagtgcatagtcagtcaagaagcccgatttcgaaggtggtgtttactgtcaatagcaaaattcgagatcacatcaaggttgcatccaatgatgtggttgatttctgtgagtggcgtccccctccttagtagtggctatgctgcaattgcgacatatcttatgatgaagatggagtggtgttagcgactgtggttcgagatgataaaggtcatattgttaccattaaaacagagagaagctcaactactgatccgctgattggggaagggcttgcagtgtgtatggcagccgaattgataatagagatgagggccaagtatgtcatctttcagagtgataatatggaggtagccagagatttatccactgagacaggaatagacatccatttcaaattgattcatctcagaaggcgcttccatcagctatgtactcaactttctagttggggaatcaggcatgtgaatagaagatgcaactacatggcgcataatgttgcaaaatgggcaaaggagacaaaggtaataggatttactaagcgtggtgacatggatccaaatgtgctgaatgattacattgagtggatgaagcatgctggttaaggagttgcaagaaagccatgtgctagtttttttttttttacattgtctttggtttaatgtctgtagtcttcgtttctttactgtttgttgaagtttttctaaggttgtactctgtttgtagactttctatttggtttaatgaattattctggggtgtttaacaccccctcccttataaaaaaaataggaaaaagaacataattatttcaagagaatgtgacaatactcgaaaacactactaaaacaacaaaaaaaaaaataaaaaacaataaaaacaagc

SEQ ID NO: 313278 - DNA, 780 bp, Cannabis indica
aatcacattaaagtagcaataaaatcaaaatcgtccataaatgtattttaaatctaatttaaatgcagaaatattaatgtaaattataccaatataatcaaaaataaattactctttcaatgaatgcacttataaaaacaaaattaaaatttaaaattgactaatatattcataaaagtatagagtaaaaaaaaattcaaaaataaaataaaattataaatagtaaaaatttcaaactcacacaactaaaaaattttaaaaatgagatggtaatataaaatcaaaaataaataagaaaataataaatcaaaaatgtaatttaataattatattaaatagatattaaaattcttataaaaaaatatgcaaaaatccttaaaaattaaattaaaattttcgaaaatgtagtatatggaaagaaatcaaattacaattaataactattattatctaataaattatattgataataatgaagtgattatcatttattacaaaaatatattaaaattaaaaacttctacattgtaacttacacttcgtaaattgtgatgatcatttaaagcagccaccattaatgaatgtactgccatcaccacttcgttcactgtcgttgccacctccgaccacggcaaagataaacaacaattacataactaatcggagaactcctgtgcacaagctaaatataacaaaacagacacatatgaataatgacaaaacaaaaaataataaaacaactcaaatccatgttattaaatatataattatatatatgta

SEQ ID NO: 313279 - DNA, 896 bp, Cannabis indica
aatatatttttagtcacaataataatttttgtgactaaaaataaattagctagtgacaatttatatctaaaaattatattttagttacaaataactttttgatgtgagtaaaaatcacatttaatcacaaaaattttatgttgggactaaaaatttgtcactaaatactattttttgtagtgaaagtgtgcgtgtgttggtcataatggaccaacaatatgtgtgctctgataaagttgcatgagaatcatttttgttttagagggtaaattatatattgtcttattaggacactatatatatatacattatagtaaaatattatttttaaaaattttaaataatttattgagttaaaaataatatttaaataacttgttgtatgcagaaaacagtcttagtgaagaaaatgttgttagacattgctttcatcatcgtaattattataacaaaataacaaagctagtaaaaaataccttataaggttaatttgatggttaaaaaaaaaattctaaataaataatcactaatattggtaggatatgacaacttttatgatatctctaaaatacctctatttacatcacccccatttacaccatcggaccacccatcgggccacccatcggaccacccatcggaccacccatcgaaccaccatcgcggatcagatctgctacctaatttttttttttttttttttttttttttttattgtttttgtacatacaaagtagcatcaggtgaccatcggaccccatcagactaccaatttttttattttttttaatgtttttgcactaaaaaaaagtatgagaaatttgagaggggtatttttgggttttggataaagtggtcatatattttccatggtgatatgtattagtttagaaata

SEQ ID NO: 313280 - DNA, 1093 bp, Cannabis indica
aagaccaaagtttgagctctaaagctcaaaccttgtctaaataccaaaccaaaccaccaattagctctaattctgctcaaacaacatcattaatactccgaaaattcaaacgacacagcacaacatttacaacaaccttaaatcccaaaaatatgtatgaaacttagcttagaactttaagaaatcaaaaagagaagatctaaggagtttaccttggattgaaatcactaaaagcttgctaattactctgatttgcagcaaagaaaaacccaattgctacaggtttcttgagggttcgaacaagagaaagagaaaagatgattttctcttaattttcctttttttttctatttttcttaataatacactaaatgaaaagataaaattaagtcattttatctaatagtatccagctgcgacactaaaaactagccacctaatctccaagtctaaatgactaaaatgcccctactaacatgactaaagggtaaaaaggctttaggggcaaaatggtcaaaaaccataactccgattaatcctaacattctaaatatataactatattgtcccactattactaaaatactaaaatgtaattttattggtcaaacgtcgtgttccaatgttgtcgagcacaaaaaataaaaaacataaattttcatatatagcataaataatacaccctaatttcaaataaatctccatatgttcataaattataattaataatctagttcataattaagccctaattatttgctaattcccatattaaaattaagcggtcttgacaaaagtatttaaaaggcagtaaacttttttgaaaactagaaatattcactactatataagagaataattatacatactttatccatacactgtaggttttccaagatttgctttaaggcctgaagaatttgcaaaaagcttgaaaccccttagaaaaagagttgtcgaaacataatctgtaaagaccgcatatgaataatactttgaattattaaataattagggtttatgtatgagatttttattattataaaataataagacgattatgggaatttatttgagttcatatatttattta

SEQ ID NO: 313281 - DNA, 710 bp, Cannabis indica
taactattattattattattattgaactaaattctaagagtctattttataatatcatactaaagtattgtaccggttccttattttctttttcgtttttttttttgttggtaatcgagaaaaagtatataatacagagatgatttattgttgattttttttttctttttttgataaagaatttattgttgaattattaagtgtttaaaaaaaatttgttatagtggaatgggtaaagggaagaacaacctatcgccgacatctactacgttacagagttgaatggttaagaaattgacaggtggcaaaagattaaaagtcccttattattaataaataaataattattaatgaagaccgacttttggttagtttcagattttaatgtctctcacccaagcaacaaactaactttacttcattattactgaaatacccttggtagactgtattattcatgaatcataactatgaagaaaataagttaataaaaaaaaatggaagaaaatgaaaaatttgacaatgcatgcttaggctatgtttggtgggagggagggagggagagtaggatggatggagaggttaaagaggatggagagtaagagggatagagaggattgttaatcttccttgtattgtttggtattaagtgagagtgtgaggtgggaatgatggagaaaaaaattaattattaaaattacaaaattgtc

SEQ ID NO: 313282 - DNA, 1312 bp, Cannabis indica
gggcataaaacccaacactagatggcttcatttttcttcttgaaagcacttgtatcttccttgtggagaaaactaagggaaatgtctggacaaattctctagaaagaggtcccagattgcctctggttgagatatgtcaacctaggcacccataatggccttggggcatgcactaggcacccaggtggtgggaaacatctttgaaattggtttctatgatgctcaatcttctttttggtcaaaatttctccgcggattttagtttcgtcaaatttacacaggcataacttggtgaaacgaaattgattcccaagttgaaattgcaacctatatacccatagttttgtatgggctcctttgggatgttgttgatgaaatttcatgtccttgcatcttacctttatggatttgaggaattgtggtccaagtatgtccctaaaaacctaaactctagccacagggcgcccaaatcgactatattttaacctaggcccccattagggctcctgggtatccaggtgccatttcttatagactcatctccaaagtctgaaacttggctggggcatgtctctcatgtatcttaggacaatgaataaggatatttcccacaagaagttgataggaaccaaaactgatgtaggacgttgcatggggtgttaacctgtgcgcccaacactaatgctagacccaggttgagccttgagatgtccacttgacatccttagtttcatggttcatcattttcaggatgctaggacatttttgcttgaactttttcgaacaacagtagctagaaatgtctttattgaatcttaatgcttacctaggcgcccactagtgtcaaggataccatgataggatacaagagataaatcattattatcatgtaatatagatttaatctatgtaaatatgttgagatcttatagccagcccaaaatatctcttggaaactcagcacgcaggccggtgaggtcaatatggacatgctggagaaggtagtcacctcatggtagctctgacttattcttgcccttacttgcaccacatagcacctgtgagtcacaaggacttagtaagaaaagataataatcatataggttattattcaaatattatcatttatacacaatcagaatcaaaccatcacgcattattctaatataaaatccaaatcagtactggtatctgccatgaataagcatcagtatacagatatctggtaatacaaaactattgtaccaataatatgaatcatattcatttaatattataaattatatatatgttacctcataaagtaactgtt

SEQ ID NO: 313283 - DNA, 846 bp, Cannabis indica
aaaaaaattattttaaagtatataaaaaaaaaccctaaaaaaatagtgatttaatattatttctccccacatatttcttaatgaaaaaaaaaatcacacaaattgaattaagtatgtagcatgtttgaggaaaattttgattaattttttaaaaaatttgtgtgcttggtgagattgcatttttaattaacttcaattttgtgctttaatgaacataaaattataattggtaaatttctagcaattgaagtggtttatgcatgctaaatgtggattgtagaaagttggttgagaagaaaattatagaacttgtttgtttactatttgaggtgaaatgatagatgatgcatgactagaaaagtgattgagacaatttttagattgtgtctttcaagctaaccttgtttaaatttctctttaattactcttttttagcctaaagttatactttttattgtcaattacttgttttgagcttaactgaatactttattatttttcagtcctaaatggatatcatgagcatataaagatgtaaaagagagaaatgaattgtattaagtgttatcctttgtagagtggtattgacaatagaaaagttcaagtgaatgttgaggacaaaaaaaagagtacaaatttgaaaaaaataaaataaaagaaaaataaaacaaacaaacaaactgttataaaataatataaaataatataaagtagatgagaagaaagaagaagaagatgaagagagaaagagaaagtgaatgagaatttctgagttgtttattccaatggggtgaacccctatttatacaaatacaagagtgagatattaaaaaactaagaaaaagg

SEQ ID NO: 313284 - DNA, 1561 bp, Cannabis indica
tattaccctagtgattattgattggactcattgagcggttatatgttgagattaaaaactatgcatttaaggcataatttggttggactcagtgattagaaccgacatgaatcgttctaaggccttattgtatttagacgtgtgagcgtaacacgtgggtctatgccatatggacataaagggcgtgagagcgcaacacgcaggtctatatcaaataataagtgaaatgacattattatatatggggtatgttatttgtaattattaatatctttactgccttgcagcgcttggctcacgggggctctattgtgtaggaaaggataaatcagtctgtgatcaaccatgagtacgagagcttggtggtgcttgtacatgttcaggccacactagaccaagcgggttggggtctaccagtgatgtattttgtaatctctgtttttccacttaggtcggcacatgagttaaacttgaaatattttgtgaaaatatttgtgggatcccaaatcatataacttttagttttgtctataaagtaaaaaaaattgttacaagttatatttttactctgttacagataaaatttaaatttcccacgcttatctttttagtaatccttgattagcgggactagggttttaatatcagttgtcgtagggtgcttacttgttagggcgttacagtttggtatcagagtgccaaggtttttaaacttcctatagaccggctgaacatgtacaatcatcatcagagacaagctcggctcgtggtgcagaaagtgttgatagtaaacgcttaactgcttatgtgattatttatttaccgcttttcattttaggcagcatgtgagcatgtagtatatttgtgatatgaagccatgtttagtatattaattgataaatgtttatttatttggaatgaaatagttgagtttgggtttaaaggcaataaatgcataagtgtggtattagtgcgtgactcgtcggggttgttgattacagggttatttgtgaaaatggaccctttacaatcatcttgaccacagggcgagcaagtagagcctggtgtaaaccaaatcaatccaccggcaccgcctatgcctccgtagaatttgggggataacgtgggggttggcaatgctaatccgcctcctgactagcagcaaatgtttcaagaaatgcaaggtatcatactttgtcaagaggaagaattgcgtcagttaaggcaaccgacaccggtagctcctgtagaataagttttaccaccagctcctgtgccaatggtgggtaaccaggggttcatatcgtcgcatagagattcaatatttgagcgctttgtaaagctgcaacctccaacatctttgggaggtaatgatataattaaagatgagcaatgaatgagtactattacctgcatcctagattatatgggggtgacgggaacagagagagtgagttgtgttgcctttatgtgccaatatcatgcccgcgtctggtgagacattgtggggcagatacgagatgttagtatgatgacttgggatgagtttaagagtctgctt

SEQ ID NO: 313285 - DNA, 1185 bp, Cannabis indica
attactcatatactatttttaatttttcctaagaaaaaaatattttcggtttgggttactccgatagtttttatgtggattttgggttcgatttaagttctccgttggttgctatgtagattttcgtaaaaaaaaaacactttaaagtgtaaaaataaaaaaatcccaatttttaaaacttccataaatttaaaatgaaaattctcattataagtaatggaagtaacacaaaaatatttttatttgataattatatacttaaaaaaacactataaatcttgtttataataattatacttcataaaattaaataaatttactaaaaaatgattataattttgaagtagccacaatattttataacaataagtaaactaagctcctactcgcaaaaattttgagtatgttacttttgtagtatttttctcattaatatgattagtgttattccaaaatttaagtgtaaattattaaagttactgtcctcttttaagtgtaaattaattccagactttcttgagatttccactgtgtaattgatgtacaaaataaaaataataagtttcttgatttatgcactattaattttggggaactaaattaatgtaataatttcctataaatagtgaaactatttcattatttagggatttaaaatctcacttttaaaaagagtatttatactgcttaattctcggtaaatactttcggaaaagatcaaaattttcttgcttcttattttataagtgaaatataactaaaaaggtagtagattataccacaatcacaggtgtgagcctctataacaatttatgtgttcttttttactttatattattcataacctgtttgaatttaatcattctcaatcactttaaaggcttaatgttattagctaaaagcgaggtcaacaattagatttttagtttgattttgaacaagccattaaaaacgagtctaacccattcttgaaaagaaatgcttttggtgcaattcatttcactataaaatttcatatcgatattagagcactcacatttgatgttttaaaatattttaagaattaaactaaaaatacgctacattagatattctaaacttttctttttttattttggagattctttaaaattcactattcatgttctgtatttataatattgtggacaatgtcccacatgaaat

SEQ ID NO: 313286 - DNA, 1658 bp, Cannabis indica
agttgatggagttggaactgagactactcctgcgctctaggtgccaggagcaggcctcgaaaccagatcctcaactcttcctccaaggccaccaccaaagactcctgagactagcactaatgaccagattccacctgagtagccttaattggatattattgaccttgagaaggtcaatccttgggttgcccagctcaaataaactgtggttgacttgtaacaatagctgtgagactctctcgataaacaacatgaacagttttaacactagttcgtgaaaaattgaaggaacattgaaagccaatgcgttgagcaggaacagtagagagctaatcagtctcaatggattagagaagtttattgctctaatcgtggaactacttctcgtaggggttcttttcgagttggtgagagagactcaccaacgaccaactggtcacatgggaactagtgctttaggtgaaaccctgaatgctcgaaatgccattaccacacatagtaaccgagcaagcactagacaaacaccaggcatggagacctttcggagggaaagtaccttcgaacaagagcctgagaggactcaagctcatggaagccaaccaataggccctctacctagtgttaagcgaccctgcaacattgagagaaccaataggactcctccatcgagtccttctcaatgttcccatgacaccaagcctcaagaccctggaaggggaaagggacctactactcaaactgaaggaggtagtaggagataatactttgaaattagaggctacgagatccgacaggtaaggaccaacagtacaagtacttccctcgagtgcacggagaagaattgaacttgagcaacaaaaattcgattctcttcacacttgtgatccagctgaagaatactttaggggaagtagccactataacgctccgaatgaacactcccatagcggatcgtcttgagatgatcaacagttcatttcagaggcatcaccagtgtttccttcacgaacccatagtcaagagacaactacaagacccaggtcgaccggagtacaagattaatctaaaagactaagagacttacatgacctcttaaccaagaaacggtgtaaggggaaacttttagagaagatcctgattgggtaacagaagctccagctgggatgcagaccaccacccatggggtcaacctggtagaatttgacaccttggtagctttagtgaagggatcacggtgttgggctttgtgccctaaataaaactctatttcaatgtaatctttatcattttattatcaataaagagacggaagtattttcatcatttatttagtgtgtcattgggttcatgttatcatttatatgtttatttaatttataattcatccaaacccttatcacattgatattcttgtttattgtgtcatcagcacagtggaaagtaatcaagattgtgtgattaaatatatatattcctagatttatcagtacacagggtttaactgataggataatctacaacatagtttacttgcaccttggataagtgctatgtcctttccaggacattggttaaagtaaagcttgggttggatgcatggagtatgcattgaaagggaccaatattgaacttggattagatatgataaatttaccgta

SEQ ID NO: 313287 - DNA, 964 bp, Cannabis indica
tactttattgttgttttttctatcttttatttaatcaaatagaagtaaaggtttaatttcaaagtacttaactacactccctgtgggatcgacctcactcctagtgagtctactacttgaaacgatacgtacacttgcgtgtgcaaaatatcgcaacaacaatctatatctgtatatattggtcactctctccctctatacatgtctatatatatatatatgcatgtgcgtgtgtacaacggctgttattcatgtaaagagaatcgaaatatggtctcccatgcatgtaaacaacaattatattatatattttcaaatctgttcttcatattatttttaaattaacatatattcaacctcacctttgttaagagagtctcatattaataatgtgttaaaattaaataccatatgtaagatatataagctacttctcttattgtcaattgattttgagatgaaacctcatgcactttaccatacactgcaagcaaaaagaaaataaccacttgaggaaaatattagagagtctcacattgataatttgttaaaactgtaagatatacatattgccaattaattttaagatataacccactacaaaaattttaacttttaattatgcaataacatttaaaaaaaaacattacctactaatatttattttatccaaatatagttattgggtcttaattaattattgggcctcaaatagttattagatgcaaaaaaactctaaatttaaaaattaagttagtaaatgtcccttttaaaaaaaattaagaaaattgtcaaatataataaactaggaaataagccgcgcttcgcgtgcggtggttaaataattatataaatattaattgaacaaaaaaattagtatcaaataattttaaatttatttttgtgtattttttaaaaaaatatatgcttattaaaaaataataaatctatatagaaaactcta

SEQ ID NO: 313288 - DNA, 3251 bp, Cannabis indica
ttttttgagtgttttgtttgttctctctctttgagtgttttgtttgttctctctttttgagagtctgttagtttggatgttccttttgtcctgtactgtctgattgtgttgcttttgttgcccctcttggtacgtgtttattatggcatcaactagtatcccagtggaagatctcgaagagcgttggaaagagattcaacttgaagaagaagaggcagaggagacattctacgaggataatgaagcagatgatgattcgaacattgacaccagatggtgtttggttggccgactactcacagggaagatatctgactttcgtatcttccaaaatatcatggctgatctctggaaacccggcagaggaatgtacgccaagcagctcgaccaaaacagatttttgttccagttttaccatgagtacgacatcgaacgtgttatctcgggcagcccatggacctatgaccgtaaaccattaatcctcaaccggctgtatgaaggtgataacccccgaactattagtctcaatactcttgatttgtgggttcaaatccatgatttgcacaatggtttcatgacaaagaaagtggctacggatgcgggaaattatgtggggtcttttattgaatcggatccgaacaacttcactggagtttggcgggaatatcttcgagtacgtgtaaagctttctcttgattctcctttaaaacgtaagatgaagtttcggaaacgtgacggtgcctctttctatgccacatttcgttatgaaaatgttccaactttctgcttcatatgtggtttgatgggacacgcagagagactttgtcctaggaatttcgacacaccagcccatctccttgtaaaaccttacggtatgggcatgaaagctcttcctcggcgtcatcaaaactttgctgtttccccataccttcggtcaggcaaggcttctgcagattcacaacctggtgtgaacacggatgctgctggagcaaatcatgggcaatcaacagatcctattttcatgggaatatcttctcctgatatctctcattctaaatccaagaataaagggattatgctttatgatagtcaacaagctgatgtggaattgactcaagctgaacttaaaaggaaacgatttgctgcagaaaaaaacaatgggccttcggatgcttcggctattactgaatcgggctcaaaaaactcgaatatggtgggtgctggtatccaggcccaccaatcgttatgagtacgttaagttggaattgccgtgggcttgggaacccacgggcccgacaattccttgagaacattgttgttcaaaagaaacccaattatgtcttcttatgtgaaactttgtgtaaaagtgatattattgaaagacttagagtacggttgggctttgaaggagcccattgtgttgatgtccaaggtcataagggtggacttgctctgttgtggaaatgcagtagtgatgtgcgacttcttggtttttctaataaccatatcgacatcgagataaactctcccaatctccctgtttggcgcttaaccggtctctatggagaaccaaatcgcagccttcgtttcaagacttggcagcttatcaccactctttcctctgaatcccagcttccatggtgcataatcggcgacattaataacatcggcaatcaaaatgagaaaagaggaggccggttgtacccgaattcgctgatcgaaggcttccaaaatgtcctgagtaattgtagtttgatcgatatggaccttcgtggccatccttatacatgggaacgtggcaaaggaacaagtaactgggttgagatacgcctcgataaagctcttgtctcctctctctggcttcaatccttcccgtcggcaaccctctcaaatggagaagtttcttcgtccgatcacctgcccatctttctcgagccttcccctgcgattgtcactggttcggtgcaccaattcaggttcgaaaatgcatggaccagggagcctctttgtgcagaaattattaaatcctgctgggaaaataatcctcatttgagtcttcaaggtaaaataactatctgcagcaagtatttaactgaatggggaaagaacataacctgcaacttcaaaaaaagaattcgtgacagtaaagcaaaacttgcttctcttcaaggtaactctgatccttcctctattgtcaatttcggccatgaacaaaataactattttgaaattctagcacaacaagaattatactggaagcagcggtcgaagcagttttggttacacagtggggacaaaaattctaaattttttcatgctatggctagcacccgaaaacgcagcaacaacatacaataccttcaagataattctggtgtgtggacaacctggaacagtggccttgaagaggtaattgtcaattattttaccaacatttacactgctgggaatgtcaattataatcaggttgtaagtggcattactagttcaatttccactgcccaaaatgctgagttactcaagccggttactagtgatgaagtacgcttggctctttttcaaatgcaccccgataaggcaccggggcctgatggtatgggtcctggcttctttcagaaacattggaatattgttggttcagacttgatctctactgcttgtgatttctttgaatcatgtacttttccctgtaatttcaatgacactaatttggtgctggttcccaagaagaagtctccaactactatgagtgatctccgccctattgctctgtgtaatgtctcttataaagtgatcgcgaaagtccttgctaaccgtatgaagcttattattgaccaaattatctctcccactcagagtgcattcatcccggggcgcttaatctcagacaacatcatgatcgcctttgaggttatgcactatctaaaaaggaaggttcatggtaagaaaggttatatggcattaaagcttgatatgagcaaagcctatgatcgagttgaatggggatacttaagagctgttatgcttcaaatgggctttgaccaacggtgggtcgacttgattatgacttgtgtttctagtgtgcggtactctatctttcataatggtatgttatggggccaatcactccaacccggggaatccgacaaggggatccgctttccacctacttgttcataatttgcgcgaaaggtttctcggctcttatctctcgatttgaaagagagcggttgttacaagggtgtcgtgtt

SEQ ID NO: 313289 - DNA, 3304 bp, Cannabis indica
ataacataaaaatttaaattcatacaataaaaaaacttgacacacaaaaaaagttctaaattatacatatagtcatatataaaatatatatataaattaattatttattataaacagtccggttcggtttaatcgttaattattaatttcgaactgcaaccgaaccattacgccgtaaacggtccgaattgaccaaaccatcaaaaacggttttcccggttacggtttacaatggttcatattgtagtggtccggatttaaaccgcggtcttttgatttatatgaacagtcctacgagggatccacttcaggtaagttgtggcttaaattcataactctcctgatgacgaaactcggagttgataaattcataattccaattggcgtgtgagacatgacttcatagagcattgaaatagcttcgaaatgcaagttgaatcgtgtcactcagaacaatattgatggagttgtggccgttttactcaaggttgttcagcaccttacgaccatgttgacatccagcgaccaggttgacattttgacgtcaactggattgccgggtgagtgccaaaacgtcccaaacttgtatcttttaattcctaagtggtattttgacatcacttagctagttgtcatgttctggtgaagttgttctccagttctcggagatgttactatttcacagaatcgggagactcaaaactacccaattacgagtaagtcactttgccaaaaaaaataaaaatataaagttgtgaatttgacttgtctgacttcatagctctctattactataaaaaactagacgaacgcttgagacaaaatcaaattcagataagaagaacccaatgcaccaagctacatgtcaacctaggcattgggtggtcattctggagcttttgggatgtcgtttgatacttccaagattcttgaaaatgaggacgaggtcttctaccccattttttttttaccattttggagaatattcttggaatagaattcacatttgagtgaaaaacaagcgcaccaggttgattatcaacttgggcgctgggctcagttttcgtgcccctagaattcttattttccccctaagtttacttgtatctttggttatttctcatgatggaaaaaatgttcagaatactttttaagaaacatgattggaaacagcctaggttgataaattgtcaacctgggcgcagggtctagctttaggctgccagatggttctgtttgattccccgaaacacttgtatcttaatctttgacaaaaatagagaatattcctggaagaattcttgaagaaactacttggaatcggcctaggttgataaaatgttaacttggtccctaggccctcttcttggcccctaggttagtctgtttttccccgaaagtacttattttctcatttttgatgaagacgaagaaaatcctcaggatagattttcaatttgatgcttagaagtgccccaggttgacaaaatgtcaacttgtgggttgggtgcctgggtgtaacaccctgatacttaggcgtgctacggtaattttctaattattgtgccacctttgctactcaacgggttttccttgaaaattgtgccaaattaaatttttgataaaactctaaactttataatcatatatatacaatctggatcctgtatttaaacttttataattactttcaaaataatttattacaaacatgtcgcacagcaactacaaaatatatagtccaagttttccctagatcgaacacttcagatcgcaatgtctgacatgtacaatcatcccccaagctcggaactcactcctcttgagtctttgtccttttctttacctacacacgaaagtaatatctgttagtcaatagactcagtaagaaaagcacataatatacattattttaccgacttgtatataggtgcccatacacctatccccaaggcttatcagataagtaagaacattcattactaaggtacgactactataccacatgcactacgtaccggtattgtacgagtgttggtagggtttgctccgtacctcaagtacccttaagtgttgtaccatatacacttcgtacctatccatactagtattggtaacaccgtattgtactctttaaatatcatacgttgtaccaatatactcagtaccgctaccatactagtgctggtagtgcacgaatcacaaataacatgtatatatcacacatacacatattcatatacaaatatggtctatgctagtcttatcttatttctgaattcaagtatgctagttgacctgaatagaaaataacgtgctggattgatgtcttatgttacatttacgtaaatgggtaaataacactctaaaacctgaaccgtgaacctaaactgcaagtttcactatcgataattaacatgacaatatcctaattatcgaggaaacaacaaactaaggctctaaaaataacacgaattgacaaaacaaattttttggggatcctgcctatgattcggttaaccagttctataggacttttaaaaccagttaaccggtatgcaccaaataacccaaaaaaatccaaaacttgcccaattcgttcccaaacttcatcaaacattccaaaaaagttatactaacttccaacaacagaattcaagtagtaacaacaacaaacaaatacagaaaccaaatctaccattaatgagtcaagtttgagttcttaaactcaaacttgctcaatctcttctcaaaccaacttaaccagctaaaaacaaccaaattatattcaaaataacttgagagatcatactagagaaaaacctaccctaaacaaccaccgattctcaaaattgcaatatcagaccaattttaaagcttaaacaacatgaaggtgagagctctagggtttaccttgattgaattcttccaaaaactggtgagcaacactcagaaatcagcaagaattatttagtgcaaagaagaagaaccctaggtccttggtttgtccttcttggttcgaaaagagagagagaaactgagaattttattttcttgatttttcctaatttaatatttctaaatattcaataaactaaggctaaataactaagtggctagctgtcaaacttaaaactagccacctcactctaatgaaaattcccaaaatactcttacttacacttcaagcaacctataagcttacgggtaaaaagtccaaaaccataactccacctaaatcggcattctaaataccccaaatgttttatcccgctaagaattaggttctaaacttacccatgtg

SEQ ID NO: 313290 - DNA, 1235 bp, Cannabis indica
ctagacccaatgatttagaatttaagccttatatatgtcatatttaagacaataattaataaaaaaaacattttacaaatattgagcagtagatttataccacttacaaatttgaaattttgagtaagtatactgctatttaccttactttgtagcactatgtttggtattgcatatacatatagatatatatacaatattttgatataaatcaaaacttaaaatagtattaataaaatctaatatggcctaccaaacgaaacaggcaaagaaaaccaagatattccaagccaaacaaacagacagagttgagtttcactcaccaattgcaaggaagagtagctttttgggtttagcaacagataaaagcttatcaatatacttaaaaaccgcttgaaaaacctcatcgtaggtcttcggagctggctgtggagaacaatacacaatgctcaatcaattatacaaacaataatacatatatatattgtaagtactatataaggcagcataccagtccttgagggtgaaaacaggggtggatgatgccattcatgtcgaggtagagattgtcgaagtccaagccattgattggggcatcgattacagtgcgagggaacttctccactaaccatctgtaaaacgaaggtattcccattgttgttgctctgagatgaatgaacgaacctcttacgtcctctgaagtagggtttaacaaataccttttggttgtagagtctccagacccatgcccggcccaggcccaggcccggcccagcccattctgttttgggattatttcaagagatttttacacatacacaagaaattacattctatattctttttatattatcctcttttatttttaccatcttttttaaagtctattatttttacctcttttttaaaatattgtaccaattttgcctttgtcacttcaagatactctccatgtgactcttttatgttagggtattttgggtacaatacatataaaaagaggtatgtttcaaataaatataaaagtagaggtaaatttgattaattgattaataaaagtggtatttttcaacttacctctatttacaccgtactgaaatttctttttattttatgagaaatgtaactaaatggacctatttctaactctatagatagctaatgttcattttttaaaataataaagcaaatgtcattttttattttttaatacctaaaatacccttcattatata

SEQ ID NO: 313291 - DNA, 1086 bp, Cannabis indica
taatactattaatagcggccaagcaatagcggcggaccaatagcggccgaggtccgccgctattgccctttagcggccaaaaactggagcaatagcggccgaggggcccgccgctattgctcctgaatgttgtagtgtttatacaacctaaatataatttgggattgcacaataataaaaagaaaaaaaaatcacacattagtcatattaaaagaaaaaatacacacaaatttatgtctactttgtttgacaatattacatttcttaatgaaattatcattgacattgactcggtgaacttggctacacaataactctcactacaaaaaaatttacttttagttacaataaaacttgcaactaaaagttaaaaaattgtgattaccttgtgactaaatggactgtggctaaaattattagtcacaaaaattacaatttattgtgaataaatgtatttttggttactatatttgttgtgactaaaactaaattagtgacaacttgtatttaaatactatattttagttacaagtaacattttgttgtgactaaaagtcatatttagtcaccaaaaaattaagttgtgactaaaaagttgtcactaaatgtaacagttttttgtagtgtcttttgcagaggatctagtttcacactatgtacaccttcaaaaaaaatattgttctagtatatttttttatctattttgacatctaaataagctttttagtaaaattgttttatgatggtgtatgctataattatttaggatttttttgtaaattttaataaaattttaaataatttatagtgttgaaaataaagttcaaatattttactgcacgcttgagtatttttttcttataagcgtggtaaaagtaacagtgttaaacttattattttaggcactgtaaattacttaaagttttttaaaaaatttatatgtggtcttaaataagtataacgtacacaataataaaaaaaatagactaaaaaactctcataaataccaaaataaataaaagtaaacctaaataactttctttaggagttgtactattaaataaaaaattataattagcctaatat

SEQ ID NO: 313292 - DNA, 937 bp, Cannabis indica
catttcaaattccttattcagcatagctttaattttgtttatctctagaatatctttgcatgctatgagcatgtgatcaacatataggaggagataaacagtgactttatttttcttgacatatagacaactatcattagagctcttttttagtacaaattcatcaatttttatgtactattgccttagtgattgtgtcaatccatataaggatctctttagctaacatacatgatattcttttccttcgacttcatacccctttagttgcttcattaggatgttttcttctaagtctccatgtaggaaggttgtttaaacatctagttactcaggtcattgatggctacaatgcttagcattagccttatggaagtgtgttttaccattgggagaaaatatttcattatagtctatcccttctctttgtgaaaaaccctttacaactagtcttgctttaaatctagccttttatactcctggaatcccatctttatgcctgtaaagccacttgcagcctatgactctttgacctttaggtctccttacaagatatcaggtcttcttcttggtttgagaagtcatctcatcatccatagcattgtctcggtcaagtttatcatctgattgcatggcttcttcataagttgttggttcctcaattcccattgcattgttgtggtaattttcaacacgcaagtatgcgtatcgtttgaacaagtaatactcacgaagagtgaggtcgatcccacgtggattgtagttaagtacatcaaaattaaattcctacttctatttctctatataaaatttaagagaaaatttaaaactaggaaataataaaaacaatgaaagtaagaagagaagcaggtaaattaataatgaagttgacgatgaataaaagttagggcttccgatttcaattgcatctattgat

SEQ ID NO: 313293 - DNA, 2228 bp, Cannabis indica
tttgatttaccaaatagaatcataagtataatttagtggtacttaatccaattccctgtgggatcgacctcacctgtgtgagattttactacttgattgcgtatacttgcgtagcgattaaaaatatagcaacacttagtgaggtattcaatgggaactacactaagagtgtcaaaatatgttgtactagcaaacttagctagtgagtctgtgttggtattctgttcatgcagaacttgtttgatggagtgcttgagctgggctaatagatctttagcttttcttaagtatgcgattagctttgacccttgagcttgatactcgctgataatttgttgacaactagttgtgaatcactgtagatctcgagtgactcaactttaattgctagtgataatcgtagtcttgctaggagtgcctcgtactcagcttcattactggttgcggttttacaaactgcattgcgctgtgagtttaaaatccctttggagtaactaagatgagtccagcaccagcaccgtgctcgttagaggatccatctacatagagcttctaggaaggttcaacgtcctcctgagctgtagtctcaggcgtgtggacctagtcttcacaaatcatgagatcgtcttcttcaaggctattgcattcagaaatgaagtctcttaatgcatgccttgtgattattgtttgaggctggtgggtgatctcaaactaacccagttcaactacccacttgagtaggcaccctaatgcttttggcttcattagaagttgcctaagttgtttgtcagttatcaccttgactgtgtgagcttggaagtatgaccttagatttctagaggccaggaacaagcagtaggcacgcttctcaatgggggatacattgactcggccccaatgagacacttgctaatgtagtagatagggtgttgtatcccttcttcctcgtgcaccagagcaacattggccgcatgcttggtgattgccaaataaatgtatagttttcaccatctattggcttagataggatatgagggatatgaggcctagctagatgatgtttgagagcttggaaggcttgctcacactcatcagtccattcaaactctttgtcgttttctttaagtaaattaaagaagggaacacacttttcggttgacttggagatgaatctgctaagtgtagcaattcgtctagttaggctttacacgtcttttatctgtgacagtgacttcatgtcttgtaaggccttaatcttttctggattcgcttaaattcctcttgagttgacaatgaatccaagaaactttcctaactggacgtcgaaggcacattttagagggttaagcttcatttgatattcctgtaggatgttgacgctttcctctaaatctttgatgtggtcttcagatctcttcgacttaactagcctatcatcaacatagacttccatattgttctcgatttggttgtgaaacatatggttgactagtctttgataagtagcagctgcattcttaaatttaagggcattactttgtatcgtgcctcgtcatttcattagttttgctactcttatcaaaatgaaattatttttatacctcttagattattttatctcttacaacaatatttttaaaatcaaacaaaacaataaaattgtaatggtaatacgattatgccaaaccacacataagagcatctctaaatagatagatattagtgatctattactaaaatataacccatattctaaagagtttgctccaatgatgctctaaaagttgatccaaatttagatcacaatatggttagatgtaaaatttatatcacaataaatacactgctttgtatttacttttatgttatttttagggcattttacaattttgtatacattattttaattaattacaaaatatgtgcaaataaatttattatcattttctcatacacttttatatataattaaaaactttttttcaatttttattataatatatatggtaataattattaattaatatatatatacatggtaatattggttatgtttatttttatgtttacaattataataaacatactaataatataaaatattttatatatgtatttattttattttcttattaattaaacatactaatttaataaaaaaataataatattcacataagtttattatatcactctacgtgtgttatgtttattttttttagtaattt

SEQ ID NO: 313294 - DNA, 652 bp, Cannabis indica
gctgggagcccggggcgggagcggtatctaactccaaagctcgatgatcagagccaaagaaacccaaatgagagagagcggcctcagggaagatattggtccaagcactattgatgattccccaatctaatcgttcttggatgtttctaggggcagccacattgttattccaagtgagtaagggccctgttggctcgaggggggagagattaaaagagtccaaaaggtttctgaagtcagccgagggacccctatcgggattaccgccttgtttgtcatgcgagaaaaggaaagcgttaaaatcccctatgatgagccaagggatatttgggttatccctaccaattcttttcaaaagttgccaggtgtgaggtctttgagagaccgtaggagcaccatagaaacaagtgaggtgaaaagagacattagtaatagcacacgacacataacaatcaaaatgactaatagattgggaacgcaaagtaacagttacatcattagtccataacaaaagcaagcccccacttctacctaccctaggaatttctaaacccgaatcaaaatggagcttgatcttaacatgattgatagcatttttaacaagccgagattccattacaaataacaaactaggattacaagaggacactaa

SEQ ID NO: 313295 - DNA, 751 bp, Cannabis indica
caaactacgaaaatcattgggcgggttagttttttttttttattggacgggttacaattagatatttacaacccaatatttatattgggttagtaaaaatacactataacccgaccaaaccaattgatctacacccctagcacaaagttcttaataaaaacaagttggtggaattagtattggagacatagtattatttcattctgtttacctcaaaattgattttaaggaggttgtatacttccctatctggaaatgatcacaattgaatcaattactcttttatttgcttgatgtggaactaaaatgaaaggtaacaagatactattactattgttgtggtaagatgataggtaaccaataccattttagttttctcgtcttttttactttttcttgtgttctcttgtaatagtgaacctgttacgcttaaaataacgaccctatcatgtaacttactaatggataatgttagttttgaagaacaaaacgtatgtagctcgataaccagttacttttttaatattagacctaaacttggaaagttcaggttgcctctgtttgaaatggctactggcatgctcagggaggtcgggcctggcctaggcccaatcctcttttatgttttttgaaagggccatgaaattgacttttttggaataattacaccacaaaatttctaactttttccctcttatactgtgggggttgcagaatttttttcaaaaatactgtataagttttatactgt

SEQ ID NO: 313296 - DNA, 984 bp, Cannabis indica
aaaaaaatatcgttaaaaattttcatattctaaaagcacttcctcaaatgataaaaagattaatttagtatactatagtaaaaaataatgaatttggatatatcttccaagtcaccgaaaaattgatcataaattaatctaaataataattaacaaaaataatttagataaaaattgataaatacgtgtcatatgagtgaatgcatgcggtgagaggggtaagtaaaaatatagggcacgtggttaacatattgaccaaatattgtcaatatgaaaattttatagttagggttaggttaagaaattattcccttttaaagtaacaatacttaaaatacttataaaaaaaatacatttaaataatgaattatttttataaatatagaaaaaatataaaaaaaaattataaaaaaatcaagttgtacagaatttttaaaaatttttaaatatttttacgattttttatgatttttattcacataaaatacattattcttgatatatttttatattgtaaccttgataatttgttgtcaatattttgttatttgtatgttattttttattgttgatttgatactgtttggatattattttcatgttacttttatgtagttttttttttttattattttttgtattgattttataaaataccgtaaaaatataatataaattttttttacaaaagacaataattatatcattatttaaataagtaaaaataaaaattaataatttatttttgaaatcaaaataagtgatctcttgcttgagaatttattttgggattcggagcctagtctataactactataaaaaagagaatgatttaggctttttaaagttaaattacaatattgaccttttctttagagaatgatttaggctttctaaagttaaattacaatattgacattttcttttttaaaataaatttatttgaatgcatataatgttaatttgtttttctgcatgtgtttc

SEQ ID NO: 313297 - DNA, 3801 bp, Cannabis indica
gctaaacctctataaaatccatgtgtcttattattgctttatcatatatctgttattatatatcgtttatcgcttataaaatagactcattgtcgttggtaaaagtgaagtcaacaaatatatttaaattaaatactaatttcatatataactaaaaatgaaattaataatttaaataaatgtatatatttgcattactctaagtaaatatattacacaagcatttttaaattactcttactgtttacgagttatctaattaaacataaaaaaaatacttatacaattgttctactctttatcaccgtggatcacctcaattaatttttctatccaatctcactgtaacggtaacaactcctttttttttgcatcgtatgtgttctttccaccaaacagtaaaaagaagaattatatttttttattagcatacatatttgtttgttaatataataaataagataattaataattaaagcttacaacttttgtgttagttatgtatctggttggatttgcagctctgatgggatcaataatgtattttaagacataaaatccatactctcgatttttttgttgttttgggcaagctatgtgataacagtccaataaattcattcatccccctgaacttctggtatggcctgttttaaaaattatattactattttaattaattaaccactattacaaaaatgggtattcgaaacggttctaaaaatactttttttggggaaccgtcaacataaaaattaagcgagtatttaaaaccgtcaggagaaatagggtgttatttgtattctcgcgcataagacatgttgcatgattaagggacaaagagtattagcagaagggattggttgaaatcactcgtaaggtatcccgaaggggacatctcggcaatcctagaagtgtatgctagacacctgatggaatgagccatttgcgaacaagtaacatttcctggacctggagagtagttgaggtaggtgggtcctggatagaaatcctttaagcgatggacacggagtgtaataacagtctcgctggcaatgaccacatcatcgtcatataaaaattgttgtatagacgattgcacctttttctaacacaaaataagatcttgtctcgcatgccaggccatggtagtttgcgtatgcccctctaaacatgcttttttcctaacggactggttagagagtattttgcaaatgagagacctttgcacgacacgtatcctggtttgtacaaaacccctcactatagttgtacaccacatgatgaagaaggttcttatcaaccaatggtcagattgtcttatggtaatatcggccttggtagcgtgtagggtacgaaaccctaggtggataaagggtatgccctttatcacatgtgtgcctataaatacttattttctatgaacaagggagaataattttcattttacagatattctactgaaatttctagagagctttcttctaaaaaaagaaacaagaggaatacagagttcattattgtaaacacttgtaatacttaaatactttcttgaggaggctaaaattatggactcgtggactaagcatctttaacgcctgaatcacgtaaaaaatatattttgtttattgtttaatatattttaatttctttagctctacttaatcggtttttgaaaatctcggtaaatatttttgtgctttcattgagagctcaggaaattttagaatcctcatcacgcttcaaccatggtgtatacctaaaaaggctctggaaagaaagttctcctagatacgataatggaggaagacgactcccatactgttggcccccagtcaagaaacgatagagagggtgcaacccctgcagagaaccgagaaagggatactgagaatgttggcgatgatcttgctgatagccaaaaccctagtggtgaagaaggagaaggaggcaacgatgaggagtacataaaagatgggtattacatggatggttatgactacgaccatgaccctaatctgttacgagtaacaaaagcattggaaattaccgaggtggagttagtagagcaaagagaacttactgcaaagatgaagaagatgacgaaacaactttagagcaagtttaatgacttagctgggtcagatgaggaacccttggtggaagttatagtcgaggggcgaacccaaaaacaaaatgaagttgaaacctcaaacccttggaaggacaacggtaaaggaaagatggatgagctcccataaaaactgctcctaagcctcctcacaaagatgcggccacagctagtcagccctcgaggacgtagagggccactgatgcttttgagcctggatgcccttttgacgctcgaggcaaaaccgtgctgagaggaccaacaactagagtacccaagccaagaagacgggggcatcctcctagtgtctccgtcaatcaggatgggagaactctcgttggtcactccgatgatagttggtccacaacggacttgcagcaatgattggatgctaagtacgagaggtacaaaagtgagaaggcaatgccacgtgtgggtgaccttagaaatcatcatagtgataagatgaggggatgtgatctccccaaaaatgacaataaaatgttggaagaacaaattgttgcgttgactaagctggtcaagaaacaaagtggagcattatcggatttggaagacgaggattaggaaccctttattagagggatcgtagaatctttactcctagaaaacttttagatgccccacattgagctgtacaaagggagaactgacccgtaaatgcattttgctaaatacaacaagatgatgcaagtggctcgtgttagcgatgatgccaaatgtttatgcttctccttgacccatactaagtctgcagaagattggtggaagggttggctctgggatcaattaatagttggaaggatctacagttggccttcttcaaacaattcattgctacacaagaaatggacatggaagtaggttcactcaccaatgtcaagtagcaacataatgagagcctgaaggcttttatttagagaatgatggaggcagtcgtcacaactaatgtcagtgagtacatgaagttgatcgcccttcaatttgcattggttgtaggctccctactgtggggagaaacgcagaggaaaagagctgaaatgttaagtgaatttatggcaaaagtacaaggtttaatcaaccttgaagatgcttatatacaagccttcagagtcccttccgcaccaactccaataatagccactcctagtttttcatcacagactaatgatccagccttgtttctcctcggaacccagttatccccaaccgtctatggtcctactacacacggtcttaccgatacacaaacccatttcttgttggaatatgttttaccgagatctaaatttactaccatgtatattatttatcatcctaaatatgaatctctaaaataatgtaaataaacacatataaagtttcagaaaccttacagtgggtgcagcggaataataatggctgcttccactcagatctctaatcgttgtatcctgtctgtagcagagtatcaccaagatctgagtctgaatctccttatcttgaaacttgacttttcacagccttacacactatgattgagtaccacttgatgtgtgtgggcacttactctatcactaaagggtatgaaaatatgaagagaagaagagacaagagtggttcgaaataggtagaagtaatggctctgaaaatttgactgaaggcttgaattt

SEQ ID NO: 313298 - DNA, 1432 bp, Cannabis indica
tttgtctctagcttctaagtaacgttattatatttttagggtcttttctcttttctaattgtttacaacaaacaaaaaattatttgcatcttgcttgagttcttagatggtatcctcttactaaccttgaatttaaacagtttaggatatcttttttttttttgaaccaactaagtagttaaataaaccattttgctttaaaattattacagtaaaagtatattgctttacaattatttacagatgaagcttaaattcatgcatgtattaaattttctaactaaaccccttgacaataggtgatggacttggggaaggttatggaatgcttggtcaggctggaagcggtaagctgcgtgtgtccattggtcagaacaaacttgctgccaaagttgctaagaagtgagtgttccttctgctgttggtttatattctattttaaataagctttgtttgtttatggcgaggaagctttcttagcttttgaatatcgtatcatatatttatgtcatctattatacaggtttaaagaaaagcaatatggaagtagtggtgctacatctggactcacttcaagtttagcatttacaccagtgcaggtctcatatttctttcttatgcacaggctatcttgttttatgttattactagtttgatttgattaaggcaattagttactgaaaagtaaaaaatctatggaaaattaggtggtggcatattttcgcatgaacacaattatggttcatctcttgctttatcattcattgtattgacctggatttccagacctgtttaagcgattgctcatttttcttttcgaaatgcaaaaaggaaagcttccattgatacttagtcattcgttgatttggcttgtttatcatttatggcatatggaggttggagggattatcctttggcttgtgttatacttggtcttttcagcaatttaagtttcactttcattgccatccctttacttttcaactaaaacttgaaagaaatattaaatgcccatgttttcatcacttatcttgcagggcattgagcttgcaaatccacaggcacaccagtttggcagtggaacacaaagcacctatttttcagaaatagggacattttcaaagatcaagaggacctgaaccatgtagggtttgtgttgcacattcacttgtcatgaaccatggtcacattgggtgagtgacaaagtgtggggtttaagtcccttaaatgtgaaaaatcacttcatgattttgctaagtatattgtgattataatagcattaataatcgtgcctggacactgttgtgataatattttccagtttgagagtgggctcgactcagtgtacactgctctgattattactgcatactgaattttgtattttattttgaaatatggaaaaaaaagagaaaagaatagaattgaaatc

SEQ ID NO: 313299 - DNA, 445 bp, Cannabis indica
gtcgtatcacatatatattactaaagcctatattgatcaaatgtcatgggcaagtatagtggtggtctgtctggagtgacaagctccttcgctggctctattggtatgtcacttttcggattgtaaaagaaggccattgaaatcctctctttccctgaatttactactactctgtgctctacgctcttgtacgttgcattgcttaaaacctacgtacatacatacatgtgttaattaattgatatataactatattaattcatcaaattaaaatcacatgaaattttcaagatacatatatatatatagccacctaacatgaaatagtcattatatgtataatatctacatgtttgatcctacctagctagggtaggtataaattaaacgtgtaaaaaaaaagaagacatacgttaaattggttggtgtcgctgaatttatatat

SEQ ID NO: 313300 - DNA, 612 bp, Cannabis indica
ttaattaattgatatataactattaattcatcaaaacatcacacgaaataattttcaagatatatatagtcacctaacatggaatagtcattatatgtataaatatatctacatgtttgatcctacctagctacggtaggtataaattaaacgtgtataaagcaaaagaagacatacgttaaattaattggtgtcgctgaatttatatatatgtacctaaaatggctgagattgagatatattccctagttaggttatataggctttagtaatatatgtgatacgactaatttatttaatataaatttctagggaaaaaggtatatctctcctataattttaaattttattaccaatacagtatacataatactccacttataaaataaataataaaatatatataatctcatataaagtaattaaaattataccaattatttttcatatattgcatgatcacatatcatgcgtgaaagtattctcataaaaaaatataatatatatgcttgaaagttatgttctgaccttaaggcacttatactatgaattatatgggtaccacctatgtgtaaataaagaattcgagaaactaccgggaaaagaaatatt

SEQ ID NO: 313301 - DNA, 1201 bp, Cannabis indica
tgaaatgagttctatttagggcacaaaactcaacattatcttcctggaccataaacattgttcgaacggagacattgtagcaactccccgcgcttttctgatcacctctaactgttctaacgcacccattgttgtaggggaacttcatacacaaattttgtattgaagttgctgctccaaaatccactaagacagggcgcctaatattatgtggtatgtcgtggggaaattcactactacaaatgtacaatgcttgaaggcgctggcattattttctccttttagggtgacaagtagttggatttttcccactggcatcaaggcatccccattaaggccttccaactaaataggacaaggtaacatgtccgctttagtgagcctaatcgcttggaaagcaaatttaaataggatattcacgaagcttctatatccaccaggactctagaaaccttcgtgtttgctatttgggcttcaatgaccaatgggtcattacgggaaaaatctacgtgtcgcgcgtcctctttgtaaaagtgatgggcagaatcattttctaaggacattggggtagtgactgtactaaagcacatgtttctcctcctccatctagctcgcataagtaccttttttgagagttttgggagcttcccgtaaggtgcggtccaccagatatcgttgttacatgttcgtcaaacagtggtggagctagccctaggggatacaagtttccttgtcctagagccacaatagttagtgtagccagagcaaaaggagctgggagtgtcggaagttgcattctcgggacttgagggtgacctacccctgcaaaggatttatggtaccctgctgtccaagaataatcacatgtccgtgaacgaccccctgttcgagattaattatgggaatgtagacccattgcccggatggtctgctctaactagcatctcgattttatctttcaggtgcttgtaattgttgggggagggtcctacctccccatgatactcgcacctttgattcagatctttcttgaaatggttgttgggaatattttactaggatctatatttactaacaagtatgttgattaacatcctaaatatgaattttctaaaacaataaaattaaacacataagggtttaagaaaaccttacattgattgtagcggaatataataactcgttccgttcaagatctcta

SEQ ID NO: 313302 - DNA, 1666 bp, Cannabis indica
gatatttagggtattgccatgtaatcatcgataggggactttagttttaattttaagtccccaaaaagtgatttagcgtgtcactcttcagttttacgaatattgtgatttaggggcttgtaaatcgtcgagcagtagttccactcaggttgactggcacacctcaattcttaagcgaggtaagaattatataatgatattcatatgtgtttatatgtttagcgtgcatgtttatggagcctgttagattacattgatagcggtatcagtatacgtagagttgtattggatactgatagatgcatgtttgtctcaagtacaagatcgatgctatcacatcggtacgactagagtatgactagagtaccgagtataggatgatattatggtcgatagtactatcatacgaacgttctagagtcattaccgtgttggacacgaggatagggttatagttgcatgtatgggcgccaaattataatctgagttattcaatgcttatgattatgcttttctaactgagtctattgactcacatttattgtttgcatgtgtaggtaagggtaaggctaaggttgagcagccgtgagagcgagtggatgaagagtgtacatgtcggggcagttacatctggagcgtacgatctttgggacaacttgttatattttgtttagtcgctgggcgacaacttttgtattacgcactctgtattagttgtaaatattttatactcgggatcccagttatatttataagttatttattttgatatttataagtatttaagtaaaattttaattatttacgattttcaaataaactcgttgattagcaacgagctgcacagttaacatataaaatcacaataacatgcctaaactaataaggtgttacaaaaacataccattaaataccaacaatgacagagggagaaactaaacattgggaggtatattgtaagacaattaatttaaggatgtaaaataactatgtatatatattacaaattttgtacatataaaatgtatataattttttttgggacaacccctaatctaagggtgtatgtcggtcagtttaatgctatattttattcaacgcaatagaaagattggattacgaaaatttaagtgcaatctgctcaattaaggaaaagaaaatactagcctacccaatgaattggtcggattaaaccaccatgaaacaatcatagtactttaaactttatatatatatttttaaatatttatataaatatataataaaagcacacacattaaaaaaaaacctcttaatcggtttgatcaggttagttcaggttgattgggtgagtagttgatattatttttaacttgcctaatataaagattgaacgagttatatttttatcgaatttttcggttatatattttgttgggttatttcaattttgtttgggtgaattacttgggttgggagatttacaaaaatttaggtgcaaccttactttaagagcactctcatgagtttcactactctattcttcaaaatacgtcacaaaaactttattttctttattttactttacgtttttatattacaccatacattaatttttttttttacatcatttaagtattatattttttaatatatttcatttattttagggactttttcattttta

SEQ ID NO: 313303 - DNA, 4679 bp, Cannabis indica
agatcgtgtgatcaatgctgaatgcaaggatcgtgggattgaggctgagtacgatgatagtgggatcatgtgtatgccatatccacataagttgatccctgagttgtagggattgagctgatgactcatgatgcgaatgctgaattcgctaagtattgagtgctctgcacggctcgctgaatatctcattctgaatgtgacagcgaagcatcctattcggtctatcattctgagcagatgcttcaagtagactccacgtgtcaccattctcgtgatgtcacgtcaaagtgcaaaatttgggataacattctcgaaggtccttaatcaaatccaaggattcctaaagtagagcatggtttcgagttgggtcataggtatccctcctgtgtgtaggcattatggattcaactgggattacagtctcacatccataggtcatgttttacagaataatgcttaaaatgttgcaatagctctcgagtttttgctatgtaactagcaatttttctactactccctagatactttgttgactacaagttgtgaatcagtgtcgagttcaatgtttttagcaccaacctcttttaccaattgtaaaccagcgatcatagcctcgtgctcagctttgttgttagaggctccaaacttgaatcgaagtgcactttaaagttggaggttctgtggagatattaaaatgattttgactttggaacctttttcatttcatgctttatgtatgtatattttccagacttctgtctctgggattgacgtttaaggatcttcatttatccctgtgcactacacaatgaagtcaggtaaggcttgacctttaatcaaaattttgggcttatattctatgtcgaattgacttaattccattacccacttcaggagtcttcctgacaactctggcttttgtaacacttgacaaagagggtggttggtttgtatcctcatggcctgggcctagaagtatggtattaacatccgtgaagcaatcagtaagcaaaagaaaagcttcttgatcataggatatctagaatccacgcccaacagtcttttacttacataatatactggaagttatacgtttccttcttctcacactagagcagtccttacggcatgatccgacacttccaggtacaaaaacaacagctctttgtcaactagtttggatagtattggagccttcactagatgtctttttagttgctaaaaggctatttcacattctgatgtgcattcaaatttatgatttcctcaaagtacgttgaagaacagtattgacttatctatggttttggagacaaatatgctatgttgtgctattctccctgtcaacttttggacatctttgtgcttcctaggtgaaggcatgtctataagagctttggttttctctgggctcgcctcaattcctcgtgaaattactataaaacccaagaacttccgtaagaaaactctgaaagtgaatttctttgggtttagcttcattttatactcccatattatggcaaaggcctcttctagatctatgtagttgtcctcggatgtttttgactttaacagcatgtcatcgatgtaaacctccatattcttccccagaatattcttgtatattctattcaccattcgctggtaagcaactctagcatttttcaatctaaatgacatggccttttagcagtagattcctttgtttgtttggaaactcgtgtgctcctaatcagccacatgcatttttatttggttgtagctggagtatgcatccatgaagattaagagttgataccccgaggtagcatcaatcatctgatcaatgcgtgcaagtgggaaatagtctttatgataggctttatttagatctatgaagtctatacacatactctatgtcccattaggctttggaaccataagtggattggcaagccatatgggatatagagcttccctaaggaagtcaatgtttgtcaacttgcctacttctatttttactgcttccgacctcgctagatctaaaggtctctgcttctgccagactggttcagtgttgggatctatatttaatgcatggagaataacacgaggactaatgacagtcatattagaatgactctaggctaacacatcactgtttgccttgatcgtggaaataatattttccttcactgtaggaggtaggttctttctcactcggatgaccttggtgggatttccatcatctatgcatatttcttccacttcctctatgtattctatgacacgttccacaccaatctgtggatcaagctcatcctcttagatcagcccctatgctggctgggaagatatttaggctttagagttatttccttctcataccataagtacaattctggttgaaatgctatagcaactttgcgcacttctttgatctcctctaatagttcctatgcttccaatatcactcgggaattgtatgcacagatactggatggatgtcaccactccaaaattctttaaaaatggtctttccaagatatcattataagcagtaggacaatcaactatcacaaatatgttgtacttgaaggatgatacagtattgcttccaggaacttccccaattatagtcattagaagttgtatttttcccatggggatcaatgtatccccattgaagccttacagttgaatcagacatggtagcagattggcttctaccagatcaatggcatggaaggctcctttaaaaatgatgttcatagagcttccattatctacgatgattctggaaactatttttttttttgttatttgagcttctattaccaaagggtcattataagggaagtgcacgtgcctcacatcatcttgtgtgaaagtcattggaaaattcatcgtccttcgacgctaggcaggtgatttcaccaagtggcaagcttcaccttgattcaactcatttaggtaccacttctattcattttgagtgcttctagaaatatggggtccagttaaaatctttgctacatgaccatctacgactactaatacaactcttggagggtacaaatttccgagactaggggctacaactactgtcgatctaggggcattttgttccccttgaagggcttgtacatttggagcatgtattccacgaacttgtggatggcctactccctgaggaggatttatggctccatgttgtccgtgttcgattgtctgtcccgaataaatgcatgagattcttaccaatttgttaagtgtccgttccatactaacccttcaatttcatcctttaagtagtcacattcattggtggtgtgaccaatatcaccatgaattcgcactttatgttcaaatctcttgtgttttctgcctttatacattggcggaggcttcctctagtgtaccatgttataggtttccttgtatacattctcctcagtatctatgagacttgcgtactcgatgtaccttgattcttggggttttaccttttttgtggactcactccaatttggaccctttgtactccctttactacttgagtgggttagattagactctagaacttctactttttggtttgttattctgggagtagaactgtatccagtttatgcagctccgaacgtaaaaaaactagcctgtacaactggctacacgaaagtacttggtccatataccgtaggagtagtaaaagcaattgacagagggtaaatggttggagttatcatctgtgatggttgggcactcattatttttgtggaaggcactgaaagtactccatatgcttagcataagcatcttttatatttataaatccttaggctcttgttaagaactcactcaatgcatctgcccttttgtgtaagagatctcaccacagtaaagatctagttgtaagtcttgatgttagagccaccaatttcatatcatcagtgacttttgttttagtagccacttccatcatgcgttgaataaacttcttcaagctctctccttgttattgcttgatggtggtcaaggagttagcttccaaatcatagtccttggctgttataaactactttctgaacattactggtaggtctctccaattgtggatctatcctggagataacctcttccactattcctccgcagacttgcttaacgtcaataaaaaaacatagacattttgcatcaaaactggccttagcgacttgcatgatgatattttatttggacaaatggtccttggggtccgtgcatccttcatacaactccatatggggcattctaaaatgctttgccaatggtgcatcaatgattctcttcacacaaggctctgtatcttcttccgtaaagtcagatacgacactactttgttttgaagaaatcttttctgtgatcttgatcaactcctaaaccttacattacaggcattgagtcttatcacttgaagattctcttccacgaatgcgatcgttgatgtggtttcttaaattgttcccatcgagtctcgatttttcagctttggctctttctttcttggcattcaatctttttcagagatcatttgtggaaaggtttctacaactgtcatctgatactgttttcatagtttaccctcttactaatcgttgggaatagtcctttttgttagtagtttggatgtagttcgtcatcatcctcatcgtggttac

SEQ ID NO: 313304 - DNA, 1641 bp, Cannabis indica
cctcttctgctgtaaagctgaggagatgatgaaggcctcttccgctgcaaagccaaggagatgatgaaggcctcttatgctataaagctaaggagttgacgccaattctgctatcaaatcaaggagatgaaaaagaccacctttgatgagacacaaccgagggaatgctaaagaactttaaggctacaacctaagagaggacaaagacaacatctatatctatataaacacatagtgcaacaagagagataatgctaagacaacagccaaagataagagtaagtgttgacgttccaatattgacacatttaagaagtatcctaaatcaaaggaaatcactcaaagagccattcaaattttatgttaaaaaggaaaacataaatgataagaaaaagatgatcatcttttctcttttccatttatacttagaatattgaattccactattcaagagggaatggggattcaaaatcctactcccagtagaaattcttgaagaatagaaataattgtccaaaattgccaaagttgatgcccacctggtagtttcgagagaaacaggcttagttcacgccattaagtcaacctcacacaagtgtaaagttgactttggaggaaaatgtttacaccaaaagtagctctaatgaacaggaaatcaaatgtttgatacgtggcaagaatgaaaacatcccagagttgagtagtcttgaatcatagcaagtcgacctgggaggggtctctagccctacgcccaggctgccttcaggaactctagaattggtgtttggatcctgtcaatttatttccaactcactatctttcaatattctatactatgaagacatgaactgtgcaagtacaggccccatgagctaaaatacacaaatcaaaatttcaaaaataaacctgggcacctaggatttcacccagtgcccaagtcgataaccctaactagggtttgagtttccaagaccgtcttagtgcaaattggtcaaactttgcatttgaacatgaactagacatactacaaacatgtttgagtcattagaattaaatttagagaactttcatttttgagcacccaacggccaattgtcaacctgggccacttccaagcatcagatcaaaaatatgactcgtgaatcttgtttgtcttcatcaaaaatggggaagaacaaatgctttatgggaagaaacaagccaacctatgcactaggatgtcaacttgggcattgggcccaaaacaactttcagtaaaacgatcataactaacttaatatttatccgattgatccgattcaacttgtgtttgaagctatttcaatgctatataaagtcatgtctcatacttcaatcgtaattctaaagtgatcaactccaaatttcatctcgaagagaattacaaatttaagctacaacttacccaaagcgggtcccctcggcacgactcaaacttcaaaaattgaaaatcaactttcgaagttaatttttaccgtcagatcatcatcaacaatcaataatagcctaaatatattttccatattttttagtattattttatccccatttgataggacatctttcacctataaaaggagagttccgctaactcattttttacattgagaaaagtactcataa

SEQ ID NO: 313305 - DNA, 797 bp, Cannabis indica
tttgctaccatttatatttatacatattatacatgtcaatctagatatctttatatatgttcctagtgtgttaaacagagatatctttagtctttacgagtttgatatataggaatattagtgctatattatctttagtcccattacttaaatcgttattctttttgtgcattttcaatggatacatttagactcaaatgatgatgaaaggaagaaggaactagcggtagagtaaaagagtaaaaactttgttttttgtatttggctcgttatgtcatttactcatagcagaaggttttatatcgcgaagaaaaagttctgtggaaatattgactcaaaaaggtctcaaacaggttataacatttcagatgaaaggttacacaataagttggaatgccaatttgaaatcagttgtagcattatcaaccacagagcctaaatatattgcttgcactgaagctgtaaatgaaacactctggctcaagggaattacaaaggaacttggtagtgattaaagatcaacaccaatattctgacagtaaaagtgcattgcatttgagcagaaaccaagtcttccatgataagtctaaacacattgatgtcagactccatttcatcagagaaataatcaatgaaggcaaggtttaaactcaaagatcctactgcagtcaatctatcatacatgctcacaaaggctctccctagtagtgacaagttcaagcactacctgaacctactttctatcttagttctgtaaattgtttttcatatgtatattagtagtcaaggtggagaat

SEQ ID NO: 313306 - DNA, 1335 bp, Cannabis indica
atgctttattattattactttttgaaaccttgtttacttatcttaggaagggcttactacttagatactctcaacaattattcgcatttatgaagaagaacaaataatttgttatgttttttccattgataattagtttttgttaggatttgggactaaagtgtgattaaggtgcatgaggtctcatctcaaaactaatagacaatgagaggagtatagttcattcaactcatatatgctatcttattttcacacattagcaatgtgagactaactctaatacactctcatcacgtttgaacctgaaaaatgtgagtataacgaatgacttttaagatatcacatagtcaagcatgacatttaaaagaatcctaagaaatttgtgaatgtacatgtcgaaaaatttgtgggtataactaacatgtattttttagtttagctcgtatttttgaatcgatggtactttgagctcattacagatcacaagcagctataatattatattaaaatttgggataaagatgcatcaagtttcataagaaattttttttttttttttgattttaagcgtttatatattaaagccatgttttacctaggactcgaacccaggacctccaacactcacatacccacctatggccacttgagctagtctcaagacaccaacccataagaatttatttagccccaatttatcttagtttgggttaatgtattgaggtatttcagcaatgtgaggcctcgtcaagtgacccacataacaggaaacgttaaagtgtttgatccaaacaataatggacactttgttgttgttgttgttgttgagtgggttggtgcctttctttttgaacttgtgaaacccaattttttctttttctgggttaagaattttgagttctaaatgctttttaattaattcatttatttttgacatatctactagtgttaataataattagtgccgtgattggtgggataaagtggggtcacgtagaagaccaaaactattaaaaaataataatttatgggaatgatgattgttcattcttagtctcctcctaagattccttttcatgttttcttcctatcctaactaaaaaacttaattaaaataaggaaatataatattaaaaggaaaatttaaagaaatttttacatgaaaaatctattttacacaatttattacaaaattactcacacacgcctatgactacatttttacttacaaagttgcttttattacacaaataccacttagtcatcattccatccatcatcaatcaagtcctactctcttccctctcttttttcattttctatcaatcaatccat

SEQ ID NO: 313307 - DNA, 1827 bp, Cannabis indica
attggcagctgaatcattcctttcagtgaaatcgtatctccagtgaacccatagatatttgagaccacaggtcccagatctttttctgatagccccatttgtttaccaacttggaagttgagaaggtttactaaactcccattggccactaagattcggtggacattatctcctccaatattagcgacgattacgattacgagtgcgtctgcgtgtgggtgatgaacccacctgtcatcactctccatgaaagttacgtcatcgcattctttcttgaaaagctttttaggtcactcacttaaattgttcacgttggtgagcattttttcttttgcttccttagcatattgttcttgtggcttcttggagtctccagcgatatgggggcctccgataattatcaagatactacgaggagttcttgaaccactcgaattgtttgtattgtcgttatcatccgcttggggatgattttcaccatgtttcttgtacttgtcgaattttcctcatctgattagttcctcaatctcattttgtaagaaccaacattccagagttgtatggttgatgtccttgtgatatttgtagaacttcttcagatcccttttattacagttgcctctaatctggggagattttctaaagactccattcttttcctcaatcgcgtaaatatgattgcgagggattgccagttctgtatagttgacgaaatgtagtcctcctttcctctttggagatgtttccttctttgagaaggacttggccagctttggacttcgctgcctctgagggatgcatcttcttaggatttttcctctagaattctttcctctaggactttgagatcgtgacaatggtatgggtgactcgtgtttatccttccccctttctagctcagccaaagaatttttgatcctcttatgcggcttagccatggcgaagaactctaccaaggactctggtcttcaatcctgcaactctttccagaagttggtccttagcaacacacctgtaatcaacatacaagttaacaaagactcgggggccctctcaaccttagtcacttcacaaacgtttaaagtaatcctgcaatgacttaccgaattcctgcttaatgtttgccaaggttgtgtaaggcagtttgtacgtcattgtggcttgtaaatgtgtcaaagacaaatccacaaaggtttcccaagtcgatatggacacctcaagcaactggctaaaccaatcgtgagcattgtcctccaaggatgccgcgaggatgcaacatttcgctaagtgtggtacctggtctacttccataatcatattaaacttttctaaataatctatgggattagtagtacctttatactttagtgactcaaatagtctaaatcccttgggcagtcgagcttgtcgcacttcggcaatgacccatggagcttgtaaatgggctttctctactagtcgattatttttaatgctcgcagtaagatgttctgattaatagcccctggcatgatggcgttgttctgagtcgtcgcaggtacggtggcaattgcagctacatttgttgggattactacttttgtagttgcagctactgcgttaggaaggttgacaatattcgttgggttattgccgttgtttatgcctggatcgcccaattggggatcacgaggctcctcgcaatttcggggcgcttggtaccgtgccctaaaaattgggttgaggtgatcacgaagattccctctgtgaacttggtcttgagttttatgccctaaataaaactcatttcaatataatcacatttacttattaataaagattagaaat

SEQ ID NO: 313308 - DNA, 1030 bp, Cannabis indica
agatttattaaggtatttttgtaaatagtttatattttaagtatattattgaaaaatccctatttattttatatattggtcctcataaatttgtaggctagtttcattgggagatgtataattattttaaatccataggattgaacgtgttacactaattttttttttttttttctaacttcattataagttaagggctaatttaggttttcgccccgtgaactttgacatataccaaatatatcgtatctctgaattttttcaggtcgttaagaattcccttcaaactattaaaattgtttgatctaagaacttttattcatttttactaaaaaaagtctaaagtgaatgaaaatttcgggggcactatttgatatatattaaagtttaaaaaacataatttagaatatattaaagtttatagggacacaagttagtctatgaacaatcaccacattaaaaaaataaatgaaattagacaagagttcttaaatcgaacaatttcaatagtgtacaggaggaatttttaacattctgaaaagttcaaaaaatataatttgataaatgtaaaagttcaaagggtaaaaattctaattttttagtaaataacttttgattaaatagtatgtgaggcacaaaaatcttgttgatagtgaacttttttttatgaaaaagtaattttaatcactagaaggcatcaagaaagggaagggatctcttcaaccaacataatttattgttgaaattttgaagttaaatcctcctaataattatcattttacttacttaatcattcaaactcaaatttttgatagtaaaattctttaaacggttgaaatattggtaaatttaagctattatccatttgtctccattaataattaacaacttgaactgtattgacgtaaaaaactagccaacaagaactccgttgaagcagaaaactcttttggaagatgagggtataacatgtaaattacaagagtatactacattaagggctcgtttggtacgccgtattgtaatgtat

SEQ ID NO: 313309 - DNA, 413 bp, Cannabis indica
atccacccctaaaggttatagagatcatgattctctaagtgttatagagattatgtggagttgcgaatataatccagagttcattagatataaaagatcgttgaactgcatattattcttaactttttctccacccctatcagatcaaaagatctttttattaaacaaattcttaataattgttttagaattaacaattattcataaacatagaaataatttctagtgtttatgtagtaataactctatgaagagtttaaaatattatagaatttgtaccaataataaaaacacttacacatacaaacatataaatataattggtaattgttgtttaagataaagtagatgaagctcaactcataaattgcaatttatttgtaaaaaaaaataattaataaaattataaaatt

SEQ ID NO: 313310 - DNA, 2057 bp, Cannabis indica
ttgaagcattcatccaagtcatctatgtgccccagtctttctggacttgatgagcatatcatccacataaactttcatatttcgtccaatctggtttttaaacattttattgaccaacctttgataggtagccccaacattttttaatccgaacgacataactttataatagtacaacccaacatctgttcaaaagcttatgtattcttagtcaggcggatgcattctaatctgattgtactctgaatacgcttctataaaactcaaaatttcatgacctgctatagcatctacgagttggtcgattcttgagagaggaaaacaatcttttgggcacactttgtttagattggtaaagtcaatgcatacatgccacttaatgtttggtttagcactaggacggggtttgctacccaagctggataaaaagcttcaatgataaatctatttattcgaagtttttcaatcccctcctttaatgcatgtgctcgttctttatcaagtaatcttttttttactgcacggtctttgcattaggatcaatgttgatgtgttattattgtggggtcgattcctaccatatcttcatgcgaccaggcaaatacatcgaagttttctcttagaaattttatcagtcctggttttatttcgagcaacaaatctttttcgattttgatttttctagacatgttatttggatcgatttcaacctcttctaactcttccactgacccaacatttgaacttggctccccaaggcgaagatccacatcttcatccctaccttgagcgaatccctatttagcattggcttttcctttctctgatccttggatgattttttttttcttttttagccttggccagggcaaggttataacattctcgtgcagtcatttgattgcctcggacaaccgatcccactttgtgttaagaatttcacacacaaatgataaacagaagttaccacttttaagtcatataaggctggacgacctaacatgacattaaaagcagatggaacatccaccaccaaaaaccgtgccatggctgttgttgaagttggagattttcccactgtgagtggtaggcgatatgttctgagtggtgttatgctctggcctgagaatccataaaccgactatgggcacgaaattaaatctttgagatgaagatcccttttctcataaatagttttgaacaagatattggacgaggctccattgtcgatcactgttcgagccaccgtcttgtttgcaatttgtacgtccaccactagaggatcattgtgtgggtaactcacaattttggaatcttcatcactgaaagttataattgaatcttccattcgtgtctgtttgggtttcctctcctatacgaccaagacttcttctccttgcttgtactgaagagttccagcgtatttttcccttgcattcttagaatctcctgctatgtgcgggtcccctatgataagttgtagatgtccatccacaggcggtggcatcagtaggttttggttatcatcttgttggccgaccatttattcttgattgacctttacatacctccttatgtgcggattgttcttcctgatcaagaattcattctcttcttttagaatcttgcactcgtaagtatcatggctaaaatctttatgaaagcgatagtatttggaatgatccctttgttgggattttatgccctaaataaaacccattttaatataatctgatttattatcaatagaagattagaagtcatttatgtttacatgtagttttcatgtttatggtttaatgtatacaaattctgttaaatccagaacatatagttattcacaattatagtgatgtcaacacaatgcttcaaaagataatgtcccttaattcatcagtgcactggatttacactgatgtgagagtcagcgataaattatacttacaccttggataagtgttatggtcttcccagaacattggcaaagtatgctagttttagatgtatggagtatacattggactgggaccgatattgatcttggtaaagatatcata

SEQ ID NO: 313311 - DNA, 2168 bp, Cannabis indica
ttctaatccatttcttaactctaaggtattacagctagacaggatgcaccaccaaagaatcttatgatgctccaaaattttactattccatagtttgttccaaagcaaaggggcaacctcacattggggagccctatccacatcctgagataggtaggctgatttgcacaagaaatgaccattattttcaagagtccaaatccatttatcattaccctagccagaggggttacctccttttaagattgcagaaatcgtctctcgatcaaataagcaattcaacttatggatatcccaaccaccactaattgaaaaaagatctgccaccctgctaaaattagtatcaaaagatccacttggtttcgaacaaaaatctttggtatgcggtatccaaggttccccctagatactagtattcataccatctgccaccaatttataggcacccttccttaatattgacttggctttaacaatatttttccaaaaccaagaatctgaatctttatagctatagttaaggaaatgcttccctttaaggtatttagctgccaaaatctggcaacacagagactgagatccattaagaatgttccacccccatttcgtcagaaaagcctggttcatctctctagttttctgaaaaccaaggcccccaagagatgtgggtgggcaaagcttatcccaagcttttaggtgaagcccatggttgcctttttcaaagtaccaccagaaattacgcaccaaaccatcaattttggtgacgatacgattagagagtttggttgtttgcatagcatacaaggacaggcccataaatttgataagggtagcctgccctgccttaaacaaggtcttcgctttccaaccctgcaacttagaagtgagattatccagaatgaagttaaagttcgcatcattctatccagagcggaacaggggaagaccaaaatacttaatgttaccttcaggagagccaatccttaaagcttccttgatccctcttttcaaaccactggaagtatttttactaaagaagatcgaggtttttaatttgttaacttattgcctcgaccaagagcagaatctctcaagacaatgccagtagcctctcgctttaatcaagttagctttgccaacaagaattaagtcttcaacaaagaagatatgggagagaattggacctcccctactaagtctaatacccttcatagcacatttactcattgcatcctctaacagccttgataaaacttcagcaacccagataaagaggtaaggagatagaggatcaccctgtcgaaggccgcaagagggcttaatcgatccaacctgccccccattaagacagatattgaaggaggtggtagagatacattgggagaccccaattgtgaaacttctgaggactaccataacaagaaagcacatggtcgatgaatctctagttcagcctgccataagctttcatgaggtcaattttaatggcgaagtaacattccttgcctttttcctgttaaacgagtggataatctcttgcacaatgatattattatcttgaatattcctacccagcacaaaagcagcttgagtagggcaaatgagagaatgtaatataggtttaattatatttgcaatgatcttggagatgaccttgtacatcacattgtaaagagaaatgagtctaaaatggttggttcttttagggttttggactttaggaatgaggacaacatttgtagcattaacacccttatgcatttttccagaattgaagaagtctgtaacagcttcacaaaaatcttcatccacagactcccaatagtgcttaaagaagagaactgacatcccatcagggccaaggctttatggttacccatagcaaagagagttctttagatttcctcatgagtggggctcatgaggagcacctcctggtccacagaagaaattctctcatgaaagaattgattgcagttaagagcctgtccattatcagacctcgagaaaattccttggaaaaattcaatgaattccaaaccaataagatcctgatttatgatccaaatattatctttgttcaagataattttgatagcttttctccttcctctaatgacaaccgagaggtagaagaatttcgagcatttatctgttgggttttatgc

SEQ ID NO: 313312 - DNA, 863 bp, Cannabis indica
atatttagtgtaattaagtttttatgccatatatatcaaaacttatctttattttcccatatttttgtaaatagcccttaattcttcctcctatattttgtggttttattgaaatattgaacttataataatttcagctactttcctccaaactacaaaaaaccatatattttcctccaatttcatgcaaaagctataggagaaaaaaactattataaataataactataaagtcaatcatggtcttatcatataagtacataaacccatatatatatatataataaagaaccttgtgtcacactcacattcaaaaagagagtcataataataaaagtgcttatagaactttgcagcatggaatttgggcaccacaccaccactagtgccaatgttccttcaatttttttttgttggggggacaaatttaccctctaattacttgaccaaaaagactcatgagcagtaaatgagtgagtgttgaagaagtgcatggttttcgaatgagagaataatacagggcaccaactagtagatgatgatgcatatatatgtttttttttttggtctgcaaccgcagctttgggtttgggggagattacttagagagtgtaccaagtgtcgttgtaaagcgaaagggactcttttagtattgcaagcaacgcatccatccaaccctaatatttggcaccacatgccaccatttcctcttttatccttcttttaattaactatatatctgtgcaaaagttatttagcctacaagtatagaaccccctcccttaacctcgtgactaaatttattacacattgcaaaattaaaaagtatgggaaccatgcatagctaaatttaagggaaaaaa

SEQ ID NO: 313313 - DNA, 523 bp, Cannabis indica
taaaataaaaaaaatcgtaaaaatgtttaaaattccgtgaaaccgtatttttgttgtttttgtacatttgtgaaattaaccctaaaactttagtattagtctaatgagtagttattgaaaataaaattaaaggagcaataccaaactcatggtcttagtgttgagattgctctcacatcttctttatattttatgtaatttacttgtttatagtatttgagttgtgttattctctatttttagtatgttttcttagtgagctgtaactttatttaatttattatagtttttgtattgttgagcattgagtggtaattatcaatattttccaataatttcagtcatctacaatgtagtggagaccagagatcaaatttatgtgtgtattattttattctaaagacgttgaggatgagatagtctacttgcacattcttaatgggaaatttcactttttggccttaataatacaagccatatcaaaatttataccctccttcaatttgtacaaatttagtccatt

SEQ ID NO: 313314 - DNA, 743 bp, Cannabis indica
gcaagctatggatctaaaatgggagcagcgagctcaatcgaaaatggcggagctcaaattgatcctcgatgagcatctggcttaggcctattctccattgttgtctgaccatgatggggtgaatatcgcaagtcatgagaatacccgagtgttaggtagaagatttgatgttgagacgaattgtcgagaccttaattctattctcaaaacattcagagtagaagttcatcaatttgacgggtctaagatggatgacttggtttacaaaatcaacaaattcttgatcttcattatgttgattcggctatagatcagacttttagtggttgctttccgttaagatggggtaccatctacatagtttcaatggatggaaatagggtataggatttgtagaatgtgattaatttattcaagtttatcagtcccgttttggtaattccatttatgattatctgttgggccatattttaaagcttactcagacctttcaaaatttcgtgatgaattcaaatcattattgctgagaatttttggggtgacagaatctatgttcttgaacttctttgtttggggtttaaaacaagaatttagcagggagtaactatggttgaaatcgaggcactgttgggttttatgccctaaataaaactctatttcaatgtaatccagattgttcaatatcaataaagtaacagaagtacttttcattcatttgtgtatgttttggttcacttaatcaa

SEQ ID NO: 313315 - DNA, 1308 bp, Cannabis indica
gattcttcacagtcttacatactatgattgaggactcacttgatatgtgtgggcatgcactcaaccactaatggctgaatttggtttgtgaagaatagctttggtatttcaaaaattcaagaggaagaagaataaggaataagtctcatcagaaagctaggtttttagctttggaggcattagttggacgatgagaccttatctatccttttatactaatttccatagggttagggttgatttattttggaataaaaaattgataaaaatagagtgaaaaacccctttgatggtcggccacttaatgggccccacaatagtttcggttttgtcatttttctcaactattttatctatttttcacaaataccacttcttacaatttcaaccatataaatgccaaaactatttatttaataattaaaataattatcaaataaaccattttaattctccacacattttaaatcctattttatttattttttctaagataaaaaatatcccatcttttaaaccaaattcctaatcccttccccctatctctctcttctccccttaaaacctccatagctgccactatctttctcactagaaccctcttcttattcttcccatttcatctgaacccaagaactcatccaccttcatctctttgatgctcaaaaatcaatcatcatttttgccgtctctattttttcgacccgcttgagcctgatttcatcccatcaccacaactagttcatctcctctgaatcacgaccacgacgcaccgtaagttttagatataaaagatcttcatgaagggaacccacttttaaaactcacttggtctattaagactcggcgtggaagatcttcactggaggtggctcatcggtgctgaactgagactagcgagggagaaagagaaagatcgaagacagcaggtcggggttttcgagtcttcgtcgggttcgtgtggtgggtggtggtggttaggtctgtaaatgaaagaaaaacgtagagatagagagagattgtgaaaaagaattaatagttgaccaaaaaaggagagagagagagatagtgaaaagaagaaaaagaaagaaaaaaaaagaaaaaaaaaattagtagtttttaaataagaaaaaaataagaaaaaaaattatttacaatttttgtaattataaattaatttttagttttttaataattttttacgtggaccaataaagttatgccatgtgtacactatgtctacgtagatgtacacatagacggtccaacatgacacttaacacctaaaatgaatggaaatattaaatt

SEQ ID NO: 313316 - DNA, 546 bp, Cannabis indica
agttagtacctcaaccaacagggaccccgactctcaaataagacatctagtgatagactagcttcctcaaagaagtgactggacacccttggccgatcttatggccagccaacccttggacaacacatggccgaccggtataccccctacaggtgcctggctggccagggaaggacctggcaggattttttgtacatttccacacatggactgtgagttgggctgcgaattagaaccctaacaacccaataaaaaagttggaaaatatctatgtttaaggcaattttagtgttttgtaattaactaattaattcaatatacaattatctaagggttttagttgtaaattagggttaagctctactatataaaggaccttaactctaatctagaaatctctaaggctcattctagcctcccagtgataaagttctatacctaagtctctaaggctgataactcgctcttcctcactccctctcacacgtacatacaagcattctcaacacttgatatttgccatcttgattcctattttgtatcctt

SEQ ID NO: 313317 - DNA, 1386 bp, Cannabis indica
aatttaaaaatgttatggttaggtaaccttaaaatatttattaaaactaaaattttaatcaagataaatatctaataagggaaaatgtcaaaactaatattttcttaattttataatttacattaataaatatattttaaaaataataaattttaaaaatctgatatagttagctatttgaaattctaactagattatcttgaagttttattaatattttattgtcaaaataagatcattttaaattttatatataaaatatgtaaatatttgatcttataattaaaattaataaaagaaagaaaaaaataattaaatttaaaaaataaccataaaagcaagtttgtgaaaaaaaaatcaaattttcaaactcaaagctcactaatatctaaaactaataaaaattaattttattctgattattagatttttatttgaaaatttagattcttcacaaaattctaccaaaatttatattttgtttcattcaaataattattgaaagttgaaaaatcacaaaaataagatgacacaggagactatgcatttgcaatgcatactccctgcgggcgcatagagggctgttgggcatgacaattgggtgcatgcagcctcgtgtgaccgagaaaccttggcatggttgaggtttagacatcgcgtgtctgagaaaacttggacaggttccctgtctgaatctcaatcatgaccgagtgagcactaagctccgcgtgcgcacgtgcaccttcccttagatattttgtttttcaaactttaacaaaaaatcataactaatcaaataaaaattcaaattaagttctgtaaaagcgtaaattcattaatttttcatctactttcacgaaaaaatacttctagtacaaaactaaaaatatgtttcatctaaaattcgtaattcacaaacattcatcaaataagcatataaaccaacatgaacacatccaaatcatcacaattattgttttaaatccatatttaatgaaattaaatcattaccatggctgtaatgccctgtccaacagggacgccatgtgtgtacttttatgaagttactctatcactaatttatataattataccaaatagtgcggttaattaaaatctttcaatttaataacaaatttttataaaagttaagtattattatctacgcgaacccccttttatcaaaatatttacattgaggactaaaagttcttttacaagataagtttatatttcaaaatacagtcaaaatggaacattctgtacaccgggtcgtggcaccgcgactaatatgtacattgttgctgcgacctcagactcatggttgctcgaccttagccttccctttacctgaatcatttagcacccgtgagtcacagagactca

SEQ ID NO: 313318 - DNA, 1169 bp, Cannabis indica
aaatcacatcctcgtatttttagtatagcgggacaatatagctagacattggaaatgtcgggaatagttaggattttagaatttaccaaaaatacccctaagtgattttatgatggttcagtgtgggcaagggcaatttggtcttttgtccatttgtgttttgtacttcagtggacttagttttaattaataatctaaatttttatgagttataaggtgatattattttgttaataaagcaaccttttatccatttcacaaaaatagaaaatttgaaaatgaaagcattttctctcttaactctgtctctctctctcttccaaatccacctagaagcagctagggtttgctgtatctttcctccattcaagctagtttcagcaggatttgagtgttcttaagctctaggtaaacttttgtcttcactttcttaggtttcttgaattttttgaaatggattatgcatgcttttgagtttatagctgttgtagttgctgttagtgtttgttattgatttcaaaagttaaattatgtttagaaatgttgatttaagcttggtttaattgttgttagtaagtttcatcaagttttgagttttacaactcaaacttggagcttaaatggtgaaattcgattctgagcatgggtactagttttattgcttggtttatgtcaattggggtatattatgcatgtctggaaggtttggtaaggtttggaaacgatttggtaagggtttgaatttattttgtttttttggagaaaaccggctaaccgattttacaggtacctgtaaaactaagtaatcgatttttgcagcaaggtttcccaaaaaattgaggttgtcgtttcgtgttagtttttggtttctggttggttaattccctgctagtttagggtattgccatattaagttgcagtaaatagtgtttttgtttaaaacctaagtcccggttgtgatttagcgtgtcacttatccatgttgttatcgatgtgatttaggagactataattcgctgagaagttgttccactaaggttgaccggcacacctgaatttggaattgaggtaagattagtataatgtctagagtatgttggctaaaatattgatcgatgttgtcacataaatatcgctagagtatgactagcatattgagtataggctga

SEQ ID NO: 313319 - DNA, 1236 bp, Cannabis indica
attagtctttagtttctaaatttttatttttgtttagtttttcgatatagatctggaaaattattgtatattttttttgtacattttgtcatgtaatttgtttgtaacttattccacatttgatttacacttaataattttgtttaatttttccaatctgaaatgcatagattaacatgtaaaaatataaatgaaagtttttctgattttttttggtaccacactaagaatgaatcataagttgtttggaaaattggactagtatttcacattttagtatcaaaacaaaaaaagaaataatctgattccctgaatgttattatttaaaattattatttaaaatttataattattaatttgattgaatatatttttttaaaaaataaattagaaaatagatacagtgacacactttgtgtgtacgtagctgttatctttaggtgggactgtaaaagggtatggtgacacgctttgagaaactctaaaaagttttagtgacacgtatgcagattcactaaataatacttttacagtcacccacattagtgacgcgcattgaagtgtcactaaaaacatttagagtcactctaagtgtgtaactgaaacccatttttgtagtagtgtgagtcatattttaggggtcccgagaccccaaaatcttatttcgacatctgaaaccctcaagggtaaccactaccacctgttgggaccgaaaagtggcagtggtcggctatggcttatgggaagccatagatggtatttcttgcttatttcagtcacatagatgctagaaaacaactttggtcacattggttcttggctaattgcttaagagagcactaccacaatttttgttaaaaaaatggcagtggtcgcataaggggactatggagccttgggtgacttttcttagttgtatttgatacatggatgctgaaaatataatttttcaaaagaaactcccactcctatgtggtggccgaccactgcgaccacttgtgccaaaaatgtggcagcagttggccaagtggtttccacaccacttggtggctttcctcacttagttttgacatgttattgatgaaaatgtacttttggcaaaacaattcatcctcattccttgtggccgaccactgccacaatttttgccacaaagatggcagtgttcggctaagcttgcattttggtgagaaatggtttctttcacttttgttgcactccttggtgttgagggaa

SEQ ID NO: 313320 - DNA, 1229 bp, Cannabis indica
gaaggctgtggaagtgaagaaatttaaaattgggcaaagaaattaagtttggggtggaaaagttacatctagttgctatagcaatggcttagcaacgttatttggcagcaaaaggtgttttggtactgggctgatcaaatgaattggagttttgaaacaataatagagtgcttggtctgataaagaggaacatgtgaagaaaatgtgttttaatgatgcaatcattggggaagtgtctttatcagaccaatcatttggtcttggtgattggtcttggtactttgtattttccttatttttgggctgagattgtagatcaatctaaatcaaattgaccccacaagcttaataagtccaaaaatttagtcaactaggccccattatgttgttgacttcagcccattttctcaatgattagcccattagctaaactacaaccctaccaccattactttcatccttctccaccaagtagccgcatgctaaactcgattcaccaccagtcaccataacctctgcctgactgcaaacaacccatctctaaaccactgcgcaatcgacctccacctgaactcactcaccaacccgaaccagcaactccactccgaagccctcaacttctaaactcgacccgtagccaccacctttagtctactttcaccagaaatcaccaaaccgttcactcaaacagcaaccaacaccaacctgtaacctccattcaaacaccagattaagacaacctccacccgaagttaacccgagccatctcaagtcgaccttcactcaccatcagcaacttctgtgcgagacaccttcaacttgcaccactcgttgccaatcacgaatcacccaaagctccgttcaaccatcactacgaaccaactcgaaccacccagccgcatccttcaccaacgcgacccagcaacgaaccactgcaccacgccgagatccgactctgttcgcacacaccagtacaccaccagcaatcgaggaagcaaacaagtacctccatttcaccattccagtcgacaccatccgagccccgttcatccaacagcaacccagctcacatccctcactaacccgagccatctcagctcctatcaacgaacaactcgcacaccagaaagcactcatctcgaaccaaagtcacccatctccatgttaggttttatgccctaaataaaactccatttcaatgtaatctattttattcaacatcaataaag

SEQ ID NO: 313321 - DNA, 6870 bp, Cannabis indica
aaaagtgaataaattttaaaattaattaagcgtgagtaagtaacacttaatttgcaagcaagttcttgcccaataatagatcatgtttcgttgagccaataattttgtctcaatgaactgcaatattagccatacacaattatatggaccggtcacacacaccttaaaatgttattatgttgcttatataaatatatatatatgtatatatatatataatattgaacaaggatgatgataaaattcaattaaaagtaagacttttttaggttgaccaataatataccttaatatactcacaattaattccagcctttttattatcattaattaaataattgatcttaattattttttagtattgttagaatggttataagttactagttagaaaaagttagatagtgctaattggactttagagtagctcggcagagcgattagttgcctataaattacacttataacccctagtacattgtaactaagtttgtatcatttattattaaagtgaaagttaatttagaaacagttctaagttatagaaaaagaagtgaggcttgtaactctctattcttcttgattaatagcagtgtgactcttgtaacacttggtgattaataaagacattaatgattgttgtttggtgttcctctctctctctctctcttgtttcttgtttaattctcttaataattctttgtatttctctcggattgtttgtgttcttgagatgatgttggtattataggtgaacttggcattgagtgtcttgattgattcacaacaaattgggttataagttactagttacagaaagttagatagtgtcaactggatattagagtagctcggcaaaagggttagttatttatgttaggattgccaaagcctaaaaaatgattaatctaattaatcttttttctccatcaacaccgtagaattgtgtggtggaagatatggaagatcaaggtgtgagttttatgtcaccgttctaaggacacaacatacgaaaagattcgaggataccctgataggcttcaagagtaatattatattttcatatttttacttttacatttaatatatatatggtgatcttggaaatattgtatgttgataatcagtttaatcctatgcttacttgatttagtaccataataccaaatttattcccctgttaaaaggatttcatcctcaaaatctaatcctaacaagtctagttactgagtcctcatattgtactctaaatccaaggtagcttcctctaccttgttgtttctcaagaatactttgaccaatgctacgatcttgtttcaaaggactttgtctttcttattgagggtctgcactggttacctctcataagataagtctgattaaagttctagaccttcataacttaggatatgagtcaagtctgaaaatacttttcttaacattgaaacatggaatatgttgtttattgccgacaatgctagtggcaaagctaaacgataagctactaatctgactttattgagaatctcgaaaggccatgtaaatctagggcatagcttgccatttctcctgaagtgttttccccctacttggaattttatgtttccgcacttctgatctatataactcttctgcctacttgaaaagcaagaattttgacattgatcttctctatagcctccctagtctgctaaattaactctagacctaagtattcctttctatagtttcatcctaatgaattggagaactgtaattctgaccatacaacatcttatagggagtcatctttataatactctgataatcgttattgcagggaaattctaccaaaggtagatacttactccacaaaccttcgaaatccataacacaagcttgtagcatatcttccaatattcaaattgtcctttcagaacctgtcttagagttgaaagttgcactaaactttaactttgtacccatgatcctttggagactttctcaaaacttaaaggtaaactttggatccctacccgaagtaatagactttagattcctatagtgtacctcttttacatacaattatatgtactgatctacttcatacattattttcactagtagaaattgtgttgattaagtaaattgatccataatcactcatatggaattgtacatttttgttgttctaggcagaccaaccacagatatccattgtagcatccccccacttccactcgagaagtgtcaaaagttgcaataagtctacaggtctttattgttcaatcttgatctgttgacaaatcaagcatttggatacataatctaccacatccttcttcataacgcactaccactaatagggtttcacacattggtgtatcttggtcgtaataggtaagagatttctctaggatttctcttccaagttcaacactgcttagagcgcaaactcaagtcttatatggtaacatcccgttgctgacatagagaaatctttagactggttagttatgacctcttctcgattttcttacttattcaggattcaccaattgagcgcacttctgattcttgctaacaaatttgattgaagtgtcaagttattgagtttaccaaccacaaccttaatacttgacttgaccacacccagaagagatcttggttgtactaaaaacctcctcaagatctttcttggttagggcatccgctactatattggccttcctggggtgataaagaattttgcagtcgcaaaacttgtctaactctaaccaccctctcagtctcatgtttaaatctttctgagtaaggaaatatttgagactcttgtggtcagtatagatttcacacttttctccatagagatagtgctgctaaatcttcagtgcaaaaccactgcaacaagttctaggtcatgagttgggtaacattgctcatactcctttaactaatgagaagcataggcgatgactttgtcagcttgcatcaaagcacaccccagggtattatcaacattttgcagaatgtttttttaagatttgaatgccagtgacaaaattgactaagaagaaccaacggtttgtatggtctgacaagtgtgaaacaagctttcaaagctgaagcagcaattgatcatagtaccaatgttagctttactattagagcaagaaaagtttgttatttattgtgatgaattcagataggatctggcatgtgttctaatgcaagccgatgaaatcataccctatgcttctcgccagttaaaagattacgagcagcgttatctgacccatgatttggaactagttgtagttgtgtttgccctaaagatatggtgacattatttgtacggagaagtgtgaaatttatacaaaccataaaagtctcaagtacttctttactcaaaaagacttaaatatgaggcagagatggtggttggaattagtcaaggattatgactgtgagattttatatcatctcatgaaagcgaacatagtgacagacaatttgagcagaaaaggtcttgagcaggtttttagtaccataatgatatgacctcagttggctttagacatggttaaagctataattgaatttttagttggaaaactacataacctggcactttaatcatatttattagaaaggatcagaaaggtgcagttggaagattttgagttggttaagattcaagagaaggtattggcgagtcggcttaaggacttctcaatctcaaaaaatagaatgttactttacaagaatcgagtttgtgtttcgagcagtgatgagcttagaaaggaaatacttgaggaggctcttaccacaccttattcattgcatccgagaaccaccaaaatgaaccaagaattgaaaccctattattggtggtgcaaaatgaagaaagacgtagtcgaatatgtgtcaaggtgcttcacttgtcaatagatcaaaacagaacattaaaaactggtagggttattacaaccattaacactgcctgagtagaagtgggaagatgttacgatggatgttgtggttggtttacctagaaacacatgaatgttcagtatgggtcatagtggactgtttcacaaagtcagcacactttttgccggtgagaacaacttatattgtggatcagtatttagagctatatgtaaaagaaatagtgtgtcttcatggggctccaaaattcatcgtttcagacagagatttgaaatttacatcaaaattttgggtgagtctttagaaagctatgggtatggagttgaagtttagcaccggtttccaccctcagtctgatggacagtttaagaggacaatacagatattagaagatttactgggaacctatgttttggactttgagggttcatggagcaaatacttgcctttaatagagttttcatacaacaatagctattagagcacaggagggatggctccttatgaaatattgtacggtaagaaatgtcgttccctaattcactaggatgagactggggaaagtatttgggtcctaagttagtttatcagactaatgaatcgatacgcaaaatcaagactcagatgcttgcttcgcaaagcaggtagaaaagttactcagatcctaagcgcagagatattgaattttaggtaggtgaccatgtttctttgcaggtttcaccaatgaaaggtataaggcgctttgggaagaaaggcaagttgagccctaggttcatagagccattcgagatacttgagaaggtcaggcaggtagtgtatcggctagccttaccactagcattatcgcttatacataatgtatttcatatttcaatgttgcgaaaatatgtggcagacccgactcatgtcttgagtttcgaagccctagaattacaatctaatatatcctatgaggaacaaccaattcaaatcctcgataagaaagaaaaaattctttgaaataagaccattctattggtcaaagtactttggaggaatttcaaggtggaggaagccacctaggaactagagtccagcatgaagactcaatatctaaagttgttcaggtttgattttgaggacaaaatccttttaacggggggataattgtaatgaccgcatgattaaattatggattagtaaaggttattagtattaattattgatattttgtgattatacatgattttatatttattgtgggtcccatttttagaaatgggcattaaagttgtaatttttcaattctgaagattttattaaactctaagtgtattatttaggttatatacaaaatttacaagttttttatgattttgctcggtgacgatgcaaaatgcgacagatggccaatttagtaacatgggttaaattagaatctttttatatagcaggggtatttataagttgatatttagaatattaggattaggcggggttatggtcttggaccattttacccctaagtcattttactatttaagcaattatgtaagggtatttttgtcattttggttttgaggattaggtagttctttcttttgatggcagctggccattatatgttttaatgaattaagctcaaaattattaatttatccaattaattcaaaatcaaggaaaaggacaaaattagaaacccacctcttgctctctctctcctatattcaggcctaaggaaaaaccaaagaaactaagtccaatcttcatcaatttttgaggagaatcagttggttttcaaggaatagtgaaagtttggaacttgtggtaagaaccttaatgccttttcattttgtttttattagttttgaaggggttcaagcatgaaatagtggtgttttatttctgtccaaaccctaggagtgggtgatattttctgaagttatgttaagggaaatttagcttgatggagttagatttaagggttgaatgtggtgttgagcaagtttgagtttaagaactcaaacttggctcaacaatggtaatttgtataatttttggttatatctggttttactgcttggatttggtttatattgaagatattaggtattttggagcatagttttgaatttggggtagttttgagcttgttttggagctctttgttttcctgcagtgagaaatggtagatcatatctacagatcggtctaccgtttttactgagaaagacccagaaaaatagcctaccattttaatagaaatggcctgtcattttttaggcagtttctccgtttagttgtttttctcgtgtttcctggatatttgggggctttttcatgctttttatcgataggaaaacttttagttttgagtttagattctcgaaaaggtttagaaagttgtttatccattttatgtgattgtgacatagggcattcatacattgcatgattttccattcaggttggctggcacgcttgaattttgaaacgagataagactagtatagaatatatgtgtatgtatgttatatacatggtgttatatgattcatatgctacaaacactagtacgatagcgatacttagtgcatatggtacaacctatgatgtttaagagtacaattcgatgtgaccaacactagtacggttgggtacgtagtgcatgtggtacaacacttggtggtactgagggtacggttcaaaccctaccaacactagtacagtagcagtacatagtgcatgtgctacagaggtcgtgcatttgttaagaatgttcttaatcatctgttaagccttgtggataggtgtatggccgcctaaatacaagtcggtagtatattgtatattatatgcttttcttactaagttttggatctagatttactaacaagtatgttaattaacatcctaaatatgcatatctctaaaataataaaattaaacacataagagttt

SEQ ID NO: 313322 - DNA, 1362 bp, Cannabis indica
tatatatatatatcatcaatcaattccaaaaggtcaccttagccccgtgatatatttatatataataaaaatataaagttattgtttaccttagcctcacgatatatatattcaaaaagagaaaagaattaattaaaaataaaaaataaaacaaattaaaagaatattatggtcattaatgaaaccctaatttgtttcctagctagtgactatatagtgagtatagttgtccaataattagagatcttcttctatatatttgttgttattaaatagtgtgcaagtgttcacaaggatctggttttttttttcatccttatattctttctttcacaatggataagaaacggtcattcgttgaccaagtcaaaagacatatatattaattttttatatatagttatgtgtatttttaattgtataattattttttttttatgttattcaataaataaaattatttatattaaaaaattatttaatttaagtaatatttaaatttataaaaaaatataataatatttaaaatttattgttaattataattttagtttaattgtaattttttttttaattttataattcttttatttttcttaaatatcattcatttttttttttataataattaggagaatttgcggcgaaatccctttatgttttaagttttatacacttaacctctttatttttttttagtaaaacccccttaagtttatttttctttgtaaatttaaggtgtcagttagatattactattaaataccaactgaattactactatatcgacttcgaagttttagtgttacaaatatacaggtgtatacagtggtcgtgcaattaatatttaacggtaatatttaactggcgtgttaaatttgcaatgaaaaataagtttaagggtgtttgccacaaaaaaaaaaagttaaggagatttaatgtataaaaattaaaatataagatagattcgtcccaaattgctctaataataataaaaataattttttaatgtaaattggataaaatattgataatagatttttttttgtttttaaatatgtacaatgagtttagatttaaaatttaatattaaaaaagatataattaatataaaagataaaaaaaaaagatattgggagtttaaatttaaagtagtgtaatgttattaaaaataacaataccttatataattatatttaatataacaatgagatactctctactagtacaattataaggtaacgtgtgtaacgtccccacttcaaatctccattgggtccttacacccacggaatgatagctcttatacacgagtacgccactctagctgttttctggattgatgactgaccctacagacca

SEQ ID NO: 313323 - DNA, 895 bp, Cannabis indica
aattataattctaaaattagattatgtcaagtttatgaatttttcactaagtaagggcttaaatgtcaagaaaagagatcctaggtcttatttattaattaagagactttcatgaccactgagcacgcttccatgacctgctttaccaatttccttcatgattttttcatgtttcctctcccctatgttggtaacaaacatacttggactattaaaacggttagagagcggttagacttggctgtggtctctgaatcttggtgtgacctttactttgataattcccttcatcgtttaaggttttatggttctgaccaccgagtcttaaaaattgtattagccagtactaaacctaaccctttaaactttaataaaagctttaggtttgagaattattggcttgaggacctgagtttttacaccctagtggatactacttggaaagagtatcatgccaatccctctactggtaatggcttccatagttttcctgctaaacaagctcactgtatttcctcccttaaggcttggaatagaagcaataactgcttgattaaatcatattcaaaacaaagatgttctcactagggaagataaccttagactcatctagttgcaatctaggttagatgccatgctttacaaagaggaaatttactggaagcaaagagctagagtccgctagcttcatgctggggataggaatacaaaattttttcataggcatgcctcttctcaaaaaaaagtctaaccatataaagtactttaggattgaagatggaactgttgtcaacactttgctgacttaataacctcttatttctctgatcttttctcctccgaggaaagtgaccttgaagctgctgcttcatgttggttttgtgccctaaataaa

SEQ ID NO: 313324 - DNA, 842 bp, Cannabis indica
aacccgcctgaaaaaaaaattttgcaggttcaccagttggggttcgggcaggttgctcgggttcgggtcaaacccgttcaaaatgttcagccctacctttagtacctctaaaggtgtactttatactagacttacccctttaagggtatactttatattaaactacacttttaataggtacgttcattctccatcctctaatgtcaatcaataaaaatattaattaattaataattgattttatttatattttaaactataagttgcaatacaaactatccttaagcactgtgatcttaaggcatgatatatgtttattgtttatttatttttattttttatatagagaaaagtaatatgttctaaattgacaattgtatccatatagaatttattctatgttttaaataaaaaaaaaaaaaaaaaaaaaaaaaaaaaagacaaatatacattagaaaagaaatagaaaacatacaaatattactaaatgaaaaataatgagtagaaaacattgtcatacatgtatgtaaacatatatatgccaaaacttatgaagttcctcttttaaaataatataattacatttctctaagaaaaataatatgtataaattgaagcataagcaactttatctcatttagaaatattaaaagcaatcaaaaataaaataaaaaaaacttacattgaaaagtatatatgcttattctttaaaaaatttattcatgtatattatatagactaggtaggagttacgtgccgaggcacgtaaatattagttttaggtcaagtttaagtttttttatttttttttattttagtattgtacgtgaaagtatgatcat

SEQ ID NO: 313325 - DNA, 1208 bp, Cannabis indica
attgttacaataaaaatgtaaccattgaaacctcttccatagagttatttatactctattttgttagttacacaatttgtttgatacaagctgtttgttcagccttccactcttgtaatctgtacgttcccttctttgtaaataaagctcatgagctcaagacaagtaatttcacaatattgggatatctctcctactgataacccgattagtgatgtgcttaatagcttggacaaagaggcatatagggaagtatggaaaaatgaagtcagcaatttcagatgctcaatccaaggtagaagatctccattactcagttcattgcacggccaaccatgatgctgctattaaacattcagaagcaattttggatgatcttcttcaacacaaggaaatctattggcagcaacggtctagagtggattgacttcaatcgggtgatcgaaacacaaagtttttccatactaaagcccctgcaagacggtcaaacaacaaataaaattcttatgtactgataccggtgacaaaagacttcgaaagctgatttggctgctatcattcgcgattattttgctcagattttcacagcctcttcaattgatgaagcagctcttactgctacaattaataccaattcctactaccactacttcaaatatgaacatgatgctcctgctgccattttctgcatctgaggtggataaagctttattttcgatgggaccagataagagccctgatatagacgggatgtcagcgatgttttatcaatagaatgggctattgttggggatttggtcactagagttgttttgggggttctcaatgatggtattaatcctacggagttgaacataaccattatcactctaattccaaaaattaagaaaccaaaacaattgagtgattatcgtccaataagcctttgtaatgtgatctcgaagctaatttctaaagtgttaatttcaaggtttaagcatgtgtttcctgctgtcatttcagagacgcaaagtgatttcctttcaaatcgtctcattcaagataacattttggtagcttttgagttggtcaatggaattaaaataagagttaatggtcggaacgggatcactgccatgaaattagatatgagcaagcctgattaaaaaaaaacagtaaaatatgaaagaaattcagaaaacttattaacacaattgagagttgagcaa

SEQ ID NO: 313326 - DNA, 1084 bp, Cannabis indica
gcggatataagaaaatctactgagttgcccgggttgtgactctcacttccattagttggatgaaactataggaagttttctcgtagcgagatggtcatctcgtattattgtactccgagctagttcgtcttttatacttagtctgcttatttgtgagctgaggtatgtgttattcttctctagtgcctcgctattctttttcagccacatatggtttcttgttaataatctaagtaccagttcgtacattgattcctcaccaaagactttacaatcagcggattgcaaatatactctagtacttccacaattaatgagatattccataaaaaagatacggcaccgattcacattctctttatcttgacacgtgttctacagccaaatttcgggtataacacaactgatttgagaagaacctctttacctcctttgaagaaaaccttgttcttccaattgttaagatgattctaaattttatctttaaggtattggaagaattatttcttggttcggccaatatattggggagacccaaatatttcacaaaggttctctgacaaggatacccatgtaatctgagattagggttatttccttgagggtcgtgtttggggagaattagagagaggatttttgaaaattaacttgtttcctcctagccttttcatagtcgagaaggatttctgtaaagaccgcttagctttaatttggaaattagcagataattaggactttattatgaagattatttattaatattaaattaattatttatgatgatttatttgaattcaaaatgcatttttatgtcacatatagaaatttcatgattttgcatattttgtgcccggcaaaattggaacgcggtgtatggctattagaatcacatcttagtatttttagttcaacaagacaatattttagacattgggaatgtcgggaatagtcaagattttagagtttcccaaaatacccctaagtgctcttttttgttgttttgtgggaaaagggcaaaatggtcattttggccctttatgctttgtctttagtggtttttaatttaacttaataagctgattta

SEQ ID NO: 313327 - DNA, 1372 bp, Cannabis indica
aaaagatttggacatccacataattaataatatttataacaggaacaattatttagggtaaatcttaatacttaatactcttcaaaagatttttcatattcatataaaacagctagcaattaacaatagcaaaagcataattggtggtgctagagcctattcatattctataagaactagagtatttaatatatatatatatatatatatatataaatatttataggaaatagtataatttgaattaatatgttaatatttttaaaccagaaatttacttcattatttgatattatcaaaaaattagcataattataattaatattatatatatggaaacgaatttaatataattcttaatactatatatatacataatcggagactaaatggggcggggagtactatccccgactccgccccgtccccaaatcgggtaaaaaatattagccccatccttgccccaatccccgccccattagaggcggatcctcgtgggtccccgtccccgtggagtttttgtgcatccctaattataatactatggagagtgctagacactagtagtgccttttagcaattttcttctttaaaacattctcattggatatgctcttaggcactaatagtgcttaacaccacttagaggtgatatcttacgattggttagtgacactccataaaaattattacattaaactatataaaactcaatacttaatttcatcaataacaatattacatcttaaaaaatactaaacaccattaatattttttagcatttatccaccataaacgctacaaaatactaaacaataacactttcgatttatttaatcaaatattattttaaataacataatcacaaagccaatttttccaacccttttggagagcataattacaaagccaatagtaaaaataatacgtggcactatggcatcattttagagggaattaaatttttgcaagagattatcatgactagcctcttcaatgctaagcttatgtgccttaaatataaaagagattctcctaaattattccatcttgtaatctcctgtatattattcccagaattggacatgaataatagaccaaaagcattttgcaaattaattctttaatgagtgaaaataggtgattatggttatggagttaaaagatgaatcctattatcaaaatgaaattttgaagccatcctttaagggaatagttttgatcataatgttagggaaatttacatggtatactaacttttgccattttgttacaaaaatactgccagacggtattttttacctttttactgtgtttttttataagtttcatactgcagtatactgtgttaggtgttctactggtgttttac

SEQ ID NO: 313328 - DNA, 822 bp, Cannabis indica
aaaaaaaaaaaaacaaagtacaatcttaagtactttgtgtaacttttctttaaagaaaattcttcaatagttaatgtattaaatataggggtttaaattctaaagctacattttttgaaaagtaaacttttataattaagaaataaaaatgttcttgttggaatatttgaacttctcacctctaggtgtaagttagcataactattaaatcaaagataatagttcaaagatatataacacttcgatagtaaatatatattagctgtaattacaaatatatatatattgtaattaataaaaatatgtatacatttttaggaagggtttgcccatatttggacagttgaagctataaaagaacaaacgttacattgagactcatctaagattaaagaagcctacctttttgccttatctagaaaagaagaaaatataattaagtttcttcctcataaatagctaccatgcaataccaaaacttcttgattggctatgtagtttaatttatacatcataaattactatattttgtatattacatttatgagctagattcatgtaataggtaccaagaaatgatgcatgcatttccttttgaacttattaaatagagtagactttaatcaataaaaaaactactgcggcattataatattgattattatccataaaccgtatcactaattgctaacatatgaaaaataggtggtgagtgaggtacgtgccatccatgttcaaataaaataatgtcaaaatattgttctcttaaaaaaaacaaaggctaattatgattttttttccctcgaactttgatatatacca

SEQ ID NO: 313329 - DNA, 1820 bp, Cannabis indica
attttcaggttatggcatagaatgaaaccgttgtagggtttcctcctagcgacgtgtagatacaggcgtcagtgacctaagaaaagtaccgggcgtaggtacgggcttgtctgattaggcgatgcgatatattggtgccaagttgtggcacggactcacctaattaggtgatgtaattatatgatatatgggtgcatgtttttagtacgagctcacctgattaggtgatgcagttatgcgatatatgtatgttaggctatgggacaggcttgcctgattaggcaatgcaatacaggattatcaaattaaaatatcgacttgcctgattaggcaacgcgatgttatgaagatggttactttatgaggtaatatatataatttatatgattaaatgaatatgaattctattattagtataataattttgtattaccaaatatctgtatactgatgtttattcgtggcaggtgccagtaatcaatacataagtaaatagctagtggttaaattcagttgagagaaacacacaaaacctaagaaccaaaataagagagaaattctatatgtcaagtaatataaatattttgtatttagctaagatgaaacatattacacttcccttgttcttttaggatttagctaagataaaagttcttactattttgtgtgatgaaatcactaattaaattacaataactgttttgaagtaaatcaaataacagtaatcaaatcaacctacattagaactaacttgactacgatttattcatagcacaacaacaaaactaccatagtttttgtcaattttgtaacacttattaatttggtaatgttatgtccaatcctaaaccttaaaatttttcaaaaccaaaatataaaaatagaaaaatccaaaccaaatattgtcaatcaagtacaataatcactcccaaaaataaataataaatagaaaacacatcacatttaaagtaacaatctaataaaaaaaaattataaccatagtatttttagcaaactcaagccataacaaccatgaccagttcattgtttttctttctttcttttatatttttgttaaaaatgtttcaaagcaagggtattaaattcaaaagtaaaacacttggataataaaaaaacacaaaacggcttaacacatggatcgaatgaagcttttgagacatattttcaagcaaaattgatatttataaacattcattcctagtactctgtatatgaaaatggagaacagtaaatgtaccttcgacttatagtaatttgtaaatgcaaacttgatgacgaagaagatttaaggcctgtaaaaaagaataaaactactcagtaaacaaagaatggaatagaaaaaaaaaattagtaggaatgcacatcattttttctttaccaaacttttattcttttttaaccatggtagataaattttctcatacccagagtaaagaacgaataacatgcaaaagaagaagaatttttgaataaccatagacacttacttgtacaaacccacgatgacggtagaagacagagccggagacacaaaagacgaaatacaccatatattcttcaactacttgagtttcctccctcaaatttgaaaatgattttatgccctaaagaagaaaaaacgtctcttacccttgttatattatttatttataatataatgtttaagattaaaattgtgatatgttatatatattattacatataatataattgggaattatatgcatgtaataatcacaatattatgtgattgggagttacatatagttgtaacatataagaggtggagttaatatttt

SEQ ID NO: 313330 - DNA, 1308 bp, Cannabis indica
aggcgacatgagtcgtactaccattaccttgagactctcatgtacgtacgatatgggcttaaaaaccaatgcttcacttctgcaattgtggtagttatattgataaaatcaaggtcgtatattgatgtggccggtactttgcagtatacttatctatctgatttgctatagcatcatagagtctcaattgtttttattgaaaaatataaaaaatacatatgtatgtagtcataaatatttatatgtataaatattcaactacgttttgaagttttgaattatgtatttgtaatcctatattcatttttttcaatgtcattcttttgtaattgcctactaatcatgtttgcataaacttaaaagtgaattgttgtgttaaagtgtgataagaaatgaggtctttcttctcttttgattctttaaataatttatttagttggaacatgaagaatggtcttcctcaaagtatgacaaacattggaatggaggggagagcaattttgtttctactcacagcaagaacaattaaaaccttctatccagcatgtataccatctcacttgcttctagactttttttattatgtttaattgtacttttttatgtttttaatttgtcatatctttgttctttttagactatgatattgttaaaacttaatgttttttctattccttatgaatttaaaatcagttaatcaactcatgtatacattaaagtctttttacaaaaatttccaccataattggtactgtggttgcatatttctttgtggcaatgcattcacttggtcaaaactattcgaaaatagcagttggatttggtggaggtaacttgctatatgtctaattggtttgtacctagaattttttgatgtaagaagcatattggtagaggttatttgttataggaatgtaagtttactatgttgtgtatttttaagtagtgtcttctataaattaggagcaaaagtcacatgtcattttcttaattttataaattgatatacatagatttgtatgtttttctttaaggtaagtttatattttatataatctatcctaaaaatatttgtggatgctctttttacaatgttgaatgttgcatgaatgacttatttatgcatgaatactcagataaatatctatccataattaaaattggtgttgaggtagtattatataaaatgagaaagaagcctttatatgtaatggaaattggaataaccattaagtgttaattttttttttaaactcaacaagtatatatatgtggaggaaacttcattcaacttcatcttttatgatt

SEQ ID NO: 313331 - DNA, 947 bp, Cannabis indica
attcctatttttcaaaaacttgaatagtgttcttcgtgactcaaagagtcaagaatctaaatggagatcaaaatctaatcttttttatcaggaactcatacattatatgtcctaaagcaatcatgtggattataatgtaaaaaagactacactacaacgtgagaatcaaatatttcaaaaaagcttgaaaaatcttaaagtcatcaatggtagattcaagaaaacaaaaacaaagtgagatatgaagacttagccactgatgaagactgctgtagatgctcagggaaacatcagatcgtcaaaaaaatttgaaaaccttgagaaacaaatgagctacgggtgtcaagtttgataaggaaatgaagattctctttctcttctttcttacagagagagtgtgaaggggagagagagtggaaatcaaaatgaagaaaagttgaaccttgtatagtatttgtagttttttccccaaaaaaatttaagcggttatttttctaaaaagatagccattcatgggagaagaagaccaatagttcaaaaatagaaaagtgtgtagccaaaatataaattcccataatgattggcaacaaagtcactttatgtcataaagtgggatatttgaaaggtcaaatattgggccacccattgttgccaggttaaggttttttacaccaaggcaggaattggaaagttcctatccgtatagacgtcagcatagggactaaggggtaaatgttgttggattttgtgccctaaataaaacttatttaatataatcagatttactaattaatataacaccataaatcgcttttatgttgcatggttcacatgatttatttcatgattatgtttaatgtataaattctattaagtccagaacatatgtaaatatatatttatttgttcatgattgtagtgtcgtcaacacagtggaatataatcat

SEQ ID NO: 313332 - DNA, 1193 bp, Cannabis indica
acctactctcggtactcatatgtaattgatgctcgtacctacgcccgatacgtcaccaagaaaaaacccttaaatggtttcattctatgccataacctggcaggaaaccctacaacggttttaatctataccataaactgacaattttcatatcactcacactcgtatctacacgtcgcctggagtattgcatcacctaatcatgtaagcttgtgcatacgctcggtactcacatgtcactaatgcccgtacctacgcttagtacgtcaccaggagtgttgcatcacctaatcaggtgagcctgtacctacgctcggtgctcatatgtcactaatgcccatacctatgcccagtacgtcaccaagagtatcgcatcacctaatcaggtgaccatatatatcacattcatagtatcattacattatcattgcttaacctatcaatcttttcattatgtaacaatattaaccatatctcaatctcaatattaaccaattcataaactattaactgtattacaatacaacgtacgatgcagtacaatatacttttcttacctcgagttttggttcaggtatgttgaccgacctgcttggagaacgatcgatgatcccaacccctatgtcataacaatgctaaaccaataagtatttaacctaaaacactgcgtaacagatgcaaaggacaacctagggtttcctaccaaaccccgtagtttaaatacactaaagtaaaacttatattttggctctaaaatatacagaatatggtagagctcgtcgcaaactttgaaacggtatatagaacatccaaaatagacacccagtgaaaacttatgacaaaaatatgattccaaatctccttagaattttgagaaacggtaggctgttttggtaaaaacagccgaacgtttttgggcacgagaatcttaaattttgcactcatcacaaatcattccaaacttcacatgacacatatataccatatatacaacaatccttacataacagaaattaaaattgagcccttaaacgaaaaataccataaagctgggacctaagctttgaaaagtagttcaaaactcgatttctaactcaaaatcacctaaaattcaacaagaaaatatcgaaactagtcccatgactagccaagaataatcctataagatcagaaccttcataactattctaatt

SEQ ID NO: 313333 - DNA, 1560 bp, Cannabis indica
ctataaatataaattattataataaaagaaaatatcttttattttattatctattcacgtaaaaatggaattatttaattgcattcatttatcaactagtaatacttcactcattttacaataaaatttaataaaatatgatggaaggaatttgttactataaaagttatatttcaagagttattattagcaagtcatataattaaagtgcaaaatttggtagtataaaaaattcaggacagaaatattaattattcaaaaaaaaaaagatttttaaacattgaacaattatttgactttatttcatatgcagcacctgaagagtattcttaccatgaagcataatgcatggccaatcaaatactaatgatcatgaactaggatctaatttctttcttgaatatgcagagagagagagagatcattacttaaagatgtcaatatatgtggtgtgatcccaaccgcacaaatcagatgcctcttgaagagccaacttccaccttttccaccagcaccctccaaccctttgtctactcaaagcagtggcaacaggtcctcttgctttcctgaggtcagaagggttcaaatcatagaaaataggcacaacaatcattccccatctttccctacacctcagtatcaaaacaagttcttcaaggcaaaactcagaagagagatactcttgggagagcagaagaatggcaattcttgaagtttggatagcttcttttctctgttgctcaagttgaagtcctctttggagaacctgattttcatccctgaatgtacggatcccatcaatgaccaaagacttatttgtaaattctgttatatgtttttgaggatcttgtgtgctgaaactgaaatacacatcaaattctggtccaggttgtgaggaataatcccccatgaaaatgtctcttggtgatttaacaaccagcttgaaaaaatgaatgcatgtttcttcaacttcttcttcttcttactccttgaaaaaagattgtataagcttttctctgtcttctacactgttttcttttggctttactgttagtattcgtttttttttttcagtggttgagacactttatttatttattgtgtcaacttgcaaattccactcatttcgttttccaaaaatcgtgcaatggtcaaatgaagggcacatgattttgtttttaatacattgtggggacagtgtgaaatcaaaacaaaatcatgagtataattttgtttttaattttaatgtaattttagaaaacataatcccacttcgggcagttgtgtaaatgagtatatataattttagattcttgcaaatgatcttagttgtatttagttaaatgatataaatttttatttgtcaaatatgtttatcctaactttagaacttccattcttactaaccctctttaacgtttgtgacccgaattttaatttattccttatattaatggggtaagttgaaaaataccacttttattaattaattgatcaaatttatctctaattttatatttaattgaaacatatctctttttatatgtattgtacccaaaa

SEQ ID NO: 313334 - DNA, 1606 bp, Cannabis indica
ttttaaatttagttttgtgaaagtgggcctaacacaaccttctgttagtgggggcccattttgtgtcatcccttactttatattcaccgcacaaaagaccttttctacaaagttgcatattttaccctagtaaaatgcatgggcacaccctacctacttttgtaaactttttatatcacctccatatgagagaaagagatgctcttcattttgatgctgacccaatccactttaataagagtctcacttcttccactaacatactcaaggattgagagcagaaccaaatgaaatgggtttagatataaagaaaaaggatcagattctgaactatatattaggaaaattttgacaggatggtccatttgttatgtgttagaattcgggaaaagatgaattaggtttcattccaaaatcaattggtaatggaaggagaaggttattcattttatatatcacaatttatttccacacatattagcaatgtgggactaactcttaatattatgtattaaataatacaacatacattgggtaatgataatacaactcttatacaacgcgccaaacgagcccttaaagaatgtttaactcaaattgtactatgtttttttttgaaagaaaaatagaaaatatccattaatagtcaaatcgaataaaattcattatatgaaaataccactgaaatagcaaaattaacaataatatgccaaccaagttgttaacaataataagaagaaataaacactaccaacatcttcaatgaaaatactactgagacgccatataaagtaggaaaagagtgtaaagaatactaagtttgcaacttaaatgaaccagtaacgaaaaaataaaacgaccaaccatatagatgacgatcctaatgaaagacttaattaatcccaaaatatagggctaataacaatatggagatctcttagacttgaccacaggaagaggaagtcacgccggccatgcaaaagtgacatgagctaattaatcgatgtagcaccaccgatccaccagtttacaaggccaaaatctcctaccgtaaatgaaacaaactctactacactaaccatagcaaagcagtgtaacaattattgaaagtaaaaacaacaaatataatactataaaaataaatagaacaagaacagtaatcaaacccatgcgatagagccagaaacgccccaagaatactacaaccccaacatattttatatttaaaaagaatttaaatggaagaatgaatgttttatttatagatttattatcaaagttttatttatattaaaattagtgaaaatatataatattgagttattagatagattattacaattttaaaatgatatgaaccttctaataaatatatagtgctatatagtatacttccttaaattaatagaaatacttatgtcaaaattttaataaagtattatttgtcttaaatgaataaaatagttaagttaaaatattaaaatattacttgacatacatatttctctattattaaaaaatatttatttcattatttttgttttttattatattatttatttaattgtcatatattatagagtaaatctatagtacaccttctaaa

SEQ ID NO: 313335 - DNA, 835 bp, Cannabis indica
gactgaatctgcatctcttctagctttcaaaaaaaagtgtacctcgtccgacttctcagatttgatcttgtgcatgaataactgatggatcaaagccttggaaaaatttattggattcctctcgaagatttatttaaaaggagattcatttactttatcccataattggaattggtcaaattttaccttgatcttcggatagtaataacttccaccacaccaagtgacacagcctgtgtaatgctatgagactggaattataaggcgtggcaatcgtgtattttagaaaaatgacacaagggaaaatacaagttagaaatccttctgcacactatcagaccaatattggacctctatcaggcctgtatcggaccaaactcaaaaaccaaatttaataataaaaaaaaagctattacagatcgagagggcatttgaccccatcggacatagtatcggacaggtagatctcataaatcacgaaaagcgtcgcactccatcagacacactatcgtacaaactaatctcactaaacacaaaaagcatcggacaagcatattagatactatcagacctaacacaaagaggtaatgtcggaccatcagaccaaaccaattggactagtatcggactctatcgaacctttatcttcaacctagaatttttctatcaaacccacacccataggacctacgtcgatcctccatcagacacaatcgggcataaacactatctcacggtttaaacagaggacccgaaaaaatcgtaaatctaatcaaacatacacatatcacagatcaggcatcacaaaactaaaatatactctaaatcaatgaat

SEQ ID NO: 313336 - DNA, 1609 bp, Cannabis indica
attgaaaaagcactgtagcgtgccttaccattaggacgttacattaacgctacagatcaataatgtattagttcgacacgtcttagtaagtttccaaaatttaatttgtaggtgtctttctatgaattttttttagcattggtgtttgtttctgttgggctaatttttgaactcaagttgagtgtgtgtattccatgtggtatttttcaaattttcatttatcatatttgtgcacgtattgtctcagaagagtttgggatgctgtggttttactattgttaatgggcttgggctttccaagttgggtccgaagggcatttgtgtctttttcattaattggtaataaatatccttttaccatcatttgagttcacgtactctgtcagtcgaactgttcacttcctccttgctcagttcattttcctcgtgtgttcacaatccttgtgtggtcttgctggtctgtgcgattatgggaaaaagggcgggtcgtcaagttaaaacgtctgcattgactggtgacgattccccgtcaatcatgccgttggagaaacctagtgggtcatcaaccaggtctgaaacaactccatgtacaccactctcaggtataccttcttcatcatctattttacctagacggtttacaaggtctatgtcaatactttttgcctcgcctaaggtccattctcccactgtgtctcactcgtctcagcctcccatgtctaagccttccccgaaaagaaaactggtgtcatctgacgcagctccttcgttggctgctaagaaaataaaactgtctaaaccaagtgtgtctgagccaaccaaaaccaatgcaccgttttactctaatgataaattgcttagatttcaggataatgtatgtcgtcgcccactgtggcctgaatatcgtgttaagctcaagcattttcctaggattaaggagttaattgaaaatcgtgggtggtctctgtttgttactcatctccaacccccaaatgagaacctggtcagggagttttatgccaacctagatgagagcattctgtataggaagattcagctcctttatcttgcttatattagaggtaacaggtttcggtttgccccctccaccattagttgtgtcctgaaaatcaaaaccaccacccatcccacatttaatgatgagtataaaccagagtttaaggatgtaggtgctgaaattactggcaatcctaactttgtttggaatgggaaggagttacctgtcacggttctctcagagttttacagggtcctccacaaaattgctatgtccaactggtgggaaaattcacacatctccacgatcaactacaatacagctcaatttctttatgccttaggcactggtgtgagcatagatcttccaactatcatgtatgatcgtattatgagttctgcctctgccaagagtatcaagcatacactgccttatcccagcttgattaacagagtggttaaacgtggatctcctgttgtttatgagcaagacaaaatgctgcctgtcccatccattggtaaatctttcaatcctgtgcatagcaaaccacttccactctcagtcatggatatattgttggaaattatttta

SEQ ID NO: 313337 - DNA, 3131 bp, Cannabis indica
tatggccacactgcccccacatgtcactatctctttgatagaaactggcactccaaggacttctgcctctcaaccccaagttcatttgacagaacaccaacctacaattgattctcaagatcatgtctctcaatttctccctgactttggagatgatgctggttggtatgtcgatattggtgctactaatcatgtagcttttgatgtggacactcttgacactgcagcaccgtatactggtcaagaatctgttgcagttggcgatggtaagacattgctcatatctcatgttggtaaagccactctcccctctaaatcttctcatcccgtacacttaaactcagttctatatgttccttctatcactaaaaatctggtaagtgtttcaaagttaacaaaagataatgatgtgtttttggaatttcataaatcttgttgctttgtcaaggacaaacaaacaggtgctgtcctactcaagggaaagctcaaagattacttgtaactcttaggagatgacagttcaagtttgtccaagcattcattacagtgccacctagccaccaccacttcttctcagtcgattgatttctgtaacaactatcaagattgtaccaatagttgtaataaaactgctactgcagtttctcattgtactcctcctttaattaataaaaatgagcatttctttaatactttgtctcctacagttttcaacactactttgaataatgatataaatgtgtggcacagtaaattaggtcaccctgcccctgctgttttatccaaagttctttcccaaaacaacatagctcattcaatcaaaaatctcaaattttgcaatgcttgccaaataggaaaaagtcataaacttccatttcccttatcctcaaaaacagcttcccaaccacttgagctaatacacactgacttatgggggccatctcatgttgtatctaaagaaaactataagtattatatcttgtttcttgatgactatagcaggttttcttggatatttctacttactctcaaatcccaagcttttgaagtcttcattagattcaaaagtttggttgagaaacagtttaatctgcctattaaaagtgtgcaagctgatgaagggggtgagtataggcctttctaaaagtttctaagggatcaagggatcaaatttcaactatcatgtccacatacacatgagcaaaatggacgggttgagaggaaacatagaaatgtaacagaaaccggtttaactatgcttgctcactcaggattgcacatgagctactagtggcatgccttccaatgtgctgtatattcaataaatcgtcttcctacttctgtgcttaatcatatcagcccctatgaaagtctctttcatcaacaacctgaaacaagatcctatagccttttggatgtggatgctttcctcatttgagaccttactctcatcacaaaatggattatagatctgaagaatgcatctttcttggctattcttcaaagcacaaaggatatctttgtgaaaatgctgctggtcgtgtttatgttgctcaaaatgttgtgtttcatgaaactcattttcctgcattttccaactccagcactacacatgtacaatctaatgactctattaaatttccaattgctcagttttttaccaacaccactgatcatgctactttccctactgtgcctgtcactgtgcctgaggaaaacaaccccaatactgtccctgctgctgttgcagaacaaattccagttgctgcatctccatctgtttctagtatgcacactgctacaacatcttgtgcaactgctgcagtatcaaccttgcctgctcctcagactacagcatctgctattgctgcagattctcatgatagcagtgttgcccctagtgagtctcatgctgcaatcactcaagttgttgcaccacaaaggacacatccaatgacaacaaggtctcaaagtggtatccgaaagccaaaagcttacttggccactagacatcaactgcctgagtcactctttcctagtgaaccaaaaactttgaaagatgctcttgctgatccagcttggaataaagctatgaatactgaagttactgctcttaaatccaatggcacttggacccttgttccctatgagcctcatatgcatctcataggcaataaatgggtacattagataaaattgaaggtagatggtagtgttgacaggctgaaatcgaggctagttgctaagggttacttacaagcacctgggatagactatcatgaaacatttagccctgtagttaagcttgtaacagttcggatggttcttactctagctgtcagttttaattgggaagttcggcaactgatgtgtcaaatgcttttctaaatggtcttcttcaagagactgtttatatgacacaacctcaagggtttgaggatccatccaaacctcatcatgtatgtcatctacacaaagccatatatcgccttaagcaggcacctgagcttggaatgacaagctcagacatactctgcttggatggggattcacagcttccaaggccgactcttcactcttcatttttggtgctggacaggacttaatcatcttcctcgtctatgttggcgatatattggttactggccccaatacttcactaatcaccaagctcatctctaatttgaacaagtcctttgagctgaaagatttaggccaaatacactacttcctcgaggttgaaattcatagaaattcagatggtatgtatttgtcccaaagtaaatacattaccgatttactagttcaagttcagctagagggtacaaaactatataccagtcccaccaactctcaaaagctctctctctctccgaaggcactgcttttgaaaatcctactctttataggagtaccttaggtgctcttcaatacatgactctcacacggccggatgttgcctttataataaacaagctttctcaatttatacatgcccctacaaatatccattgggaagcttgtaaaaggcttctcggatatctcaaaggcacgatctctgaaggtcttctgttgaaaccagtttccagactatctcttgaagcctattctgatgctgactgggcgagttg

SEQ ID NO: 313338 - DNA, 392 bp, Cannabis indica
tcttaaagtggttgaacccggttttgatcctctcaatcgggtcaaactgatccgacccggtaacttctaactcggtggtgagttgtttgatcttggcggcggcgacatccccgaggtgatttttctcgctgaaaccgaaaataacggaaaccgttaaataacatgccacgtcatgtgggacccaactttctcgggggagacttatctcagccgcaaaagtcggatcctacgtaatccatagaaaacggattttcgtcttcaaacccgagttaggagtgggagccaaggtgaaatgacataaaaggacactgttttctgacattattacggaagaaaaaaaaacacggtttgtttggaagaaaagaaaagaaaattaaaaaagaaaaaagaaa

SEQ ID NO: 313339 - DNA, 4358 bp, Cannabis indica
atagacatttagtaaaggtagtgcgtataatttagttatgcacgattggattgatagaactaatatcttttatcaacgtgtcgtttattataaaggatttattcacatcacaacgataatcattaatagatcaatcttaatcttcaatattcatgtgaattcatgtttgtcttcattaagttctttaattcactcattaatgtttctcaaagaagatgagtcttacaacttctaatttaaggagcttaataacatgagtggttgagaacatgttatatagaaatagaatctaagctttccaaaaggatcggatattcattctcttatagtgttaattctgtgagtgctaacagtttgatctaaatctataattagattatagattaactgttcacattgagttaatggtacataaggaatcaacagataattagaaggataaaatggtaattttgaccaactattattattaactaataattggaaggcaaactaattatattagttatatcaatagactacacataagaattatgtaaatataaatctatattatcaaagagttcaatatatatttatagtagagtaataatagaagtagagtagtaataatagaattaataaactaaattattctataaatgagttcaataataatcaagtatttattggaccttcaaaatgtaagtccatggtcctcagatcacctctttacaatactgtacaggagaatgtttgacttaaagaatgaaatgagaaatgattaatttttacaagagataattcttgatggaaaataataattttgtgtaaattattatttatgtaaattatgaattgaataattaatatgaatttacctatttagttttattttataaaattattagttaaatataatactattattgaataatattatgagagagaaatacattattttagtgtaaaataatatttaattgattcaagttaaataagagattaatgaaaagtaatcaattcttattcattaaaaaataaataattaatcttatttaatacaaaattgagaaattaattttagactttaaaatacggtccacgcatgtgggactatagcccacacatgtaggtgacatataaaggttcaatgattttgttttgattattttattaaataacataaattaaaataaaataataattatcttttaattatttgatttaaatatgttataaaataattattgacctcgcttttagctaacgacagaaagtcaaattaaagtgattaagaatgaataaataataacagtaataataattaagtaaagaaaacaccaaaactatagaggttcggccccttgatgatggtaatagcctactctcatttagttggtattgacttgtgaggtgaaaatcaagaagtccttgatctccctcgaaagctcttataatgatctttgaataattacactcttgaatctataattctctcttatgatttatctcatgtattttctgtatgaacttcgtgtccctggatagtgtgatgactccactatttatagggattaattacatcaataattttcccaaaactaattagaaataaaatgaggaaaccatttactttctataattacaatgagcgaaataggaaactaggcgaggttgtcttacttccttgatactgcatatccatcccatgaaattagggatagtcatgtcttacaagcatgaagatatataggatatatctatgaaaatatctaactagcattctctggtcgactcatgcgagatgcccatatgttagaagctggtcgagttttctcgcacgccttacccgaatgttccaggttcttcttactttgagtatccaatctccctgcacggttcatcaatagtggaatcttctgcctagttcatgtaatcttttccacgtgtcacccaagtggatgccacatcatcctatataaaaatttgaataacatttgctccccaagtctgtgtgggagctttttgatcgcacgtggatttattcagtcataaagctgaccggatgggtgacgcatgtctattttgtacccttgatctgatgtgaatgatagggcatctttttgttatctagagcatcaaatgccttatcatgaaacttttaccgcgaatcacgtaatgacacttgtatgatattgaatgtatgacgatgttctcttttggaggaaaacccaaaaattcaaattttactcttagccctatataaaagataaaaattggcttttcactcttttagccattttcattcttgcataactagagccaaaacctcacttttctctcaaatcttcgaagaactttccttcgaatttcaattgttggagtcgtctaagcacactcaagagtatacaaacagtgagtaagttatcttttcttcttatttatgcaattttcttaaaatacatgcattattttttcaaatcttttctataaattcttggttctttaatctattcttgattgatttgagatttagaagatactagggcttttaacttctgaccgatgtacacactaatcttttaggtttctattttcttgccattttggctagaaattatctaaaattacccattcacaggcttctgaatatcattattattttaaacttttaggtttagggatttcattttcagaatgaagtttcttctttcttctttaaatagacttggttggcatatcagatatgttatgccttctacactcacatctagctctcaccctttgtctctcttcttttatagatgaaccctggtgaattctggggaggtaagcatcacatcgaccaggatcttcttcaacttctttatcaaaatcttccttgactcagttctgacttgtcttcatccaatgaaagctcttcaacttctagctttgacgactaggaagtttgcagtgatcattatgagtctacggagcccgctgtgcgacatgatcagtaccccaaccagataagtggagaagtacaactaattcatctagaaattgaacaagggttagaaatgttatttccgtactttatggacgtaaaaggtctgacttggtacaactgacacactaccagagggcttattagctccatcgaccatatacactgccatagctaaggttgctcttaatgttgcaaggaacttttctaagctgaatccatcatttaaacgtaaaaaagatggctaaaaaagcaaaccttgaggaaggattcaaagtttgaccctcactttgctcagttattcacgatggctggggtggaacaagctagacccttaaacgaggatgatgaagttgtgactgggaacgttgaagtctaggaaattgaggactagggcgagatccttcctgccatactttctgatgctaaaggagaagaagaggaagatggagttcaagttcttcctttcattggatacaacaaggctagagaacttgtcttcaagctggcgatgtcgtagtgacaggccaagattatgtcgaggaggaatacaaataggcctggcccttaagcagcaaaggaagaaggctcctcggtgggtctctcctttgtccgtacttactttcgaaagattaaaaaatctcttcaacgaaggtcttcttggaggagtagaggcattcttgcccggtcctgggtagcttggaatgaaaccaggagaaggatttcgtgcgtggtctgggtcgtatacaaggtgaaatctttcccttgcatccatacttcaagaaaatggcaaactaccacaagatttgactaactcagttcactcccaagggtattaagtatttggtcgcactattcatgttgtacgccacatagggatggggccagccttcttctcacaacaccaactagctttttaacttgaagtcatgtctgaagtagaacaggtcgtgacatttttacttctcccaaaatgaacaccaatggctgagtggtactatggacaaggaggtgtccaagactagtgatttcattgaagattactacttggtcaaagagatggatgccgaccacctgtctttctaggagatcccctcctactatcgtcccctttcaccttgggtctaaggtcaagagctcaagcaattccttaactgtcagagtcggctcggaacagttccctcctagctattacagccaatttccttaattatggactttacccattcaaggaggttcaaggatccaaacacgcaggtgagggaattattactgagtaggaggctccaacgaagaagaaaacctctaatgggaatcaggtgctgattgaacaacctattaggatcaatgatgatcttgaggaagttgtttgtgttgggttttatgc

SEQ ID NO: 313340 - DNA, 725 bp, Cannabis indica
ttttgatgtaatttctaatccttattatgctattattaaaatcaagtgtaggactttggtcatgttttgatactatttgaatgcatgtgataaaagtttaattttatagctattggccctagtaaagttctctgtatttgatttgtttcttctacaaaccaaggccaggtaatatttttacctacttcccattgctctctgattagatccatgcatggattcgttgtttgcaaggctaggaacctccttttgcttcaagatggagtctaaactaatgaagacttagtattttgctaaataaaaaagtttgtactgtaaaaatgtttatattagagtctcgacgtataaatgtcaatttaattagttttagccttaaaaggagaaaaaattcttaaagaaatttggtttatgggccttgcggtgacccgcccctaatgcggcgggattccccgtctaaatggggaacggggcgggaacgggaatcaaattttgtctctgaatgttaaacgagacgcggactcgtttaggtggcgtttggtaacacttttttaatctgttttttgtttttaaaattagaaaagtgaaaatattttttaaaaacatgttctattaaattgtttttgcttttcaattttttaattgaaaatcaaaattttaaaaacaagaaaaatcactttcaatattttttaaacagtttttttttcttaatcaatattttggactcc

SEQ ID NO: 313341 - DNA, 3207 bp, Cannabis indica
caccagttcagcagccgatcaatccactcccaatactgaggtcccatctaccactaatgtttagaggccagttgaagatgatactgaaatccaaaacctcctagcagcccttgggctcatgcaaggtcataataacgctttgcaccatgattaagaggatctccgtgcagctataaaccttgcatttgacgagcaaagatgtcaatttatagaatggagggacagcgagatgaaaactctgagggctcggcaagtagccattgatgatcgcacgaggcaggccactgtactgataataaaggcctactaagtcaccaatcaacaactggatactgcgtccagtattcctttgggcagttcagatgggtatgtagctgggcataccgcacaaactcacaatggtcagtcatccaatccacacccacatgtccaacctgtgggctaaacagtagacgaccagatcttactgaaccgtcccttgggtggagttacacacatcaacttcaccccaactgaaatttttggctggccaacctgccggccaaacaagtcagacaccaaggccacctggtacatcagtattcgataggttgggtgccgcacatgacctcaggactggcctaaatcaaagaaggggcctggacgaacaatacatcccaccaactgtccagccaggtatccgcattcaggatccagtccaaagagatcccaatgtgagacaagccgatcaactagctgaacaagttcatccatttgtgcaagcacaactggatcaacttaaaaacatggtacaaggcctgaccgggtcaaaactcattgatctcaaacttgaccgagcacgcggatcacccttctcccctgagattgaagtccttaaactacccctaaatttaagatgccaacctggaaaatgtatacaaggaaagaagatcctttatcacatctgaagtattttgagatgcaaatagacctacagggggaaagaagtgatgtctgatgcagctaattcctgccacactcgtagaggccgcccagcagtggtatttcaagttgcccctagggaggtctaactcatggaatgccttctcctcgaagttcgatgaacatttttcctcctcccgtcaacttccctcgcatctagaagacctagtcaaagtaaagcaaatgccaagagaacccatcaaagcttatataagtaggtttatgatcgaagctacaaaagttaaggggttgactgaagaaggaaggctggccacaatactaggggcattaagccactcgaagaactgtggaaggacataaagaggctaaccgtggggtcaatggctggatttctagattaagcaaatgggttcatgaagctcgaagaagctgttcaacgtgtggaactgtcggacaaaaaaaagccagcaacgtgtcacctcggtaggaacatccatttagaatccataataccctagcagctcaaattcaaatgggaagaggtctcacaacggcaataggcaaggtaatggaaaaaaaagacaaattaactagcaatatcgaatagcaccccagggaaaatgcctcaaaattcactgccttcttagtcctaacaaacaacctagagacaatctatgcaacaactcagtccatggtcccgtacaagaaaccatctctcatgaagaaggatgtaagtaaaagagatacatccaagtttttccattttcatgcggactacgaccatgacacgaaggaatgtaataacctaaagtggtaaatttagcttttgatcagaaagaataacccgcagttatagaagtttgtcaaggtcgaccaaaaccaagggctgcccaagaagacaataactagaaccatttgatgcctccacaagtggacaggcatttacaggtcataattggggttccacatcttgctggagactcaggcaaagctcgagagagccttacagtacgagcaaacgatcttggctttggaagagagaaaaccaaaaataccacgggtaggggagccaataataacattcactgaagcaaatactagtcacgtccatttcccgcacaatgaccccttggttgtagaagtgcaaattgcagataagtcagttgcacagactatgatagacaatggagcttcctcaaacatcctgtttaaaacaacttatgagaagatggaactccagcttaaagatctaatcccctacacccagctcatatatggtttctccaaccagagcattgcacctctgggacaaatttgcatgcccctcgccgttggacaagctccaaggagcaaaactgtgatggcacaattcttgataattgatgttccatcagcttttattgtcatgttaggacgaccgacccgatctgacttaaaagctattacatcaattttacacttgtgcttcaagttcccaacaaaagaatggggtggggtgtctcaggggaaaccaaagaattgctcgagaatgctacaaccttgctctaactaaggtcaagaaggaaaatacctccggctagagttcggacaagggaaaaggcatgacccaataggaagtttcccaagacaaggacgaagacatggatccccaacttggggaatcaaacgcaaatgtagggccaatgtgagaactagaagaagtggaaatcgacccaaatatcctaactaggaaactcaaaattggtaaagggttattgctcgaaataaaattagctttaataacatttcagagagtaaacctggacgtttttgcctggtcacatgaggatatggtcagtattgatcccactataatgtctcatgccctaaacattgacccaaactttcgtcccatccaacaaaagagaatactactgaacaaagaatgggcgcaagcattgaaagtagaggtagagagacagcgcaaaaataggttcatcattgaagctttctacccagcttgggtagctaacctcatactagtacccaagcctaaacaaaaaaatgggaagtatgtattgatttcactgacctcaacaaggcgtgccccaaggactgttttccacttctaaatattgttcaacttgtggatgcaacagccgggcatgaaatcttgagcttcatggatgcctatttggggtacaataaaatcaaaatgcatccaccagaccaagaacatacaagttttcgaatagatattggtctgtactgttacaaggttatgtc

SEQ ID NO: 313342 - DNA, 986 bp, Cannabis indica
gtaatatatttagttagaataaacacacttaagtatatggttaatttatttttttagttatctaaaattaatttaaataatatttaatttacataaattaaatttgtgaaattatactaggttttaaaactaaaaaaataaatggattttctttgacaattaaagacaatattgcatcgatttttttcttaataaccgatggcataactaactacagtgtcagttattaggaaaaaattgacgtcatatagtcggttatttctaacaggccacccatatgccatcaattgataagacccatctacaacgtcatcttgaacagtgacggtcccatttttgcccaaaaccaacaccaaatgccccaaaaaaaactgcctctaggatattctaaaagatattatactttgatagatgttgttgtatgaaaactctaccagtgacagatatttactctaagagccttcacaatcaattaaacaggctcgcaacatatcctctagattctgaattgacctctcagaccaaccatctgtctgaggacaaaaagttgtactgaaattcaaatttgtacccatggctcgttagagacttacccaaaacttggaagtgaactttagatccctattcaaaataatggacttcagagttctcttataataaccgctaccagacaacaatcgggatggtcccttatgagcttttatatgaaaggatatgtagatcacctattcactgggatgaagtgggtgaaagaaagttcttgggtcccgaggctgttcagagaacaagtgcggtagttgacaagattagagcgtaaatgctgatggctcagagtagacagaagggttatgctgatccaaagcgtcaggatattgatttccaggtcggggacatggtatttctctgaatatctccgatgaaagacattaaacgctttggtaagaaaggaaagcttagtccgaggttcattggaccttttgaaatcc

SEQ ID NO: 313343 - DNA, 1985 bp, Cannabis indica
aatgatgtaaatttcccttgttacaatttctcactctcatacactattctaatctctatgtttgctctaatctttataatgaataaattagaactatatatgtagttacaatatgatctaactgactgaaaagagagacaacgtgtaaaattacctaaaatcaatttataattaacttaacagaaaattaattagtcaaagattttgggcagatttattgttatgtttgaaattatagtattggaatcttaaagttgtgctttcatgggtatgatttagttctgggtattttaggcagatttgatattcatacattaaaattataatgtgatgattaggtctgaaagttttattatgctctgatgacaatgatttggtttaggctataaatgagcaatttaggcagatttatttgctattcttctttttcgtttgtgggttttgttgattactaagaaatttgatatgttgaagggatacagcaagattggctctgtcctttagcttaaaatggtttatgggctactagagaaatgagatttaaccaagcattcttgtgacatgtctatattgtgatagtaatcacttcttatttcactattatcttatgttgatcggattgaagcataatgggagtttgcttaaaatgagattataatccggataaattagagagaacatgaaagagattataaaagataggataatataggaatgttaattatcgtttctattatgtccttttacttaaaaggcttagaaagaaatatgaatgcatatgatcacttagatttttcttgtagatagagagttaagttttaggagtttactaataaacaacaacaacaactattctcaaggctgcgatgatgcttgcaatttcccacccaatttttctttacatatagattggaactttattcagtatatactttgagttaattatatgtactaataattcaaattcattcacttgggcatttacttttttcatgaaatccaagattgctttccatataattacattagaactgctatatagagattcgtattcaatttctacattgcaaaatttgtccattttatttcaacaagttttaactacagtagcaggtgtgttagggttggagaatagttggtaattattaaggtctccttctctatcttaatgtctctctctatttatgtatcttgttaatttttctactttgtgatttgtattattacaaaatttacataaaaaagttatcttaattataaaagtaatttagttgcagtgagagctttgaactctatttatgttggttctttctatttttttgggttatggtggtatgtcggtagtgctttttgtatagattaataatgtacaactatgaatttgtgtatattttcgtataaatataattttttgtctaatattttgattactagtataaaaatggtgatggtggtggtggtacggtggctcagttttttttttattattattattatcattatttttacttcggttcggtgcattactatttgctttggttatgaactgaagcaaaaaccttctttatttgcttcaattcataaccgaagcaaaaaatcaattagcgtcatttcataaccgaagcaaaaaaattactatttgcgtctacggctataacgtcggttacaccaactgaagcaaattctttatatgtcacttaaaacctgaagtaaaaatccctttttgtagtagtgccagtccaatgttaagcaggttaaaacaatgttagaatcttcttatggagagagctttggtccctgcatcagtaggattcttctcattgggcactttttcaagctctatttctccttcttctatcttgtctctgacccaaagacatccttatgtcaatatgttttaatctttagttcatggtagacaaggtttttgctcaagtgtattacagattgttgggacaagactgttaggagttagttaggatggt

SEQ ID NO: 313344 - DNA, 604 bp, Cannabis indica
acataatattaacctagtatactgtcactttcgagcaccttcaattgtagtatttttttaaaaatattaaaaatttccatatcatctaaaaatataatattttattttatctctttttcacatcatcttttatacttttaactctaaaaacactccaattgtacacccttcaagaatcatataattatgatttcattcattattatttaatatattatttgttttaattataaatattagcacagtacttattatttttatttttattatatattttttttaaataaagatagtatatcatgtaatagtatcaacacaattttttatgataatacttatttatttttaatggtatagtatttttatattttgccaaataaataaccgtaaacatccttcaaaatttaactattggatgctcatacttgtcataattaaattttattttatatttagcaaatataaaaactattatatctttagtgaacttttatgaaataatattgtcagtaaatttaatattttgggatgacaatttttgtaaatatcaaaatgttcgtatttttcagttttattattattattatttttttatattattatt

SEQ ID NO: 313345 - DNA, 1336 bp, Cannabis indica
ctgtgtagtccttcaagaaaaaccggcttctgttttctcctaacccctggagaagtccacccccagtaggtggcccattcaactcttccacatcctgagattctgtatcacccagggcaatcacaatggcgtttctaggagtagaaggaacctcatctacgttgggttcccaatcttctggatagacatcatcctcatcataatcatctctcggcggtgatggatgtatcgtctataaaggctctgccgggtctgatggatgtgttggtgatgattgatgtgccagccctgatggttgtgtcggctccgaaggctgcttttgtaacaaatttatcacggtcgcaatttgatccatgataagattcttcatctctttctgacttctcttgaagtcagccttcatcttggtctgtgcagtgagaatcgcaagttgttgcgcttcaaccttctccaatctctttgccaacaagtggtagtcggagtcattggctccagcagaggttggcggaacagtggcaggggttggggcacagttgcagatgtggaggggtctagtgtagttttgggtgaggatggtggaataatatttacactttgaacataattcgccacccgttttgcttaggtctcgaatgcagtcaaatcatgctccccagcttgtgtttcttcgacctcatctaagcccatttccaccgtggagacctcaccctcacaattggtcttccaataatcaacctcccgattccgaggatacaatatttgaagaataaccatctgcaaaaagtgaacatgccatcaatatcgcaatcatgtcgcgcgaaaattgcaaaaactcgcaaaaaattacgcatagaaatcgcacaaatatcgcatggtaatcgcactatatcgccaaaaatctattacacatatcagtcatttaaaatcgcaccaatatctcatagttatcgcataatatcgccaaaataaatttataagagactgccaagtacatcgcataaaatcgcacaacaacctcataaaattgccagaaaatatactacacaactgaacatttaaaatgtactgtaaagtaaatcgcacaaaaatcgcacaaatgtcgcaccatatcgcacataaacacagataacacttatagcaaaaatagacagcaaaaatagacaaagattcacacacccttttctcaaacagtacagccacatcaggttgcttcacatcgtgtttcgtgactgagtcgggggtactccagttcaacattcaagggaatcgagtccctttgcactggccatacttcttcccgaaaacttgcatgacctcaaatgcccaatattgaagg

SEQ ID NO: 313346 - DNA, 1684 bp, Cannabis indica
cttctggttcatcaatggcaagacagctcaataggcaattcaacacacacaaactagtttcattttcttttgtagatccaaagctcgtgtgagattgaaaactcaaaaaattaatgactagagatatttcgattctttattcataatgcatatatgttcgatttaattttcttattttcatacacgatcatatatgctttatattatatatgtaatataacagttggtatcaaacctatgtcttaattattttgagttttttcatgtatatgcatatatataaatatatataatctgtgtttttggctattcatagaagattggtaaaaaaaatcgattttaatcattttagtatgtattgttgttagaattgttatataaacttaatactactatttcttattcattaaaacaataattatttttatatatatacacatttatattcatagtgacttatacatataaattttttccaatatatgtttatatataatactcatttaatccataattttataataaataatggattaaaatgttactattatatatgtttataatcttttaagttatataatcattgtataggagtatgtatgtaagcataaattttttactttttcgatcgtaaaatataaaatctttagttttcaatttttggtgtttattttgaatattttaaattttatcacattcatgttatggtatatattgaaatcatgcaagaaaagatttgaaaaactatgaaaaacttgtattttttttatttttttttttggtaaattacacgtttcagactcgtaaatgttttgtgaaattaaagcctaattttcacgtgtttcgtatgtataaaatatgcatggatctcttaattattgcatttagattattttaaaattaaaaacatgtattttggtcgttgaaaatggtatttctgtccgagttttgttgttaggtccgtgtgacccgcaaaccagggatccaggtctttatgctggaggttgaagacaattttttcacataatttttatttattttgtattattaatttatttcctatttttgttaattttatcaataaatttcatttatttattttattttatatttttattgaaaacatatattaaaaatttatatgttatttagtataaattaaaactaaaaaaaaattctttattaactacatgatttaggcatataataattgtgctaatgtgaataaattttgttttacgattaattagtgtgtaattaaatatttattaccaaatttaagtagtttatcatctaaattaattagtatttgagaaatttgtcattaattacatattatgaaaacttataggaggaattcgattgaggatccacactttgcacggctctttgcaattgctggtgtagaacatgctaaatatcctagggaggatgttgaaatgattgtttggggacgaaatagtcctggaagtcgaggatcgggggcgaggtccgtgttgctacttctcttgatggtgaagatgaagatgatgatcacaatacaaacaacaacaaaacaatagataagaaaacttacagaagagaaaaagaagcaattaggataactaaggttgtggaactacatcttgctgttgacttcctcagcaccaaaacgaaatggcggagatattttgtccttaccctt

SEQ ID NO: 313347 - DNA, 583 bp, Cannabis indica
ctctctctctctctgaagttaaggattattttggtgaggatttgtgggggatttgcttgttgaagcttgtgaactttggtaaccccctttaatctcttttaattatgttattttgaattatatttgaagttttgagcttgtgttttatgcttgatgttcttgagttggttctggaagcatgttggttagaattgaagtgtaaatgggtggtttttatgttgattaagcttgtagatttgtgagatatgcatctagaatttttgttagatttttagagtagaacttgtgatttaattttaggtttatacattgatttttctgggcttttgtttgttttaaagctttttgtttgttgttggaggaatttagacaacactaaactaaataatatatcaaaaatataaatagaaaatatgcgagtactcaacctagaatggcaagtattcgagctatggatatacaaacgtatttgaaatataaagcacacaaggaaatattgtggttcaattagatcacggtttgcttagtccactattgcaagggttttctgtattgtccatttcatgttggatcacttctttat

SEQ ID NO: 313348 - DNA, 1366 bp, Cannabis indica
cagacccttaaagcttgagcctttacagggaagctttatcgagattggtagagttaagggcgcaaatgccgtctcggtctcggcttcagcttctgacagggattctgataacgacggggataggtttcggagaggtgtctgtgctactgaaacggcgtcgtgtgaggaggaggatgacaacaggcgtgggttaggaaaagatttgagtttgcccacgcctaaagagatttgcaaggcccttgatgaatttgttattggccaagagaaagccaaaaaggtttgttttttatttttgaaaaattgtgtagaatatgtctaatcaatgttcttggtttattgactgatcattcttcattaagaatttgttcataatagaacggcatgtgcaatatgacaagttgttcataatagtgccttttaaatttgtttgattatgtggttagtatttcatatgtatccattgattagttaagatataatactttatcgatgcatcgaatgttttaacaggtgctttctgtggctgtttacaatcattacaagagattacatcatacctctgagctgaaaaggttagctccataatgttttgttttggtcatgatgtttaaggtggtaatgggcaatttcttgaggctaactcaagtggttggatggtgaatgtgtatgaatggtctgggcttcaaatctcccataaatctaacagaacataaactgttttttttccctaaagattttgatgttctttatctgaggctggttacccttgataccaggtcaaaggtacaatttggtaagtgtgaaggtgaaaatgatgacaatgattctgtggaattggagaagagcaacatattattgatgggtcccactggttcaggtaaattgtgtgttcttattagtgtgtctatgaaagccatggttatcggaatctgcagcttgaaaggattgcttttctgattcatgtacgtttaccgtgatgggtaaggatagggaagaccttacttgcaaaaactctagctcgcgttgtgaatgttccttttgctatcgctgattcaacaacattaactcaggcaagtagactattgcttacttctcataaccacattatgttaatgatattttggctgtagtttcttctattgcttgcaatcatttatttttacagcagcatttttcagttcttgaatgtatgtggtagagctatcctggagttaactttgcaagtcttttgtaggaagagtttcacatttcttttctttcttgattttctgctctggtattttaatgaattgtggatgtattgtttacaattggttttatttttactctgtaggcattatgtttttttttttccaattcaaacagg

SEQ ID NO: 313349 - DNA, 1832 bp, Cannabis indica
gcctgcgtaagaataacataaataagaagtttagtaaattccttaaagtatttaaaaagccgcatatcaacatttcctttgcggaggccttgaaacaaatgccaagctacgtcaaattcacgaaggagattctatccaagaatagaaagatggaagaatctgagacagtagctctaacaaagtagtgtagtacaattctttaaaagaaactccctcctacactgaaatatcctgggagttttaccataccttgcactattgggaggcttgaaaatatccatgtattttgtgatctggaggctagcatcaaccttatgcctttgtcagtatttgagatgctacaactcagagaggcaaaaccaacaagtgtaacactacagctagctaatcgctctttagcccatccaagtggagtaatcgaagatgtccttgtcaaggcggacaagtttatatttcctgctgattttatagtccttgacatggaagaagacaacaatgttcctatcatattgggaagacctttcttggcaacagggaaagcactaactgatgttcaaaagggagagttaaatcttagagttcaaggagatgatgtagtatttaatgtactcaaggcgatgagttatcctaaagctagtgataattgtttttcgattgatacggtagacaaattggtggagtacaaagaataaagtgaagacccttttaatctgacttgtgtaagaggaggtggttgaacaagatggtaaaaaagtgatggaatatgctatgtggcttgactcttatgggccattaaacaaaaaatattatgaagagctaggagtcattccaacaaagtcagttccatctatcgagaagtcaccagaacttgaattaaaagttttgcgagatcacttgaggtatgagtatttgggagaaaataagacacttctagtcattgtgtcagcttccctttctactacggagatagaaaagttgttgagggttataaggaaacacatgagagccattggattacattggcaaatatcaaggggatcagcccctaaactatgatgcataaaatcttgatgaggaagaggcaaagccaaccattgatgctcaataaagattgaatccaccgatgaaggaggtcatcaaaaaggaagttctaaagtggttacatgctagggtggcctatcctatttcagatagtaaataggtgagtcttgtccaagtggtgccaaagaaaagaggaatgtggtagtgaagaatgaaaagaatgagttaatacaaactagaatgtaattgtgtatagaatttgtatacagtacaaaaaactcaacaaaagcaaccagaaaagatcacttccctctcccattcattgactagatgcttgacaaattggaaggccaagagtaatacagttttcttgatgggtattcaggttatcataccattgcaccagaagacaaagagaagacgatattcacatgtccatatggcacttttgctttatggagaatgtgatttgggttgtgcaatgctccaataacattctaaaggtgtatgatggcaatattttctgatctaattgagaagtgcatcgaggtgttcatggataacttttctatattcgattcgtcttttgatcaatgtctaagaaatttggaactggtattaaccagatgtgaagattccaatttggtgctcaagtgggaaaaatgtcacttcatggtaaaagaggggatagtgttagggcacaaaatttctaaaagcggtattgaaatggataaaaccaagatattgacgattaagaacttaccccctccagtatcagttaagggagttcg

SEQ ID NO: 313350 - DNA, 1064 bp, Cannabis indica
atgtaataattctaatttataaaggtttggccccccttactcccccttttagttgtatttactcttgagataataccatgtctctctttagtattataattgtgagaataatatattacagataaagaactggtaagatcttatgaaaaacttatgaagaaatagacttagagtctacgaggctttgatggcatgtggaacttaggaagagagagcactaaaggcgtgtggaacttaagattgaggatcttttctcatgtgatctaatgccctttatattgtgtagggcttacaatatatcctaattaaaatatgtaaatatatcactttaaaatatggaaaataacatatttttttttatcttatatttgaattacaaaaacggataattaaatccctaaaatctaggataacatctttgagggaatatgtaattttcccgcactacgtgtgctaacttgaggcctgcaattagagcttggaggctttgaaagcaaactttattgccccgtgtagttgtttccccttggcataatgagggcaatgtctacatcagacaggtggtgagtacaacttccgttaacatgcaagttccagctgaattttcttgctcttgctctcgcttcttctctggctcttgcttttctactgaaacatgagagatttcagaagatgtgcaagttcattcaaccacgaagtcagtgagagcttggccttctatagccactcttatttggtaagagatctcatattggtcgagttcaatggcccacttgagtagtcggccagatgtttcaggtgtttgcaatacttgtcgcaatggatggtcaatgtacacttgtattggttgagcttaaggtcttagctttcctgaagcttagagcggaaagtatgtcagcttttccatgagtgggtattgacttttagcgtcaataagtctctcgtagtacacggggttcctaatgccctcttcttctctaattaggactgcaattactgttggattttatgccctaaataaaactccatttcaatgtaatccggattattcaatatcaataaag

SEQ ID NO: 313351 - DNA, 3540 bp, Cannabis indica
atggatattggattagatcagttctatccattggatgtatttcttgtatacctattggtttaatttgggtttatccaatattttagacctaatatttattggatcagatcgaatccatctaatattttagatccaatatctactggattgaattggacctatccaatctaaaaaaaagtaaaaatttaatgttaattttgatatatacatgtatttttcttacgtataacaacataaaatttaatttttcattcaaactaaatgaaaatattcattagtttgattagatattggatgtattggatttttggacactctatccaacatccgatccgatcctattggatattcaaaaataatatccaatctgattcgatcacaattagatatccaatatttggcagtcgattgttattagattggattactttatgcatacccctaagcacgggtcaaaggattcataacacatgtgctacaaaaataggtattttatcccggtttttaggggcattttattttagtttttgctaaaataaaaatcgaaacatatgctagtgggataaaaatgaatttttaatcctgatttttatataaaaaaacccaagataaaagagattttctatcccgatttttatgtaaaaaccaggattaaatgttaaacaataaaaaattaaacaaaaaaaaaagttataccagttccatgaaagtcactatcacttttacaatcagagaccaaaattttataatcaatcaatacaaaaactatattaactttatcaacccaaaaattaaaactttattatcaattcagaattttacaattttctcaaaatatacaaatgaaatcagtacaagacaagctaaactttacaccaaaaaaatcagtacaatcaaagccaccactgccttcgacaaccacaaactgacacgaacaacgactaaccattaaccttcctcaaccaccaatcgtgaagctccgtccaccacgaaaccccacgaacctacaagcaccatggtcaatgaattgccacagacctctgtccacctgagaaaagaaagaaggagagagatccaaacctctgtccaccaagaatcaaagtttcatcaaaaaaatgtagaacaagatcaaacaatacctagaggtttccataagaaagatcagcgtcgcgaagcctgagagaaagaggcaacatcgcagaggctgaccggagaagatcagtccagcctagaagatggcagcatagagaacatggagatagagatagcagcggatgagaaagaaagtgtgggagaaagagaggaaaccctaaacctaaatgtctttttatatgctcaattataataaaaatcaattataataaaaaaaaaaaaaaaattaatgaaaataagttcaagaaaccgtgtgatagaatgctttattgaaaagctagagacatgtttggcaaaataccaaataaccatagtggaaatattattttttgaggtccaaccaaatggggcccttgttccaacttttatcccgattcttagctaaaaatcggaataaaaagtctcacttaaaatgttaaggttgtgtttggtaaatgcataaaaatagcccttccaacattgttttttgtgtgtttgtcaaacaagacccttgttcgaaacttttttctttaagaatccaactataaaagtgagatcaaaagtaacaaaataacttttgtcccactttttttttccaaatttaaaaagtgggctaaaaagttccttttgttgtagtgctagccgtcatttcacatcctcatacgtcacgcactttctcgaggtgcataataagcacgagttaaaggattcatgacatgtgtactctacataaggaaaacaaaaaggtttgcgagctttcgcaaccttctactttggaattccaaagggccatacccatttgcagttttgcattttacgacgaatccaaattggagctgcaagccttcgcgactcttgagcctcaaaggcttaggagataaattttatacgtgcttccgaataagtgacacatgtactttcaaggcctaaggttagtggatcaactcaccacggagtcaaattatgacttcgaattcaaagacgaatccaacctacagacatgataaagtaggaccttcatggtcccaaaagagctacatgcttagaaggcaaaaggtctagcagagcgaatttggataccctcatagggtaattcagaatgggcaactgaaaaagacatctgaaggcatccaaaaatcatcctacgatgcatcctccacacacataatccttaaattcagaggtttatcccctacatcatacctaggggtgcacacaccaccaaaaggaacatacctttttgaccaacgacatattctctaacagttactgtacataatgggttgcacatgacacttctcaccatcaaatggtctccactcgtacggaagatcattatctcttaagttggatctcacctagcagacccaaagttaatataaattgtattttaccccattagtgagcctagttgacacatataaatcctagcatttctgggtttactcataaacccgactctatcttataaatagaatattaacccttcaagcaggcgcgaagccaggattaggtcaagggggccaatatactcttcgagattaaattatttagtccccatataaaataggattaatactattttagactttgtattttacaaaagttaccgaatgaattctctgttttgtaaaatgacaaattggaccctgtatttttcaaaatggtacaaaatactagtactctaagctcaattttcaataatttttttttttttgataaaactaacttgaagataatttatagcacgaactaatgcagaaaatgtacacagttttatcagctacctctgccgacccaaaatggaaaaagatctggaactccaaggttcatccgagattgaagctcatttggtggcagatggagaggaatgcattcccaactagagggaaactcgctggtttcatggaattgaatactatctgctgccctgtttgtggagaggagaaagagacctttttccacctgatgtggaaatgcacttttgctaaagccctatggtttaactcctcattgggtttacgagtggaacaggtggatgttcatgattgggagcagtggaagaaatggtttttagaggaccccaactgttaggctaaaattagtctaagttttgggtcatattttcggttagttttcactctttgtttctagttttagggctatattacgcttgattctttggtttcaggtcctcgggcatttaaagaaagtatgtacaagaattgaggaaaaatggtgaaagaatcgagaagaaaaaccaagattggtgtcgctgattggtgtcgctgcctgttccagtcgcgacggggaatttgccagtcgcgacgggaactggcagagagattttcaagaagtcgaagtttaactcccgtcgcgacgggggctttgccagtcgcgacgggaccc

SEQ ID NO: 313352 - DNA, 1370 bp, Cannabis indica
ttcaaaacacaattgcaattctacaccattaattacaaccggaagatgtatataataaaagcacaaattaattattaatcttgcataaattgaatttcaccttaacttaacagcatatcatattatatatcataaatcgacaaaataccactgttggcagaatgcagtaaacgacatacaatataataaatataccaaaataattaatagtctaacttacataagaaaagcatgactgaacttatataaaagatactattaactttgaaagaaaaattataagatgaagaacaatttaataaatgagatatggagatgaagcacaaaagaatcaatatcaatattaagaataagaagtacaaagctacactctaacctcaccaatattactattctaatacactcttttttgtcactaaaataagtataaataaaataataataagaaagaaaaataaaataacaaagtaatttctactctctctaaaatctgatgccttttccaccaacttttggtctctatttatagagaatataatttgatcctattcgtagaaaattttatctgcaaagtcggtaaattaaaaagatatgcaaaaatcgcttcaatcgtggtaaactggcccatatgtgagaatggctgaagagagtgggaggcgtatgtggagaaagtggcttcgtaagaccacttgtctagcattggagcttttagtcaaaggcagtagaagttgtggttggtcctatgcgtgagatatgtacgtggctttggtagatgctaattccttgctgtttcattttgggcttgacaaacattgatgaggcttgaattttagcccattctttaaataacggtccatattgaattggataaagaattcttggacattgaagataattgaaacaagcttaaattggagaaagaaaagcatggagatggattactttgggtcatctttaatttcttttcaccactttacctaaatttgaaaaataacacaaaaattaaaataaattaaatatttccaactaaaataatattaccattaaaaataaggaatatttaatttatattaattatattttcataaataagggcgtaaaatgtatcaatttgagcccttatcagtcaccaacgatgttgatgcttggggagtcgccgattatgtgtgtggctgcaggagtaatctccaatggaatggctactctcactagttcgtcagagttgcgaacgtgatcgtcgttctccgtagaagtggagggcctgagatgaggaatccagcagtgcctctgtcgatggacagtagcgttcaaacatggcatctaattcctttaattgagccttgaaacgttgctccatacgcagttccata

SEQ ID NO: 313353 - DNA, 895 bp, Cannabis indica
ctagctcaattcaacatatcaccataatctaacttagaaacacaaatcatacaccaacaacaactacggtaactaatcacacaaaacatgcaaaattcttacttagagttcaagataactaaagaagaggatgcgatcctttgatgtcattgttcgcggctatgaatatttggaaactgtaacagttgcctaatttcgctggaatcagaccgtacagctggcccgtaagttgcccaccatcaatatcagagaatgggagtgcattcccaggtaccgtaacttgcttgtctttgacgctgagagtatgggtagactatggcgctgttaagaagcagatgaatgtgactttagctccgtctcaagctcttaaaccccaaaacctcttttgctttgacggaagatctttcgccatttataaggataccatgtatattggtttttcttcatcaataggctctgttattagtaatcactatgttctgggctggagctttgagtttaatggccaagcttaagatcgaacttgacttgtccaaactcccaaagctaccaagggtcgaaccaaaactaagtctattattgaggattgtattaacaaacaagcataacaataatgagtgttgtgtaatctcaatacaaatggtatgaagataagtttaacaatatatcaacctcttctctcattgatcggtccataagcatgtcttttgaaaccattaaaagatcaccactcaacgcattgagaagaaagaaagatttaaattcaaaactacctccatcattcttcggtcgcaagatggagacgaagagatattgagaagggaagcttttggtggatggtgatgatgatcaatgaataattggaggagattttaatgaaagagagagagagaga

SEQ ID NO: 313354 - DNA, 3767 bp, Cannabis indica
tggtgctttaaataaatttgcttcgccacttaaatttcctaatggtttagaggtcccacgtgtcgggcttagtggtggtcttttgttgctctggacacatgatgtggatgtaactttgctttcacataatataagtcactttcactgttatattaaacttccaaattttactgctttcacttttactgctttttatggtgcgccatctcaccaaaataaaccgcactcatggcaattacttcaacgtcttgcaaataactctcgtttatcccattggcttatcatgggggtgacatttctcgtactccctcagctcatttccaaacttttgttgacgattacgagcttcaccctatttcccctttgggtagtccattcacttggaccaaccgtcaaaagcaaccatcccacacacaagagagacttgactggtgcctttccaatgccgcttgggacgcaactttccccactcctcgtcttcttcacggtaatttttttggttctgatcatccgcctttactcctaaccatccattactagcctgaccaagctaatccaactcttagattcatttttgataagccttggatgtccgaaccgggttttgaggattgtcttcgtgatgcttggactttaaacaaacagacttctcatcataacccattgctctggttcaatgagaaattccataattgctcttcccgtcttaaacactggaagcaatctttgggacctcctcttgccgctcatattcgtgagcttcaatctcaactcaagagcgttcagtcttctcctcagcccacaaatgaacaataggattggggaagacaacttaagagtgaattaaaccgccttttacataaagaggaagagtattggcagcaacgatcccagattacttggctcaagctgggcgataaaaacactcgctacttttatcgtattgctcctatgcgacgtcaaaccaataaaattcattctcttcagtgctcggatggttccatggcaagtgacactaattccattttgtcaatcgttgaaaattattttgcctaactttttcaaactcaattacctgaagacgacatcattgactctgttttaacgggtatcacagagcgccttaatgaggaagaagttggagtcctccaggcaaatttttctgccaatgaaattacgcaagccgctttccaacttgcaaatgacaaagcaccagggttagatggctacaatggttccttttttaagaaaaaattggcatttggtgggtaaggatgtcattagtgctgcccaaagctttttgaatggagatgctggtatctctgcggtaaacaacacactcctagttcttatccctaaaaaacaaaatcctgagcagatcaccgactatcgccctattagtctttgtaccactttttataagatcatttctcgagttctggtaaaccgtctcaaacccatcctcagtcgcatcatctctcccactcaaagtgctttcctcccaaaacgcttaatttctgataacatcatcattggtcaagaggtaatgcactccctctcccaccgcaagacaggacgcctgggatggatggctctcaagcttgatatggccaaggctttcaatcgtgtggaatgggttttcattcaacgagtaatggagaaatttgcttttcctcaacagttcattaaccttatcatggcttgtgtctctactgcaactttctctttctccattaatcaacaagttcttggccatgttaagccttccataggaattctccaaggggatcccctctccccgtatttatttctcctgtgttctgaaggtctttcctctctaatttgcctcaaagctcaacagccccaaccacgtaaacactctcttggaataaaattgccaggaacgcttccactatttctcacctcttctttgctgatgacagcctccttttagttttgcttcccctgctactgcggctatcatcaagcaaatcttaaatgactatagcttggcttctggtcaaatggtaaactttaccaagtcggccatgttcttttcaccaaacatcagctctgaaatcaaaaccgacatcaccaacatccttggcatacctattagagatacttttgacaagtatttgggccttcctcaaacatttggaagaaaaaaaaaggatgccttcaattacattaaagatcgggtttggtttcatctaaacaaatggaactcctaacttttttccaatgggggtaaagaagtccttttgaaatcagttgtccaagctataccctcctatgtcatggcttgtttcaaactccctgcctcttttcacactaaactcgaatccatgatggctcatttttggtggggaggattggagcaaaatcgtaaaatccactggaaaagctggtctcctctttgtttctcaaaattccatgggggtcttggttttcgctctatgaaagctttcaatcaggcgatgttggctaaacaggcttggcggcttcttcagtctcctcactcactcgttgccaccttactcaaatcccgttactttcccaacactaattttcttgattcgggaaagggccatagaccttcacttgtatggaacagtatctcttagggtaaagaacttctccagtcaggtattcgcaggtcagttggtgatggtaccacaatctccatcttcaatgatgcctgggttccagggtatggtaaacttcattaccttcgataccaatcagatgctaatatgacagtggcaaaccttttaacgcctactaaggaatggaacctcacccttctccaatctacctttcccgcggatatttttcaagccatcctaaccattcctcttgtcaacatcaccacacctgatacatattattggtcccttaccccacatggcacctacacagtcaattcaggttatcatcaagcccatagtcaactccaccaaaatgatccaacaccttcggataatactgtctctcaaaattggtggaaacagatgttgtcactccctttagctcccaaatttaaggactttctttggcgagctagccatgataatctacccaccagccacaaccttttcaaatagaaagccttaccttcaccatgttgttgctggtgtttttatcatgatgagaccctagagcatgctcttttcaggtgcccaactgtccaggaggtatggattttaactattttccatgattttattgatagaaatagttttctcacttgtatggatttactttaccttgctgccactacatttattgctagagactatcactactttttgtgtttgctgtggaagctttggcaatgcaggaacaattggttacacgctggtttgcatacatctccttcccaggtgctgcattgggtaacagattacatagatcggtatcaaagctgcaacaccaattgtttttatactagtcaaacaccttgtgtctctttgttgtccacagagaatgaaccacacatccccagctacagcctcctgatttctgtagatgcagctcaagatataaggcaaaataagatgggctttggtatggttgttcagacatgtcaatgggagatactcttaactttggcaacaccttggagcggactacatcaacctatgataatggaatcacacgccttgtactatgctctttcttggtgttctaatcactccatttatccagatggcatagtttcggattgtaaggttttagtcgattatatttgtaataaggatact

SEQ ID NO: 313355 - DNA, 945 bp, Cannabis indica
ttttttctttttgtataatatattatacataccttctaagataagatgttgcatctgaaacctcctcaaggctgctcacattttctggtccctgattccgaagactccccgcgtttgcagattttgtagcttgcctaattgcaatgccatctcttgtaatgaatacttaggaacaccaagatgttgcagcttaattaaatttcctatatcagttgaagttacgcttctacattccaacaatagtgtctccgaattatacaacttacatattgtattaggtatttcttcatttcattcacaatctaacttcaaatatcttgaatacttcaagttgtaagtgaatccatcaaagtaagcttgtgaaaagaagttgaaactgaacaagtttcattgcagagagtttgagagatttactctttcaagtattgattactcatatttccacaaagaaacatacacatttaagaaaaaagagccaaaatcacaacacaatacgaaaaaaaaatccaaagtggagctgtggatatggtacacaatatagtaattgttcatacatatttttctattctataaattatttgggaaaatcttctcccaaaatcccttgtttctttcttgatggagcaaaaatatactagttttgagtagacactagaaaatccaataaaatacattattcaactattcctaaattgtggaataatatctatgtaaagttagctaaatttccacaacctgatgaacttggtattatgtgtgatgacaacctttttcatcccaacagccaagcaagttatgggaggtcgaataattttcggaacactgtcaatgtgaacatcttctgcaagccttgctcctcttgttctcgcaactattccattcttgtctcgagagctcgaaatgcttcctgccaaaacaattctggaaacaacttcacctgtgttc

SEQ ID NO: 313356 - DNA, 1440 bp, Cannabis indica
gataactaatcagattgtaaagagttttatttagggcataaaacccaacaaatagatgcttcaattttaccagggttggttgctccccgaggtgagcaatcagttgtctacaggggatgatatgtctgtggagttgctaatgggcgagctactaaaggaggcaacctgagtaagtacttctcatttggttcttaattcattcttttacccatgcaggttttgacctttctttatgcaactcaacttaaagatggcctacacttatttccaagccaagtccacatccttaaggactataaccaccactaacaacttgcaaacggaggtggatgcagccaagaaggaggtcaaggacatgagggcaaagatgggcaaggcgaacaaacgacttttggccaccaacaatcgagttgaggagctgcagaaggtgattcaatacatgccatctatcgcttaacttaaagttgatgttgatgccctgaccaaagatttcaatgccttaaaggatgagagggaaggtgtctagactctcctttctaagttggaagagagtgccaggtctatgcaggtagagcgagaagcgctccaaaaggaggtagacaacctggagacgaccgccctggaggttttctatgaattttggaacgcctatccaaatggaaactttgattacctcaattaaaacaaagaggcatatattagtttttgtgtagcccagaaagataaagaagaatccgaggcaaccaacccctatgctccgaccgaccaaagccttgatgtccagccacaaataacccaactgacctgtacaaaaagctagggactccagccgtataagaccttctctttttcttattttttttttattttagttcgacctatgggccttttttaagtacaataggtttgaccaagcggcctttaaacttggttatactttatttattttaagacaactagctggtcgagcagcctttaatctcggacttattgtgcttttgttatctttttattttaaaatgagtatttttccttattttagtaattgcactgttaagttcttttttgagcttgttgtttacctttttttttatatgggtataatttccccttaagtgaccgagtagacttatgaatcttggtcacttgtattgcacaagttcatttttcatctgttaactttttaggttcgagcagaccctttgtacatatttttgttgtaaattcaaaaagaaaaataattaacacaattagaatgttgataaatatctttattcatttattggtctgaatgattttgttaccttagtaacttatatttattgaattatgaaagatattacatgatctattcaatctttagctaacataaaccaattacatttttgaaaatgtaatttagaagtggtaatcctgttggatattattttaccaggatct

SEQ ID NO: 313357 - DNA, 2302 bp, Cannabis indica
aaatcacgtaatacgcctaaggtagttagggtgttacaccccgcttcccctgacattcgaggacccgtctacctttagcagccagtccctcccggcgggttcctccttgcaccggacaggttctggagttatctcgactaggaaatctgacagcgcttgtcccttaatagcagtccggggcaggtattgtatgtcaaatttgctcaactccaccgcccatttcattagtctcccagatatctcgggcttatgcaagactcgttttagtgggaacgatgtcataaccgagatcgtatgacactggaagtacggccggagttttcttgctgatatgactaaggcccacgctaatttctcgattattaggtatctaccctctgctccggaaaaggttttactggtgtagtagattggtagctccgcctttccttgctcccttactagtaccgaacttgcggcgtatttagacaatgaaaggtagaggagtagggtttccccgggctagttttgacaggacggggggcgttgtcaagtatctttttaacgtttccaaggctagctggcatttctcatcccaactgaatttacggtttcctctcaataggtcgtagaacggtaggctcttgtttgaaagctttgagatgaagcgacttagagcggctatcttcccagttaatttttgtatgtctcttatggtgcggggtcggcccgtcgcctgaaaagcctctatttgatccggattaacctttacccctcgtcgcgtcactaggtggcctaggaactttccacacccgacagcaaaggcacacttggctgggttgagtttcatcgagtgggcaagtaggatttgaaaacattctcgtaggtggtcaacatggtcggcgccatctttagatttcaccaacatgtcgtcgatgtaggcctccatggtcagacccagctgttgggcaaacattttgtttaccatacgttggtacgtggccccgacatttttgagtccgaaaggcatcacttcgtaacaatacgttcccctctcagtgtatgaatgacgttttatctcggtcaggagggtgcatcatgatttggttatagcctgagaaagcgtccatgaagctcattaactcgtgtcctgcggtagcgtcgattatcatgtcgatgtgtggtagcggaaagctgtcctttgggcaagccttgtttaattcggtgaaatctatacataccctccacttcccgatctttttaggcactacaacgaggttggcgagccaagtaggatactgtacttcctcaatggtgtcgttttccagcatttttgtgacttcgtcattcaccgccttgttccggtccgcccccattttcctcctcttttgcttaaccgggatataatttgggtttacatacaatttgtgagtaattatggtcggatctatcccaggcatgtctgagtgttcccacgcaaacacttgaaaatactcttttaaagtcctataatttgattctctcggtctcccgtaagtcccatgccgatgtaggttgtttttgtcgggtccgtcgggtgtatgggtacttctcgtaactcctcaactgcgggtgactattcttttgccggggcggagttaattaattgctataacttgtttttactccgcaaggatgaggtgtaacactcgcgggcccccaattgatcccctcgaatctcccttacctcacccttacaggggaatttgaccacttgatggtaggatgatgcaaccgccttcattgcatggatccacggtctgccaaggatggcgttgtaggctgatgggcagtccacaactaagaattttactgacttgtttacttcgttagcatagaagggcagttggatgaaacttcaagcaacagcgctttcccccgaaaatcctactagtgtgacctgggtgtcctgggcttttaggtcctcgatctccatttctttaagaactccagcaaataaattgttggctgaactcccagtatcgactagcatgtgtttcattcgtacgtgggccacatccaaggtgatgacaagagcgttgtcgtgggggtgctccagctcggaggcttccccttggttgaacgataggagtatgtcggggccgtcgctgtcgattactgccattgcctttactgactgaatccggcaggcgtgggccactgaagctcgtattgagttcctgttggaaattattttaccaggatctagatttactaccaagtatgttttattaacatcctaatatgaattctaaaaaattgaaaataaacacataagagttta

SEQ ID NO: 313358 - DNA, 982 bp, Cannabis indica
agattaatatataacttcaattgcaagaaaatttgtcaaactaacaatgtaaaataacctcacttaacttattctacgtgaccaatggtcgcatagtgtaaatcaatgatcttttatggtagcaaagtgtaattcatcgtcctttctatgaccatgctaataattttttttgtgaagttaatttgctaataaaaaatttcatttacaaaacactcatattgctgaaattgttcatcatacaatcagtcagcataaaaaaagtaatggattatgaaacataccttgcaaaccaacgaacattacaatgctcggttttccttttttaagagtgaaagaaggttttccaggatccaacattttgcacaattcattaaatatagcctacaacaaaactttcattaatgcacaaaaatcacaatgggatttcatactagatgtaaagagaccctgaagaattataattaaaaatcaaaagttcaaaaaagaaaaaaaaccattgaaagattacttgttttcatttccaataaaagttcaagcaaaccgaaattgagattatataatcagaaatagtaaaataaaaacatacttgctggataattttgcgcttgttgtgaccagcagcgaggtcatccaaattgacaatcttcttgatattgctttgcatatcacggacgagcttgaattgaacatcggactgtagcagagcgcgactgatctcattgagacattcattgaggaccttctcatcgatcacagtggcattgctcatctgctgaagagcgcgggatatgctcccgcctaactgtgctaaaaccatcttgggtaatcggattcggagaagacgaagaaaatatgggtagaggttttcctggagattgaattacaaatctttcttcgatttagaaattagggttcgggatagggtttgggaaaaggggggaaattgagagaatctgagattggagatgaagaaatcgtcttt

SEQ ID NO: 313359 - DNA, 1825 bp, Cannabis indica
tggtcagtttctcccctgaaagtaattgttccttgttttaatgaagacaaagaaaattcttgggattattctttagtttgatgcttggaagtgccccaagtttacaatatgtcaacttggatgctaggtgcttggggcacctggtgctcaaaaaatgaaaagtgactccaaatatgattctaatgcctcaaatatgttcatgacatgtaaaattcatgtcctagtacaaagtttgacccattttcactaagaaggtcccaaaaactgaaactctagttggaatgttaacctaggcgcttggtgaaaccctcggcacctgggttgacttatggggtggtgtttcgtgtatttttagctctccagccttggaattagatttttcatgtcttcattactctgaatactaaaggatggtgacttgtaaacaaattggtaggatccaaatatccatttcagtgcctcaaagtcaacctaggcgtagggctaggacccttccccaagttgactgctatgactcgagttccttcactccaggaatgttttccttcttgccacgtgtcaaaaattagtgttcacattaccaaggctacttttggtgtaaacatttttccccccaagtcaactttatacttgtgtgaggttaacttgatgacgtgaactaagcttgtttctcttgaaattacaaagtgggcattaattttgacaatcttaggtaattgttttctaattgtcttgagtaatttcctttgatttgggggacttctgaaatttgtcaacatcaaaatgtaaacacttactctgatctttggttgttgtcttagcattgactctcttatcgtattgtgtgtttatgtggatgtagtctttgttttctcttaggttgtagccttgaagttctttagcgttcccttggctgtgcttatagcagaggtcttgttcatctcatcagtttgccatcaaaggaggccttcttcatctccctagctttatagtggaggaggccttcatctcctcagctacacagcaggggaagccttcatcgtctccatagctccacagtggaggaggccttcatcatctcctcagctttacaacagaggaggtcatcttggcgactgtcaatgaagttttgtagaagtggctggtcgttctttggtcaattgaggatgtgaccaacttccaaattaatatacctaataagacgggggtgatgtcttccccatcttgggcgcacattgaagtgattgtaggtgcggtctccattttttccttggtcttaaccatagaagtctttgtcatcgcttcagttgtattcacaatggaagaggccttatttgtcccctcgactgtctcgatagtggaggaggtcttcttcatcccctcagctatcaacacaacgaaggaggtctttctcatctccttagatgttagcacagtgaaaaaggccttcttagagaatgttaacgatatattgtaacattcacatgctactcattggttgccaaggagacagtcaatactagctaattttgagaacttgacaggcaggtggtagatagatgagatggcttggaggtcgtagaatgttgactttctaaggagacttggtgtttatcactatgaaggtagtcatagtggtgttctctcacggggttgtttcaactattagtggtaatctaatttcaccacaagaagcgatgtcggctctgctgaaataatacattagttgcttgcatgaccctagactcttacaaagacaaacctattcttttcagggtgtgtttggataggatattctatgatgattctgttggaaattatttta

SEQ ID NO: 313360 - DNA, 869 bp, Cannabis indica
agatgaaataactgttagcaaaatatttatgcaactgtaatgcaactgatatcaaacattaaaaatcaaaatagtattttcacgtacataactctatctacatgtctgatgattgtaagatgatgttaaatgatttgcctaatgttgttaattttattagacggtctgcaaacagtgttgctcattgcttagctagagcttcctatttagttgtcgatcgtgatttcaggggtaataatgttgctcctgaattaagtcatgtaatcgctacggattgcctttaataaagatgatgaatgttttaaaaaaatatatatatttcaaattacagtatttatcaagtctgttaataaaattgtaagtaaataaaattatatataaggaattgtttttcttttttttaaatatttatagtaactgaaagaaaaataaaacaaagatttttttaaaaaattgttcatattgttattattagtgttgtataaatttttaaagttaaaaactttttgtaagaataaaagaggatcacgtggtgcatatctcttctctactctttcggtagctcatacaatcttaagggaccacctgccagctatagaggccttatatatcctttcttaattgagtcatcggtgtacatcttaaaggttcctatcccattaagattgataccgccacaacaagctgaccctctaaaagaccaatcataatctctcccatgagaggctatggtagaattcgaacccttaactcaagcaagaaccatgccagtaaaggtatccctaacacttaggaggcgtttggttgggaggaatgaaaatataggaatatgaatgggaatgggaatgggaataggaatagaatggaat

SEQ ID NO: 313361 - DNA, 800 bp, Cannabis indica
ttagatatacagataaaaaaaggaaaaagacatagatagagcagtcaccgtctttctgagctcagaaaaagcaggaagaagaagatggtgcgaaatgttgaagtttttaccaatctttttacatatttatttgttttatttcttttagtcagcgaacatgtggtcttcttctccagtagtctatacaattaaatacaagtcgccccgggcccattaccttaattattaataattaattaatatcggcaagtacctgacaaatcaaaaacaggtatggtaagaagaatatgcaacttattttttttttttttttttgagagaaagaatatgcaactatcaatatactaaaaatatgttaatttatgttttcaaaaaaacatatgttaattcattagtttttccatttttttttaaatttatggttagttataataatgaatatatgtggcaggtaaataaatactaggatgtacacgggtggattgacaaatgttacaccatctctcaaaatttggttatattaattttttttatttaagcatttatatattacaattatattttagttggactccaatctaggacctccagcacacacgctagcctcaagtggttgtgttatattaatttttaatattatactttaatatataattataaaatttaatagttttattgaaatataaaaattaataaatttatcattgttattactattttttcaattatttaaaataaaaagaatataaatagttcatcaataatgctatagcttatattaataaaataataaaaagtga

SEQ ID NO: 313362 - DNA, 706 bp, Cannabis indica
tttgcagtgattgaattcattggctttgcttatgtccattttgtgaaacaatcaactgtaactataccatggtttaactccacctcttccattgggagggacccaatttgatcactcccccatactgaaaatggctacgggcttgtcatcaatgtgatttcattaggaggtgcccttaggatgtttgcaaatatttggcacagatcacacttgaagacgtagtcattgcagtcttttatcattgtggactagaaatatccttgtcttatgatctttttggacaggctaggacccccactgtggtctttgtagaacccttcatggatttcttccattattttcttagcttcgagattagagacacatctcaggtagggcatgattaaacctcttcagtataagattccattaatcatgaggtatcgaggagcttggtactgaacctcccgggaagcaactctgtcttgaggaaattctaccttagtcatataattgaagatatggtccatccagctaggctcttgattggtgattgcaacctctgccttggctagaatgctaggctttggaaggtactcaatgggtaccacccccagtctttctactaggggtgttcatcaaaccgctcaaaccacccgcaccgcaaaaaaatacagtttgaaattctttgcggtgcggttgcagtttgaattcttcctaaaccgcg

SEQ ID NO: 313363 - DNA, 832 bp, Cannabis indica
ggtgttaataaacatacttgtcgcctatgccctctaggtggttgagcatgtggcacattaccacgggaggtggaccgccttggctcttccgaagtggtacaaattttggatcgggttaccttataggtgacagtggtgctcgaattggagaaggatgggctctcatttcctctttatctatgttattattttcacaactaggaggaatagtttgtgtccgatgagtttcatgaccactcccatgtaatggtacatgggtttctagtgcatatcttgcatgggctccaacattgggtaaaggttgatggtcccccctccttgttggattattcatgggagcatctcttatccttgggcgaccccttcttctcctaggtggagaaggatttcttggtacagggggttggtctccatgcctttgggcttgctcttggagttctctgttgtggctcaaactttctgccaactgggcgcgcaaagtttcactttcttataatacctcatcgacaggtacagatctgaatggtggccgctccctagacggggatgaggaaatcttggacttgtccctcatcttctggcataggtggcataaggcgcttttcttggcgccttgaagttccctttccatgtggttgtggagggacaaaggttcctacactttgaggttgatgtcgttgaaggaatttagacaacaccaaattaaataatataataaagatataaacggaaaatgtgcgagtactcaacctaaaatggcgagtattcaagctatgaacacacagacgtactggaaatataaagaatacaaggaaatatagtggttcagtca

SEQ ID NO: 313364 - DNA, 1056 bp, Cannabis indica
acttttattaaaaataaataaatataagctaattataatttttcctcaactttttcaggacgttaatagtttctaaaattattaaatttaaagatttctgactattttcgttcaattttactaatatgataattattgacgctaaaaagtgatcaactccgtacaatatagtaagcagtagtggccaactaatgtataaacaaaaaaaaatgaaagagaacacaacaattatagtagttcactccccgtgaattaatggtaatggaactacatctacttagagatcttattatcacgaaaacagagaaaaaatgtctaagcctgatagaagctatgaccttgtagagaaaatgaagaatgtgtaaaatgagttggggtgactctcctttataagaaaggaaatccaattaaattacaataaaatgatagaaaatttgcacaaaattcattcaaaaattctacactagctcacaggttgattttgatgcctgaaatgtaaaatcgtgctaagggtattcgatacacttagatccgtcttaaaaatagctttcatgtaccacttgaatcacatcatttggataaaatttgagggagttatgaccattttactgagtggtgtgcactactaaacgtgactgcgaggtcaattcgacctttaggcacccaggttgacatagaacgtcaacctaagtgcccaaaacttggcttcttgggctttaggcatagtttgagatgcttgaatgatataatagctattcttagctcattcttgactctggtgaagatctcttggcaatttttcttgatatgcacatgtgatgcccgggtaatcactagtgattactaggtgacgaccggttgatcactaatgcacatgggtgttggtggacttgcacataacacatgtgcataggatacttgttagattaattaacaatcccaagatactattttgtatataatatagaattctataatatatatatataaataataattaggtttgtgtacctcattgatctatagcaattacaacaatttgatagtgcaatacta

SEQ ID NO: 313365 - DNA, 1069 bp, Cannabis indica
ttgattagtaaaacgacgtcggaattggaggtggcggtgacaatagcagaagctgacatggcggagtgttgagattttttggagtgaaaattgaaaaaccaggaaaatggtagtgaaagagagagagaaagtgagatgggagaatgagaatgaggagagatgtgtgtgtatatataaatatatttataaaagaaaaggatgagagagaagggaagggagacaaaggagggacccaagcagagaaaacccacgtcgggagagtgatgacactttgaataactctctcgcaacgtcacctcttctatcactggtttaaaattaggcaccattctccattatataaacttatatcttaattaattttttcttcttttcttataatttcttgtactgtttcgaattgtaagtctgagtactgttacacgtcggaggatttggattcatgttatgatttagttcggtgttactaagtttattaccttataatctccgataacacatgtgagttgttagaattctaatgattaaattatactcatatttgccatatgtattttatactaatcgtgttgtctataattaatcacaaacaaaaattgtaacttgtactattcatatataataataatcgggatcaattaaaaaaaaaatttacaaatagggttgtacaaaaattttaacatttttttacaagattttatttatattaacagtattttaatgtatttttattttattggtaatgtatattatttttctgttgttttaatattgtttttatgttacaatcatttggtttttttatatatttataaaataccatcaaaaaaaattgtacgtgtaaattttttacataaaataactgtttatgtaatttttttcatttaatattaacttattttagagaaaattttaaaatattatacaaaaaaaaattatcaataaataaatgattttgtttcttccactaaatgtcgaagaacacaagtacaataatgtatggaggaatttctaaattatgttttctattataggatgtgtatatcatacattgtggtacatgagccaa

SEQ ID NO: 313366 - DNA, 653 bp, Cannabis indica
ccacactcaaagtgtgtcactacatcttattttttaaaacaatatatattaattttttttaatttaggttatattgtagaatttatttaatttattatatttggataataataataatattaactatgaattatgagttaatatatattttaatttggctataaatttgatagcaaattaacataacaaaaatacgatacaataagaaaaaatatcacaaaatatataaagaatctaaaaatcaaggaaaaatttgtgtaaaagttaatcaaaaatctatacagccaaaaaataaatcttcaacagtgaaaaaaatgagtgtaaacatacatttcaatcaaaactaaaatcgaagtctttgaataaaataaatacaaaatatttgaacaaccattcgacgccaatccaaaacttacgccatttgaagctcacaatatcgtccaagatgtggtggtgtggagcttgcgtaacagagatgtgagaggcagagggaaaggtggagttgtggcccttttctgtcgaaaagagagatgaaaggtcaagatgtgatgatgtggagctcgcataatagagatgagagaggtagagggagtggcggactggcgaagctaacttgtggctcttttccatcaaggagggagagagagagagag

SEQ ID NO: 313367 - DNA, 1619 bp, Cannabis indica
attagtttgtcctcaaatttctgtcatacaatttaaacccacacctcaaagacctaaagccatacttgaaataaatgatgaaaaatctggaaccatcttgttaaatctggtcaggatgaatcctctagccattataggtgattcttacaacaaataattgagggtaggcgccattatttgcgagaagtatcttggcctaaaccctccaacttaattgatattcccttagcgaggtccatatttttacctccagtcactgttgctctttcaccaggtcacttagattttaaaataatggcttagaaagctcgtaaatccaagaccccttaggatcctatagttacttttgaggctgaactatagaatccaaaatcaagtccattggaccttacgtcggggatgtttcaaggtcatgcgacatcaagaatgagcaaggatgtcgcattaggtccattgcaatggaggagtttagctgttatccacctgaatgtctagtttgagacgagggttgtagtaccagcgagccttctaggataggcgcttgaagcctcgttcatataagagttggagcagttctccctcttaaagattttttcaaagacttttgtaactacctcagtattgctccattccaattggcaccaaattcatacaggatattggcctgtttaaagtctctctatcatattctaaagtgggagtgtccgaccccactagagattctttacttttactctgttaaagcctgcacagcaatgaagcatggtggaagaggtttttactatctcgggacccataccaatgatcacaggatcgttgtgaggcggcccaacaaaatggagttcaaggatgacttcttttagaccactagtctattttccatcaacacaataaaatttcaaattatatataagtataacttttctctaaaacttggatttgagttttaatttctatatatatctaccatactttactaatttagttctttgctatgctaacagcgatcaccaggagaccactcccaactcctgaaatcaagaaaaggcactaaatcctccttgaccttccctatcggatgcgagcaactgacttcttattgcatcgaaacaacttgaaggcttgcactcctcttgttctaactcaccatttctttgatttgattcagccaggcgttgcttgttttccaattctactagtggaacatacttggtagaatcatatgcgtcttcacttcgcctctctgagatctattcgccaattggattaaagtttccatcatttctcccagtacgtgggatttcaattgtgttggttctttgtgatccttgaggttcctttccagggtgatcagttgtttcctctagatggtattcttcatttcgagggatattattcgccatagatataggtttgtaattgtatttagaatgaggtttattttttttattataaaggctctcaatgaaagcactaaactgttaatgcagattttggttaactaaatatataagccttttgcgtaataaatatgtaacaaaattaataataacaataatccaatgaaaaattaattctatttatttcaaaattaattatgttgctaattcaattttaat

SEQ ID NO: 313368 - DNA, 1099 bp, Cannabis indica
actttccatttttatctcccttagatccttctccatcaattgctccatgaaatcccatattcttgtcctccccatcaatttcagcatgatttcctcccctaatttccgcccctgtcatcactcaattactgatcaccaccggagtattgttcaccggcgtagtagatgattccccagtcattttcactgccatttctgacctcaaccaccttgaaccaatggagtgtgatcgtcttcttggagccgctttcatatccaggttatacctcttagttaacagatgaggaggtgtatcaaaggcttcctcgcagaatctctctgaatggccaagcaaaccacagacaaaacagaaagtggtcaaatcttcataacgaaaactcgcattacattcaggtccattcttcatttgcagtttccggcctttcttcagcagtttatcaacacgaatacgcaccctcacccttaaaaaatccctccagccacctaagaagttgttcggatccatcttgacatatgaaccaatataatttcccaagtccttcaacactctctctgaccgaaaacctgatatcaaaccatgtacttgcacccaaaactccaaagtaatcggagtaacacatcttggattctcccctggtttaagcctatccaagattaaaggaatcctatcaaatgtccaaggacttacttccatgactcgatcaatgtccatgtcgtgatagaactggaataaaaacagattcggctctaattctttggcaaataagccacgaacgggacgccacaaagatgccattttgtgttgcatagaatcaaagtcaatagtccgttccgttaagaagcgtcctactagacaccaacgatcatccaaatcaacattctcccctgtatcattttcatacatcaagtaaccatcatcatcctcccctagattcattgcagcatattgttcatccatcatcgaagggaaaagagtttttagacacaatcagcaagaaacaaaatcaccaacctcaattaaacaatacagaccaattaaaacataagaacatcatacacataaatccaaactaatatgatagtaagttattagtaaaaa

SEQ ID NO: 313369 - DNA, 1176 bp, Cannabis indica
ttgtatagtttgtttctaaagtaactttcttctcttcagtggatttagaattgcttcatttttgcaagaccgtcgattatgtcctttttggttgcattttccacacttgacttttgtttttgtgtccattgctcctttatatctatctttctttggcctcccagctggtcttttatattttggtggatgtactgtgatattcttcacatcctctggtatattccatgatgttgcttcacctaatggaagtatgctatcctcatatgttgacatgaaagcttctttagtgtagtagtaggagcagtatttgtagcaagagaagtttcttttggctagtacagccattgcatgcgagcaaggcatttcgtcatagtcaaacttctgacacgtgcatgttttgttttccagatttactatgtaggagcttgtataatcgtgcactttgtatacaagaaggttagctgtctcaacctgcatgaagaatttatacaggtttttgttattatatttttttcagaaattatttggtttactgttaatgtttttttttatatttttcaaacaaattataaaatttaatttaaattaatgttaagtgtaccttgtattttaagcccatttctctttgtttcttgagagccttttctggaatatttgccaaagtagtgtccgttttcaaggctctatttttgttttcccaataccatctttgtaccaaagagtgtagacattctagtaaggttgcaactggtaattctcttactgatttgagagctgcattcactgactctgctatgtttgatgtcattgttttgtatcttttattcatgctgtatagccttgtccatttatcatatccaacttcattggccaagaaatctcttattcttaagtcaatgttgtccaaatcttgcatgcatttctcaaattcttctatagtgtaagctttcgaagctccatcaaatgcatgtttgagctcatctcctccttttttgaatttcatttttagatttttgagcaagtgatagcaacataccccatgcattaggagtgggaagtttgactttgttgctttgtatatactctcatgcctatccgagattatgcattgtccttctctttctccatatgtttcttttattttttgcatgaaccaattccaggagttgtcatttt

SEQ ID NO: 313370 - DNA, 2547 bp, Cannabis indica
gggtaagttaagccctaggttcattgggccatttttgatacttgagaaggttgggttgtagcgtatcagctagtcttaccaccagcgttattggctattcataatgtatttcatatttcaatgtcgaggaaatagttttagactcgacccatgtcttgagttacgcagccctagaactgcagtcagacttatcctatgaggaacagccagttcgaatcctagataggaaagaaaaagattcttcaaaataagaccatagtttgatcaaggtgctctggaacaacaacaaggtggaggaagccacctggaattagattctggcatgaggactcaatatccagagctattcaggtcaaatttcgaggatgaaatccttttaacagggaaataattgcaatggctgcacgtaagaatatgggttattaaaggcaattagcattaattattgattttttttatataattatttatgattttataatgttgtgggtctcaattttagaaatgggcattagagttataatttctcaattcaagagattttattaaactctaggagtattatttatattaaataggaattatgtaatttttatgatttttgctcggcgacaacaagaaatgtgatggatggctgttagaatcacatgggtaagtttagaacctatttcttagtgaggcaaatatttgagatatttagaataccagatttaagaggggttatggtattagaccattttatccctaaacttattattgcttaagttggaagtatgaggggcattttggaaaattgtttgtgtgtttaagtggctggtcttggtgttgacagctggccactcatttgtttttttttttttaactataattggaattattgtgttagaagttagaagaaaattaagaaaacacaagaaaactaaaagctctcacttcctctcattctctttcttgaacaaaccttgagaagtagcaaccttggtaaaattttggtgtgatttgaggagttttagttggattgtctagtgtaatccaaaggtaaaaaccctagcaccttctccttctcctttgagttctactggtttttctttggtttgagcttataattgaaggatttggggctgtttgagctaaagttttccatgagttgttttctgtaatttaattgagttgttagtgtatagtttctactgattttgttaccttggagtgcggttgagcaagtttgagtttgaaagctcaacaatgtctaattgagattttgtgcgtattgtgggctattttttgttggaatctatcctttgatgttgttataggtgatctggaaggtttggtgaagtttcgacacgatttgagcaaattttatatttatttagcgttacttggtgcaaactggttaaccgtatcagggtcaggattctcgaaaattttattttgtcaaatcgtgttattttcagaaccttagttggttatttcatggattcttagggtgttattataagaactattgatagtagaacccttagtggtgaaatttgatttctaggactaggttttttatgtgttatttacccatttacgtaaatgtgacttagggcatccatccaacacgagattttccgttcaggtcgactaacccacttgaattcagaaacgaggtaagactagcatagaatgtatatattttatatgcatgatgtttatgtgatttgtatatgttttgggttggtatcatagcagcacaaccattgtgtcagttcggcagtacgagtacagtacttgttaagagtgatattcaaccccagaaagtatttattggcgctatcatagtggtacgaacatagtaccagttcggcagtacgggcatagtactggttaagagtgatattttggccaattatactttcaggtactattgatgctattatatcggcacgaacatagtgccgggcctgaagtgcaatcatagagctggtagtggatgatatcatggtcaatagtaccaaaagtaaagaacgttcttacccatacagggatagtgtttgtaagagtttaaatacgggatcctgttttatatagataaatatatatatgtttataaagtttaataatttaagttaaaagttttaattgggcacaattttcaagaaaaactctttcattagcaaaggaggcacattaattaaaaaattactatagcgcacctaagtatcagggcgttacatatagtgtttagctattaggtgcccaatatcagctattgaatttgactccaaagtcctttttagcaaaatattctataataagagggatttttctgttctcttcgatatagtattggacatttgtaattctttgtcaaacttccctaacatccctatttggcaatatctcaatggtatttaatggagatgctcatagtgttgccaaaaaaatattagggcttgattaagagtatgtgtggaatggtaccatttcacacttctcaaaattgtaacttgtattttttggctgctcaatgaaagttacaattttataaaaaaaaaa

SEQ ID NO: 313371 - DNA, 1478 bp, Cannabis indica
aagagcaagcataagcaagttatgcctctcaacgtgaacaatgtcaaaagtagacatatacttaaatgccttgacaagcttagcaactttaattatatattaaaaatttgttgattaatgtctcacgattaatgttgcgaatatcaatttactccgagaagaacatgtatgggcttcatattgcgaggaggctatttatgcctttactcttaaattcaccgagtaatttattctctttgttatacacatgtcatgtagctatatctgttatttattgttcgaaatatgagtattattattattataggtctttcaatgtgttgtgtcgtgctttttcagcttgttgcgcgctatgcttttcaagttagcttatctatgcttgcgtattgtactttttcatgctttttatgtcgcgtgtcgtgcttaagtatatatttttcgtattatgtcatgtcaatttatagcattgtattataacataattaaatttatatttttttgtgtcaagttgtactcgtaccttctaaactcgtgttgatttcgtggcgcgtgtgtcaaatatttcagtatgaatttacaaaacactaatgagaggtatgtatgttagtcaaaaactagtatgagtatgagatattatggtaagatatatttaagatagtggggtgggagcatgataatgagggagagtatgggagagtaacatgcatgccgtacgtagtagtaatgtaattgtactattagtcttttactactagtagtaataaagtaggagctgtagctagagctagcttagctagcaagcctatgtatatatatttatatatatagtctcacttctgagtacgtatactataaatatatttacacagaatccgaatctcgatcatcatatcctatcctcttatggtacctatcatcatttcttgactttatatcacctactttttccataccaacatttacatcaaaatattataggaatatttttcttttttttttacattcaacaataattttttttaaaaaaaattacactaaacataacatttatctaattattaaaatattatggtaaaattaaagactagctactaaatatatataatagaaagatcacaaattatatacttacacatcattgtaaatgtgtaagtaatttacattgattatgtaaatattcttctttagttgtattgtattatgttcctttttcttaccaatttgttaatgcaatactaatttggctcggtttaaaagtttaaacaacaaatatatacataataatgatctaatgacaaattattatatatttatttgtattaatttttattttttagaaaaagaaatggacagacggaactaaaaagtgacaaattctaataattaaggatttttacaaaaatactgcattttgagtaaaagtttataattttactaacacacagaatttttttacaaaaatactgtatttttataaa

SEQ ID NO: 313372 - DNA, 1172 bp, Cannabis indica
aactttacataatccgggatcccgtctttaaaattacaactgtattacaaaatatttaaatacaaagttattgcctaacaactatcaaaataaagcctgttgtctagaagatcgaacactccaggtctaaccaacccgagtgcaatcttcacccgctcgtgctcactgttgttcagcattagccttgctcttacctatacatataaacaataactgtgagtcgacatacttagtaagaaaagcataatcataacattaacataaaccgaattataactaggaacccatacacccaatcataaccctatcccgcgtcccacacgtactatctagaatatttgtatggcagtacaattcaccataatatcaagctatactcgatatcgtagtcgtaccaatgtgataacatcaatacgcactttgccaaacatatgcttgtcgatattcagtgcaactctatgtacactaataccgctcttactgatatgctatctaataggcaatcataaaatatgtacactaaatatgtaaacacatatgatactatcacactaatcttaccttgattccgaattcaagtgttacagtcaacttgagtggaaactactgctcgacaatttatagacccctaagtcacaacatatgtaaactgataagtgatacactaaatcacttttcgagaacttaaatttaaaactagaagtttccctatcgatagatagcgtggcaataccttaaatatcgataaaatacgaaaaatagggttctaaaactgctaaaatcagtaaactgaaatcccaaaatggcgatccgttcctagggtcctgcctagggaaacggttaaccggttctacaaaaccagtaaactggttcttgtagaaaaccccaaaaactacaccacatgctcaaaacttccccaaatcgtaccaaactatccagaacacctaattcaacatcgctaaacatgtttaaagcaataacaacaattatgaactcctgaaacaaaatctaaaattaaagacctaagtttgagtttaaaaactcaaaccttggtctttctcaacaacaacaaccaaaactaacataaaacaactcaatcctaacatcaaaaagaaaaactatgttggattttgtgccctaaataaaaccctttacaatcagattagttatca

SEQ ID NO: 313373 - DNA, 829 bp, Cannabis indica
aaagaacaaaaaaaaggtcttgcttcacagtaacgacgacgacggtagttgcaaaagagtgagtcacaacaatgacgatcgaagactattgaagtgaaaataatgaaataatctcctacacttgctccaacaaaatttttatacattctatttctttaagctctgattggttcaatttgttaccctatagtatgaggaagaaacaagcaattctaccccagaattcccctatatatattacttaagttgaaattaataattggaattatgaacttaaatggtaatgctttttgaacaaaaaataatatatttgagtcatctctcaaaattaaatgaagatgcttttacctatgtatatgatgggatgaaagaaaattaactttaaacactactatataatcatccctaataaaattagtgagatttactgcataatataggtaccttgagaactgtaggatacgactgtagtgtttctgggataattatatccaaattaaagctttttcaatgcaaaccaactacaaaagagacaaaagaaagattagaaacttaaaaagagagagtagagaatgagaagccagaaaaaaataatcttaaattaatatttgatagataaatattgttatttatattatttaaaaaataattatgtcgctaaggtgtgcgtatagtttgttatatttatttgatttttttaaagggatttgattttttttttcttgacaaaaaaggaatttaatttttttggttaacgtgtttaagaagaatttatttgtttggcatttataatcaatgaatttaattttagagtttttttatttttaca

SEQ ID NO: 313374 - DNA, 894 bp, Cannabis indica
aaaataagaaatattaattttaaaaattagttaataattataaacatcaactattagatttgatctaatgactaataataaaataaccatgcatgggtaatactcattaagagcatacccaaatatatatgtattatattttggacatttaaattatatagcaattcaagagtaattcaaacgaattactatgttattaatcatcaaaaactatgtaatgactaatgagaaaacacataatcaaatacaattgtgttgttatataaaacatactaataaattctttatctatctgaaaacatatcacttaagtgaaaatacatctcaccaaaaaatatatttataccaatactcctatgaaattatatattttattttgtaaattatttatttgacaaataaatttgtattatcctgttaaaaaaccgggtttaagaagttaaaagacttttataatgataaaaacttatttgtctcactaaaagtgttacacaactcaaaatgaggtgagggacttcgcaagtccaattttgtttaattagaaagctagtgataactagttgtagacctttctataaaaaaaaaactggtaccatacactcatttactcaatttggctcactttttttttaggagactatcccaaaagtaatagatgcctagtgtttgttttgttgtctatctttaataactctcaaaaaaaaaaaaaagctgcataaactaccataccactctaccaccacaaccacaccccacccaccccatgttgccccatctggtcaaaaagacaaaaaccaaaccaaaatcaccataaactaaacagccgaatcccaccaccaccacaccatgcccatattcaactccaaaacagcaaaatataaaataataataaaa

SEQ ID NO: 313375 - DNA, 2007 bp, Cannabis indica
agaacccagcgcaccaggccattgtcaacctgggcgttgggtcctttctcccaagcttatgagatttcatttatgacacttccaaggcttctgaacaagaggacgaggtctcctaccccatttttgaccattctagattcaatggttgcatcggatttggcatttgagcaattgagggtagcatcctaggttgattgtcaacttgggcactcggctcaaccctaggtcaacttgggcgctgggccctatttccagggagtcaggattgtagttttctccccaagtttacttaaatcttcattacttttgatgacgaaaaaaatgtctagaatactttttgctgaactggatcaaaaatagcccaggttggcaaaaggtgtcaacctgggcgctaggtcccgctttcgttccttcgaaaaattttgtttggtctccaaaaatagttgaatcttaatattttctgaagatgaagaaaatggtcgaaagaattcctgaaaaactccattttaaatggcccaggttgacaaaatgtcaacctaggtgcagggctagccctaggtgtcaaccagggtggtgggcctgttattttggcccaagaatagctgtttttccttcaaaaggatctatttccccattttgatgaagacaaatatgatacaaaagtcagatctctgatcgaacacttggaaggcacccagattgacaaatcgtcaacttgggccctaggtgcctagggcctgaggacactaggtgctcgaaaatcaacttactctaattgtgattctgatgcatcaaatatgtctatgatatgtctagttgatgtcccaatgcatgttttgaacactttgcactaagacggtcccgaaaactgaaaccctagttgtggatgtcaacctaggccctaggtaaaaccctaggtgcccaggttgctaccaggttgcaagttcatgtaattttagctctcggggcttggattaggttgctccatgtcttcattgtaatgaccgttatacttagacatggattagtgggacacttagcactaattaatatgactatgtgattatttatgtattttatgctttatagactctattttcatgaaaatatgtgttatgattattatttcacaatttcagagattttattgaattatatgtgtaatatgcatgctatctatgaattttcatatttttacatttttatgcccggtaacaatggaaatgggtcgaatgacaattttagtcacatggacacaaatttgtatcaagtattttacgatgcaatattattggatatcttagaatatcggggtttgatgaaataatataattggaccatttacccctagggttacgagataactttgcagggaaataagggcattttagtcttttcacccttagagcttagtcactcttcgaagggataggtggctctggctcatacttttgaggatgaccaactactcaggaagcaaacaaaaaggaaaagcaaaatgaaaggaaaaaaaaaaagcaaagtcataagcaaaaagaaaagtaaaaaaaaaaaaaaaaaaaccaaaatacaccttctccttctccctctacttcgtggcttccgaaccagggccaaaactcagagttttccaccattttcaagcctcttcctagctggaattcatcaaggagttcaacccctagctcctccaaacttctaaggtaaaacctaacctgaaatttattagtttttagggtttttgttagttttttgtggctgtttatagtagaacatgtttaataatgaaattattattaagcttatttaggactgtttagaagtggttttaattgtttagggttgttgtagccaaagttatgcaagtttgagttcaaagaactcaaacttaacttggttgtgataacttgaattttgttgcaaactgggttaaggtttcttcatgaaatatgttcattatgatgtgtttagatgctctgaaaaaatttggtaatgtttggatctgta

SEQ ID NO: 313376 - DNA, 1012 bp, Cannabis indica
caatttcctgccctgtgtacatccctacaaataatgtttaggtgattgtttaaaattgtaaaaagaattagatatccccaacaattttaaatagtcatgaagcatccacgacagtttattacaatcacttaaaatttggcaagattttttaattagttatctctggcggtctaattgagaacaattcagctattacctcaaattcacattcatgctacataatttcaatattaaatattacaaattcataagagaaaattattatctagtctagatattaagtcaaaacaaaatatgaatatttgcaaaagcaaagataatgttatacaataaaacacatagtagcattaagaaaacaaaaagtataatttgcctattattctaccatatagaaagttcaaactttaaggcaaaattgtttttggtttttttttcaattataatttaaaagaaaaaaaaataagcaagaggaagaagaagattaggataatgaacctttctgatgtaaagggtatgtcgaagtgggttaagagatcagtttcagataaaggtcacacatactgctgaagaccagacccataaaggcaggtcctccacctttggatttagacttgagccataaatcctaacagaggaagggaacactgaagtggactccgacgctaatgaaacaccgttgacagtagatttggcgggtggtgtcgagtcgagcagagatgatttgaaggcaagtagcttgggcgtgtcaggaataagaataggaatgcagagcctaaaaggagcagacgacgttgatttcttcaggttgaatctagagagaagattggaggtggttgagttgagaattataaataagggattcaaagggaggtttggttccaattgaaaggtcatgaatgacaaatagaacaagttaattaatatatacaagagctagacagagtagaagtgggtagaatagacatggctgcaagtgctctagagaaagggtacttcaagagacaactatggg

SEQ ID NO: 313377 - DNA, 776 bp, Cannabis indica
gggttgtagccccacacacaccacatccactcagagccaaatagggttataaaatagctctataaaataatattttataaagaagtgacaaagaaaaaatatcccctattggcactggtgctcaaataaatttttaatttttctttttcgttattatttcttttttctctttacctttttccttattagtttgcccaacaaacaccaaagtagagtgcctccttttgagttacccttaattattagcttattttcggaatatacctaaaactacaaaatgtgagatacaagcaccaaatacccataatagctacacctatgctaggaatctttccaaaagtataaattttaccaagtcacaatatgtacaatgtactgtaagcaccttttttttttccgaagcacattgaaataatgttgaacacgagggaaatgaacccaaattcacatgccttcattatattaatgatttaattttatatttactcttatataaatgttttaatttaataattattagtaaaatattttcggatagtgctaatgagctaaacgcattgcttaactattttggagtgcgttaaaaaaataagctccaacaatacaaaaattaaccgattataataaataattaatatgaagctcacgattgtaaaaaacgctctacttttttgcctaatgtttttaatatatagtattttaatcataagtaatactacgtttcattattttatttaattatataatatttaacaaataaaaattataaaaaaaca

SEQ ID NO: 313378 - DNA, 1685 bp, Cannabis indica
tatgtaagtagcccctataaatagttgtctcatctcactattaaggaacacgaaattaatcagaatgaacactcaagagtgaaatcacgatctaagagtaaattactcaaagatcttcgtaagagctttcgagaaggaatacttcatttttttttatctcataagttaatacaattgaaagcgaagtaggctattaccactatcacagggttgaacctgcataaactctggtgttttctttacttattctttgctttatattatttgtttaatcttatcgctttaattaagactcactatagttgactaaaagcaaagtcaacaaaaataaaatggaatgatgattccactttaaaaaagaaggaaagactattaccacttttcctccaaacatgtacgttaagtactcattatgaagtataggcatcacacaggcagtatcactcaactgtcagtgcgtgactcgaggtagacctttcaaaaggcatttaatgccccagacaccgaatagactctcaatcaagtcacgtcaaatcaacttcaacaactaggacacacgtcacccatccggacaacttcctagtcgaatgaagtccacatgcgaccacaaaggtctcacgcatacttagggggcaaacgttatcctaatttttacactgtgacgtggcacctaactggatgacacgtgtcttacatttctcaacctggacgaatagttttactcctagcagcccatagagattgatgtggagatccaagacatacgtgcatggcaagatgtccgagcagagtcattggtggacatccgacaagctcgatcccgtgatcaactcgcatgcatcagttaggggatgtgagttggcaatttcaaaagtgattgataccatctctaaactttcatgtcacgaagcaatcaggggcggagccagcataaaaagttagggggggccaaactatattataaatttaagtataaaaaatctcaatatttttattaaattcataattaaaattaaaatacataacgtctttcttgcatatcacgaaaattatcgataagtgaatctatactaaattttttggcaatttctctttcaatatacacgagcaaacaatcacttaaaaattcatcttccatcttgttgcaaagtgtagtcttcactatattcatagctgaaaaagattgttctatggtagctgtagaaaagtataagaataagagttatcatcttatacacaattagaagaatatctgtttttctaatgtttaccaaccactaacataaatcataaatagttgcaaaaacattaaatatagatgttattttctatcttaataataaataatacatctatagaaataatcaaaataaaatataattcaatcactttatttataaaatatggtggctcatgtaatatgtatgaaatgagagaagaagaaaagaatagtaatacctaattatctatgaaagaggaagaagagaataataatacctaattatctattttgaaggtcttttaaattttttagttttcactatttttattattgtaaaaaaaattaaaagaaatatgcgtcttggaaaataattgcctttaaaaaaggaaacaaatattttctttttgacaatacataaatataaggctaattaagatttttaccccctgaactttgacatgta

SEQ ID NO: 313379 - DNA, 1096 bp, Cannabis indica
tttcagcaactctttaccaaagctaatagaggttcggatctgttaaattccctccacagatgtgttcctcatcgcctaagtaatgctgaaaatgaatttttgctggaacctttcactagtgaggaagtaaaggcagccatattctaaataaatccccttaaagcaccaggaaaagatggtctcctggggcttttcttccaaaaaaaaactggagtatagtgggcaatgaagtcaccacggcctgcctggatgttcttaacaataatgccgactgtagaagactaaatgaaactctgatctgcctcattccaaaggttcaaaagcccactgtgatgtctgaattctgtcctattagtctttgtaatgttatttacaaagctatctcaaagtgtttagcgaataggatgaagcaaagcatgaattcagtaatttcagccaaccaaagtgctttcatcggaggccgaattattcaagataatgccattattgggtttgagagtcttcattgtatgcgcaaagggcgctttggaaatggaaagaaaatggcggtgaaactagacatgtcaaaggcgtatgatagagttgaatgggacttcttggaaactatgatgatgtgtctgggttacgataagatgtggactactaagatcatgaattgtgttcgttcggtctccttctccgtgcttattaatggctctaccaaaggttactttgttcctgaaagaggcttacgccaagttgatcccctttcgcccttccttttcctattgtgttctgaaggtctctcttgcttaatttttgaagctgaacgggctggaagaattcatggcttacggcttgggtctatggagcaaaaactttctcatctcttatttgcggatgatagacttattttccttgacgcaaatatggaagacagcttagctctaaaaggaattctcgaggattatgcttcattatctgggcaatgcataaaccttgagaaaactgaaatgtgtgtgggatgtaagattgatgactccttggccgatcacttagctacaaatttggggataactcttgtcaagaatcacaccaagtgttggaaattatttta

SEQ ID NO: 313380 - DNA, 1188 bp, Cannabis indica
gagcccccatacactcgcaccaacacacacacgtagcacaacactcacacacacccacgactcgcatgcgaaccctcagcttgaaccaacacaccttttcacatgcatgcacacgacgctcatccacacatgcatgtacaacctctccttcttacgctcatgcttttgtcattggatcaccacaagaccaatcatcgaatcgcatgggtgcatctcgagaattgcaagtatcgatggcagcattacgaaatacataccgagtaggtaagctcattgaagtttctttcgttaattgctgaaagattagttaactaatcttggaaataagtagagctaatttttggggttaacacttgttccccagtctataagaattcttttaagtgttcttgtcgactaagtgagttggagaattttccttgctgaagtgtgagatcctcttagttttcttcgaggaaatgccccctttgccttggggacatcccttgcttgaaccttattttgtgacaatatgttggtgtagtggatttttcttaccttggctggccctctcttccctttttttttactgagcaacctcatcccggcccatgcggtgaagcaaaaattttacttgacattggctgaacgactgtgggggtcgctctatggcctaaaaacattcataacttgcgttggccaagcaactctggagatcactctttggccaagccatttttgtaactgcgttggtcgggcgactttgggggtcactctttggccaagccattttataaccggcattggtcgagtgactctggggttcactctttggcttagccattttttgtaaccagcgttggctgagtgactctggggatcactctttggccaagccatttttttgttgtggtaagtgggcatccatttaagggagtatggctctttgagtagtctcaacctcttatcatttattcatccttttactcgaatgggagggagcttatggtacttgactgcgctaccgtcttgacttgtaattatttgcttacttttgagaggcgtcccccttatttcagcattaggccatgagtgtctttcgagacctatgttggctaggtaacttttgtggggagaggtatatgcatttctcttttcgactaaaggtagctagtccttgtcaattttaaaaatttccctctctctctt

SEQ ID NO: 313381 - DNA, 765 bp, Cannabis indica
ctaggatgtgatattctaaccaattccaactttcattgtaatatttaatttcgcaataatatacatttactatttagagttagaaagagagtttaatacacacactataactacacatcgaaagcacctggtagcttgatacagcctaaatgtgatatatgaatttattatatttataaatgtgaatttaattatatatatatatatgtgtccccttatgacccttctatttaaggtaagacaagccatcaaaaaataaaagctgtggagaggggtacagttatgagaagcggtgataaagtggaagtggacaaagatagatagaatgaaaaaggaagagataaataaaaatattaattgttactatatatatcaccattgctgttcttacatcttaatgcaacttccaataaagacatgttggattaaaattttttattgtgggcacatatgtataattaatgtatatgctattacaaagtgtgatataaaattaagtgaccaattatgttatgagtatcaaaagggtattaaattgtcatggaaataatgtatagatactataagttaatttataatttgttgaggagtcaaattatatatattcaaaactcattatataataagactataaataggtagcgctccccaagaaatactagggtttctatattctcttctttcccatcagagaaaatactttagaaagtgtattattggaagatcataattttctctgcaatctccaacaatggcttcaggtta

SEQ ID NO: 313382 - DNA, 1918 bp, Cannabis indica
ccaataataatctctttccatctccattacctacaaatcaaatcaatatgttaatattatatgtatttatcttagatgataaaaaataaaataagtattacaatatatatatatatatttaaatttacactgcaattatactaaaataaataaactagcatatatatttatctatatttaaaagttttttttttttaaaatattactagaaaattaatatatattatatattataaatttttagatatatataattaaacgagcattagattgaatcagttactttttgagatcaaagaacattcaatccgcacaagtgtacattttaaatttttcaatccaattcaatccgcgtacgtaagtgcgaataatctgcatttttatagattggattgaattgtgcgaattgaattggatcggataatttgtgaacaaccctacaatgtatagtccaatattatcttaagttaacacatacatcgatccaataggccttacaaaaaagtataaaacttaggcacactatcgagcctacatcaacctatcatcttcaacttttatccctttcgaataacaaaaatacaccatgcctatatcgggtgcattagaccaggctaaaaactcaaatttacccgcaaacatatattcgatcattattccaacactaagtttaacccaaactcaaaaattatagacctttaactttaaatttaattttagtttcaaattttattgtgactaaaagtaaaatattttgtagtgtaaataaacatatcaataattttatatattttaaccttaataaatcaaaaaaataaaaaaaacgaatccttacctttaataagtcgacactgccgatggagaaactgttagatttataattactgcatataattatgtaaaattatttttttgttatgcacacgtatattgtactagtatatatatattttttctgaatatataatgtatatatatatatatattatggtacattctatacgagtacagactacaaaatagtgtatttaatttgttgaattaatgcgtgcatgtgtttgctctgtttacctaacaacatataagacaatcaatattattatatttatgtaccaagcaaccaggcaatcatatttaattaattatctatacgtacttttgttctctctactgtcccatatatttcattgtttctttttttaaatatatataagagttattttcatggacacatctagtaactatagttaatttaaacacggtactcttaacaatgacaggatatatttattctatacactcaaaatgtatgatatatataaaatatattttttttagaataaatgtacaatgaattattatcatgtatttttctacattatcttctttgatcatattatatgttattattatttgaagaattcgatctgttttcttatataattattttgggacatatatatatgttcctattattttattacacaaatgacaagacaaacaactgtaaaggaacaaaagaattcaatctctcaaatgatctctccctctctccctctatgctaaaaggcaccagtggtgtctagcaccctattatgcgtcaatattgctattggtctaactaaatatcggtcttatataatttaatataatagttttagggtagtattactagccaatcgcaatacgacatgtcgagatagtactaggcaccattggtgctctatagtaatgctattattttaattacccgaagtacaagaatgtaatttaataattgaaaagattaaaagaaacacatacattatacatataatacatacatgtacagataacagatataccatcttttattatttctgtttcgtacgtgtttaattaagtaactgaaaaagttgaacacgtataccattaatgc

SEQ ID NO: 313383 - DNA, 704 bp, Cannabis indica
taaaaaaatggaaaaaaatattaattttttatgtggcaaaagacaacataaataataaataatctaaaaaaaagattattttattacaagttttgaaatgaagatatttattaacatagatatataatttgaggccatatactataatttccctaaaatatattatatgtaattggttacttttgataattattatatggtgacttctaaaattgtaaatacgatatgttctataataatttttatttacttttataaaaatccatttgctttctttttttcttttaagacattaattttcttctttaataatattaattctctttgcaagatatgtcattttagattttttcaattgtaggtataaagtaataattcttattcttatttttgcaatttttatagctaccacaaaataatttttttttaactatgaatatagttaaaaccacactctccaacaaaatgaaatgaatttttaagtgattgtttgttagtatatttttaaagtgaaatctctaaaaatttcgtaaaaattcactcgatgactttttatgatatgcaagaaaaacgttttgtattttaatttgttaattatgaatttaataagggatatttgtagtaaaatccctttactatttgtaatttttacacatatgaccctaattaaaaaaagtaactgcaaaagtaccttattttatgat

SEQ ID NO: 313384 - DNA, 762 bp, Cannabis indica
tttatgtcgcaatttaccctattttaaataattaattagttggaaaataacctaattttctctttcttgtataaccctttgactataaatacaaggtattagagagctattctttacatttgattttacaataaaaaaagctctctaaaaatattatataagccacctatacacttttctccttttctcttagaattagaaaataacatatttatttaaagatagttcttaaatcgtgttcaattgaagttttgggttcaataattgacaatactctatgaagaaaagaaaaaaatgttagatcattgaacagaaatagtcatattctgctatgaaacaatcactgtaagtattctaaaagtcatacatataattctatggtttttgttatctgtgaatccggatggggacacgtggaattccaccatcggatacaatgtaaatactctaggcccaacattgggccaaaataaaatattgggtcaggcccagaagcaaagtcagttctttctaggggtgaaaatcagtcggttatggtcggtttttaaaattttataaccgaccggtcggttacggtttttaatttacgaaaaccgtaactgaccgtttagaaattataaccgtataaaactgaccgtacggttttgggcggttttcagtttggcagttttgggcggttttaggcggtttttgacggttttaggcggttttttagttaaactattttttatttctaaaaaccaaaaccgaccgccatgtcaa

SEQ ID NO: 313385 - DNA, 1307 bp, Cannabis indica
tttataaatcaaatagacaagcatttgataaagtgaaccaaaacatacacaaatgaatgaaaaatacttctgtttctttattgatgttgaataaaatagattacattgaaattgagttttatttagggcataaaacctaacagcttcttcctaacatcacatgatttactgtgttaaaacatctaatgctggtactttctttcttgtttatctcttttattactttgttttggaaatagtactgtgtaaataagtgttttccttggcagacctgaattaactggttatggaggaatgtctataaatggccagtcttttttggattgaaatgtgactctccttattcttttctaccttttaataataaagaaggcattccttattgttacatagtctacctattgttcttttaagatgtcaatcaaagagagtttcctagatattctgatgacaaaatttcaatgtatgtgtaaaatatagttaatgaattgtttattttattcaatagattaacatgtatttatataccaaactagagatactaattaagaaactagagagaagatagaaaactaagtaattacaattatttttaatttttacaactaatatactctaatactccccctcaagatggagcataaatagtaatcatgtccagtttgttacaaagataatcaacccacaacccattcaaagcttttgtgaaaatatctcttaattgttctttagtcttcacatatcatgtgcagatcaaacctcgttgagtttttacacgaacaaaatgacaatcaatcttattgtgcttagttcgcttgtgaaacacaagatttgaggcaatataaagatcaatgtaattatgacaccataattttgctagaactgaagtcttaaatccgacttcagtcaacaggtgataaatccacatatctcacagagagactgttccatagttttatgttatgattctgcactagatctagacacaacattttacttcttactctttcaagagatcagattttccccaaaaatgacacaataacttgaagtagatcttctatctaccttggagcctgcccaatctgtatcagagaaacacttattctgagtgtgtccatgatccttgtaaacaatacctcgtcccggtactccgttcaagtagcacaaaatttgttgtaaagttttccaatgatgaattgatggaaatgacataaactgactaacaaaactaactgaaaataaaatatctagatgagtcatagttagataattcaacttttctaccaatctgtgatatttctcag

SEQ ID NO: 313386 - DNA, 1301 bp, Cannabis indica
tgtaatttttgtggctaatacttctagccacagattttttaatcacaatgtaagaataaaaatttataattagtcactaaacttcctaacttttagtcataaattttgttgtgactaaaagaaaaaatttttgtagtgagtaattgtcactggtttaattttagttttgtgattaaatacttttggcaacaaaatttttactaataacatatgtattagttacaaatttttcatttttagttacaacttaagtaagattttttagttacgattttaattttatgtttttttttaaatgaaataacaacttcattgaaatatatattagcatttagagtacaaaagtgtttctagatcagcccaaacatgctcgaatatgctacaaccaaagaaaaatcgagaatataataaaagatatatatggtaatagatagatataatcttcattcaagaccaagaaaaaaagatagaaagtaattaaattttatttctctttccttaaaaaaaaagaaattttatttcccttggtgatagataatatgcatatataataatactaatgattatatgcttatttcaagggtataccacaccataattagatcactaattaattaaggaaaaacctcaattagtgtctttacaccaaacatgggtgtaactttacagctactaaaaccagcttcaaagaagattttctcccaatcctttttggttctctctctcccagtcaaagcagtcatcattaacatatcaaagtagagcaaagtctccattgctaaatgatcttctgttttgctatttatgacattattgtctattatcagaacctttcctccaccattccttgagattgcatctctacaattcttcaaaatcttagtgcattcctcatcactacaacctgataaaacacactatacaaaaacaatacttatgataacactattttaaaagaaaaatgaaagtgttatagaaaaggaaataataacataccttgaatagaattgcatcagcttgaggaactgtttgaaacatgtcaccttcaataaacttcaagttttgagtattgttatgagaattggcatcaactgcataggctagatcatacactgagcattgcaagtgtggaaatgcttcaaggagcatcttacacattaatccggtattccctccaacatctaccaatgtagttattccctcgaaaaccgacttaaaatccttgagaacaaatttcaaacccccgaatcacttccatccttcattcaacgatcaccaaatccatcagtattcttccccca

SEQ ID NO: 313387 - DNA, 978 bp, Cannabis indica
tattttttttatttgggcccctaggatgagtgggctctaggcgtgggtctagcttgccttagcctagggtctgttgccctagctgcaggtcttcccttgtgagtttctcgattgaagctcacttgtttcttcgttgaagctagtgctgctccattcgtggaatatttatcctttctttcatgccagcgtggtattagaatattttttatataaggcataaaattaatttattaattttaacgtgtatgagagataatgaatattttatattcattgcatttgattccaattgattggttgatattctatatattgtcggattacgatttatcaaataattcattttctgatttgattttctgaattaattattaaaatatcttgataactaatgtggcaaagatactgatggagtatctcaccaataaatataaggccttggtcctcgagctgctcactcgttctatgaaaatagctaattccatagatctaaagggagtagagagcttggaaatttgattaccgacacaaactagtttctttttcttttgtagatccaaagatcgtgtgggattgaagcttaaataatcaatgactggagatatttcgatcatttgttcacaatgcatatatgttatacccaaaatttagctatactccagaagctgacacgtgtccaacaaaaggtataggaatcaactctacagatataataatattatatgaataattgcatattaaataactcgttattcaatacatagaggtttgatagataatattcaaaactcgttgactatatggtcaaaagcgagacaaggataataacaattgagttgagattaacgagacatatgcatgcctcagaatatacagacaagaagggggacattcatccattcgagtagaatgaatgtaacaacataactgtctcgcattacacatagcgagaagatcacctcactatgttaatgccaa

SEQ ID NO: 313388 - DNA, 1155 bp, Cannabis indica
atattaggagtatttttaaaaaaattatcttaggtttaacttttttaaatattaaagtgtatttattattttgtggaatgtaaatataattttctcatttataattgtaagatattctatttaccataattatatataaaggaaaaaatgttttgaaggactattattgttcttatgatagtgtcatatttggctcctatgaagaagcaacaatgtaaaagcagtaaatacacatagatgcgcctgagtttgatgttaacatcaaagaaaattcaaattcagaaaacaccacacaaattaaaaataggatatatatacttatattaatatgatgtaggaaaaatatctagttcaattcctataaagtaatatttcggtagattttttatctgctttaacatttaagacaagtttttagtttaattcttttttccatgatcgtgtagacggtatagttttttaataccacctacaaacagttatttaacactcgtatttgtatattgttgcccttattttctcccaaaatacgtggacctggataaggccgacacgtggatctgtgagaatcaactcataaaaaatcgactaagtcctaggcggaagggaagtatctcaaggaggtatctcccggaggagagcacaagtatttctactctccggaaggtcggaggtatgctaaggcaatttcggggaggtgcagagatctcttgaactgtcacctcgcatttaatgccgtatggggaaagacgtattaaaatctccataaacgaaatagatggcgtaacccccttttcggctattacgctataatcaataaggctagtgacggctactttatgaggaatcacatcaatcaagagggcataaaagattatacccacctaactactcctaagatacctacggtataggtcatgtatttcctattttgtatttgctgggaatatgggcccctatgaagctaacactgaaggacaagtgatccatttttagggatcacctcagaaaaacactataaataccccacaaacagactaataaagggtcgagatttctgggttaaaaggaatcaaagagagaaactattagagaaatgcaccaagaacataatctgaaataaatactctcattaataacaaagactcgtggact

SEQ ID NO: 313389 - DNA, 1092 bp, Cannabis indica
gttattggattttacatgagtctcacaaaagtaatataatcttatgtttcaaaacaaaaaattgttacagtaaaaagaatactttgagacattgtaatttgcatttattatgttctgtaatgaaaattttgtatttgttttttttcttattattgattttcatggatgaataataacaaacacaataacagcatgaatgattactttttactgtttacactttacaattcaataacaataataaaggtaaaacaaacaaacaaattaataagatagtctactacaataaatttcattacctttgcttctctataatcttgttctcactagcttttgttttgctaataaattgccaatttcattggtgggatattcttgttgtcttgctccgaattgaccgttgttaataaaaacccttcaatactacaacataacgagaattctttggcggtagtttttcggttttggctttggttcatcagattggctcttgccttgctgtaatagtctccttttcattagcagcaagggttggctttcgttctgcttttgctacgagctcattctgatatgcttgctcttgccatgttgttatagccttgtggactggctctttttatgcttcttttacgacctcattctgatattcttgatcttaccatgttgttatagtcttgtgggctgactcttgttctgctaatgcgacgacctcattatgatatccttgctcttgcctgttgttatagtcttgtgggttacctcttattttgcttctgctacgaccttattctaatatccttgttcttgctatgttgtgatagtcttatgggttggctctcattcagcttccgctacgacctcattatgatatccttgtttttgccatgttgttaaagtctcgtgagttggctcttgtactgctcccatataatatttctctacataatcattatttggttcatgttgtgccataaatttttgtctttttgtttgcttctttatgctcgcttttaattttattcttcaattcttttgacatcgttttataaatcttgcataatacctacactactacaatgttagcctttagag

SEQ ID NO: 313390 - DNA, 1322 bp, Cannabis indica
ggttgtgtggtttagaacgagtttggggcacttaattatgttctcctctctgatattgacttcttattataaggtgttatgtatatatatttatgaggttgggacgttattatcgccataattaagcttagctatttgctgtacgtctaaggttttgttttaccatatttgtgcatatttacattcgaatgtatatggttaattacaatgtataaccagcttttattttctattattttaactttagtttttttttaattctttaatgtatgcttaattttataggctattactaatacttggggcttaacatctctaaattttggtatcattatttacatttattgctcgtattttagctaaaatttagtcaatacatactttataaataaattaatatattattaatatatttatatcttattgttattttaacttatttataataaaaatacatatcttattattattattattagtggcaaaactatctaaattctatgattagtgatatttaactacacaaactgaattttttttggtaaaattctcctaaccttaattcggttagctattacccctttcgttttaaaaagcaatgttaagtgccacggtggacataccatagtattcacatgtgtacacgtgacaaatttttagtggaggatattggtggaaaaattacttgagctctatgattagtgacacttaaccacataaattaattttttagtggtaaaatcctccaaacttcacttctgttatctatttacccattccttttaaaatgctttgttaagtgctccgggactcgaaccgtcagatctccccttcctttgttagctatttacccattatgttcaaaaggctctgttaagtgctctgcgactggaaccgtcaaatctccccttcctttgttctttgttcttcttcttctatcgcgatgaacccactagaccacgacaaacccaatgaacccaactaacttcctcgactatggtagtattgacgaagagttgtgagagagggagaatcagatcaggtgaggttgaggtgagaaagaaaaacttcaaagaagggttgggtcttggggcttaaaaggaagctgaagggttgtgtttgtaagatcgaaaattcgattttgggatttgtttatttgaaggtggccggaggtgacttgcaggagctgtgcgagaaggagaatggaagagagagggagtgcgggtggaaattagggttacatggtgtataaaaaaaagaataagatgaaaaagaaaaaaaactaatttaactattttataattttaattattttaaatatt

SEQ ID NO: 313391 - DNA, 1473 bp, Cannabis indica
caaaatggtgtcttatgcaattgttcctaaaaaaaaatatacttatatataaattttaaatttcaacttcaatattcaaatacaatttaaattatcaactataaattttaaaatttcaaattgaacactataaaatacaaattttaaatgtaaaatagtttaactgttaaacgtaatttatatattatgttataaataattttagtaaaaaaatatgtaaattggtttattcaggttatttgagcgggttagaataatattcaactcaccccatatattcattgggcggtttgaatttttcgtaaagttatccgggttgtattttttgttggtttatttcgtttggtttgggtaatttattcaggtttggcggtttgttaatttttttgaacagccctaccttaaactagtcaagctattcagctaaatttaccttatcctatatcattgaacatttctatataattgcatttacaaaaaataaaaaataaaaaataatttctaggagttaatttttctttttaaatttgagtaaattgaaaatattgtgagttttttatatttttttgtcaaaaaaatagggttttttttttttcaaaaatattattttatgagaaaattgaaaaaaaaagattgaaaaatatgagaaaatcaagtaagagtaactatgtaatcagatgccattataataactagagaagtaagagataaatgtgtactttatgttattttttttcataatttttaactttttctctaaagtcttctcataacataacttttttaagaaaagaccatatttttacaaacttatactttaaaaacaataaaatgaaaatttttccttaaaaattgaatttcaaacaaagggtataagcaagtaagcttcttatgaaatgttagctttttttcttctcccatcacccaaaatttaggggcaaaagataattttcaataaataatgttaacttaaaattttgttaacatttaatgaagctaaataataaatactttgaatgtatatatataatctagaataaaacgattaatttaatatgaaattaaaaacaaagaatttttaatgtggttttatagtttattctacatacttcaccattctattttatttatgaggttgttatgaacagggatacaaattgataaaatttaactaagttttttgttgtccctttcacctatgtgtttctgtcatttatagggactagatagcagttatctggtcctgtctatgtaacagtttatgaaacgtggatagtgatacccttgttcctaaggatgccacgtgtatttttggaacataatttagtaatagtagattaactatataatcaaatctgtgataatagtaaaaacttcaccaattgaaaaccatagcaatgaataagatgacatcactaaaaatttattttgggaatcccttgttacaaaattttacaaaaagagttatataca

SEQ ID NO: 313392 - DNA, 2768 bp, Cannabis indica
aaatttgtatttaaattttaataaacacattataataacatatcattacatacttggtaaaaaaagtatatcattataaatattatcataacaaatatattagattaataattaataaacattatcaataataatataaatattgcaaaaacgagaaaaactaggattcctaaaaaaatgccccaaccggaagatcggttccccaaccgaaattctaatttttatggggtttcctaggcaccaaacggtccaccggttcctacaggtccccctaaattagtcgaatggttcagtgcaagaaacactcaaaacctcactacaccctcaaatcgaccccaaacttttccaaaccttctaaacctgctaaatataccgcaatagacatatttcatgcaacaaaacatcacaacatactcaaaatcaaaaattaccattaaagactaaagtttgaattctaaaactcaaactttgtctaacaaccaccacaagccctaaactaacttcgaagcaactcaactaacatcaaaataactacataacacaccaataaaagcaaaacacaaccacaacaaccctaagtccaaaatcaagcataaaccttgcttgaaacttaaggaactacaaagaaaaggtgttaagatgtttaccttgggttgattcactagaaaacttgctaaacttccagaattaagctgaagaaccacaagccctaactggcttctatggagctcgagagagactagagagaaaaagttaattttcttcttgatttttcttactttgggataaatgaataagtctaatcgtttttctgattttattaaaattatattcagatcaataaagcttaactaaagctcactaaaagacaaagaaatcccttggcaaaaagaccatttcgccctcctatatactaaaaactacaatagtcacttaggggtaatttggtcaattctaacatctctaataatcccaacattcccaatttctaactatattgccccgctactactaaaatactaaaatgtgattctaatggccaaatgccgcgctccaatgttgcagggcacaaacgtacaaaaacataaaatgtcatgtatggcataaataataagtcctgaattcaaataaatctccataaaatgttaagtcataattaatattctaatttataattaaatcctaattatctactaattctaaataaaacaaagcgagcattacaaatgtagtggccgaattcaaagtaccttccgtggtagcaagattgatcacatctgtcgtgttcatgggaattccaattgtggttggaacatggacatcaggatcgacaggctgtgggtcttaaggaagacctatagatgcagatggtgcaatcaaatttcttctcgtgttaaccatggtatttgatcagatatgatatcgactcgctctcaatgaaagcaccaaactgttaacctcgaatagtggccaacaaacactggagtcgtatgaatctgatgtttgccacgtattacacaattaaaacttagaagaaaacaacacaaatacttttatagaggttcagccccttagttggcaggtaacgacctactccccttttagttgtattgatactgagggataatactattcagatcactataggtgggatctaatatagctcccttaaggatacaaagtaggaatcaaagatggcaaatctccagtgttgagactgcttgtatgggtgtgtagaggaaagagagaaagagagggatatcagacttagagatttaggcttagaatgaggttctagcattaatgacttggaggctagaattagacttagggttttttaggttagagttaaggctctttatataggagagcttaactctaatttacaactgaaatacttagttatttgtatattaaattgattaaatacaaaagactaaaatgcctaaagatagatattttctagctacttttttgagttgttagggcccaattcacagtccaacttgtagtccacgtgtaaagctgtatagaggatcctgcaaggtgcattcctagccaatcagatacctgcagaaagtaggctgaccagccttgtgttgtctagaggctggctagccatagggccgaccaggggtggtcaaccatagatacctttgaggaacctggtatgtcacttgttgtcccgtttgagtgtcgggatccccgttggccaaggttctgactagacctccttgttggtgagttgtattgccacatggcactgattttatccatgtaagcaatgccacgacaggtgggaaaaaattgggataacactctaaaaccttctacagcattctaattcctctaaaaaggattaactccttaaatagacaaaataactaattcaaccaagaatctaataactacatggaacattacaaattttcccttactaacacaacacgtctctactaaagcattagggatagaatggtcacaatccaagtaccacacatagtctcataattcaaactatccataaattataccatcatactattagaatactagttggtactattgtgacattgttggccaatatatcaagttttcactattgttgagcaaatatacatggtgttatctacgtttttggtataggatacgtggattccaagtcaacacccaagacctatcatttggaccctcatcaaaggtagagtggtccgagcccacttggatatgtccttccaggaacgtatttttggaaatttattttacca

SEQ ID NO: 313393 - DNA, 586 bp, Cannabis indica
tcagtttctctaatgtatgtagtatgtaccatattagtatgtggtaaccgtttatatagttaccttgtgttaaaaaaaaaatgtggttgttgttgtgcttgacttttttagtataagtaagatatcatgacattcaatttggtactccattctcatgctcaattctcatgttcataattggtagtggtgcctcaccttactcaattgtcaactatgtatagtataatcattttcatttaccattttttagaaagaaaaaaaaataactaattacaatagtaaaaaattaaaagttaatataagtgcatcaccaatagaatgctaaaatttaaaatattgatactataatagtatgctaaaatttgtgttaaatttgttattttggactctgtgttttgtaaaagttattgattagaccatttattttgttaaatgacaagatagaccctatattttttaaaatggtataaataaagctcccagctcaattttcaacaatttttttaatataaccaacttgaagacaattcttaacacgaacaaatgcaataaatgtaactgttgaccgagattttcggcaactatt

SEQ ID NO: 313394 - DNA, 1912 bp, Cannabis indica
ttaataaaaaaaaataattttttatacaggatatatataattgcttacttaatataattttttttttttggtgtacatatattatgagctcgacaacacctagtcaagagacatcaatatttggataagctcttctcaattaatataaagttatataaaaatctgaattacgtgtagaattagacctttgatggaaagcaaagtggtgccttattgagttcttatcctttaatttaggaagagtttaaccatacatacatatttatttaaaaataattaatataatattaggtacggtgaaccattggacatgattgagactttgatcaagagtggagactatagtatttttctctaaacatcttccacatgggttgataccctacacattaggctaaccacccataataatatatctctatatatatacatcaaaagtaaactcaaaaataaagaaaaataattaaactttatagttataaactctccacctaactaaacctaataaaacattatcaaatacacataaaattctgcacgtacggacaaaataagctttgatcttatggtataaacatatattctagtttgagatatacatatttatatcactcttttgttgcaagaaaacataatttagacacccatttggcgtaatcaaattaggtagagtgaactatattatattacataaaactctcaatttttcttccatcacatgcaatccaatcttggtatatacataaccaatttcttaataacttaaacttataataagttttggtgtgataattgattacatttacaaaaaatatttgttattgatgttttggaaaataactactcataaaaaaaaactcaatttgaaagcttagtagtatcggtaaagtgagttgaaaaagaaaacaatgaccatgagatcatgactttataatgacagtttccaaacctgtactcttaataaccaattaaacactttgaatgaaaaattaatggatcacattattcacacataaatatatattattgggaagtttggaaaaattgacataattttgcttttaattaatgttatataaatattataaaatgatattatttcactacaatcatttactaattaacaacttttaagtcacaaatatagaatccaatttgtaataaagtgatatagttttagttaccatttaatatataattcaagtatttcgtgactaaatattttttttataaaagcctattaatttttgctaatgcacttttaaaaactcgtaaaatagtttgtgtttgtggctaatagttataaataatttttttagtaacagaaataagtatgatgatattagttttacaaattttttcttcgctaaaataaatattttctaattttattttaataataatttataagaaaaaaacttttcaaaatttgtgaaataactcaatatgtttctaaatgaatatattttacaaaatatattaaaaaaaccgtataaaattttataaattattgatgttttataagattgagcaatgctatgaaatattcatggtgttacaagtacctaataattagtatttttcaataataataataaaaataaacacatggtatatgggaatttaatataaattaagagcattattattaaacattgtcgaatatcgtttgaagtggccctatataaatagttaattcacaattttctataatgaatattattaaattaaattatatgaggcttgatattaaattatatatattagtagtatggaagcaccatacgtgccttttaacatcaatcttaatttgaaactctactgcaatgctactactaagagtactttcaatagatgagctaaaaataactcaatctttaaattatataataaataaaaaaagttgtaattt

SEQ ID NO: 313395 - DNA, 1947 bp, Cannabis indica
caataaaataaaacttatattttgactttaaaacatacacaatatttagagctcgtcgcaagcgtcaaaaaagtatatagaacatcaaaaacggacacccaactggaaagttatgacaaaaatacaatttctaatctcctaggaatttcaaaaaactgtagaacacaaaaattccaaattttgtactcaccgaaacactcccaaaacctatccaaatcatttcaaacttcataaacacatatataccatatatactgtaacgcgctggccaacagggacgccacgtgtgtgtttttataaaattcttaattatatactatataaatataccaaaagtgtgggtaattaaatttttgtcatttaaaatcatatatataaaacttctttatagttaaagataagtaatgataactatggggtccccctgttttcaaaatattataaactagtttaatagtgcttttacaacataaactttgcaatcccaaaatatattcaaaatatagcatcttgttcactgggtcgtgccactgcggctgatatgtacattgttgccacgatctcgaactcatggctgctcaactttttccttccctttacctgcaccataaagcacctgtgagtcacagagactccacaagaaaactgaataaaataataaccagcaatattaagcaattcaatttcaatttaacttgcatacacattcacatgatattataaacacaatcctggttctttataaagtacccctttaccactcgttaaccacgagatgaatatgtcaatatcgttgcccgatgaagcaaatgataagtaagaaacctatccgctgttttaagagtaattactcgtaacggtaacaaccgttctcaacactaggtcacaaccgaggctcaacatacatatattcagaatcttgataatcaagactataatcattcaaccgttaacacttagccacatatgatgcttgccacttttcttaccttagttaagaactcaagcgtacgggccgacctgagtggaaaacaagctaagcgatcttgcgtcctatgtcacgacaaaaatattttataaacaacttatccatattccaaacaaaaccctagccccataatcgggcaaaattctaactctccactggtttaaaatagcttaaacgtcactaaaatatcctattctaagttctgaaaaacaccctgagcgaaaccggtttcgaagccaaaactagagttttcccccactactgcaaaaaccggtcgaccgatttcactatgcctgtgaaaccggataaccagtttcccctgctgcacaaaatggaaaccagggtttttggctccaaaactgaaccaaatctcctccaaacctgttcaaacactccagaacagtgtactaacaataatacaacatatcccaagcttcaaaacacaacaattcaatctttaattccaaattacatgcttaagtgaaagaaattcaacttttagcttcatctaacacatttcgatccaagtagccaaagaaacctctcaaaaccattctcaacacactcaaaaacctaacctaaacacaactgaaactcaatctaatccctacagccacagaaacacaaaaccctaaccttaaaccaacaaaaattcatagaattcacaacctataaggtgtaaacttacctcaatcacttctaggttgatcttaggttcaagaatatgctccaaaagcaaaagaaaaatggtgtggagagtgtctcttgctggttggttggcttgcacgaaggggagaagaagaagaggaggagaagcgtttggttccttgcttgataagttaactcttaaataggtttttcttttctttttgttataaaaactaacttgccaaaaagactaacctacccctcaaaacttaactttctaaaaaaagaaacctaggggcattatggtaatt

SEQ ID NO: 313396 - DNA, 1048 bp, Cannabis indica
actatcttttgagttcgcaactttcccaattattttttaaaaaaacaaaaaagaaaaaaataaccaatcacttttagttatggtattctccattgaaggtaagcttgagattaacactgattagtttaatacactttaataaagttaatagatttgaaatgagagagttaaaaatggtgttgggttttggagttttctcgtaaaaggaagaagcgcgcgggtcaatgtgtgtgtgtgtgacagtgagagagagagagagaacagtcattgctttgcattgcactgcaatttgcagcacagcggtatcagtgaggagagagagagagaagggcaaagcaaagtctgtcgtacgacagagaatattgtcagaggaaaacacgcataaatataagaccgcgaaaaagtgggtttgatttcattttgttcgtttaacatatcaaattacatatttatccttcttctatttccttaatctctgatttttttatttcttgtcttcttattagtactaggtgaggtgtacttaccttacctatgtcatgtagttcatcgtacctgtgtaacataattattggactatgccctaattttaacataatttttttaaaacaaattgagtttcatgctctttacactattgtttgggtaaaaggggagagattggatttatgaattttattgtttggcaagagaagttgagtaagcggaaggaagaaaagagatgcatggaatacaagaaaaagattaaaaaaaaaacatataaaaagatattactacatgttataaaaagagtgcaatctgatgataagtggacaggcagatttagttttgaatgaaaaaagataacgtgccaatatagtggccctcatagagccaacttcgcacgacttaaacttgcgagaaaatgatcgagataagaatctagtcgcatactatgattggtgttacatgcgtgctaaaatggcacgttacaagctaagtgatgcccacaagttggccaagttgtaacgcccaaatgctaaggcacgctacagtgtcttttttcaat

SEQ ID NO: 313397 - DNA, 610 bp, Cannabis indica
ttctattctcattttttattcacatttatattcctattcttttattttcatgtattcagtcaaacttactttagtgttgtgaagttgtggtagtgtctaactaattcaaaagtaatcttgttgaattggcatcatctcattggctgcataagaaattgactacataggtcgattgtgcaaaatcacacgattgtcctaatttttgatgttgtagttgttgtttttgccttttcatttcaacttccaatatcatattatatgaggttttcaaagcttctattaattcaatgttttgactcacttaacagttaacatatggatcaacattcgtgacttaaaacaacttcaattggtaaaatttataaatgggtgactattaacaattacattaaaaatatgtaattatagtggttatattttttcttagaagataatctccaataagagaggtaagaattgtgctatacttagtataaaaaataattttgtggtaaatttatatcaaattttaactttgtgcttcaatatacaattgcaaaattttaatgtaaaatttaatatctaattaattttttattaaaaataaaatctaataactttataatcaatt

SEQ ID NO: 313398 - DNA, 2646 bp, Cannabis indica
aaagaaaacatgcataactcaacatatattcagccatcaaataccaattaaaatcatatattctcaccacataaagtccagtaaaggacaaaatatcattgggacaaaataaccattttgctcctccacattgaaataacttaaagggtactaaaagggtattttttggaaattctaaatacctgaccactcccgacattcccaatgtctaaataaccgtcccatattactaacatactaagttgtgattttactgagccaaacaccgagttccatgttccgggcaccggaaatgcaaaattatgaaattcactatatgacataaaatgcaattcataattcaataataacagcataaataattattttaaatatctataaataattttcataattaatcataattaactgctaatttccaaattaaactaagcggtctttacaccatacttctggaacaacacgttcaagaagaaactatggtggtgataatcaaaactcagaaggaagacacgaagaaagcaatgcttctacaggatatgtacctagaagtgaggatatttatgatccaactaggtatgtacccttagttgaattggaaaattgacaactccgcaaacacttggtaaaatctaaccagcaaaatgctaagttggaaacagaggctgcaatggcaagggcgactcaaggaaataatacacaaaagtaacttgatccttgggtaagaaggccacgaggcagacctcggggttcaagaaccaagaggcaggaagcaaatcaaggaaatccctagaacacctaggaggtgaaacctggggatactatggattttccagtggatgaacgccaaaataacaaagaaccacgtcgagaagttcgtcaaagaccccaaggatttatgaataaggggaatgaacgtaatgatgtaccagagtcttctcacaggaatgaggacataaggcaaccccgatttagggaacaggaaatccctcataataacgaaagaaatcctgagactcaacctacgacaagtgggttaccaccgagacacccccaacgtccttctccatttgagaggaaatgagtatacacgtatctaaatagaggatgtgtatcaacctcttctgaaggagaaggccggtgcaagatgaggcaagttctagttcaagatactctagatctcgaggacagtcgatcaggcagacaaacgcaaaaaggaaataggtctcgccgttatgctgatcaagaaagcatgagcaacacacgaagttatcaatctgagagttacttagatactacatctgtgagcaactatgagcgaagacaacccgatcttcgtgaacacttgaatcgaagacaacccgatctatgcaagcgattaaatcaaaattcacctgacttacaccatcaacttaatgcaaatcaacagcaagtggatcccatccaattgcaaatcattgagttagaggataagtttagaaaataacaggatggggaatacaagaaattacctggctattacttggatgaggaaaccaagccatttcatcttgatattatgaattctcaatttctttagggattcaaaaacccacacatctcgcagtatgatgggactacggacccagtcgctcacctgaataactagaataccataatgcgagccaataatgtcttgaataattgatttattttattcccaacttcattgactggggcagcgagtagttggctcgataaattcactcaccattcgataactttttgggaaaaattgtccaacaattttaggctactagagataggcgacctgaagcatcatccctaactaacgtaaagcagcaaccaggcaaatcacttaaggcttacttgagtcgctttagtagtgctgctgcaaaaggtagaaacttgaatgacagtatacaacttactactcttcaagtagggatcacaactgacctttcaacagctgggggcgagctgtgggatgacctacgggtcgtccagtaagaaatattaatgaattcaacgaaagagcacaagtgttcgcgtgcaaagaggaagcgaggaatgagatgaagttgctgaagactagcttaggaaacaaacccagcacaagtactgccacatcaagtaccatctccacaaaggctgataatccaagtggttcaaagaccaaacgaaaagatgactcaagagaatcatctaaaaataagaagaaatagaaaaagcatgaaaaatatgtgccaatctatatcgtgtacaccaagttgaatgaaacttgtgaaaacatctttctcgcaaattagcacagggttgcattttgtaagcccaaaccaatgagacatgcgagacataaacaagattccgcaaaattttgttgatttcataaaaacatagagcatacaatagaagaatgtcgacaactgaaagacgagatagagagccttatctggcgtggttattttcgacaatatgtgaggcgtcaaggtaatgagccaaaccaaccaaatctacccaatcacccagataaccaaagattacaacctcctcctgtcgagggagaggatatattggatatcttgggagggctgcatctcatggagaaagtagtaatgcccaaaaaagatatgtcaatgaaataaa

SEQ ID NO: 313399 - DNA, 819 bp, Cannabis indica
aataatccgcaaccttctggaagtacgagtgcaaaggcaacatttccccttgcttagtgtgaacacccgaccaggcacagaaacctttttgtgcgctacttgctaggtgtttcgaagaagggatttaacacaaacatttgcccagatatccagccttgtccaaggccctcacgtgccttgctgatcttggacggagggcttacccatctggcacctaaggcgccttgcttcttgtgaggatgcttcagtgagctcttcggtgacgtagtcttccccttcgaccaagacttcaccctctgcagagacgacctccccggcctcgttataccctccaaagtttggaggttcagccactccttcctcctcgaccttggaagggctgccgggacagatgttgtcctgctccttgatctcctagacctcaatgtccccctcatgatctccctcctccatggcaggcggatcttgttcggcacttggcaatgtggcgagctgggccacatgaggattagatgcgttgactttttacatcgtctgctttgtgtgagccatcatcctcctcctggacagatgctgatgtgtatgtcgcgcaactgtaacagtagggacagcaatcgggatgccgaagtaacccgaacttggtcggacaatacatgttcaattagacgaaagataatgcctccaaccctttttcaattcccaaatgaattggccgtacccctctccagcgatttgctcagggtaataatggtgctgcactacggattctagagtaggagaacaatcactactcacatcccaatcttcaaagctcgagtt

SEQ ID NO: 313400 - DNA, 1113 bp, Cannabis indica
gcgtatcaacttttgccgacgaccttagtaacgccagcaaaagactttatagacggccggatttattttctggcataagtgcaacgccggcaatagggctgccggttgaggtcccagtgacgaggttttggcggcgggttaacatgccagcaaaagaattggcgcgaatttggtgccaatcccaatttggcacctacactttaacggtgcattaactcgccgaaaatagtatttaataaaaaataaataaatatttttgcttgcaagtgatgcgccagcaaaactttaaatatttaaaatattcaatattcttgccggcgcattgtactcgctgacaaaagtatttttttttataaaaaaattaaaatttataatatataattaaatttaaatttaaaatagaaataataataataaatataatataaaatatattataaaaccaaaatttatattgtaattataaaactatattaaacgtcataaactaaataaaagaatttatagttcataaatagtaatgttatgcacactgcagactaaaaaaaaatacaaatcaacagcaacatcgttttcattaccgggatgggcagtttgtgaggaggacccagcaacatggctaggaggctgaaatggtagaatcgaaggcatctcgggcatattaaatcctagaacgacgttggtcaactggatcatttattgttgaaacacgctcatgatttgattctcagtcatcatcatctgttgttgttactcgttccgttctttttgctcttccaccattcgttgtagtgcctcatattcctcttaagtgacagtgggctacccggaggggcctagcctgggagttgctctttttgcccccgtcttaactcttggcaactggccctgtcctctcaagtggcgtgaccgcgaatggtgaaatgtttcaaatttctttagcattaggtaaagaaactatatctagagtaatcgtcaatgaatgtgacaaaatacttataaccgcctctggcttttacatttagtggtacacagacatctgaatgtactaaacctagtggttctttggcatgctctccctttacagagaaagaacgtttagtcatttttcct

SEQ ID NO: 313401 - DNA, 1273 bp, Cannabis indica
ttaatataaataaaaagtcacccatgaatttctcatacaaattctgttatataggcactttatatagagaatagatatagtttggtgtacctatgtaagagtataaaagcatacgtgtggctataatgtcaaccctaaattgaagggcaattaggacttgaaataataatgaagattttgatttaatttcttttgaatgggaaatcacttgtgaacaacacaccacgtgaaaacccacccacctcattaaaacaacaaacttcttcttaattttattttttcatccataataatatttctatatatataactatatatctatatgttaaatttcagccacttatttcacttctcttttttgctacatatataatattcactattacaacctttggttattaattgttaaagatatcatattggtagttatatatcgtgattatttatgtatatatataaatatttttaaatgataatatatatatagtgtgggatatggtttatatataatgtatttacattataatttgagatgaaggaaggattcatgcatgttctctatcttttgtaacaaaaaagaaaagaaagaaacatgaggatagaaatatattatattatgacttaaatcaaataatatatattcaaaaaaaatatagccacattgcataataaattaatggttaagtttgccgtgtaacttttaaaggagcgtttctgaagattttttatctattttagtatacaggttaacttttgtagtctatttttgttataatggtgtacggtttaagattgcctataaatttttttaaaaaattaaatatagtttacaatgtcaaaaataaaatttatatattttgttacacatgcgactgtttttcttatacgtatggtaagtaactgtttaaatcttattttattaccactataacttattcagaattttttaataatttacaagtgttattaaatagctacaatatgatgtggaagcaaataaagggtttacaagaacaacctttaaggagtctactacataaattttttaaactaattactcataaaataattcatgggataacttttttatataagtttagaaaattaccacttttataagatcttttggtatggatctaatgttagaccatggagcccaaaattgactttacttgggtttagacccaacctagcacttaagacgactaactccactgggccgccctccatatattaaaggaattttacatggtatactaacttttactatttt

SEQ ID NO: 313402 - DNA, 2113 bp, Cannabis indica
atatttagggtgctaatcaacatacttgtgagtagatctaagatcctggtaaaataatttccaacaactttataaggtaacatatatatatgtaatttatatgattaaatgaatataaattctattattggtataatggttttgtattactaaatatctgtatactgatgtttattcgtggtagatgtcagtagtaatttggatctcatcttatgaacaatgcgcgatggtttgattttgattgtgcataaatgacagaattcgaataataaactatatgattattattacttttcttgttgagtccttatgactcacgggtgccatgtggttcaggtaaaggcaaagaaaagctagaccaaccatgaagtgataatcttctccagcaatgtacaaattgatcttgttggcctgcgtgccgggttgccaggagttgttttgggctgtatctactgcgtattagactagtgcctaatgactcctcatctaataattatccacgtgtcgctccaataaaaacacgaataacatttacccctaagcttctgggacatgccatggtctgggagcttgcagtatcttttcttgagggatttttcacgcgcgtggaatttaagacgagtcctttaatatgtttcgtcattagctgccaaactgaagtgttattatatgggagggatgatttctcttttttttcttgttagagtgttaaatgctgagttttggatttctatgcgcgtccaacgtgctggacgcgtatccctgagaagctcaaaatggcagtgattggactcaagaatttttttcttgtattgtttttaacgatacacacaatgatgggggccatccattgggatgtgaggtaccttttgagcctctcacgtccaatcatcaaacatctcttggggcgaaacgaagcatcgacttctcatgaaatgtgccccttcgttgtcccataaatacttgcaacgaccatttcatttttcactcttcttccccgtcaagtcataacttttgagttcccttcttcccagttgcatttttctcccattaacgatgcaccagaacattcaattccaacatccctccctcaatcgataagttctttgcttatttgtttaagagctttggagggtatcttgaatggtgcacctgcttctgggattagcagtgttgcttctaggaattccagggtcaaacaatgatccttttctttttgttgtgccaatttgttgataggtatattatgtctgctctagagaagaccgacccttccaaggcggcaggaagtagctcctctgctaagaagaggcaaaaactggtggtgttggacctcagcataggggaaatgtgagatcaccccggcctccttatggccacctgaggctgggccaacctaggtctctcccctcgttttgtcgagaatgccttttgtggaatttgccttccccaggggagcggttcctttcgatcctctagagatgtagagggagaaggaagcaaacagggccctaaaagggcgtctggagatggagaggctctaagtccgccggtgggcggccgtgatgtcggtagtttgcaaggcagagcttgcagatgacatgcacgcaacacctcctacgagacagattgtagaggttgaagccctagagattcggctggcctacaggttggggcgagaggccactcctttcgctgcagagctcttggaccagttggccgggagcggctcaaagttgcgcatggaaacttgggcatcctatagcagtgcggatgatttcgcgctggcccactctgcaaagcaatgggcctctcacgtgaatgttgttttctgtgcaaggaaaatcattgggggtacgatacgtcttcagccctccttcccagaatggaaggattgcttgaagtttgttctactgcccgtgatgctttcgctttcatcttttcaagcgaagtctgaggttgaatttttatacaacttcaaccttccttcccggaagccaaagcttacttcataaaaattcaacgtgactcttgcatgcaccctggtttttgttaaataaagatcactgggggtacaatacgttttaactctccttcccagaatggaaggact

SEQ ID NO: 313403 - DNA, 1537 bp, Cannabis indica
tatattttccaaatattatatataacactaatatattttttgtgtgtgtgttttgttaatttgtaggatcactatacctcaaaacctggcatttttgggcctatcttacagttctccaattgttgtttgtgccatgggtctcacctttccatctctgtccttcttactctctatactcctcaggtatatatttatatttttccccaattaaataataaactagattaaatatatatatcaaagttagtttttgttataatcaatgaggtcatttacatagtatatttatgtgatttaatattattatacagaacaacaaaagtagattggagaagtaggagcttccaaacaaaagtatgtggtacaatagtatcattggttggagcaacaatggtggaattgtacaagggtccacttattaaaaactcttcatcatctctccatctacctatgctctctgcagccaagaaatttttcatcttttccacaaataatccacagtattggcttcttggtggccttttactggcagctgctaatttatgtgttgccttttggaacactcttcaggtaccaaaacattattaaaaaatcataatattttttaaagagtattattattagacaaaaacaccacctagaaatgatgccttgccaatttgttagtgatatttcataaagatattatattatattacataagacttaatatttaattgtgtcaatacatgacatcttaagaagtattagacactactgatatttttcaaaatttatctttttttaaactctgaatatcgcgcgtcttattaattagatgactgaaaagtatgtttacaactaaaatagagtaatttgcgacataaatatttaggtctaactctcagttgcaaattataaatatctacgtttaatttttagcggtaataatacctattatatttctgaaactctgtaggtacctaaccgttatatgttaagccattatatccacgtgtcatttttttattagtatatttgaactaatttgtttaaataataaaaatttaatgacttggaccaattagggacacgtagcaatttatttaaccagatacctacagaagttttaaaattataacttaagtattattacaaaaaaaattaaacttaagtatttatttgcaactgagaattaaatttaagtatttatacatgccgcaaattacttgctaaaataacatgtagtatattttgatgtgtatataaattcagaaaaacacataataatatacgtacccctatatatctaagatttttttttttatgatattgtttagtaaatttttaaaaatgtaaaaaatgtttacagtgttggtataagcttcaaatattgaatttactatgcgtgtaactattttcttgtataaattaatcagtcttataaactcttctaatgtcaaatatgtaaccttttaagggtttactgtagactatatatatatattattctataaatttatgtatcaatataatactcatgatatatatatatata

SEQ ID NO: 313404 - DNA, 1220 bp, Cannabis indica
atttaacttagatcactcttcatatgtttttttttggggtttagttaacaaattgagctaaatgtactaaaaatatcaattagtagctcaaatatgtgattttgaaagttacaaagtggaagtcaacgaaaatcattaatgggtctcaaataatttaataatgaaaaaaaaaaagaaatttatcaagataaataaaacatgagagcattaaattaataaagagaaaagggattaacctgatgagggtgatgaaggggaggaataaagaactcttgcatggtataacctgtcctttgggaagacttactactacctttatagaaggtaagatatgacttctctcctaagctgttttcaatttcctttccccttccggttaccttccaaaaccctgttttagtcttcctattcctacattgggagcttgagctcctgtaaaatgaccgatacaagaaccaccactcatctttagttgaatttaacttcaatttagctgaaaattttcattcaaaacaaaaaccaacaaattaatatatatatatatatatatatatacatataaacataagtttattctctctcaaaacaaaaaaagacagacacacacacatgacacatataccagataattcccaaggttcaaacttcaacatatcgtcaatctcaacaatgtaaagatcatatttggaattcattccgagagttttcagctccaagtgattgatcacctcctgttccgttggattgaatgtaagtcccattggcaccgttgatgggctgctactcacttttctgttctagctaccaaatttttgtgtgggtgtgagacttgaggtaatggcgggataagaaagctgaaaataaaaatggcttcttgggtactgtgatttccgatgaagcactagaattccatctcacagctactggttttgggatttactctctttgtgtttcgttttttttttctcagtgtgtgcagaacgaacaaacaatgagagacagagtagtagtgagagtgagatggtgcttttattaagtaaaggtcattcattatcaccaccagttgactttgtcacagtaaattgtaaagtcttcctcttattaccttacctaagaagttgttaagtcctcattcttttttcatggggtcagggatgccatcgctttttgtttttgataagggaaatgatcgctttctcttttctgtacttttggacgtt

SEQ ID NO: 313405 - DNA, 3180 bp, Cannabis indica
cgatttatatatataataagtagaaaataaaaaataaaaataaacttcgatatattaccaacaaaatgaacaccatgcttgctttgtcttgttccagataaaaaaaaatcatactcataagaatgtacagaaattatctaccaaactaatgaactagtgtaataaggtcatacaagttacacagacaaagaatttaacatagtcaccaagactatttgaagcaattcaaacttatgtaacaattttataagaccattttctaatttaaacaatttcttttaaattgtatcaagcatatgcgtgtgaaagtaaaagcatggaacattgcccaaattgtcaagaagactttttataagaatatgtaaccaatggagacgttgtcacactaccttaatggtagtgtatcctctatataactcctaattatatagtaccaacttactcaaatatgactttcacacattgagataggttgctctattcttccaatggagcttgaacacatagtctttacacattttttacctttcaaaaattgtagcttacacaacactgtttgaagaattcaaatattcctaggaggagggaaaaaattttcctgaactaaacatgtataaaatcatgatactaaaagcattagcaataaaaataatgattgtaattctctaaagtttgagattttttttttttggaacaaaagaaaagacaaagcattatgaacatcaagtaaaaataaaaattcaaggaccaggaagcacacaaaaaattagacagtgcaaaaccctaaggatttcattagagagataaaacaaactgagtcaagagatttagtaaaaatatctactatttgtttgctagtttcaatatattctaagagaagaattttattttctagaagctctctaataaagtgatgttgtaggtcaatgtgcttagtgtaagaatgttggccaagattttttgaaatatttatagcactaattatcacagaaaatggttaaagttttcaaataacccataatcttccatcatttattttacccataatagttgggtacaacaattacccattgtaatgtacttagcctttgtagtagacagagagattgagttttgattcttactgttccatgaaacgagattgtttccaagatagatacatcccccactagtgctcttcctatcatatgcattacctgcccaatcagcatcattaaaataaaccagattagattagtgtctttagaaaactaaatcccgaaatcaatagtactatttacatatcgaatgattcttttcacagtagaaatatgagattccatgggatttccctgataacaggcacaaacaccaacactataataacatgtcgagtagcagtaagataaagtaaactaccaatcatacttcgatacaaagtcgaatctacctttactccttgttcatctttggataactttaaagttgtgctcataggagtattggtatgtttggcattttcaagctcaaacttttttaccaagttctttgcatatttactttgagaaacaatggtaccctcatcagatttttttcacttggagacccaaaaaataggtgagttcaccaaccatgctcatctcaaatttttgttgcatttgagagacaaaaacttgcactttacagttagaagtagaaaccaaactgaatatcatcaacatatatttgagcaacaataacatcagtatttttatcaacatttccccttcagtagtcataagaaaggaaaaactcagttagacgctcataccaagcacgtggtgcttgtttcaatccatacaaagctttgtctaacctataaacataatcaggaaaatgaggatcctcaaaccctttgggttgttcaacatacacttcttctttcaaaaaaccattcaagaaggcaaatttaacatccatttgataaaatttaacgccaaaaatataagctatggaaagaagtattttaatggttccaattcttgctaccggagcaaaagtttcatcaaaattaataccctcaacttgagtatatccttgggcaactaatcttgccttgttttgaatgatagtgccaaaatcatcactcttgtttttgaaaatctactttgttccaatgataattacaaatggtggtcttggaatcattgtccacaccttgttccgaatgaactgatgtagctcttcttgtattgctaggaaccaatcttcatccatcatagcttctttcacagttttcgatttcaaagaagaaacaaaacacaagaattgaattatattagtaagttttcttcttgttaccatgctttcatccaagttttcaaggatgagatcaaaaggatggttctttttaacccttgaggatggttccctttggattgaataagtgatcacatttgaaggacgctcaaattgttttgctggtgaagattctggaagaacaacatttgtagctacagagtcttgcaatgtagtctcaggaatagcttctgtggatctttcaatttcatttgccacaacagaaggcttttccaataacttttcaatctgttcttctattaaaaactcagagaaatcttttagatcatcaacaccaacattagcagatttcattacaggttgggttctcatattatacacacgataagtcttatgattaataaaatatcctataaacacaccttcattacttttaacatcaatttttccagtgtaatcacagtctgtacaaaatataacaaatacaaccaaatatatgaaaatgacttacatttgatttcttacctttcaagatttcatatggtgtcttgtgagtacctggatgtaacaacactatgtttatagtataggaagcaatgttgattgctttgtccctaagacaccttgtaagctttttgctatttaacatcaccctagccatttttgttagagttaggttctttctttcaaccactccattttgttaggagcaggaaattcatgagaaataccattagatttacaaaactcatcatatacagtattttcaaattcttttccatgatcactcctaatacgaacaatcttaccaactttacaagctttttcaactatcaatttcaaacacaaagatttgaaagcctcaaaagtatcagacttttctctcaaaaaatctacccatga

SEQ ID NO: 313406 - DNA, 739 bp, Cannabis indica
gttgtaaaaccacctcctctcttcaggcttttttagaggcatgctagcttaacagacctagacttgcccttgttcgtacatccctttggtatcatttttattacaacctatacttataataagggatcaacacttagtgaattggctaagtgtttgggtgagggagaaacacttgatattttagttaagtgttggtagggggagcaacacttggtatttttgcaaagtattgagagtggaaagtagcaaaagagcttgaggagagatcaagggagaggggagcttccttggtgcatgtggggagtgatgggaacgaggagctcccttggtgcatgtgggaagtgatgggagtggggagctcccttggacgagtggggagcaagggggagagagagggagcaaggatcttgggcacgaagagctcctcacacggggagctcaacctgtgccttcgctcctcctcgtgctagctcttcctctcttgtggtgtctcaccttgctagttggccttccattttctttgtcccactacatttttattttaattgtcattgtgagatcttccttccactttaatcacgtggtctccaaaatttatacttagtaattttggggttcgaattcttgcccctacgtctactgagaattcattcaagggttcgttgtagacgtaagtttggtaagtcttcgtctccactcacttattctcttggttactgttatggctattacgtacttg

SEQ ID NO: 313407 - DNA, 577 bp, Cannabis indica
tacacgtggacagtccaccgtggtactttactgtgatttttggacggaggtgtgtagagcaaaatggaaccagggtttaggtagtttagccgccaaaatttcgatttttgtggttaagtgttccgtaaagttcaggtggtttagctgccaatatcccaatatttttataatagtattgggcacgacatatgctctttaatatttctaaaaatttagatattagtattttttttaatgaagttcctcaaatattattaggcacaaagccaataaaaataaacctttactcgagacaactaggaagacttagccaccacacacgattggaatcaagtgtgatagctaattgtgcaagagagtgagttgtgacattattagcgcaattacaatgaggcaatgaagtagtagaaaaagagttcatgtaaaccacatgattagaatatagattattataacaattaacattaattattaattgttatattatttataataatataatatatagattaaatatgtgtaataaactaataatatgtaacatatgactatattagttgtcatctttttgtaacat

SEQ ID NO: 313408 - DNA, 986 bp, Cannabis indica
gggtttagtgaaaattaaccctttatatgaagtcttaaaattctaggttataaacctaatatcatgcaaaatttccttttttaatccttcaatcagacctggtcggtatattttatttgtttttattccggccaaatactcatcttgtgtcttatcttttgtagatgaaccctggtgagttttggggaggagaacatcatattgaccaggatcttctccaacttctgtacgaggatcaacctcgtctttgtgccagtctatcctgatcaagtgacggtctttccaactcgagttttgaggactgggaaataagaagcaaacacacaccttcttcaaaacccgaggtgcaacatcatttttatcccgaccagatcgtaggtgaaggctacagacgctttatctgggacctcaggaaggggtggaggctttatttgtcgtccaattggacatatatcgtccggtcggatatagttaacactatacccgtaggccgcccaagttctgctgctgtaggtacacctatagccactttcgttgtgacagttcctaggcacactaatcaagctctgtttagggatagaatgatggcctacaccaaacatacagtgtggagatctactttaactgatcctcacgtggcccagcttgccacaatgacgagtcctaaacaagcctgccctgctgctgaagaggaagattatgaggggtcgccgaagtcgaagaggtggaggatcagggtgaggtccgtcttgattctccatcagaagccgaagaggagggagttgctcagggattgccctttggggttacaacgaggaaggggagcccgtgtccgaggctagtgaagtcttggtagagggtgaagactatgttaccgaggaatacaccaagggtgttcctcaaagaaggcaaggtgccttaggagctcgatgggtttctcctccgtccatagtaaccaagccaagatgaagaatttggagaagcac

SEQ ID NO: 313409 - DNA, 1392 bp, Cannabis indica
taacaatatgtaatatattctcaattcagataaatactgatgctaccgcatctactgtctatttaacatagacctacgtgttgcgctcacacgtctatttacattaagggcgccttagattagtttatctcggttctgattaccgagtctaacctaattatgccttaactgcatatttctttatctcaacatatatagcatggcattgcattcaaaatcattgaatcactagagtaataactctagaccatataactgctcactttagggtaataaccctaattccggtttctcatttaatcataagcataatatcaaacatgagcgccaccgcgcttaactctacgtgataactactattttacctgatattctaagtatgtggagattttaaatccccggatgttggaaaaagaaaaaaggagatgaataaaaagctgctcaaaaagttgtgcggtactttttcctaactttgagactgaagaggttatacaattcaaggcactcgaccgaggacatgcagtggcattaagcttatgcggttaacgaatcattaagcttttcttccatgtacttctggatgttgaaactcgatttaactgactagatcaaaatattgaatgtcctcccaaataagcctaaaaaagaattctctgtattcaagcatgttaggcgacgcattgataagaggactatcgtgtctttaccaatgcgagaaaagcttaaggcagagtgatacatacggaacaattataataaagtggagaagtatatcagtaagatacttttattattaaataaatataactagatatataataaacagattaaatattaaaatacgatagtttaggaatattaatattttaaaggtcctaagggtaccaaagtgggtactttttacaaacgtatactaccaaggtcattaattgttcaaaacaaaactgaccaagtgtgaattttaacaaaatacaagatattaaaaaagtggttaccgtattatgtaagtattgtatatctgatgactgtagcttgtttaattattttgttatataattttcttatatccctttcatggaataagtaagccatgttatatagcactagaaatttgatctaatcatacattatctcttaatttgatctaatttaattagtaattggatttgaaatataacactatctcatcattaataaaatgtgtacatctttctctttaaactcactagggtttcgctctagtagtttttaccatctgcttgattttttttttgcctgaccaaggctcgtaagccatttctcggtcctacgacgtggctctagtcgggtcttgttaactcccactaggggtgttcacaaagtatccgatccaatccaatccgcacgatccaa

SEQ ID NO: 313410 - DNA, 1207 bp, Cannabis indica
aaagaaaggaatgaccattccaatgtaacaaggaaaaaaaattaatgatttttttatcaatttttttttatgcattttaaattttattccattcctattcctattcccattctcattcctattcctatattttcattcctcccaaccaaaggcctcctaagttcaccattaatgtgtaatgaaaacagtattccaaccccatcatcaaccaaccatagagtcaagtaacaatcaattttttattagtggaaatttacctaattattattagacagtgtgaattcgatgtttatagtgtcgttcttaacaatttcaaatgttttattcgtttactctcaaaacatattattcattcaaatgttgtaaagtttttaatctttattcttaggaatgagaacaaagttgtctcatgcatccttctctaacttcttactaatcaagatctagttttgattatgttcgtctcccctctagaaggtttaaattttaatttgaaagtaggagtttatggattgttaaataagaacaactctttatattttaattttcaaaaaagttattaacttcaaaagtctttttttcctttgactcacaaaagttaaccctttactaaaagaaagaagatcgtgtaacaattagtttcttaatgttgataatttattaatcttctttcttttcttttgttggtatttcttttatgttgatgagcaatatgcctctgaccaataataatatatcataaccaccattaattagagtagacagtagtggatgtttcatcatcatcttcttcatgatctttctatcatttcgagttttgaagattatataaatatatacattgggaattgtgttttgcattgtgctaattattttttttatagaatatatccttattttgttttaaagaaaaccttccatccaaaaagcttgagaattgctaaaaagcactactggtgcttagcaccctcctcgttatcataccactattggtgtaattaagtatcgagtctcatataacttaaaaaaataacttttaaaaaatatcattaactaattgtaggttaactacaagaaaggggaccttttatcccacttttttagttaacaaaaataaaaaatgggataaaaaatatattgagactttttatcccacttttagatttgacgcctcaaatatgcaacaaatatttttttagacaagggc

SEQ ID NO: 313411 - DNA, 1039 bp, Cannabis indica
tttggacgcaaatatatatttttttaacacacaccatcttcacataaagtgtatatatatacattttctaaaaaaaataattagtatatataaacatttaaaaatttaggttatcgaatcaaaataaaaatgatattttataaattatatgtatattatagacgaataatataataatatggacgtagaaaattacaatgtggactaactttgtgctatccgttgtagcaaaaatcaatttaggactatgctgttgagtttgacatagggacatttgattttaaaagccaactaaaacactctaaatttgtttacggaaagagaattgtttaaaagattgaaattgaattagagaaagacaaacgcatattttgctttgttacttcccttcttttctagtcttaaaattagtggtccttataagtgagaaaacgtacaaagtcaaattcatttgtccagtcataatgaattattattatactgccttgtgatttgtattcttttcaagttccaaagaccatacaagttaacatctcagctacgtattccttaaaaatgtgccataactattttacttttctttaggaaaaaaagcttaaaaatggtatgtatggtgtttggaagttgtaattttattactagtacaatttaacatggaatctcaattaattttactttattaagaattcaaatctaatgtcttattttgtgtcccaacttagtgtctaatctattagaatgtgacacttgtaatactccatttattgtattgactttctttttctccaaaataaacactaaatatttaaagtaagagaaatgttaaagggcaccagtggtgcctagcaccttcctatgtgtcaatatcgctattggtgcaactaagtaccgagtcccatataatttaatataatagcttttagagaatatcgctagccaatcgtaacgcgacatgtcgagaaggtgctaggtaccactggtgcctaataacaatccccttaaagtaaatacccttttagcctaaacgacttatttatat

SEQ ID NO: 313412 - DNA, 949 bp, Cannabis indica
ttaaataggaaaaagacaaaagatgtcaagaccaaagacatcattcttatattaattaagacatgagtggcacctaccttagtgtagggtgtccttatcatttttatctttttgggttaattaattaattaattaatttaattagataaatatttgaatttgaaaagttattgagatatttcaagtggttgagagattccctaagtcggttatatgatataaatatctataatcaaattcagttatattatttattcaaataattaaatatgatttaatgaattgattttaatttatataattaattaaataaaacttttattgggtttatttaatatattgtataacaaaattctgaatagaagttttggaataaaatttcacataacctttttgaaagccaaaaaagaaagtttttgttagattttttttttcttctctatcacaaaaataaattattcttgctcttgtactgagataaaaattagaacttcatatacactttgtcctaatagcccacattattctttgtgtgtggtggattgatttagaagactacggtgtgagtttccaataaacctaaaaagatacaacatacgaaacgaatcaaggatatcctgatagacatcaagaggtaaatattattttcatctatttatttttagtttaatatatatacatatggtataatgatatttagaaacaaattcaactgctgctacctgatttagtactataaaactaataattggtacgagagcagttccattaagtatatatgtatatattaaatattgtgtgagttttatgtaataatttatatatatatatgtaatatatattgtgaatgaatagtattttattgtgaatgtatgtgaggtgatagatcgttaattttatgttaaaaatagtgtaggtttcattattatttttttaaaaaataatgtat

SEQ ID NO: 313413 - DNA, 738 bp, Cannabis indica
ttcattaaccatttataagatgcaaattaaatacaaggatagaaggaggaggacacatgtcactccattacaaaagtttggaccaataaataacaaaaggcaaaacaaaattacagagctaaataggaccacatgggatttaaacaactacttataccattagtctgctaagtatttcttagcaaaatttgatgaacaccctatgtataagtagaaagcacaaacaacaaccaatacaaatttttcactcacataacaccatgatgtggttggtccacgtcatctaattaatcatgattagtactttcataaccacttggccttggcttatgcctgtagatttggataactccatcttccttttccttaaatagacttgaaaatggtggtttcgaatgtggtggcggtggcaatggcgtcggtggtctttcaatattaataccaacctcttttggtaaagttggaaatagtattggtggcgatgattgtggtagtagttgtagaagaattttaaccttcttcctttgatttatattgcttcttcctgaaaattgtactaattaataatttatgtcgaataacattttgcttccataatttaatttctataggaaattaaaacgtcactatagaaaaagttatttttagttacaatataatttttttttgtgattagatttgatttttagtcacaataaaatattatttataattagaatatatatttagatcaaagtt

SEQ ID NO: 313414 - DNA, 3315 bp, Cannabis indica
aatgtgattaatttaaacttttataatgagcagtaattgtacaatacatttatagaatttgagatcccttatctaaattttcatacataaacaaatcaaaagatgtcccatggtgactataaaataatgagccctagctaccccaaagatctaactctctaggtcgaactgtcttaatatgtataatcttcatttagctccagacttactgtcatttagcaacaacctttcctttacctccacataacatagctgctatctgtgagtcgaaagactaagtaagaaaaccataaaatataaacataccccaactagtgaccaggcccccatacacccatcacgaagccataatctgcatcaaacacatataagtctcaaacattcttgacagaatgattgaccataatactagtcgggtactatagttatgtcgccatgacagcatcaatccatactttaagtataattgaccataatatcaacctggcaccatagttgtgttgccatggtagcatcaactcatgctacctgaaggtataaccaaccataataccaacctatactcagcactctagtcgtactgatgtggtagcattatttcatactacttgaattgcagaaaagatataatcatgatatctagatgcatgcttgtatacaccaactatcactataactgatatatcatatatctggcaatataaacatgtacatatgtatgtgattactagtcttacctcaattcttatttcaggtgtgtcggtcaatctgagtggaaatagatgctgatgagcaggggtcctaagtcacatttacaaaataactggtaagtgtttgttctaaaacacttcttgattcctgaaaataatctacggttttctactaaactatgtggtgaaaacatcctaaaataaaaacttatagtttggctctaaaatatataccatattgtagagctcgtcacaagccttaaaaattatatagaacatctaaaatggacacttgagtgaaaagttatagccaaaatacgaattttaatcctcccaaaaatacaaaaaacggcagaccaaattttttgctccctgtaaaatggaacatcaggaaacaacatgattcccccccgccccccgattctaacctaaacctttccaaactatccagaacttctaaacacaatatataagcatatttcatgaagaaacctcagccaaaattcgaatagaaatcaaaataccaaacatgagccaagtttgagtactttgaactcaaaattgcatagcattttctacagccaaccaattcctttcaaactagtcctaaacaatccctaacaaccctagaaagtctttcctaacctttcttgaatccctcaaccagtcctactaaaaacaactactgaaaacctacaaaaatctaagaaaactagtaagttttgtgctacggtttaccttagatgattatggatgattgagcttagctttcctttgattctcctagctgaaatgagttgaaaccaatgaagaagattctggttttcctctagtttttggaaaccacgaaaaggagaagatatgaaggtagaaggtaagcttgattttgactttttaatctccttttgacttaatttttgtcttttgttttttttactttccccaagctgttgtcacctataaaaggtgagtcgtagccaccaaaactcttaaaaataggtgtcttatcaaagtaccaaatgataataatgtccttattaccccaatattcaaaaatgtctaataatatttgccccgcaatatacttgatacaaactcgtatccatgtgagttaaattttcatccaacccatttctactattaccagttataaaaatgtgaaaatatgaaatttcatacataacatgcataccacacctagaattcaataaaatctccaaaattgagaaataataaatataacacttattccataaaaataggctcataaaatataaaacacacatataaccacataatacaattaattaatgttaagtgtcttactaatctcatatctaagtatgacgatcattacaaaaactttgtattttttttattttactgcattattgttcatcacaggttttctagtataagttatagaaccttggtttgtagctacaaaatttttgtttcagtactaaatttattgttccacatttaattaattgattaattaaataataaatttgtaattataaaatacgaaatttcatttggtatcaaagcaagttactaaactcttcgtgagatcatgaggttacattattttgtttaatttattttatgtgatatgtcgttctttgtagaaggaagttctaccactcgtccacttctattgaatgatactaattatccttattcgaaggtcaggatgagggcgttcattaagtcacaagatgaaaaggcttggatggctatacttttgggttggtctctacctacttaaaaggatgatgaaggtaattttaaagtaaaacttgaacttaattggtctaataaagatgaaattttttttggctaataataaagcttttcatgcaatctttaatggtgttggtgaaggctttataaaattgatatcatcttgtcaatctgcaaaggagacgtggaaaattcttcaaactaagtttgaagatactgttgatgtaaagagatcacgttttaccatgttgcaaactagagttgatggattaaggatgtcaaaaacagaaactttatcagaattttatgaaagattgtctgatattggtaataaattgtttgctttgggagagaaactagatgaatatgtgttggttcaaaaatagtttgtgtacttccagacaattttgacatggaatttctagcaatggaggaggctaaggatttttgcaaaatgaaggttgaggaactaatgggtttcgtaagaatatttgaactaaatcaacaaataaagctaaaaggcaagtctaaacgttcagataagaaaagcaaagttatttcatttaaattttcttaaaaagaagtttttgatgatgagaaagatgaaaaaatggccttgttaacaaggaattttcaaaaattcatgaaaaaggttggcaacaaaaagaatttttcaaaaatctcccataggtaatacctcgactaaaccttttgtttctaataaaggtattcaatgtagagaatgtgaaggctttggtcatattcagtctgagtattctcataccttgaaaaagaataaaaagggttttactgtaacaccctaactagcataggcctattacgtgatttttaaacgtac

SEQ ID NO: 313415 - DNA, 1346 bp, Cannabis indica
tttcgtctcaagatggatatcaaattatatgaatgctattagttaatattagtctagctagagataatatgtaataataataataataaaaaatatgagattttcttaatgttttaaacttatgttttagctattttcttatttggttagcatcaaatgaaacttttgtggaacatactaaagatgcttaaactcttgtaatagattctataatattaaaagacacaaattagtcttgtataatatgtgattgtcttaaaattattaacaaaattaagaaagaaaataacaacttctctgctgtgaagttcaataaataaaagagagtaaaataataaataaaagagagtaaaattggttgtttagcagagcttcaaaggtcaatttgtaatagaattcaataaacataatatttctttttagtttaatttcaatttttttttccaaaataattttatatttttacagaatttttaattattttttaagatatgagtttataaatataaataagtttaatttatctttaaaaaaatctcagcttgtttaaattatttgatgaattttaaataattttagtttgattttttaagattcatgtttataaataaaataaaatttgaaaatattttttaaaaaaaaaatttaggtttttagtaaacttaatatttttatcaggctttttaataatttttttttaattaatatagcattacaatttttaaaattaatttctttatcaaagagaacaaaattttgtatagatcaaagtttaagaggtaaaaatactaatttttacggtaaaagaaatagaaccgaacagaagaggcataattatgtaactattatattttagggaggatttttaacaaactataaattttagagagcaaaattaagtagttttgaaagtttagaagacaaaaatactaattattttaaaataaaaagatcacgcgtgcaacatactctttgaaccctattttgaacgtgttaaattttttaaaaatttcttaaaattttacagaatatcttaaataattacaccatatacaataataaaaaacaatagactaattttttttttcaagataccaaaacaaataagtgtacatcagtattccctcaaaaaaaaaaaagtagcacatcagtatacctcttccaaaatggtgcattgtaaaattttccactctcaagtaaaaagaaattagataaaagcccgtaacctacaaattacaattagttaagcatcatctcaaaataataagggaaacttacaaaaatactggaattttgattaacttttacaaaaatactgtcacacggaaattttttcaaaaatactg

SEQ ID NO: 313416 - DNA, 2893 bp, Cannabis indica
gtgcaaacttgagcatacatcaaactccctactacacctacatatgggatagttttcattgcttcaatttttaagtcgttcttaagacattgttgcttagtaaatttgtcccctttcagaacagaaacagaatcaaccttacaccaattcatgttgaaccttttgagcacacgattaatgtaagcttcttgagattatccaagaacttttgattcttatcacaatgaatctcaatccccgaaaatgaaagatgtcactctaagatccttcatatcaaaattgttactaaaaaaatttagcctcatttagtaatgataaatcactgttggaaagtaaaatgccatccacataaagaacaagaaaaaaaataacaactccttatagatcttcatataaataaattggtcaaacttgttatcaattaaactaaacgatatcacaagcttatgcaactgcaagtaccgtcggcgagatgcctatttgagaccataaatggattgtttcaatttacaaaccaaattttcattttcattttccttaaagccttcgaattgagacatatagaatttctctcttaattctccattcagaaaagtaattttaacatccatttgatgcagctctaaaaaaaatttcaattaaagccataataattctaaatgaatatttagtgaaaacatgcaagaaagtgtcagtgtaattaataccttctctttaagtaaagccattttggtactaaacgtgctttatacctttcaatatgtctcttattatcctttttagttttgaaattcaatttgcaacctattgatttaaaatcatcaagtaaatagaactaactcccatatatcctttttcttcatggactcaatctcatcaccatatctttatccattttgatgaatatggactattgagtgttataagtgagaggatccataaaatgaccaataacatattctccttctccatggtaaaaattatcatcacaccttgttgaactcttttgtctcttgagagcttcttagatgaggtgcttctagaatagcatctatttgttgatcattattttaaatgacatctttcacaattggaatttcttcgataataggaccttcatcaacaacatgaccttcttcaataatatgccccttgtcaataataggttgttcatcaatgataggaccctcgtcattttctatatcaggagcaatataatcatcaacaaaccgagcattatcaactagagtaggaataagactactattattatcttctcttgaaaataaaaaggaataaaaattcacttagatgtgtaatatcccgacaagaataatggtgaattattagggatttattatatactatgggttaatcaggtaattagtgggattatgatcctactaatctatttcaacaaaaaaaattaattttattataagtggataaataagcgtaatttattaattatgatttatatagcatgggtgaatataagatgaactatttgtagaataaaaatattttaaagtttggcgaccttggtggctcgatcgggggccaaaaattttataacaagtttaattagtgatttgatgagaatattataataagttgacaatgtaagtattaggatcactagaagtatttgtgatttgacctaataccctagaagtagagatttattagtggacttaaaaaataataagataactattaataataaagtttgtattaataatatagtaatattattattaatattctcataaatttaatttatcaatttattaatatacaaatatatatattatgtttagaagaaacggtacgaataatgaaactctcctctgttctctgttcgaaaaaaccctcatcattttctatttattttcttcaattttcaacccaaaacctagcaattcaagctccagtagtagcaggataataaatcattgaagagagaaagcttaagaaaaggattagtttcattttaagttggaaacagtttgttttatatagtgactgtgtgatttagagtagttatggagattctgactttgtaaaattgttcttcggtagctatgggaaaagtttaagttcgagctttaatggcgttttctgtttaagggcttgattttaatttctgttacgtaaggattgttgtatatatggtatatatatgtcctatgaagtttgaaatgatttggatagattttggtagtgttttgaagagtgagaaattcagtatttttgtgcaagaaaatggtcggtcgtttttaccaaaacggaggaagattataaattgtatttttgtcattacttttcactcaggtgtctgttttggacgttctattactgtttcaaagcttatgacaagctctacaatatagtgtatattttagagctaaaatataagttttattttagtatatttataccgtgagatttgataaaaaaaaccctagattgtcttatgcgaatatcaagcagtgttttgggatagacacttattggtttatcgttgttatgacatagggtctgagatcgtcgatcgttctccaagtaggtcagccaacataccggaacctaaacatgaggtaagaaaagcataatgtaccacatggcatgacaggtttcataattgtcgattgtctaattaggcaatgacaatgtgaatatgatatacaagctcacttgattaggtgatgtgatatatgggtgccaagttatagcacaggctttcctgattaggcaatgtgatttacgagctcacctaattaggtgatgtgatatatgtgttggaatcatatcttaccaggaacttagatctactcacaagtatgttgatttaacaacctaaaattgaacttctaaaacgatgaactaaaca

SEQ ID NO: 313417 - DNA, 1062 bp, Cannabis indica
tacaatcttgaaaatatttttttagacatatattgatcaaaatacaatattcaaataatcttatttatcaattttaatttttagaatgaaaaagtgagatagtggtgtagcaatctaaaaacattctaagatcgttatataacttaattatcactaaataaaaaacaaccgcacgcgaagcgcggtttgtttcctagttctatataaatgagaagtataaggcggtgacttggcggtctaaaatttctctaattagtcttatttattctcttcttaattctctcattttttttttaattttttattaacttcttaaataataattgatataaaatatatatctttatttattttttctttgattctctcatttttttttaatttattttaaataaattataacttcaaatttatcatcaatttttcattttgtttttttgatttatttttactgtcacgtttttttacttcttccattttttttaaattaaaatctataagttatatataatctttatataaccagtacttggcatatatattaagtaaataaaagaattaatttaatgtataggtaattttttttcttttaatatgtaatttatatatttatacataatattatattatacaatatgttgacaaaatatactaactacgaaataattttagaaagttctttcaattgccacagtgtaaattacgtttaataatatttataaactttgtttttaacttaaaaatatctattaaaatttatttatatatctacaaaaatcatttattttggaaaatcaattggcatagtgctaattataactttctattacaacctcttagtcaaccttcacgcttgtaattacatgccgaaatatttttttttataacggtatattttaattatagtatcatgcctataaaattttaaatttttttgaatagtttacaatacctaaaacaaagttcttgatattcttattttcgacactgtaaaccattcaaaaaatttacaggaatgcagaaatagaagtgttgaccgaggtttttcggcaactagtaaaa

SEQ ID NO: 313418 - DNA, 2421 bp, Cannabis indica
aagctagttatattaaaaaaaaaattatcaaaaattaagctctgggtcctatttatactatttttgaaaatacagggtctattttgtcatttaacaaacagagggtctaattggtgacttttacaaaatacaaggtcaaaaatagtatttaccaaacaaaattgagtttttatgcttagggagcttaaatcatatacatctcctcctacaactctattaaatatgtactaatttttatattgtatgacaaaatgctctaatatatttttcttattttttcttcttaatttgtatttatttattatttttttgaaataaaattcattgataaacaaaaattacacgggatatggcaaatgagcttgtacaacaacatgacttacacaaagggggataacctcaatccacatagcactaatttagtggtcaaaacataattggctaacttatgagctacttgattagcctctctataaacaaaagacaaatcaattacattagaatgatttaacaagattcttaatttggtgcaccagcccatcaatatctctgcatccactttctgcattgtttattaactgcaccacttgtaaacaatccgactagacttaaaactgttgcatctttctattgattcccatttgcaaaccatatttaatggcgtgtagctctgctattagtggttagagtccttgcgaaatataaatggtggatgcaaacaacactcttcctccatcatctctagccatagatcccaagcttgccatattctcatgacaaataaccacaacatcaaaatttatcctaataataccagttcgtggcggagcccactgagtcgctaaatgtaactcttagttgagtgggatccacaataagctgcttaacttgttgctgctgatttgagatgttttgatttaatcatcctcagagatctctaacattgtgattcagctactcatgcaagttaagttgtctacggtttagatgctcacaaagatcaggttcagattgccttgcactactgattgatattgtagagagattttcaaactggtgtctctgtgagttactcatgctttcttgttcatcatgataatggcgacgagtatttccttctcttcgtgttcgcctttcccttgcacgtgatatggtcgacctactctgatcatgtgtccttgacccactcgataagtgcttgattctatttcttgggaatcttctcgagtaggcctacgcctctggaagaaatttgagatgcggccctactaaagtaggtatacatgctatctctttcgttttggtttggcccccgcaggtgccacggtggatgccctgatgcatgtggtccacttggattcctctcattacggtgagtgatcccttgatcatcatgtcgcatttgtctattggtatcagcattcatatgagatgactctaaattgtcaggttgcatttttccacgattcatgttatcacgagaagaccctatatcattgggtcgagtttgtctagtgttagtgtttcttggattttgtggatcttatgtgtccaccagaatattccttgtatttccaggttgatcatcctgaggattcgtgggatttttgtggtttttttctccaataggagtttcctcatttctcctggttcttgaccctctatgtcttccccgaggccatcttgtggatgtgtttggttggttaggaggttgcatgtcgctcttgcagctgcagcctcacattccaactcaacatttctctgattggactttaccaatatctgttgaagtcgtctgttttctaattccaacaataatacatatcttgtgggatcgtatgcattctaactacgtctttcagggatttcatcaccaatttgcttgaaacccccttaagtatttcttcttcccaagcatggaatctctgtcgcatttgtcctctgggaaccctggggttctttcccaggtcactgagttgtttccctaggttgattgtcatcattttaaggggtatcctcaaacatggttggagaaatataaaagtttgaatattattcgagggaggtgtattctgagtgttttttcctacaagactctcaatgaaaataccaaactattgatactgttttttgttaactaataaataagccttaatttaagaaataaactttcataataataaatattaattataataaaaaatatgaacaagaagctgttttacgtggttttgaagttaattcttcacagtccatgagtccatcttattatcaagattcaaatgtttacataatataatgggatattggcggttaaaccacttgaactttactgtttgtaacacttaaccacaaaaaccaaatttttggcggctaaactacctaaaccctggttccgttttgctctgcacacctccgtcc

SEQ ID NO: 313419 - DNA, 823 bp, Cannabis indica
tttttttaaataagtagcatttattttttgatattaagaatattaaatttcaaaataaaataaataaatgtaatgcatctaagccctccacgtgtctatatttatgagttaacggaggtggtagtaatgggtgtaagagaattataacattgtgaatttttgcgcccaaaagtaaagataaagtatttaagtgtataaaatctaaaacattaagtatttatgctgcaatttactcaaaacaaaatgagacaattatgttggttttactaaaatctagaattttaactttcttatttaataaatagagataattaattttcgtgttaataaatattaacaaaaaaaaaaattaagacacaataaaatttatggtaaaaaataagaacaactattttaaaaaaagagtactgctacaaatatcgttgacaacgaaaagttattaaacaaaaatattgacccactttaaaaaataaatccatatttgtagatgagaaacaaaattcttttacaaaaagaagaggaggaagctatatataatatatttatgagaaaaacaaatatttatgcatggccatagtccatagttttcaaattgtgtagttgcttttatagtgactcatattacttgaaaattaagacactaaaaaaaaagaaaaaaaacttgaaaaaaatacactgacacatgtatatagatggatgttgtactttagttacacgtgacacttacacagtattgttgaacttttttttttttgattcaagcgtttatatattacatcatgtcttacctgggactcgaacccaggacctccaacactcacac

SEQ ID NO: 313420 - DNA, 1243 bp, Cannabis indica
atcaaaatcaatcaaaaatcagttatttcttgttgcaaagctataaactagcaaccgatttcgaagcaacaagcttaaacaacttgatatgggaatttaattattgaaaaaattgttattatgaaaagcttaaacatcaaaatcaatcaaaaatcagtcattatcgattttcgaaaaaacaaacttaaacatctcttcaaattagaatttcttcaacagcttgatataaacatttgattattaaataaacattgttattatgaaaaagctaaaacatcaaaatcaatcaaaaatcagtcatttcctgctgcaaaactaaaaccagtaaaaccgattttcgaaacaacaaacttaaacataagaaactaagaattgccataagatattacaagagtaaggaccaagtggcattactgtgaagtatcaataaagaaaaggataaacacaaaagtgataaagaagcaaatgccaatatatatgctatgatagattgatattgaaaaacataagaagaatatgaacacaataatcaatgagattaaacacaaaacaaagattaattcaaatgtgacaattagtgatgaaaattgaagctaaaaaacagctgtgagtgaaacatcaaaggaaataatataaaggaccaaaagggtatcaaaggaaataatgttcaagcttcttcataattgttttactcaattaaaataaacacaaaagtttttacaaccaaagaaaacccaaaaaggaaagctttaaaatttagtatcacaattcacaaaaattaaacaaacccaattttaaagcaaaaaaaaaaaacaatccgagcttgaaattcaaaactaagaacccagaaataaaaaaccaaacttttttaattattattaaaaaaatccaaaaaaaaacaaagaaacttacagagtgttagcatgttgaatatcagcttcgagaaccttcagagaatccttaaacgactttctcatggaacctatgtacatttttttttctccttctcttccaaaaattaattatatatatatataattcaaaaccaaaaattaacaaataataacaaaagaaagaaagagaaaaaataggcaaatttggaaagtaagagagaattttgaagagaaccctaatatgagtgaacccttttagtggagttggccaaaaaccctgaagagattgtgttttggttttggttttggagaaaaatatgttaaagaaaagaagaaaagtaaaaataaaa

SEQ ID NO: 313421 - DNA, 1851 bp, Cannabis indica
agttaaacttaggtatttatgccgtaaatttttttttcatccacatgcactcttcaaaaaagaattttagccaccaaattcctcgattaattttattgtatgtgttatttgatgttggcccccctactatccagtcttggctccgcccctgcttattaccaatatgagatgacgtcttaatcagtagtattgagagtcaatactattgtaccaataatagtataacacatgttgatagtaaaaattcatcaataataaaaaataagaagatatttaacttgctgaaacttaagaaaagttgtagagcaacaatagtgaaaattatagtatcgtattataaacttctaagttagggttacacaaattttctaatccctttgaatgaggggtgaagttctatttatagaggagctctagtaagtttacatgtggtcccggggaacaacctagtacttagtacattcattagctgtagaggtcaaagtagtggttccatggtggtggttgtagcatattcttggtcaagtataccagatgctgcaaatctgtggtgatcctactacttgcccagttcttgtctccacgccttgtcagacgttgtggctgagcaaaagatggcccccacatagtggtcccgacttggtggccctaccgtggtggttcttgtaccttctttcaagactatttatttatcttatactttagtaattagtgtttctttgttgtaagttatgtgtttggacttagtcttctaaataagaatagtctttaatccttaggattcaaattggctggacaaggcgagaatgaatgggtgatgttagaactttcaagtgaccaaacctctcgaggtgccaagaggggttggcgcagaagggcgacgcagatacccccttggtgcaaggagtcaagactttgcctttttgttctctttattgagttggaacttgctagtggatcaaagagatacctagtcaaaacatgcttaacctatgactgcgattgttgtcactacacaggggttaatgcatgtcttcatcttttttttttctctggaacttgttgcctctcaactttcataagagattagtttgtttcaatgggatgagaagaggtcgtgtccatgactttcgagaagatgtcgcgagaggtgaagtccaccaccccagtaactttcggcaaaaattcgtcaaccaagttatggttgaaaaccttgaataataatcactgataaaaataatgtaatgatcttaacgtaaatatattagagagagtggataagagagtaaatgtgaaaagctttgtattcaggaaatggtctcataaaattacaaggttttgacccccattcttttaatagagtggagggaatttatgaacaagtatattttccaactgcacttgtggactcttgtcactccaatattaatttgaaagttggttttacttttgagcattcttaggggcacattctccaaaaacatgtgttcaatgagacatagactcattaagggtctatgtattcttttatttgaggagtgtgggccaagcatgttgtttcatgaattccaacatgttgtttcatgaattccaacatgagtgtgtgagccaattattgtcatgcacgtattttaacatgagtagctagactaatctactccggtggttgctttttgatctaagggttgagattcaacttatccaactataaatacacctctgaattgttgggaattttcattcccccattctttctttagcttgccatcgaaattcggggttttcaacttagtttagcttagcattggtatttttggagatcttcttgttcctttcattctctctctctct

SEQ ID NO: 313422 - DNA, 1055 bp, Cannabis indica
actgcaacaacgagtactgtaacaaccaaagcaggaaattcaaaccataatgggtcgaatggaaaatggaaagatgagtcaagagattcatcataagacaagaaaaagtaaaataagtacgagaagtatattctgaaatactcagtatgtacaaaattcagtaaaactcgtgaaaatatctatctcgtaaatgaaaactgggtcgcattttgaagacctggacctatgagacttgctaggaataagcgatatcccaacaagtattttagttttcatcaagatattggacataccactgaggaatgccaccaattaaaagatgaaattgaagggcttatttctcgtggatatttgaggcagtatgtgagaaatcaaggaaatgaacaaactttacccaataaccaaaataataactatggaatataacctcccccggttgagggcaaggacatcttggttatttctagagggccacacctcataggaaacaacaatagtgctcaaaagagatatataaatgaagttaagaatcaagaatctgcctttgcacccaaacccttgaagggagccaagcctgaagaaccacctattatctttactgatgaagatgcttcacatgtctggtttccacatatggttcccctagtgattacgattcagctcataaataagagagtaaaaagtgtccttgttgataacgagagttctgttaatattctctacaaagaaacattaaaaaatatgggtttgaaaccatacatggtgaaactatgtggattcatgggtgatagtgttgcaaatttaggcatgatcaaacttccattcactatgggagagccacaactatcggcaacccagattcattagatcgttatcaaaaatacaaagtaattgacttatgcataaatagactccctcttattgtatgccgcaagcttgatgtattcaacctactaaccgaatcttgataaaactccaagagctcgaactcccttcgatcaccttgaagagtgcttgaatcctcccgattcaaggcttaaaggctatctcccgaa

SEQ ID NO: 313423 - DNA, 1582 bp, Cannabis indica
gggtgcaaatagaactcccctaatgaaaaatataatcaacgtgacattctcttttatttctttttcaatcaaaaatattagttgtttgggtaaatattattttggacttttgaccttctattttgttaaatgataaaatagaccctatattttccaaaagggtaaattgcgacataaatacataatgtttcagattttatacacttaaatacctaatgtttatttgtagagacaaaaatacataatgttacaattctcttacaacgttactactacttccgttattaactcataaatatagacacatggagggcccaaatacactacatttatttatgaattaacggaagtggtagtaacggtgtaagaaaattgtaacattagatattttgcctctaaaaataaacattaggtatgtaagtgtataaaatctgaaatattaagtatttatgtcacaatttactcttttccaaattagtaaaaataggtttctgagcttaatttttgacaatttttttttttgaatatataaccaatttgaagataattcctaacacgaactgatatagaaaatgtaaacagttttatcataatgcatttaggtcgtattattaaattttattttgacaaaaaattagttcaaggtctgatttgtatcattttagaaaatacatgatctattttttcatttaacaaaacagatggtccaatttataacttttacaaaacacatggtccaaaatggtatttaccctaattattttttagtacttctttttttaatattgagagagaaagttctaatttgaaaatttttattggctatttaataacaaatatataaaatacaattcaccaactttattttttttttatttgttgagaaaataaaaaaatatatattaataagtaaattagataatagtcgattacatgatgataaatcgctcaaagaataatcaacaagataggcaaataccgtttacaaaaataagaaagaaaaactctaatatcaccttcaactataagaccaataagttacaagcgttgaagcataaaaaaagtgcagagaatcctaattttttaatccaaatgaacatgtaacaaactatacctatcaatagttatcagtcaaaatatttcaataaaaattggataataacaacttctattattcaatcgagaataaaataaaataatcaaatgaccaaccatagcaataagaattgtaagaaaccatcacatcaaaaactatagggccaataagaatttgcgaatctctgaacatggacaagactaacatccattgccatgaacaaacaaagtcatactaccatactaacaaaattatttatgatttttgcccccgaactatgacatatgtattattgtgcccgtggacttttcagtgttacaaatggtccttaaactatttattgtaaattggtcattctgtcaagttttgtcacacttggcaaacaaaatgatgacatggttgcttagtcaattgtcacatcagcgccacatgtataattttacattaaaaaataaaattatgcatttttaaaaaattattaaacta

SEQ ID NO: 313424 - DNA, 738 bp, Cannabis indica
tcatatatattaatctatttcaaaattatattttattatattatggagatgatcagatcattattgagtttatcacaacttttatcatgtgaagtaatagtatttgttttaagccactaagaatctttgagtaattgcaatcgaaaaatttaaatttagtattaaatcaatactaaaaaggatattatttcaatattaaattctttttcaatttcaaccacaacagtaaaaatatattttgtattattaaattatctcacacaataatatgtatataaatataaaattcaatcacaaacctattattttaatgtttaaaaaaataaaatattaatttcgtatagtctatagtgtcccactaaatagtgggacactatagactcccacgtatatagaataacatttagtgttctatttgagcaattttgtgtccaaattccactatttttataattttagtgtcctattggagaaacccttagtagtgagaaaagaatgggaaaaagagagaggttatgggtttgaatccaaaacttttcagctattatactattagttgattataaaatattattagagaaatgctaaagggcaccggtggtgcctagcaccctcctatgtgttaatattgctattggtccaactaaatatcgggtcccatataatttaatataatagcttttagggagtatccctagccaatcgcaacgcgacatgtcgagaaggtactaggcacca

SEQ ID NO: 313425 - DNA, 1893 bp, Cannabis indica
aaattatgatatatacagaaataagagaatatatatcttaatttgaattggtcattattggtaccatatttttaacaattagttagctattttatagtcataatattatacttgtatattgtatatatgagtctgattgataatacaatggcacggaatcaatttccttcatggtatcagctaccaatttgatcctctctgttgaaccatagtagttcaccttcttcttcttcttctcactctcaaaaatggcaaaaagtacggccaaattccatcttgccctcaccatcaccaatggaaatctcttgtttctatcacgttagataacgagcaggctctgtatcactcatgggctcccttgttgaccaaccttactcgggttcatgatctctacaatcatattgttccacccacagaggaacttgacagagtagcataccttgctgcaaaaacagccgaccttgccttatgaaaatgccttgacactgcgattctccagtggatatatggtaccatttcctctgaccttctccttgctatcctacgacgtaatgacatagttgagggagcatgaaaacgacttgaagctttatttcaggacaataaggcttcgcgagcaaacctcctcgaggaagacttcaccactatcgttttcgaggaacaccatacgtaccatcaacaactactacaattaccttcaatctcttgtagattggcttgcggatgtcgatgccccggtgtcaaatgggcagctcatgttacgtctcacaggttctttgccagaggcgtacattggtacaattgatttcatccaaaatcaaaaccccttacctttgttcgaaagctgtcgattaaggttaaaaatggaaaaatgcacaatcaaagcacgtgtcgcacgtgaatccggaacctacaatggcacacccatggttgcagtaaccactaatgactccaatgactcttcctctgctcctaacgcaacaacagtaacaacaacaaaaataaaggtcaaggaaaaggaaaagggtctagtcaacaaggtggggccagtggtggtgcgtttattcaggagccacgtcctcaaattcaatcacaatggccacagtggcagccaaattgagaagggtggaccattcttcattgtcctttccctgcctattcttggcatccacgacccaattacatgacccaaaaatcttttgttgggcctggtgtgcttaagcccaaatctcaagccttcaatgtgatgactccatctattactagttacacgtaaactgatattgaggccactatgcatgctctatctttctctcaacccgatggaaactactacatagataccggtgccacatctaacatgatggcagatgcaggtattctctcgtcttatttcaattcaagcaataaaaatcataacattattgttggtagtggtcatttaattccatttgtctcacggtagcactaatttaccccaaccttatcctcttttgttcttcaaagtgtgttacatgctcccaaactccttaaaaatcttatctttgttcttaaatttaccactcacaatatggtttctatgtcttttgacccttttggtttttcaatcaatgatttacagacgaggaccacactagtgagatgtgacagtgttggggacttatatcctctcttctcaaattctcaagccacatcacccacacattcaacttttactactatgagaattagccgataattaaagcttaattctgaaattagatttttaattatgttttataaatttatggagatatattttaattctaggtgtgttatttatgttctataggaaatttcatgtttttcatatttatgcccggcaacattggaacgcgatgtttggccgataga

SEQ ID NO: 313426 - DNA, 682 bp, Cannabis indica
gtaactgcactactaacaatccactcgtagagaacttgttaattccaaccgctaacatcgatttgatggcaagctatcgaaaaataaataaaaactaacaacaaaacaaaacaagatcacgtcacacactaaaacattcaaaaccatgtcatatagagacacactaattatattagcaaaaattgaatcgcaatagtaaaatgcaatcccgaccaaaccgtacttatgaccaagaaaggccggtatgggcttggacagagagaaaatacaacttcctgtaactataaatttagaaacgagaaaacctaattttttaataaattagttcatgtttttttaattgatggtcaaggaattagtttgcctttgatggttaagtttacttttatattttgaatatggtaagatttaaacaaatatagacattgtatatatgcgtagattaattatctattttaaattttatttttaatattataaattattttaaaaaaaaattcaaatatacattgtgatcatataaaagaattatagagttcataatccctatgtaaaaaaaatgcagcatagatatataataaaaatagcgtcactatgtaaaaagtcaccaatgtataatatatatagtatgttagataaattaacaattaacccaagatctatttgtatataacatagaaca

SEQ ID NO: 313427 - DNA, 1619 bp, Cannabis indica
gtagatgatgatctaacagtgaattaacttttgaggctaatagtcactttttgaagcccagcgggacccgccgcggttaacctagagcttatttttgtaactcccttgggggtaaaaattttgaggtcactactaaaaactgcttacttttagtgacaatttttttagcacaacattaacttttttgtaactaaatgcgacttttagtcataacaaaatgttacttgtgattaaaacctagtatttaattacaagttgtcactaatttagttttagtcacaacaagtattgtgactaaaaatgcatttagtcacaataaattgtaatttttgtgactaatacctttagccacagacattttagtcacaacataggaataataatttataattagtcacaattttttcacttttagtcacaagttttgttgtgactaaaagtaagattttttgtagtgggtcaataacttcagaattgcgatataagtgtgagagatgacttaatagaacattgaaataacttcaatacgcaagttgaatcgcgtcaatcaggttaatattgagtgagttatgactattttattgaaggcaattcacaaccaacgctcaggttgacatctagcgcccaagttgacattccagcgcctaggttgatatatgacgtcaactttgatgttgggtaagtaaaaaaacatccaatgggtgtactttatgatgcctaagtgatattctaacatcatttagtttgtttttgtgatttggcaaagctggtcaccaattctcagagatgttgttctgcgaaaatgagagactcaaaaactctttatttttgagtgattttcccatgttgaaaatgagagaagcgaagttgtaaatttgacttatctaacttcatggatcttagttattgtaaaaaactagacgggtggtcaaaacagaattagaatcaaataagcagaacctagcacaccaggccatttgtcaacctgtgcccttggcacttcattttcgagcttctgagttctcattttgatacttctaaggttcttgaacttggggacaaggtgtcctatcccatttttgaccattactgattgaatggtcgaattagatatggcatttgaatgatcgaaacaagtgcgtcaggttgattgtcaacctgggtgctgagcctagtgtcacgggttcacctttttaggtagcaaaatactcttgacttctctaagctaaggtcaaccttctaactattcgagtaataatggacttatttttcgagtgactgtgtacctcgtgcacacttctgtctctcgaaaaactcccatcgagtcatgcttgcaagcttccatgagtgcatccatgcatcaaggctctctagccaagatactcatattgtccataggttcgcactatgataaggtaaatctcaacaccgttgctcacctagtcactcatgaccaaggtagcatgtgtgacaagatgccaacaccaagttaacgtatcaaccttccaatcatgccccattcgatattgttcgaactatcttcctcatctctcaaggaatcacatacgtccatggtccaatcctaaggcactatgcctccacgcatgttggcaggccct

SEQ ID NO: 313428 - DNA, 1746 bp, Cannabis indica
aataagctacctgacctacccttccaaaaactcaaacggacagattaacctagaacttaactcccctttctaaccaatttttgatttttttttcctttcattggaaccacctgaagaaagatgaaattcccaacatggaatttaatatctctacactttggatcaacatagctctttcatccattgtataagcaatatacaaacttaaatctttaatctgcatcagtaccacatcaacggtattctaataactggtattacatgaaaactcatttagaacctcccattcagtatccttatcggacggatacaccaatctggtttatatcataaaatttccttcaaacaaaatcaaaagtcctttgtcaagccggttccaaacctttcctcgtacttctaaagttcagagtcactctgctgggccatttattaattcttcctaataaatcaaaccacattgcgatattaacaagttctctaaccacgaactcaatccctgttctagttagatcttcaacaacctttgatgagatcttttctctttacaaacttgtcctagatatctttgatttacaacatctactaccaatttacttccgaaagcggtaaggaatcacaccattataatcttcaatcaactctaactatcgtcattgccttctaattaaatctttccgaagaagaagtctttgagacttttgtgatccatatagactttgcattcttcaacatacagataatggtgcccaaatttcaatgcaaaacaactacattcaatatcatgactgaaattttactgctcatactccttcaatagtctaggtatataggcaacaactctcctaaactgtattagaacacaatctaatccctgtttagaagtgtcacatcgaatcaaaatttctccttactgactggtaaagttaacattggtgcaatggttaacctttgtttcaattctttcgacctaattccactaagagtgtaaacatccctcaacaaatattccgtagcattttgttaattccagaaaacctctaacctcagttgtaaacttgggttgaagtcaaatcaaaactgctttaatccttatcgaacctatcaagatactatctatatccatttcatgctctaagaaacctacttagagtcgggaaatttgcatttcttgctattagcataaagtttaagctcctaaaatattacaataccatccaaaaatgcctctcaaaagccttctttgatttgaaagaaatcaaaatattaataatgacaacattcgcgaagtcatcgggtatgaaaaactgctttagaaatacccttctcttgaatcttcaattggtaataaccagatcgaagactgatctcagagaggacggtccttccctaaaattaatcaccataacttctatccttgacaaaagtatacttactcttcaccataaatttattaaacttccaatgatcaatacatacttataaggtttcattctcctccttcacaaacaaaactgacgtactccaggatggaattcccagtccaacaaatttcaagccaacatatagcatcccatgtaactgaatctccaaccatctcaaataccattcgatacggagtttaagatataaactttgccccacgtaccagatccatttcaaaatcaatctccactttaatagtaagcccagtaattctcctggaaagaaattgaaaaattctcagaccactggaacgtattctggtcc

SEQ ID NO: 313429 - DNA, 679 bp, Cannabis indica
gcttggattgtcaattccctttttaggcaacctaatgttggaagaagaacaagttttataaatattttagttaaaaagaattaataaaatatgaaagttaaaattatatgtaatcatattagagtaatttttcttcatgtttattttatttttagtttttgggtggattttacacttagtttggtgcttcatgtgtttttggagcatactttggattcttagatgtgatttgaggtttgaaattttgttagatttttgattgaattttattgcagcaaaactaggcatgaacaaaagacttttgtcgttaattcaaaaaagtttgcatgttgcaacaattttctagcaaaattttagcaaaagtacaagttaaaggagcaatcaataatatttttgctaaatttttacagaaatattgctacaacaggcgtaagttgagattctttgtgagttgtgaaagaattttcaaaaaaaaaaaaataaaaaaaaaaccaaaaaccaaagcataatttctcaaattatatcctaactcaaacaatctcaaataccctgaaattcctatcctcaaaaaaccctattttcatgtcttcttccttttccgtccttatgagtccatatttgtcttataaatatgattaatttatgtattaatattcttaaattgattctttaaattatt

SEQ ID NO: 313430 - DNA, 960 bp, Cannabis indica
ttatactaaaataaaattaaaatagccgcgaagagccctagttccatactaatttagtgaaatggtacgccgtaagatgctcttcttaaggaaaaaaaaaaaaaaaaaaaaaaaaacaaaaaaaaaacattttctacaaaaataaataaataggggaaaaacaattaaagccgcctgtacaacacaaaattatcgttgctaaagctaagacaatgaacgaaattgggagattgacaaagttacagccaggaaccccatccaggaaacatttgacacaaacgttcagaatcaatagcatcttgtattaattgttgaacctgaaaaatgaaatttccaaaatgccaaacatcagattcccaaccctactaggagaagacatgactttctaaccagttctgtttttggctacatttactggtacaaatgtaaaacctataaaagatcttaggctagactggggaaggaagttacctgcccatgtacacttcgcatttcaccttcttcatatccatccagtttctgtttaactcgcatcagtgcgcgagccgcatccttgttcccttcgtaatcttgagagccttccaagcttgcctctacatcatcatcagattcctaatcaaggatgacaagaaaacaagcatataaggcaaagttggaataattaatgaataattggcaccattgacagacaagagattgtcttatcaatttcccacaccccattgcacctaccactttattgattatgttgttcctcattggtaaggcagtatactgttaaaacattatgcttttgcacaattcattagtgaaatattgaatactcctcaaccctatattttctacttagatgaacagcaagcatgctagaattagattgcatatgcacatgactcagaaccgtcttgcttcttctcattctgagattttgtttaatttttttagtagatagtcctcaaa

SEQ ID NO: 313431 - DNA, 1335 bp, Cannabis indica
cggacataagagggcatcagaccccatcagacccaatcggacaagtatcagacccacaaatcacaaaaggcatcagaccatgtatcggacaacatcagacacaccatcggacttgcctacatcagaccctaatcgaactctatcggaccattatcggaacttcatcatcaaccttgaaattttctacaaaccctcacccatcggacctatatcggtccaccatcggacaccatcgggcctaaagattttctcgcacatacaacccaaaactgaccctaaaatctaaaaaaactttcacatatcacagatcaggcatcacaaatctaatatataccctaaatcaatgaattataaatgaaaaaaataaacaaaatccatgatttttaaaaatagggatttgaaaatgtaccttagacttagacatcgagtttggggttctccgtgcagtattcggttggtcggaatggtgggtgggggtgggtcggaatggtgatggtgctgtggggtaggcgttgtgggtcgatgtgttcttgcgatggggtatcgctcgggcagagagagaatagagggaaggagagagaaacgggggaggtgattatgacaggggtatttttggggtttaagtaaaatagtcctattttaacaattactctaagtttttgtttacctaagtaattatgctttaaaagatgcataaaaattcaaatttccctttatccctttcatattcccaattcagaaaaagaaaaagaaaaaagataaatgatgtgtaagtaatcgttggaacttttaaaattctaaccaattaaatttttttaaaaaaaccccataaaattaggttaaaactaacaataaatagtttacttagtttttaattttggaaccatgcatgtgtattgagaacacaaattttattatcattttttttttcttagtgctaacatttatttatatataaaatatatattatatataaagggatttaaaaaaaatgcgtcttttaattttgagaccttgtgcaatggcccaagctactcaatgtattgagaaaaggagaaaaagaattttatttgtgttgcagaaccaagaatggtcaagtctatatatagagcttgaaccaagatacaaagaagataataaaacggttttaactaacaaccgttattacagcaaaaactaactgacataacaaccaaactaactagatattagaaaatgaaatacaaccagctgaataaaccagtaaaaccagcaaagacagtaaaagggggaaaacagagtaaataggaaggaaaatagagtaaaactcaataccccctcctcaagatggagagt

SEQ ID NO: 313432 - DNA, 789 bp, Cannabis indica
aaaaaaaattttatgaaacaaaagttgaaaaggaaattctttcataccttgttgaagagtcattacctaaatatagtctttagacattagtaattaaaagaagaaaaaaaatgattcattaggagaaggtaaagaaagagaagtggatgaattaacgtatacattagtaaagaaaataaaggtagagctatagtatattaaattaggtcttgagtgagagttatacatatatatatatactaggcggcaactacgtgtaaggcacgttgtgtttaattatatatttacatattatattattttacatattcaataaattttaagttctatattttttcagataagatgtttaattatttcaaaatattacgttagattgttatgctaattcataaaatattaattttatgttatttataatttaagatgaagaattagaaacttcttcttgttttgcttctttattagagtatacattgaaatttttgaatcttcgagtcttcatgttctcttggtcaacatatatttgtatccaatacttagttgtctattcgtttgaaatatttttgttatcccaatatttgcactctgacatggcatcacatgatggtgacacgtggaatcaactctgagtatctgcccgcaagatatagtccgaacaggataccttatatgcatgttcaaggcaaagcaatcaccaatccgcatagagcgaccaacacttagcgaatgtagctttcgcaccgtgagtcatcaaagaaatccctataacttagggatcagattgca

SEQ ID NO: 313433 - DNA, 1374 bp, Cannabis indica
agtaaaattgaatgaaattagaccaaagtccttaaattcaacaatatcttaatagttcaagggaaatttttaatggccaaaaaagttcaggggcataatttaatacatgtctaagtttaggggaaaaaaatactaattagcctaataaaaatattaatgctgaaacttagctcaacaataaatttatgtttctacttcgaattctttacactagaattatcccaatcataatgaacatctatactttattacattattcttccaagatcaagtgtgttttgaaattgtaattcgatagagttttgattaggttagtttgatcgaatctgtgccgttttagaatgatggagtttcttatttataggcaagaagagatgtcatgtgattcatttcctttgctcgaaatggtccacgtggatccgttctcctcacttcctcgcgcactttccctcttgctcctctcattgagcttggttctccaaactatccttagcgctgctcttctgccttacaaaaaataaatctaattcaattctatcatattattttaaatatacaaatttaattaaaatataatatttaaattttaattttgtcatattttttttcaaaaaaattaagttctttcatactttttaaattttaaattttttataacgatattagctttaaatttaaatgtaaaataacaaaaaactgtcaaattaataatttcgttaaataactaaattttatatataaaaataaagatatatttagaaagaaatacatatatataaaaacaactaacataacactatagcatcttttttttttatctaaatttgtaaatttctcctacataatggttgttagtattaggggtgttcatcaaattcctaaaactgctcaaacagtcgcaccgtatcacactacaaaaaaaaatacggtttgaaattatttgcagcacggtcacaatttgaatttttcctaaaccgcgcggtacggtgcggtttgcaattttgaattgttaatatgcgattcaaactgcactgcaccgcacattataaaaatattaatttttatatttatttaggtccaatatgtgaatgttcaacctaaagtccactaattattttattgttgaaacttaatttttttttcatatttattttcaaaccttacggtatttttgacaagtgttgcacaagttttgttgtatttgtgatagtttagttatttagtgatagtccaaactgcagaaactgcaaaaaccgcaccggcccgcactattttttacggtgcggtttttaagtttcacggtacgggtgtggtttgagaaattagaaaaaccgcatgtgcaggttggtttgaaaaaatagtcaaaaactgcac

SEQ ID NO: 313434 - DNA, 1007 bp, Cannabis indica
atgctgtgagagtttgggggtatttttggggttttgaaaaaaaaggtatagttttttagggtttaaattattggttagaaatcaaattttttgattttctaagtatagaaaatcaaatttccctttaaatattaaaaaatatagtagcatctcgtaactatttaatgtttatataccgcgggccaaagaagtatcccaaaaccactaaagtaacattacagtcccaactggacttgtaactatactattacgggtactgagaacttactcgacacaaccattacaaactcaaaatattctactgcaaccaaactggttatgcgacacactagttatttcatgttgtagaagacaataatttacttgtgctccttagtattcttactaaaatccttggtactactaactatatcctctctagctaacattttctttatggacatatttacgagaatgagaattaatagtataatattgatttctatacaattatttaatatgttttagctagaaatagagaaagtagtagaaaataaaggaaaagattgtccccatttgtataggaatatatttctcatatttcctaacttattttatttttattttaattttattcataaaaaataaaaaagacaatatgctttttaaaaatctataaacaaaaaataattttttttttgaaagcaataaaaaataatttcatgttctaacaatgataattttatcaaattgaagcattttaatacctttcttatttatgtaaataaaataatatgattctatttttttttcaaataatttagtaaacaacataataaaatataatttttgattattattttttttttatttttaaacaaattaattcgtttcatccagacaagattcccaataaatactctcgatcatttattcctaagataaacaacttaagtacatctatatatactaggtgattgttacgtgccaagccacgtagtgttagttttatttaatattttagtttt

SEQ ID NO: 313435 - DNA, 650 bp, Cannabis indica
cccaaaattatctgtctaaatactttagggctttagaagaggcccatataaattggttatttatcaatagattttttttagaggaaaatatcatttagctatctattttgcacgattacttgtttagattttttttcttttcaatactttgcaagactatgccaacttctctccctttttgtgccttttttattttgaaatggatgttataatttctagttactcaaaagtttgatagtgatcccacaatatcagttgtcattttttttttgaattaatttctcattacatgataactaattacctatatttctggtaatataggtaacaggttacctcttttggaatttagttaccctacctaggataattggttcctctagtggtaacaaattactcatcattataactcactcaacttagatttagtaaaaaaatcagatttgaaaacgtgaaaggtatcctagctattaggggtgggcatttgatccaatccaactttttttttcccaatccgatccaatccaattagtaattggatttggaaaatcatcattcgatccaatccaattagacctcaaaatccaattggattggatcggttttttaattggatattcaattactcacctaaatttcaatattagctt

SEQ ID NO: 313436 - DNA, 1139 bp, Cannabis indica
tctcaacatagtaataattgtgtaaattgaactgaaggaatatggaattgataattatatgtaatatacaatcatatgagagaatacaagttgtacatatataattactatcccattcaattaattttatatttatttattttgttgaaaataactaacataacaatatctgtattttgattgttttttttttttggtaaatcatgtgtattaatcacaaaattgttgtattttgggtgtacaattaaaatcccacattgttacattatgtatataagaatgatcactatctcaattagaatgaaactttttaagaaaaagttcctaaaaataaataggtgagggcttagtaaaacttccacacaccaataactctaaattaataaaatgtgcttgtagtaggaagtctttgtttcagagttaactaattgataactctgtttttgggatagaaaatctatctcatatcacaacaaaactcccaattcttaaattattttcagagatcagcaatagaaaaattaaaatcttggaactcaatttgagagaaacataagttttaacttctcttttgtttgaataactttcttccaatagtagctaatctcactaatcctgactcttaagatgattaagatagacttcattgaccaattttagctaaagattgtcttggcctaaacatgtttcccaattgtacaatgattccagaagacaatatccttgaaacccaagcctcctttctatggtttgatgtattttttttcttttgttttttgttgtgctttcctcactatttctatagctgtatatctcaacttcttttttatgcaatctttcactcttaatcaaattgaatagtagtgtttgttgttgtcaaaagtatatgtattgtttcgcaagtataaactcacttgagtgagattgtcctacaaggactgtaactaaataccaaaacattaaatttatgtttctatttggtaatcaaaaagttgttgtaaagctaaattgaattaaacaagtaaaccatgaaaatatataattaatttaattttatgtccataattaaagacaaaatgtacaactttgtgccttaatcacaactcccaattagcttattgctgtctctaacaattcaa

SEQ ID NO: 313437 - DNA, 606 bp, Cannabis indica
aacttaaagaataataaaagtagaggtagaggtaaaaattaaaataagtaaaataaaataggtatacaatataatttactttatattttctctacaaaaataccccatccgatcacctataacacaaaatgaattacacttaatatttttaaataaaacaatatataaattattaattaagaatcagatagattttataataataaaaactgtatatttttaaatcttaaaatttctttgtatagcctaaaaatcacaaaacataaaaattataaactttaatcattaaaaatactcaaaactaataaaggttatctaagtctaagaaaattactaatgcctggtttaataaaaatgtctcaataaaattattaaaagaagagtaatttgcggcataaatacctaagttctatgccgagtagcagataaatacctaagtcttatttttgggggtaaaaataatttccgtcactactctggaacttccgtaggtacctctccattatgtgccagattagtgtccacatgtcatcttcgcattggtccacatcatttagttattattttttattatttaaaattcattacaatatttgaaaatcattt

SEQ ID NO: 313438 - DNA, 3341 bp, Cannabis indica
agttagggtgttacagaaacattagtaaaataatagtaaaatatcaatttgtagatttatgtttttttattaaaaaaaaatatattaaaataatattaaaatatcaatttatagatttatgctttaatacaatattaaaattgaaaaaattaaggagatataagaaaaatagttttggagtgattttagaatgtaaagtcactgtttcatatttctcatttatatatattaatattataaaaagaggtgacgcctagctatactatacactattctacttgcctagtctttatagctatgttagagctatacagaaaatcttccaatctaattataatcgatcgattgaatcctaatcgattcaatagaatcagatatgcaatcatattggatcgaatcggatgtaaattttgaaaattcaatcaaatcggatcgaatcacttgttggatgagacatttgacccaatgcataactgaaccgaataaaaccactccaatggataactaaaccgaatagaactgatccagttatcatctaatagtcatccaattatatttatatacttttaaaatacatttataattttatatatttaatatattttatttaaaaaatttataattaattttattcttattgtgcatctacacacttgaggttaaagaaaaaaaaacttagatctaattaattatttctcatcatcctataaatattaataaaattatcaatacgtattgaataaattttattttttagtggtattattataggatcatgataattatgttgcactaaactaatatttattatatatgttgaattattaggttttaaattatatatatattatatatatatttaatgaaatcagcttaaatgatagttaaaataaatttgatggatccaatccaatccaatagaaaaccagttgctgcatttaatggttggagtcgatccaatccaatatatcaattgaatcggatcagatcagatgactcaatttaattggatttgatcgaatgacaaaatctaatatcccataaataattagtttagattggttgggccaaatctattagatgtgatccaataaacacttctactgcaaagattttctaaaactacaggataaaaaatggctatctttgcttatgcacacaatgatttcttttatattctgtaaaaaattacatatttaataaaattgacaaaattaatgtgaattgtaatggtaatcataatcgtttaactccattatatccattacaatacaatagttattacattgaggtgatgtttagtttggtgagatgtaataataatggtaattgtaatagtaatgtaatggaataaaaatagtaatgagaattgattaaaatgtttggtttgttgttgaaataatattatcataaatgataaactgacaaaattatcctgtactttaatttttatatttatattaaataagagtattagaatcattttaactttattgtatttagtcttttgtaatgtaatcctcattacatagcttttctaatgtaatgagaatttctttgtataatgtataattacattgcaatcttattatatcatttttaaaagcaaagcaaacattataatggataatttaatctattacaatataccaaatatgccatgattattataatgataattacatatcaaaactaatgtaatcctcattacaatcaattacaagagtaaaataataatttaataaaaaaaatatagtaaacaaaagttaaaggtctatattatccctccttttgaatattttataattataaaataaaaatgatagaattattttagttcatacacattttatttcattacattctctcatactaaattaaatacaataattctgattgtaatgttcattccacctgcaattcaaatattgtaatcaatttctattactattcttattctattatatcactattaacattgtaaagtgtgaagagctcactataaatagattccttgaactcactgtaaaggggactctctggtagaaaaatattaacaaaattgtagtttttctaaatagtgaatagagtaatatttactttgagtattcatctattaagatattgaaacatcatcttaagttcttgctatttcgttgacgagttcttaccgtcaataatttggcaccatttgtgggaagcgacacaaaaaaaacaatgtcatttctttacctagaatcattgagaagatgtcaaaatgttctcattgttgccaagaggtggaggtgcgacttgatggccttcagctgattgcctcaaggcctgacccgccaacacccgcctctagggggaggtatgggtggccaggtgcctcaaaatggaggaggcacaaatagttatgaaccctcaacgggagaagggaataggcgactcgaggacaagcaagcaaacaaccagcaagatggagcgaccgcctccatcatgttggaggaaggaagaggagtgcaaaggcctaaggccccatctccaataagtgcagccactgagatcgggagaccccagaacctcacaccactagaaaagcaagtctactcggtgagttctagctctcagacttggctacacaatgaggagatgaatgagttgagaataagcaacttgcggctggaagaaatagtcgcaaacatgcaaagggtgttagaggagctcttgataggccattctgaggcacctctactcaggcaaagaggaccagaagcaggaaaaagaggagtaagtgggctggaagatgggggagtatcaaagtactcgaaaaataacacccccaaatcctccccgcaaagagctttaacccaaaaaaatttcgaaccctcatcgcgaccaaaaaagaccgagtctaaagcggtccaaggtgacttgagagaaaagctctaccagaagtccatgaccaagaagcagacgctcttggtagattcacttcaaaacgaaaaaaacaaagccagccaccacgaacctgcgggagaagctaactaaaaggaggaaggagttagataaggagatggaggatcttcgacgggggatagcatcagctgctaggggtgttcgcggtgcgggtggtgcggtttttaaccattttctcaaacccacctgcacatgcggtttttctaattttgtaaaccgcactcgcaccgcgatactgaaaaaccgcaaaaattgcatcgcaaaaaatgatgcggtgcggtgcggtttctgcagtttatgcggtttgaactatcacaattttttttttgaaatcatcataaaataattaaactattattaatataattattccaaaacac

SEQ ID NO: 313439 - DNA, 1789 bp, Cannabis indica
gcattgtcacttctagtacaagcacctttgattccaatgttagttcctgtagcaactgtaataaatctcttgtatctatttttgaattgtgacataatagattaggtcattcctcagatagagttgtgcaatctgtgttaaagtcttgtaacatttctattggaaataataaaaggcatatttctatttgtcaagcatgttgtcttggtaaaattcataagatgccctttcctaaggcttcttgtactgagtattttgaaccattacaacttgttgtctcagacttatggggaccttctcatacagtctctcataatggctacatatactacatgtcctttgtaaattctcacactagattcacatggatttacctattaaaaaccaaatctgaagctctcaaaactttctcaaattttaaagcaaaaattgagcttcaaataggtaaaaaagattaaagttctttaaactgattgggggtgactataggtcctttactaagcctttaaaacatgttggtatcattcacagacatccatgtccaacaacccatgagcataatggttagtggaaagataacatagacaaattgtggaacatggcctaagttttcttgctcaggcttctatgccattaaagttttgggatgaagcttttaggtgtgctgtgtacattcataacagattacttacacctgttttgacttaaagttctccattgacatactttttcatatcaaacctgagtataaaaccttagaacctttggttgtctttgttatcctaatataagaccttacaacaaacataaacttcaattcaaataattttttggcgggggtattttcgcttgctccttttctggcttaggattatcttttgaacggtctgtctccttgcatgtgcattcagccacaaaatatgccagagcttgtccttttacaactgtgcggggttgatagattatttcatactgccccaacttcatcgcccacttgagcagccgtccagatgcatctggttttagcaaaacttggcgtgaatgttggtcagtgtatacccaaactagatgagcttggaagtagggccttaactttcttgtggctaggatcaaatagtaagttaatttttcaatcaagggaaatcgcctctcatcctcaactagtcatttgctgatatggtagactggatgttgaacattattctcttctcttattagcacaacacttacaatgtatttggtgactgcaaggtagattccttattcttctctgtccaggggtcttgagagtatgggtggttctacaagttgcttctttagttcttaataaagaattctcacattcctccatccaatcaaacatcttttacctcagaaaatgttgaagaaaggaacacacttgtatatttattttgaaacaaatttgcttagtgtgactatccgaccagtcaggctttgcacttctttcacctttgttgacaatttcatatccagtagagcttgaattttctccgtattaggttctaatccttgagcattaataatgaatccaagaaacttacccgagctgaccctgatggaacactttaagggattgagtttcatgttgtattttttgaggattttgaagcattcatccagatccattatgtggccccagccttcctagatttgatgagcatgacataaacatacacttgcatgttacgtccaatctagtccttgaacatcttgttgactaacctttggtaggtagccctagcatttctgaggtcgaatggcataactt

SEQ ID NO: 313440 - DNA, 925 bp, Cannabis indica
tcataccaaggttcatgcttaactaagcattgggtcacggttccacatgcaaatttcgagaattcttagagtctgccatatttggtgtcgggtttcatcacaactgttggtgtggttcatatcaataggctagcgaggttgttcttgtgtgagtatctttaccaaattgcactctccaatgcttcccatagatgcacttttttatagatttctagcttgccactaaaaacaactagtatcagcaattttacaatacttttttcaataatgtggccaagcctttgatgccataactgagttagatcagattagaccatttttgaattcacatttgatcacagcaaaagaacctttgaatacaatcaattgactgctctcaatcatcatagtacaaccattggaagcaagaaccccaattaacagaaaattccttcttaatttaggtacaaacttaacctttataattgtcctagcaataccaccatgcatcttgatgataacagaatcaatattttatactttacaagctttgttatttttcaaaagaattgattttcttaagatttcttcaaaagtactgaacaaatctttatttggacacatgtggaaagagcaccctcagtccaatatctaatcttcattaaatttctcatttgaaactaccagcacatcactagaattatatccatttgacatcaatcttgcttctccttttttttactgtcctttcttttttttttttaattggtttctgagtagatagcattcagatttgtagtgcccttctttcttgcattagttacagaattttggcagggttggatttgaatttttctttatgatgacatttgtgttgggttttgtgtcctaaataaaacccattacaatctaatctgattagttatcaatttaagagttttgaagt

SEQ ID NO: 313441 - DNA, 953 bp, Cannabis indica
acaacaaaatttgagcaacacttgtcaaaaataccataaggcttgaaaataaatatgaaaaaaaagtttcaagtttcaacaatacaataattagtggtgggcttaggttgggctttcacatattgaatctaaatatatataaaaattggtatttttatactattaacaattcaaaaccgcaaaccacaccgcaccacgcggtttaaaaaaaattcaaaccgcgaccgaaccgcaaagaatttcaaactgtattttttttgcgatgtggtgcagtgcaggcagtttgagcggtttgataaacacccctagtaccgaagtctcaaaattgaaagaaattctggacaatccttaccatatccattcccacaatagaccagcacttctgataaaaagttagggtcatctggacctcaacttttatctgggtatatttagaaaacggccttcttgacttcctcataagaaactggttgaagtagctcagagttagtcaaatcttagactgatcgagccacttcatttaccacatcagattcatcaatgcttaaagcagcaaacagatgaagtcatccgtaacaacattcgagagcccacactcccaatcacacaacacatgaccttgatcatttttgagactctgaattttgtaatataagtgtatgctatttaatatatattgtgtagtttattgttgtttgtatgtaagataataaaataataaaataataaataaaaacaataaaacatggaaaaggttgaccaaagagaccggacatccaagtcaggacatgattgcaaagaataaaacagatataaaaatttatcatgaattataaattataatcataactactctttaagacttttttttttttatgtgtacataatcttaaataaaatatataaaaaaataaattccctgctggccatcaagtgggcatatatactattat

SEQ ID NO: 313442 - DNA, 1032 bp, Cannabis indica
taatggacatacatctactttcaatttttattgctcaagagaattataagaaactggccaaggcaaaagctctaatttttagagagagagtgtagagagaaattctctaaccttatggggacttagaagaatgtgaaaaaatgagctagaagagctctccttttatagggaagggggtcctattaaaatattagtaaaataataaaaaatgtgaaaattaacttttgactaatcttggccattgatgattatctaatggtgaaatattgactcttgataaaatcaacaatttttgtagtttgaatctcgttcattggattatttttggagaatctgtcgaaaaattgcattgtattggggcaaaatttgaacttgaaatatttagaattgcaatatgggtgtgagacatgacttgaatgagatttgaaagagatttaaaattcatgttgaattgcatcaatcgtataaatattgagggagttatggctgtttaacttaaggatatttagcacccagctccaaggttaacatccaacacccaagttgacatcttgccattaatcaagatgttgagtaagtggaaaaatgtcatggacttgttttttatgatacttaagtgatttgttaacatcacttaatcattctcttcactttggtgaagttgtttaccagttctcggagacgtggctttttggtaaaatcggggatactcaaaactccccaattttgcaaatattccaccttgttaaagggtgaaacaccaaagtatgaatttttcctatcacaagtattagctctcgtcttatacaaaaaaaaatagttggatggtcaagacaaatttagattctaataactagaacccaatccacaaggctatctatcagcctaggcgctgggtgcttctcgggtgacttctcgaggctcattttgatacttctacgacatttgagattgaaagcaaggtctcctacctcatttctaacaataataagaagaatgctcatagtagaatttgtgtttaaggagcgaaaa

SEQ ID NO: 313443 - DNA, 856 bp, Cannabis indica
aattcgaatcgagattgcttgcatcaaagaacaggaatcaatgaaccatactagacaccgttaattaaagctttcataactttaatatgttgctactattctatttatagctaagtgatcttaattctttgtacaatataagccacaacctcatatatgaataaaatatgagtaaaaaggtttcatataaagctcgatatgagtaaagcctatgaccaagtcgagttggactatcttcaggccattatgagtcgcatgggctttcatgataagtggattactctcgttatgtcttgtcttacctcagttcggtataacatcattcatggtggtcatgttgtgggtcctattaccccgtcccgaggtatccgtcaatgcgaccccttatctacttatctttttatcatatatgccgaaggtttatcaactctcatcaacaaagctgaaacaaatcgtgtcatccaaggctgtcgggttgcctgtggagcccattccattacacacatgctttttcaaatgacagctatctcttttgtcaagcttcgagaggtgcaagcagggtgttattaaactccttcatgagtttgaacttgcatctggacaaaaggttaacattgctaagtcatctatatttttcagccccaactctgatgctcaaactcggtcacaaatctgctccattcttggtatgtctgaagcttctgatggcagcctctatctaagcttgcccaatatcattgggcacaacaaatcatccatctttggatttttgaaaaataaagttcttgcccgtatcaacaactgggatggccagtttctttctagtgccagtaaagaaattctactcaaaacagtg

SEQ ID NO: 313444 - DNA, 1673 bp, Cannabis indica
gtgtgcaatagagttcatctccgcactggtacatctcaaattgcttatgagctatggaaagggagaccaccaaatgttagccatatgcacatttttggatatacgtgctatgttctaaatgaccgtgattacttaggtgagtttgaccctcgaggagatgaggggatatttttgggttactctaccaacagtcctgcttacagggtattcaataaaaggactcactctgtattagaatcattgaacgtaaagtttgatgacttataatgtagtgaagaagtgagtgtcgaggatgatgcccctgttctctctagacctagaccagtcaccactaggccaacccaggtgtatcctgacactcctacaaagtccctaaacatcgaaccggcattatcagatgaggttgatgcagatgtcagttgtcagaacagggaacctgaagtcagcattgctatgcccaaagaaccccaacatgccaaactttacaaaaatggactaccaaccttggttcaaaaagctcatcctcaggcagttgtcataagcgatccgaatgacaccatggtgaccagatgaaaactgcagaacctgttggcgttttcctactatctctctcaaactgagcccaaaagtgtcagagatgatctattggatgaattttggttggctgcaatgcaagatgaaatgggaaactttagaagacttggtgtatggattatggtcccttggcttgatgaataaaatttgataggaacaaaatggctaggcttgttgcccaaggatacagtcaggtggagggaatcgactttgatgaggcttttgcacctgtggcccgattagagtctataagactcttactcatcattgcatgttttctgaagattagactcttccaaatggatgtcaagagtgcatttctaaatggagtaatttgagaggaagtctatgtcaaacaaccacagggatttgaagatccgcaccatcccaatcatgtgtacaagcttaacaaagccttatatggattgaaataggctccacgtgcatggtatgatcgactcacctcattcttgatttcccatgaattcataagaggtactgccgatagcactctattcattaaacatcttgaaaaaggactttttgttgcccaaatatatgctgatgacatcatttttggttcaatctgtgaaagtgaagtaaatacatttgtcacattaatgactagtgagtttgagatgagttttataggggaccttagtttctttataggactacaaatcaaacaattagatcatggcactttcatatcacagtcaaagtatgtcaagtctatgttagaaaagtttgggttttcacaagtaaagcatgcacatacacctatacgcacgacaaccaaatggtcacgtgatgagtctggcgaccctgtagatcccactcaatacagaagcatgataggtgccttgttgtatctcacagctagtcgacctgatatctccttcagtgtcggcctatgtgctaggtatcaagccaaccctaaacagtcacatctctctgctgtcaaatgaattttcaaatatcttgctgggactgttaactatggtctctggtatagctgtgacacaaataccaccttggtgggatatagtgattctaactgggcaggatgtctagatgat

SEQ ID NO: 313445 - DNA, 3600 bp, Cannabis indica
aagcccacactggtccttcattgaatccgcttttgcttttagcatgcgccaaatttaaactacattatatactactattggtatttaattttttgaatatggactaaaaaatacatgtacaccatgtttatagcactccattaaaagtgctcttagccgtttgttttctaaaaagtaacatttttgtaacatctaatggctcccagcaatatgagccgatgttaaaaacatcaaacacattgaggtactgcatgattggcctaaaaagtatttctattaggcatcagtagtgcctagcactttctaaacgtgtgtaacaacctattagttaggcacgctacaattttttcttaattagtgtacactctccatgctaatcaaaagtgtttgttgaaaaacgtgaataattaaaattttcataattaattttaatcttaaatatataataatttacataatttagaatcccattttaaaagttacataagtttacaaaatacgtgtattacaaaagtcatcgtgtagcgactatcaaaagtgagcttaaattatcccgaagaccctaaacactacatgtctaactgtcttgatatgtataatcttcatctagttctagacttatccgggttcggttccaactcttacatgcacaaacatgtaataattgtgagtcgatagactcagtaagaaaaacataaacataaacataaacataaacatatattcaaaccataaccaggctcctatacatctaatcataatctgataactgggctaggaatgttctcaaaaaaattatgactaatcacgaatccatcctatactcaatactctagtcgtaatgatgtggtagcaattagttcatactatctggaagcttagcatatatttattaatatctcaatgcaactctatgtacactttaccaatatcctgatatgctaatttgatggctactgatttgccaaacatatatccattggcatctcggtgcaactctatatacacttcactaatactcttatatgttattctgacggcaactaacatgcacggtaaacatgtatacatatatccaactattatactaatcttaccttgattttaaatgcaagtatgtcgataaccctgagtgaaaactgctgctcgacgatttacaggtccttaagtcacaacataagtaaaattggtaagtgatacgctaaatcactttttgaggacttaaacttaaaactaaaagtttctctatcaatagataacgtggcaataccctaaatgtgatgaaacatgaaaaaactaagccctagaatctaaaaaattcggtaaattgaaaccccataccggtctaccgttttctagggttctgctagaaaaaccggttcactgtttctagagaaacagtgaatcgtttttccctgaaaaaaactcccaacttcaaaaacctgctcaaaactcccccatatccaaccaaactttccaaaacacttaaataaggcataaaggaccaaatccaatcaaaaatagcatcattaaagctcagaattgagtttttccattgatgagctcaaacttagctaaccaacaccaagactcacaaaaagcgatcaaaccagctccaataaactcaaaattaactctaaaaataaaccccaagaaacttaaacttaaacataaccaaaaataaaattttacttcacaacttagctcaaaacctagaaaacaaaggaatggagaaactagggctcttacttttgaattcacccaagaaaattctttcaaatcttgctgtaatcatcaagaacaggagtgaaatggtccagtcttgcttggttttctagagaggcccagagagagaaagggatagggtaagggttttcttctttttgatttatctcttgaataaaaaaatacaatctaaatctcttttgtcttattctctaaatatatccagcatgaactaactaaggaattactagaattccattaaaaacaataattgaaatcttagggcaaaatgacaattttgtccttacttaaccataaagcaacctaaatagtctaggggtgaaatggtctaaaactataattttaaacaatctcgatatttcaaatgtttatctaaatgactctaatggccaaatcgtcacattcaactattatcagcataaaacatgcaattcataaaaattcacatataacatatataatgcaatgagcattcaaatatatgtccgtaattgagaaattattttcatatggcctatttctgacaataagccctatttcctactaagaagtacataaccataaattaataattaaatcctcaaatttgtgctaattctcatgatttaactacacgatcattacaatgtgtcaccttataattggttaacgattctctgtagaagttattacattaaattatatgagatttgatacttaattataccaataacaatatcaacacgtaaaaaaatgctagacaccattgatactagtgcggtaagttcgtgcatgtaatgttggcccgacccgtatttattcgtggttttcaaaaaacgagccgtgccgtgccgtgccacaaaaaaatatggagcatgtcgtgcctactttttaaagagaaggtctgacacgacccgtaagcccaatattttcgtgtcgtgctcggattcgtgccgtggttcgctcgtgctggcccgtatttcttaaacagaccagtccattttcatatctggacttaaattactgctttacttttttatatatgttttttataattactatattatatgtatattttaaaactttagttatatttatataacttttgaacaatattctacagataatcatacaaaaaaattatcaacattgttagaatttgaatatttacttataaatactcaaattttaatatcacaccctataaataaattaatatataatcttaatttttcatgttttaataattttaattataaaattataatatttagtattatatttaaattttaatattattttaacttatttataattgataaattcatattttattattattattaataaattataaatatttttaatatgtcttgtcgtgttttttggacttttcatgtgtcgtgctttttgatctagtctatttgtgcttactaggggtgtttgcggtgcgggtggtgcagttttgactattttttcaaaccaacccgcacatgcggttattctaattttccaaactgtacccgcaccgcgaaactaaaaaatacagaaaccgtaccgcaaaaaatggtgcggtacagtttttgcggtttggactatcatcaaataattaaactatcacaaacacaacaaagcgtgagcaacacttgtcaaaaatatcataagacttgaaaataaatatgaaatcaaattttaagcttcaacaatataattattagtaggctttgggctagacattcacatattggacctaaataaatataaaaattgatattttataatatgcggtgcaatttgaactaattcaaaaccgcaaaccgcaccgcacaacaaagaatttcaaactgcatttttttgcgatgtggtgcggtgcgg

SEQ ID NO: 313446 - DNA, 6492 bp, Cannabis indica
gacccaaactcagacccaaatattgaaccagacttgggacacagaatcggccgggacctagaaccgcaccccagctttggtcctgaacgcaaactcgaaccttggactcgcgacctgaattagaaccaaaccgggacacgtgagaaggatccagatctgggactcagaccaggactcgaactcagaccaggtcccaaacacggaccatgaccaagacccaagaaccgaaactggaacttgaaaaagaaccgttagaccaggcccctcgaacaagactaggaccgtgacaagtacctagagccagagctagaacctaacaagcacctagccccaagcaaaaactgagactgggactcgagcccccacacagtcctgtacccagacccgaacctagactgggatcgaaactcgagacctagatctggaccgagaccttgacctagatacgaccgcacctaagacccgaactcagacttggaccccaaccaagacctagaccaggatccgaacttggacccaaaccaagacccacactcagaccaagacttagaccccgacctagaccaggataaaaacacaaacccagacactgcatcgaaatcagaactgtgactaggacccaaatctgaacattgacccagacccagacccagacctaggacccagacctagatgggggacctggacctgcacctcgaaacccaaacccaggatggaactagggactcggacccgaacctagacctagactcaaacccagatctggacctagaccgagatcggaacctgaaccaagactcggataaggacttgaacctcgatcgggtcctagactaggaccaggacctaggactgaaaccaggatgggggacgtggacccagaacacgggcatcaaaactggaaccgtgacccatgaccctacccagacaaggaccatgacttaggacccggacccggacctgggacccgaagtggaactagattgggacccgagactgttatccagatctgcagctggggcttggacctgacctgtagtcagtgtttggatctgagacccatacccagactcaaaccttgacccgaactcggacctaaacccgtaccccagacatggttccgagtctgagtttgggtttgagtttaggaactggaatacgaataggacccagaccaagacccagactgggacacaggctcgaatcaaaactcagatcgagagacgggacacgaacccgatcccagacacggacttggacccagacccagacctaggacgtagaccaggattggagactcaaacctagacccacgatccagacctagaatggggacccaaactcaaaattagaaccaaaatcaggacccaagactggaactgggacccaagacccgaccctagtctcggtcccagaaatggacacgtacatggacacacaccaggacccaggatccaaatcaaaacgagaccggacaaaagattgggatctggatcttgacccacgacctggggcttcgacccaacccgtagtcggtgtctaaatcttgtaatcgtaccaagacccgaacccagaacaatttctagaccaggacccaaaccttgactcgaagtcgagtcctgaaatcggaacaagaacctgaatcaggaccctagaataagaattggacatggacccaaaaccggatctagatgcagaaccgaacacggacccggacctagatcgagatcgatacccagacccaaacttgcgctaggacctattacccaaaacatgcaacccaggacctgtgacccggggcctgaaccagaacccagaactggaccagaacctagacctagaccaagacccaaacccacatcaggccaagaccttgacctagacacggactgatacttgaacctagacctagacccagattcagacccgaaattataccagaactcgaacccgaacgaaggactcggacccagactaggatcgagaactgaacctagactgggactagaacctggcctaggaccgggacggggaccaggacccgatactcggacctgggacttgagaaccgaatcgggacctagacctaaaccaagccaagaccagagacaaggactagtactgatcatagacgaggatgtacactcggactgggacccaaacctatactgcgaccttggacgctgacctgaatcagggatccaaccctatgactcagaacccaagacccaaacatagacccaaacttggtcctgagaccccaactaggacccaagacatgagctagaactggaccaggatctgaatatggacccgcgacccaagaccctagactagaacccgaacccgtactagaactcgagctagactcgacatgtggttggtgtttggattagggaccaagactaagacttaaaccaaacacgaactagacccagaccaggactcggaccctgacccacacccaaaccttcaatcgtaccctgtgacctgaaattggaaccggacttagaagcggacccttaaaccctaaaccctaaaccttagaccctaaatcctaaactctttagacttacccctaaaccctaagccttaaaccctaaatccctaaacactaaactcaaaatcctaaaccctaacattgacacgggcccagacccatacccataccaagatcggaacccaagaccaagacccaaaactgaatccagacgcaaactttgacccatactaagggcctgaactcggacccaaacccagaccagaacctgctatggaacaaagaccttgactcggacccgaattgggagcctgacccagacgcaaacaaggactagacgcagaccgagaaccagacccagactaaatcctgaacttgtactcggaccttgactcagaccaaaactcaggatccaaacacgaacctaaacttggacctagagtgggacctaggatccggacctagatgggggacctgggccctaaacccgaacctagacccaaacctagaccaaggatccagacctagatgggggacttggaccctaagttggtcccttgaaccgggaccgagaccgagacccaaaactcgaccccagacacgagacacaagacccgaccctagacccaaaacccaggacatgactactgggacacaaccccgaacccgaacccacacccaaacttagggcccgacccgagacctgagacccgaacttgaacaagatcgagatccaagatctagatcccaatttggacctaaggcttcaacctgacccgtagttagggtttgaatccaggacctgtagtcggatccgtacccagaccggacccagatacaaatcgggatgcagacccaatcttggacctaaaattagaatcagactaggtctaggatttgaacaatgacctgggacagtaacatgacccaaacctaaacccaaactcaaaccagaacccataccgagacttggacccggaccgagacctgtgacttcagacctaaaccaagacggggatctggacccaggccaaggcctaaaaaccagagccagaccagggacctaagaaccaaactaggacctgggacccgaaacttagacccgcactggaactgggactcgaacccagacctcaacccaaatcgagacctggactcagaccgggactcgagacccaaacccgaaccgaaacacgaacttggacacagactaggacctaggaccagaacgtagatgggggaccatgaacgtagatgggtgacccaaaccctagaattgggcccctaaatcgggaccagaacttgggcctcgaaacttcgatcgggattcgggacccgaccttagacccaaatgttgacctaggacccacctcaagacctaagatccgggacacgatgcttggacccgacccgtagtctgtgtctgtttctgagacttagagcagaagctaaacccaatctcaaactcaaaccaagacccaaacacatacctagacccacactcggtgaccaaaactgaaacctgaactagaacaagactgggatcttggaataggaccgggacttggaccctgacctgaaatcggaacagaaccgaacctcgaaccataaccaagaccgaaacctggacctaaacctcgccccacacccaaatcaagatccgaaaccagagtctaacccaaactcgacctgaacccgtaccccgtgacttgaaacttgaaccaaaactagaagaagattgggacctaggaacaagaccaggagcaggacctggacccaaaccaaaactgtaacaggaccaggacccggactcggacacagacccacactgggattgggtcccaaacttgaatcaaaactcgaactgggacttaggacccgaacccagacctgaactcagaccctaacatggaacaggactcaggacctagaattgggatcgagacccaaaactgcaccctatttttggtcccgaacctagaccgagaccgggacctgggacatgaaccgaaacaagactgggacccatgattgggatccggatcttatcctgagatccacgaaccgggcagacaacccatagtcggtgtcttgatcttgactcggacaaggacccaaagctcgaccaagacctagtccccgacctagacatgggacccaaaactcaaacatgaaccagaacatgaccaggaccctggaaaaggaccaggaccgtgaccaggacctgtacctagaccgacaccaaaaagtagaccataaccaagccccaaaactcgagtaaaaccatgtttgaaacccagcccctaacccaaataaggactgagactcgaactcgaccccgaaccaaaaattggactcgatcccgacccagaccaagcccctaacatacacttagattcaaacctggacatggacacaaacccagacccagaaccgattactaacccagacccagactaggatcgaaacaccggacctggactcagacccagacgtagacccaaacccaaacctgggatccgaactcagaccttgaccaagcctgggatccaaaaaacctatacccagactcgaactaaaactcagaccccgaccccaacctggacccagaccctaaactaaaataaaacccggactcggtattagaactggaactgtgactaggacccagacctgagaccagaaccgaacccaaaccataacccaaactcagatcagaacctagatcgagaccttcactaggactgggccttgagacttgggacccgaacctagaccaggacctagacatgacctggtcctataccctcgccaagacccagaccaggatccagaccttgagagggaccctaaccaaaaccctgaccaagactgggaccgagacctggagctgaatgcggacttggacctggactgaaaccaagactcgagacccaaacacgaaccttgtcctagataaaaacctaagaactgaacttggatgggggacctagaatagggatctaggccccgaaaaccagaccaaaattagaatttgagactctaacctgaaccaggacctgacttggactcgggaatccgaagtcagaccaaaactcagacccaaaaccttccccggacccaaacccaaaatcgaacctgaacccgggacaaaaactcagacccagacctagactcagacccaaacctagacctggaccttgacccaaactgagatcaaaacctaagacttagacccgcaactgaaccaagactcagatcgggatcaaactttggactacaactcagacctggacctagagaaaggacccgaaccaacacccggagcctgatctagacttagaccgaaatccagacagaacccaaagtcaaactcagaatcacaactgcaactggaatcggactaggactaggaccaggactacgacctaaacccgaacccgaacatagataaaaacccaaaccgatacccaaacccaaacccaaaccgagactaggactcaaagacgaatctagaccaggacccaaacctagaccaaattcgggacctagaccccgaatcaggatagggatatgggcaacgaaacaaggactgggacctagtacccgaccccaaacccggacttgaacctaggaccaggctcgtgacctggcacctgaaatataaccagaccgggactcgagatccgaatccagatctggaccaggggcttggaccaaaaccatagtcggtgtccagatctgggacctaaccccggatcgaacccagaccaaaaaccgaacccagactcggacatgaactgtaacgccacgtgtgtgcaatttaataaaatactctaatttatataatatgtaattatactgaaaagtgtgggtaattaaattttgataattaaaattcaacttttaaaactgtttaacaaaagataagtgatatagaatacggggtccccctgttttcaaaatatttacaaactggtttcaaagtattt

SEQ ID NO: 313447 - DNA, 772 bp, Cannabis indica
taagtatgaacaatatacataagttataaagtgagatgtcccccagtcctaccacgagctctgtcggttgaattcataattataccatgaacttgtgatttgaatattcatctctctcaaatttaagataacaaaaaatatatataaatttgtattggataatgtgaaatgattatgtaagtaattataataaaaatgtatatatctatctctgcatgtatggcaagattgtcatgttgctaaaatccatattttgtggtcttcttaatttgttggattggattaaattacacatatgcatgcatggggttttgttttgttaggctaggcctaggccccacttcatcatgttttgccctaataatttcatttcattactatctttagccttttcttttggagtactgaacaaattatctactttacacaactacactatcactctacttaaatttaatatttatgtaaattttgtattttacttaaatttttatgtagttattttattataatataatagtctatttgttattaccaactcaagaattgatgttacattaaatgtgtaacagttaaaattttactataaaaatttacgtaagaatttaaatgaaaataattatataaaaatttaaccgtgaaaaatttaaatagctaggcattcaaatacaataaaatgaacttacataaaaaatttagtggcaaatatggtattatgcatatggatctgtactatcattattattaggtagtctcgatagtctcctctgtt

SEQ ID NO: 313448 - DNA, 1130 bp, Cannabis indica
atacatataaatataaaagtaatataagaatatatatatatatatataatataagatataatatatgatagatatatatatatgagtgtatatagtaagatatataatattatatatgagataataatataatatataaggtgtatatatatatcatattatatagaagagaaatgaagagtagaatataataaataaaaaataaatggagaaatgaagaagaatccaaagtgattgaaggaggatcaccaaaaaaacttgaataagatttcaatacctttgtctaaaaagtttattttcccttttgataaacacttagggttttatagaaatacttttgggaattatcaagccttaagaactttctaacttagtgattgaagatgaaaagtggtgtgtcaaagagtgaattatagggccctatttatagtgtttaggaagaaccaaactttgaaattcaaatcccacttacaattggcagttactagccatgtaggagatctttaaggataaaaaaaaacattagctaaggagtaggaaatgtcctccattgatcacataactttttacaatatttctctcaaaaaaggctctcagaaatatttcgtctggcatcaggcgacatgtcacttagagtaatttctattgaacctctaagatacgtcattgcacgatgttacgtaaccaatgcacactacaggcaagatgtcgcccattaagtggcaacatgtcgcctaaaatgtatcttcaactccaattttgagttttgaatctcctcttagaattattaatgtgaactaatataatcataggcataataccatattttacaatcattaactatgtgtctatttggtcaataaccataattagatggttaatagtcactaaatatattagaggcacatgagagcacccttaaaattataattgacccatttgttaacttggaaacttttactggtgacgtggacatcaatgtttgacacgcggcatgaagagtgacatcacggagttgagtagacccgagtcatagcaatcaacatgggaggggaccctagaaggcatgtcaaaaagatccattcattcgggtcggatcagtgatccgatccgacggatcattactgatc

SEQ ID NO: 313449 - DNA, 1262 bp, Cannabis indica
tcataactgtatcataatcatataattatttaaataatgtgaatgtattgtaccgtccattattcaaacaacacaactagtttaaataatgtgaatctgttgtaccgaccgttattcaaactacttatacatatctatagtctaaataatgtgaacccattgtaccgtccattattcaaaccacatacacatatctactgtttaaataatgcgaactcattgtaccatccattattcaaacaatataatataataatgaacaaacaaaaataggtttgaagtcttatacctcattcctactccttttgaacattatttcatacagaaaacttaaaagtttctacttaatttccttacctcgtggaaaaaatagcttgattgccttttacttgcgtagatccaattctttcggtacttgtaaatcctaatttcaaatcttaaattaaatactcagtttaaacaatgatagtaacttgaaattgatcttactatgaaatttattttctagtatcatgcttatcatatattttcttcgaaaataataccttaaatcactatccaacgaactcttgcatccaagcttgcgtaaaactcaccaaagaaaaagatgactatagtttcaactaagattagcgaaacatgtgacgaacttccaataaccaagatttaagcaagcttggctcgcactagattcttagactccgaatccttgatatcaaatacaagattattagagtttgactaaaagagttcataaaatgtgttttagaaaaattaccaatatgcggtgataaaaaattgaaaggcaaagatatgaatggcaatgatgaggctttgatcaagattatgactccaagtacgaagtggacacataaaaataaaagcttgaatcggtgatatataggtttggctatataggataaaagggagattgctgagagattgattttggttaatgaagaaatatgaagagtatggctctctatttatagacctctacacccacaatactataccaactgaccatattgttaatattaattaaccctagttaaggtttgaatctttaaattttgaatatcttcctagtcctatctcgggtacatgttcatgcacaacaatttttgctattatctctacatgccacatgtgcatgtccattcaaatgcataatggatatttatatatttatttatcattttttttaaattaaactcttattaataataatcagagtttaacacatcattaataggaaatga

SEQ ID NO: 313450 - DNA, 807 bp, Cannabis indica
tttaggaaaaaattatcccctaatgcatgcatagaacactgaattgttaaaacatcctgtgtatctcaagggcgtaaagttgagttacgtggaatccaaggatcgatgccacaccgaatttgactaccatttcctacttttaaacataagccttgttgtaagagctctctaccccaacaaattccttgccaaattaaagaagacatgcctccttgcttagcattcatgaaatcattatgagggaaatatctaccttttagaacctgacccagaagtgagttaggatttttaagagtctccaagattatttgctaacaaagcctgactgaaatgaacaaaagatcgaaaccctattccaccatccaattttattttgttttacaaagaagtttccatttcttccaatgagtcttctttttatcaatgtctgaaccccaccaaaactttaccatgattttctcaagttgtctacaaaaagtaataggcaacttaaagcaattcatacatatattgagatagattggactacagctttcaagataacttctgtaatatcccgataagtcttatggtaaataattagggtttatatttatattatggattaatcaggtaataagtgggattatgatcttactaatctattttagtgtaaaatttaaatttgctataagtgagtaaataagcataatttataaattatgaagatttatatagcatgtgtgaatgtaatatgagctttatttggaataaaaatatttttaggttcggcgatcctcaaaacccgataagtagataaataagtat

SEQ ID NO: 313451 - DNA, 1598 bp, Cannabis indica
ttttttttttttaacaaaattctctcaagaaaatggcttaacagtagcaccggtgctgactccttttttaattatttttttaatttatttaactgtgattcgatatttttaatcaacctccagaccttgtatggccggggagaccatatcctaccgtgtatggccagttaggattgccctggcaagattctttgtacaactgatacgtggactgcaagctacttacgaattgggccattaacaacccaacaaagtgatgaaaattatttactttcaaggggcaatttagtcttttgtatttaatcaatttagtatgtaaatatttaaggattttaattgtaaattaggatttaggctttcctatataaaggcttttaactctaacctaaaaaagctaagtctaattctagcctccaaatcactctaagtttgattagcattatagagagctatatctgaatagcattatctctagttatcaatacagctaaaaagagagtaggtcattactcgttaactaaaggagccaaacctctataaaaattcttattttatttactttattgttcttgttgtataacacgaggcaaacatcaaattcatacgattccgctgtcagtcagtaactttttgaggtcaatgagtttggcaattatttttagactagatttacatttgtttaggtgtggaccaaatttgggtgagaggaataatctgagttaatatttcttaaatctagtttcattttgaattgatttgtgttgaaataataaattatccttaaattttcattcatggaatctagaagggaatcgagaaatatgttgatcgtgaatggtagggatggcttgaggtgtttttttttcattattttgaaatagtagtcaataatgaactttaatcatgaaatatttatagcttaattttatgtgttttatttgataatttggacttggtttctttgctggaacaatcttcaatatattttgggatatatagcatttgtttatttatggcatactaataatgataataagtcatacagaacacgattaaattttgatttctgttttttttaataatgtatacagaacgatgataataagttatacagtatacgacacaacaagggatagagaagctcatatatgaacttagttctaggaaggaaaaagagagagtcaaggagagaaagtgggaaaagttcaacgaggaagagagagagttaggagatggatgaggaggaaaaagaaaaaaaaaatattattattttaataagtttataactttaactttttattttaaaatgattttttatattaagtgtatcaatataaacgtctcaagcgtataagagtgtacacataaaataaattattccatgttggtagtcaactttaaattattaacagttcaatagtttgaagagttttactaccacaatttgagtttaaaggctaagtataagtaaaatgctaagttgaaagtttaggcgccaaaaactctttcaagttttatgtattcacaacactttcaacaatatatccggctagcattagagaagttgctatctaaagcaaagatgaaatatttttatc

SEQ ID NO: 313452 - DNA, 2066 bp, Cannabis indica
acatagataggaaaccggttgatgaaaagtgtggattgaacttgggagatcaactttttggaacttggaagttgatgtgattagattgataacttttatgcaaacaattattaattgtgtttaactcacgaaatttcacaaactcgtaacaatgtcaaactcccttcttcttgtgaaattatagaaaagctaatataattgcgtaaagttaacaaattaaatacaattgggtacaaagtgcattaacaaaacagtacaaaacattatcatattattcatgagaatgaatttggaaaattttttatttttaatgattttttttagcaaagtttatgttaatctaaaaacttttcctaatgacatggacattaaaatttgacacatgacatgaaagatgacgtcagctaaatagacccgagtcatagcagtcaacttgggaggggagcctagccctacgcccagcttgactccgggagctgtaggaaggaagtttagacttcaataacttgaatcaaactcattatcttttagtattttgtaccatgaagacatggagcaacctaattcaaggtgcgggagctgaaattacacaaacctgcaaaactagaagccaatctgagcacctagggtttccacccggggcctaggttgacatcctcaattattattttagtttctgggaccgtcttagtgaaaagtggccaaaacgtgcattaaaacatggacttgacataccacagacatatttgaggcattagaatcaaattcaaagtaagttgagttttgagaacccaaggccttgagcccccagcacacaggttgacaatcagtcaatctgggcgccttcaaatcatcttcatcaaaaataggaaaataggtcattccagaggaaaaacaacatgttcagggcacaaataatagggcctagcgcccatgttgacacctagggctggccctgcatccaggttgacaatttgtcaacctaggccacaaaaaatggagtttccctagaattatttcgagtatcatctccgtttttagggaccaaacggaacttccaaaggggaaaaagagggacccaacacccaggttgacacttggtactgggccttgcacccagggtgacattttttcaacctgggctgtttcctattcagatcaaaaaaaattgctccgggcatcttcaccgtcatcagtaataatgaagaattaagtaaacttggggagaaaaacacaaactcgagtccctagaaatagggccagcacccaagttgacatggtgctgggcctagcccccaggttgacaatcaacctgagaagctaccttcaattcctcgaatgccgaattcgatgcgaccattgaatttggaatggtcaaaaatggggggagagaccttgtcctcaagtttagaatccttgaaagtatcaaaaataaaatcacaggagcttggtttaaaggccccagtgcctaggtcaacatttggcttggttcgctgggtcctgcttatccaaattgatgtcgttttgactgttcatcaagtttttcacaagagcaatgatccatgaagtaagattaatcaaattctcaactttaattttggctcaaccagaagcggaaagtttcgagtcttcaatttctgcaaaatagcaacatctccgaaaatgtgtgaccagcttcaccaaaacatagaaaaggactaaggggtgtaaaaccatcacttaggcatctcaaaggacttccctttgaaatttctacacttttacagcgcccagtctcacatctgatgttaacctgggcactagatgttaacctgggcgctagatgttaacctgggtgctggaacttgaactacctagagttaaacatccataactcactcttttttcatccgatctatgtgattcaacttgagttttgaagctatttaagccttttatcaagtcatgtatcacacactagtctaaattctaaaactatcgtcgccaaaatttacccccatgggatttacaaaataagctctgggtaactcgcggcgggacccgccagacataaaaaattagccatc

SEQ ID NO: 313453 - DNA, 3694 bp, Cannabis indica
aaaaatacaaataaaaaacaccaaaacatatataagaatggttttgatcacatggactttatcattaaaacaattaaaggtggaagaaaaagttttttaaaaaagtaaaaaataaatgggaaagagctgaaaagaaaaaagaaaaaagaaaaaaaaatgagaaaagagaagagataatgattgacataacaaacttaaaaaataatataaccgtgttacagtaaaattaaaataaaatgcaaaatttcactgttcagtatgaaaatgagtaagaattagtagtgactatccaacacggcatgtttgaaatttcaaacttgaaaggtaatattcaacacggcatgtttaatagtggtattagcccttttctcataataaatataattaaaccatttcttttcgataaatagacagtaaaatcgatcttatattacaatgagcatgaggaacataataacattatttctgttaaaaaaaatagaactgctttattatatgatctaattgactttttcatcaaaaatatggagtgatcaacggtagcttgacatgtgactccaagaaaaacaagtaaaaataaaaaacttgtaggtgattctacgatatactctcttaaaacggatggtttgatacggtacgttatagttatttaagatattttacaaaatattaagaaattcagaacaatttacaatataaaaaataatttcaaacaatctattttacacacgtataaaataaaataatcacgcgtacaacacattatttgaatgtagtttttagcgtgttaaatttttccgaatttctaaaaattttatagaatgtctcaaataactataatttagatgactatgagaaaaaatttgactaaaatattatttcggataataaaacaaataaagatatatatcccttttgaaaaagtccattataaaattttccaaaactttttattctattatctgttgacaaatattataaaataataaaaagtatagaaatgcaaagagcattgctattgggcagcagtggtgcctagcacccttaagacgtgtcgtattgcgattggctagtgatactccctaaaagttattatattaaactatatgtgacccaatacttaattagaccaatagcgatattgagaggatgcttgggactacgagtaacttttagcatttaacttttagcatttctcaaatgcaaaataaataataataataataataataagggagagttgtgaactacacgtctcttaattcttgtactcaacgaaatatttagctgtaataagaaaaacccaaatcaattactaagttgtcgtgtttcttactaatttcccttaaaatgaggtcctgcgtttcctcatttttcttactagtattgctcctacttttctccaccatcgtttactttacacacgcagccagattcgacatcaaaaacaactgtccttacaccgtctgggcagccgccactcccggcggtggaaagaaactgaacacatacgatgtttgggccattgacatgaaaccgggcactaacggcagaatatgggcacgaacaggttgtagtttcaatgaggctggaaacggcacatgcgaaactggggactgcggaggggttctggagtgtgaaggaagtggtggtcaaccgcccaacaccctggccgagttcagtcttgacactgccaacaaggatttctttgatatctcgcttgtggatgggttcaatgtccccatagactttagttccacgtcggcgcagtgcacacggagtatcgagtgcgtggccgatataaacaacgaatgcacagctgagttgaaggtcaaaactggatcagttggttgcaacaatccctgcactgtgtttcgaaccgacgagtattgttgtacgtctggtcccgataattgtaagcccacaaatttctcgaggtttttcaagactcgttgccccgatgcttatgtttactcttatgatgatcggcgaagcagtacatttacatgccctactgggactaactattctgttgtcttctgccctgacattaagcagaaaggtcaggcacaattataattaatttattaattattacttaatcatgatcatgtctttaattttatctacattaatctcgttacatatagcacttacagtagcttgttcaagatgacgagtttttctttctaaaatataggagtacaccaaatttatctcaaattacatatgaattttattttaatataatttttttttttttttgtatgtgtatgtgtgtaaggagaggaagacacttacaagattaattaggggctgtactagcataaaaaaaaaattatatatctatacttatttttaatttgtctacaatttacccgttaatttttttttatccctcttagagtatatagtgtgtataattattctgttacatatttgatttgatgtaactattaaaattttctttatatattagacacactacaatatctattatttgctattgaattgtattaatagatggtgtaaaattataatatattttcaataaactcgacctcaacattaactatcggttaggtccggctgagtcttgaattaagtgttttttgtcataatatattgaaactggatcgtatcagattcgattcgaaaagaattagacagagcaaagagtcgattagatctgagatccaataatggatccgaatattttaaagctctgactcgatccaactaaatagatctttttgacatacctaaaagaaagtaatgcatagtgaaaaaaaataagggaaatttgagccataaataactatttcgttagatttcttgctaataaatatttaattttaaaaaatatcagcataaatacataaatctccaacctctactataaattaattgtattttttggtgtccgttgtaaactgatcacacttatatttttagtgtcacttcgtagaaaaagttaaattttggtgtcggttctaaaccgatattattgagttttagtgtagttttaaaactgacacttaatgtctacatatatatttttttagtgtaagtttaaaacagaaactaataagtataactgtaggttttaaatcgtgactaaaaggggttattttcataaaaaaaaaataattatgaatttctttttttataattttgaaatataaaacttaaaaggttataaacttaaaataagttatacatatcaattaataaatataaaaataatttaaaatttactaatacattgagagactattgttacacaacaaactacatactacattatatacattataacaaatacatattacagataataaatatagagtataatatatagattacaacaaataaatatattacataagattttatttcataaagtaaaataattaaataaaaaagcctaaatccttttatttttctcattcccgaagccaccgcgaccacatcatcatcatcaacgctcgaccacaaccagaccatgaccaccaccgcaagagccatccttgaaacccagaacacaaccagaccatgaccaccatcactgccgctcaagcacaaccataccatgacaaccatcattgtcgctcacctcaaccaccaaaatcaacattccaacaaaaacccagcaaaagcttctctgtcgcaatctactgagagagagagagag

SEQ ID NO: 313454 - DNA, 891 bp, Cannabis indica
ccaaatgatgttgtccatgtgtaaaagtgcacaaaaaaccttgtatagcttctcttgaccggctagacccttgtagtgagtaggctggccagccatggtgcagtccaaaggctggtcgggccggccaacttctatgaggaagttggtccgtcacttgatatctgtttgagtgttggggtctctgtttgttgaggtactgacttggccttctcattggtgagatgtactgccatgtggcactgattttttccacataaacactgccacatcaggaggacaaaaatcaagataatattttctgcccaagtgcatgtgcgaacatttgtacggataggacttaccagctatgttggtgcggtcgggactgctgtagcctttactgaataaaagttgttgcatttttagctttttgaaatacttttccttaactgtctaatctcatttgctgtagagaaatgattgctttagttatctctttgatgtgtaggtgaagtaagtgaagaaagggtcccacatgtactatataagtgcttttggaggaaaaaacctttttcacttttcacttcttacattttactttctctcactagaaatttgcatttgaagaagctcctccttctctctagagggccgaacccatcaagcaacattctcccaagattttcgtgtcgttttgacgatttaagcttcccacattcttccttaagggtttttcatagtgagtaagctttttattcctgctatttcactttatttggttgatcttgccatgaatgcatgaacaatatttcttgctttgaacatcctttgattcttatgttagattgttgtcctttcagtattttgatatgcatgatagccttaggacatgtaatgtgtgatttctagacg

SEQ ID NO: 313455 - DNA, 938 bp, Cannabis indica
aatataataatagaaataaataagaaaattgagaaaatgtaaaagaaaactatgtgtgatgacacatggctagttttttttctttttctaattattttgtatattattatgtatgtttataataataaaataggtggtcattattttaaaatactataacaatgttgatgggaatcttgatgatgaccagaaagattttgtggatattttgcttctgattcaaagagatcttttgatgtcgatttcaccgaggctcgacgccctgtagattcgatgatgaaagtaaccttgtctatgtttcttactcattttttttaaacctaaggatattagttggtaccacattaatctttgaaacccaaggactctgtacccaaatctctcaacctgatttcttgtcgtgatttcccgtctcaaccatcaccgtgacccatccttcaacattaatagaaattctaaacatgaatttgtctatttttctatgatactaaaaatacataattggatatttgttttgttccattatttatttcacttgcaaatcttcacagtttgcagtttcattttaagtgattttaatggtattacatcacatgaagcaagagtttgtaacgtaatgtaaattactatttttgtactcatcgatctctctctctctctcatcacatacaatctcactcaattctacaggaatgtatgagcaactttttcctaatataaaaattatatatttctatttgtgaggttcttttctcttgtgcatctctgctgttagaatccaacttaattgtcaaattaagtgtgttattattaagagttagtcccacattgctaatgtgtggaaataaattatgatatataagataaaagggctactcctcccattgccaatttggttttgggatggaacctcattcatcttattcctcaaattctaa

SEQ ID NO: 313456 - DNA, 2354 bp, Cannabis indica
gaatcaaggggtagctatctgaacggaaggagtcattatattctgctgcaatcaatgtaagattttcttaaacccttatgtgtttatttcattattttagaaattcatattaggatgttaatgaaacatacttgttagtaaatctagatcctggtaaaattgttccaacaggatggagacttggaaagttcttcttcttcttcttccttagtatctgtagcctcgtctttcttggttttttcaaaaaaggctagcatctacatgactcctcctccctaaaagcttaaatccatgttaggatttgccatctaggagcgatagatagaatgtttagccatcaagttaactttggctatggtattctcttcggccccttcaagtttcgtgttggcctcattaagcttctggtttgccttgtcaagctctttattgtttttttgatgagcttcatagagatccttagcctcttttttagcaccttcgagctcagtcttatggctcttcttttgttgttcagcttcctttattaatcgagtaaccacgtcccgagagtcattccatttccttgcaagaatttcatgttgttcaacggatgtgcaaagctgggactctacttgcttgattcttagaaggcctctttgatgagctaagtgagaaaagagagatgcttgcaagaaaaaaaatcatttaggaagaagatgataaagggatattaagaaatttgaaaacaagataaatatgaaaatttaccgagaaggagacatttaaactcctttcagattagctctcaaagtccccatttttgacgaaatcctagtcgtcctgctagaaagattggtagtggcgccaacaggaagtgggaagctgggacaagaccttcgagcccataatgccagcattgcttggcaaggggtatgaaggttccaaaaatacgatctcgagttgtgaaccagagaacttaacctgatcgacagatcctaggacctgttcatcgatgctcacatctgttgggactggggagatcatttagggatcatcaagctcaataaccatttgagtcgtggcacacttcttatttgatgtggtctttttcgctctcttcaattgttcagggttagttcttaaagaagtttccgagtcagcaacacgtttttttacctttcttggaacctggagggctcgagagaaggctttcaaaattcatatctgcgaagcaaaaaaaaaaattcagcacttgtccataataaacaataagaaattggagaataaactcccacttaaagaaatttaccataattatcagacgatgatgaggaagaactataataactactaaactccttgaaactggttatcatatataggtgaaaagggtttaatggagacatatcccagtctagatggctcgctctattagaatttgtaccatattgcttgtcaattacataataagagttgttacatcttaattgaacatgatgcttgggatattaacagtcaaacctatgagctatgcgatcaaaacaattctagatataaaaattatactgactatccttaaatttaactaagttgatacgctcaaacttaagtactgtgggagatcatccataattattaccttgggatgcatcttcttcagcttcttgagggaatatattctttaagaaattgatacgagccatgtagtccttgtcttcctcgttagcaggcattggaacttgccgctacttagaatattttgagtttataaagtcgcaggtagcttgtttgctgacgaggagattacaggtcttcaggttgagctcgtttaacaaaaaaattagatgatcgcaatccaaacagaagacctacaagggttttttgtcgtttttccatctcaggagttggaataggcctcctcgaaatcgctatcaatacaataagcaaaataagtaaatgcctacaattaataaattgaaaactcaaaaccatgtttttatgacaaggtagtacttacgtatgatgtgaatgcggttgtattcattgcggcaaggccagaagtccagaagaaatcatccttgaattcagttttgttgggcagcctcacgatgatcctttggtcatttgtgtgggtcccaaggtaataaaaaccacctgctcctcgcttccttgcagaagaggccattacagaatagaaatataaaatttcaactgggggtgggcactcccaccccaaaatttggtataaaaccttcagataggccaaaatcctataagaacttggaatcagctgaaagggagcaattaagagataatttaaaaagtccttttagtagtccttgagagggagtacttgtaaagaccgcttagtt

SEQ ID NO: 313457 - DNA, 1377 bp, Cannabis indica
caatgccaataattgttttttttatatgagtgtgtacacatttttattagaataagaaatcaactataaactcatcatgtgttacagtagagagagcgctacatttgtttatatatatgctagctaaaagagatgagagctgatttgacaaaagcaagacacaaatactttcgagtttccttctgaggtggctctagatttgtaaatatatacaatatgtatatgcatatgtatatatattcttataatgatgcaaatcctatatatttatatatcaatgtatgctctactctctatgtatcatgataagctttaagtttttttaaaaaaaaaaaaaatccttctgatatttcttcttatgcatttgattactttggtgtgttgtgtgaggagaatgaagaaagccacaagttaataagtttgttcacaacatagtaaagtgatgatatgacctcatttagcacattattcttcgggtgacattctaattttatgctattagcataattttagttttaatttatgtatatatctattaatatatatttataattctgttgttagggtagatgatatggcgtttcctcttcttaatcttctataatctttttgttagagctggtgggatgacactttaatattttttcattctaatttatctatttgctctattttttcaatttttcaattctaatttctctattctaacatttcttcacaatttcatgcacaaccaaaaaaaaaaaggtattgaggtttaccctcctcaatatattaaagaaaaattaatatgtgttttctttttgacactattttgaaggtacgctaaaatctctgaatatatatatatttttagattcacttgctcaaaatatctatattgttgtacttatatatatactcaatgttatatatgcatgattaagtgaaaatttgttaattattaatttctatcatgttaaaaaaaattcaattgtttcattctcatatagctagagcttatttctatagaataaggtgtaatttctaacaaattatcctcaaatattcaagttggaatcttcctaactctaatcacatttttttttctctatgaaagaatacaagtgagtggcagttggtggagacccaatctaataacgaccaactcatgtagagttttttgtcgtttctatggagctactcttagcttccctaattttttttttctaagaagctctaaaacattaatgattggagttgtcttttttgccattatgaacacactcacgctcatatacgcctttattttgtcgctatgttttggacatcgtttgactcaagtattatttttattatttttttaaaatcaaactcaattgtatcttactcttattt

SEQ ID NO: 313458 - DNA, 793 bp, Cannabis indica
aaaacaaaataaaaaaaaactaatcaatcaacttaataattaaaaaggattttcttatttataaatataaaagtttttttattattatttttacagaatatacaatgtaatttatagagcaatcaataaaacaacttaaatcgcaacccagacaataatccacatcacaactcaagtaacatttaatcacaaccaacagagcaactcaagttgtataaaaagaatcataaaaatagaaaaaaaaattaaaaaaattgatatataaagtgattccctaattaaatttccactcttataataatatgcaaaaatcttaatattttattgagtaccattggtgctcaatattattcataagtattattttatgattaattagcaatattctcttaaaattattttttaaaattatataaaaatcgatacttaactatattaataagagtataaaacataggaaaattctataatgcacccccttaaaatagatatattgatgtatccttatctgtttagcacccgaaataatttttagtcaaattttgtctcatggtcatgtacgttatagttatttaagacatcctgtgaaattttaaaaatttggaaaagtttaacacgccaaaaattacgttcaaacagtgtgttgcacgtgtgactattttattttatacgcgtgtaaaactagactgtttgaacattattttctatattgaaatttattcagaatttttcaaaatttttgaggtttatcttaaatagttataacgtacatgaatatgaaaaaaaaaatgaa

SEQ ID NO: 313459 - DNA, 2395 bp, Cannabis indica
taaatgtgaaaagggtttggatgaatttataaatcaaatagacaagtaaatgataacatgaaccaaatgacacacaaatgagtgagaaatacttctgtttctttattgatatttaaaagaatagggattacattgaaatggagttttatttagggtataaaacccaacagaatcaccaccacccctaccaaaactggaagtaggaagggtaatgaccccactaacactttgagtcccttggtaatcctgaataaattgcacagccacctcggctcgaagggccttttctaccatctgggcataggtattagtattgtgagtagtgatcattagatcatgcttgatctgggcatttaatccagccaaatacttctcctttttcctaaaatcagtgggtacaatacatgagccaatctggcgagcctttcaaacttaatggtatactcagttacatacattgattcctcctgaatcaattgagtaaactctctctttttggtgctacacgttgcatcattgtagtatttagcattaaataggtcctggaactcatcccaggtaatgacaataacatcccgagtgagagacaccaactccaaccatactagggcatcttcctagaactgaaaagtagcacgggtcacccgatcattatggtgactcccataaagtttaaaatttggtttagagcagttaaccaatactcaactttcatcacatctgggcctcccggaaagactagaggtccctacttctggaacctttcatacagtggctcgtttcggttaccagaaataggttattatgttggtaacactggagctggagcaataggtacctgaagaggaggtacaacttgaggaccatgctccctcaaccttcgaatctcatcgtcctgcctcttaattgtgtctttaatctctgcatacctctactcctaatctggcgaagcctgtggcgggttttcatgatcaccaccataagccctcctatgacctctacctcagccacggggatgataggattctgatttccccgaccaccaccagcctcaaccatttcactctgacttctcgtgtttcaacgggtgtccattgtataggacgagcctacaaatccataagtcaggcctatcatgcagcgatcaaaaattgtaatctaaccactgcatacatggaaacttaaacatgcttatattctgatataaaactactagcatgcttcctatcatgtttttctaatcatgctcaactgaatatggtaatatagcatataaaagcttactgaaccgtgactcaagcttgtctataatgatgtttgtacatatcttgatgatcttcagagtacaaactggtagctttgataccaaattataacgccctactagcttaggcatggtacagtgttttttttataattattgtgctaaactttactaattaaagggtttagtgtaaaatcgtgttatacaaaaaaaaaattcaataacataagcactactacaaaaaagactttttgcttcgatttttaagagacacgtaaagaattttctttagttggtgtaaccgacgctatagccgtaaacacaaatagtgatattttttgcttcggttatgaaccgacgctaattagtttttttgcttccgttatgaaccgaagcaaaaataaaaggtttttgcttcagtttataactgaagaaaatagtagtgcaccgacgctaattagctttttgcttcgattatgaactgatgcaaaatttaaaaaaaaaattataaaaaaaatctaaaccatgcactaccaccaccacactactacaaatcgttcaattcacatatacacagatttaaactactattaaataaaataacaaaacttgaactttgaatttcacattagtgcactcacttactttagctagtttcatatactttgatgaaaaagtaaagtaaactaactgatcacttaactagcacaaactgaaggtagtggataaaatgaaaaaagataaattaatttatacaattattttgtttcaatgtcataatagcaaaaaagaaagatgtggttaccaaacatattatttattaaaggaagcttgtttattacatacttgcttcccattcatattcatatggttccattctttcatgtatacatgatttaagtaaaaatgatatattaaagggaaatttttatatatatacattatatagattaatattaaaaaaaacgttatataaaaacaatccatctttatgccgtgacacgtcatcaatttgaattacaactgcaaacaattggacgcgtgaacagttgaagcctgcaacaactgaagacgtgaaggacgtgatgtcatgacgtcagcacacatcacacacgtcccagtcagtttttt

SEQ ID NO: 313460 - DNA, 1566 bp, Cannabis indica
ataataatatttaataaaatgaaatttcccttacaaataaaataaaacaaaatataaaattttatataaatagtaacatagaattatcaattctttatgtaaatactagaatttatttgtttttcatctctattgttgacggtgactatattacatttgatgtgttattattagatcatactaattttataaaattaaaactagccatataataactttataaaatcaaaactagtgatgttagtcttattacaattaaattataattactgttttggactgatatatagtcacaaattaacttcttttagcttgatctatacttgcggacaatgtcataaaataagataaaaaaaatgatttgattacatacaaagatttgagatttgggtgtagctatagcaaattgtgcatctacctaccatcaaggtcggaaaaagtcaacatgacatcatggaaagatatgttagttacaatatcaagcaaagcacaaaggattcaagttaaccccaccattattttgtcatatatgacttaatattttggttgagcctcttgtcaactatataaatattatcctaattattattgattaattatattttttcttcaaaatgtcttgatcatgagacaaattaagaacatatatataaaaatagaaaattgctatattattgcagttttttcttagtaaaatttgataaacgccgtgccaactcaataaacgaaattcccacttcaatcaaattgtgagaggaactctataaatataaattcgtactttctttttaaaataataataattgaaaaactgtgattttgtatatgctaattgattaaagtttaaattattatactctaagtgtttaagtgagtacataaaattgatttaattaaatatttttataattataagattattttaatccaaaatatttgacttattttaattttatatccttgttcacatttgagcaaagttgaataaatgaaaatagaattttatggcgaattagaagttgaataaaatgctcaacattcatcatttatattataatgacaatattgatatgttgggaagtgtttgttgccttcacgtgatagttcaatcccaagcctatgttgataattaggcaagcccatcaagctcgctcacccatttcactccaatcaaatttgtgtacgaaaactctcaactgctatctaacatgttggctattgtagacattgtcccacatagaataaatggtagagaattgagctatatataaaaacataggttactccattcattaccaattggtttacgttacattttattcattgtatttacatgaacacttactacttctggtaggaatgattccattacttacttagcccacacaaaaaaaaattgataaagaaagtcagagaatctcaaatcaagatattaattatattttggtttattattgcatttacgtgtttccttcaaattaccattgagtgtcaaattaaacttgatactcattaaaaaatttggtaataaggacatgaaaatattaaggtggtgtttggttggag

SEQ ID NO: 313461 - DNA, 1589 bp, Cannabis indica
tatacctattttaagggggtgcattgtaaaattttcctatattttttaagcgatgaacaacagaggaaagttcaaaattacatttctcaggcaattaattttatgattcttttaccttacccaaaaaaaaaaacaatagataataaaatattgcgattcatctattaagaaaaaaaaaaggctacccttcttggtgtagcttctataatttttgtttttagattataagacacgttaaaaatttaatttgtcatatttttttaagaataatttgcgatataaatataatttaagtattattatgattaaaaattaaatttaaatatttatttacaacataaaattaaatttatatatttatgttgtaaattattattttttaattaataaataagctgaattaaattaatataattgacactgactgctcatcaaattaattaatataaaagccagcaagactgtgagaggggaaaaatgctgtttatgtaataataataattttggaattattattttattgtaatcatttatttatttgttggtgcaaattctgtcataaataaggtgacgcgtgtagagcacgcatgagaaagagagtttggttggtttgagcgtaaaagaattggcgccagagaggcagacatccaatttcacctgtaacgtaagtataaggcacagagctacaaaatccggtgggtcccactctctaatacctttcactgttctgtttccactttttaatgatttaccgcacgtgcctacctctattatgtacttaataatttaattacaatttcatttaccttatttttattcttatttttatataaagttttgggtaaatttgagtataagttcccaaaattctatatttgtaaaggataaatttaatatttatttttagtggtataagtacttaatatttataaaattgtaatttttctttaattttgttagtacaggctctgttttgaatttattaaaagaacatttagaaataactgatactacatatttttatctagaccccatgattaagaatttaagtcttatatgtgtcctgtttaagataataacatagtctgtactgacaaaattagaatgattttaaagcatcatgttaccgtttcattctttaatttttatgtttcaactatttgtatcactatttaatttgataaggaaagaatattcaatgagaaagaacagataaataaaattaagaaaaataaatagtaaattgaattattaaaaatattatttatattagtttaggaatcttttacatttagtttttcaaattttttttacaatattaataataattattatatattttcttttttaaaatatttgatattaataatttttttcacatgataataattagatatgtcttttttaaaaaaaaattgtatattaacaaaaaaaaattcacgtaatcatattttttttaatttttagattaattaatatttaattacttaaaaatgcaaaaaatgagaaaaataataaggtagaataaagttatttaatttattaaaataatagtaaaatatcaatttgtagatttatgctctaataaa

SEQ ID NO: 313462 - DNA, 1570 bp, Cannabis indica
gggcacaaaacccaacaatacttgtcacattgttgaacaaaactataggagtctcctcgcatggttggccaatagtagcctattgttagggctttgttgcatagactatggtggcctgaatggtttctgtattctcctttatgtagctctttgagaatgtagctagattcaactagcaagagacatcagagcaatggccctaagaatggtcatctatagagtttcccattgtatagcataactctggtaactttagctcttagttttcttcactcattattgtcatgtggaagggttccatcctctaggtattgtattattggtgtcactcaattgtcttgttcagtcaaactttttacatcttcattgggtttccatgtcgttggccattgcatgatcaccacacggatggtgactccctctttggtttgaatagttgagtcgagattagctagggcgtcgacatggttattctctagtctcggcactggttaatggtgaattttgtaaatctagaaatcttatcttgacaatctagaggtaggctaccatttttaaatctttggcctggtatgccacgttaagttagtttagaataagttgaaaatatgatgtgacttcaatggttttggcgttcaactcaatggataggtctagccccccgtattcagtctcattgttggtaagtttgaaatcacatctgattgcccgttggataacatctccttgaggggaggtaaggaaaatgcctaggccactccccttgctattgcatgatccatctactgctagcgtccatgccgagttagtttgctcgttcaaatataataattctttttctgcttgtacttgtccaatataagaaaaattagcaataaaatctgccaatacctgtgatttaatggttgtcctcggttgatatgttatgtcatattcatagaactcaacagcccatttggtcatgcttccagaaagttctcgtttgtgtagaatgctacagagtggatattgggtcatcaccactattggacaacactagaaattggacctaagcttgggccatgttgtgacaagtgttaaggccaatttttccagttgagtgtatctcatttcagcatatagtaatgtcttcgaaacatggtaaatcagttgttgctttccttcatcttcttagacactaatcgctgcttctaaaatcgccaaatacatctataaggtttctccatcctttgactttgctaggagtggaggagaggtgagatagctcaagttgtcttagtgtttcctcatattcctctagccactacaattaattaattaaagatataaaaaagggattttttctataataaactaaaaatgaaacaagtttacatttatgaccccaaaaagggaaataaacaaaaatagaaactaaaagttgttaaattacaaaaataccagccaagaaaaatggaagcctccatcttcttcgtgacccagcggacgaatcccaacaacccattctcaaccattttccttccaaaaccagtaaaattagatctaaaaaaaatgtagatctcaagggaaa

SEQ ID NO: 313463 - DNA, 4526 bp, Cannabis indica
agctagggatattagagagaaatcaagaaattggagagaaagaaagaagaagtagattaataatacctcaattcaagccattaattagtctttcatttacgatctgagaatgaaaagagaggaaagaaaaatttgcagcaaaaaaggaagagagatagggatttgtaggaaaacgagaaagacaattaagaataagaaatataattaagttattttgataaaaaatatatattacctcttcacttgcttctattgatccaaaatgaaggatataaaagaatttggtcgaaaaatgaatgaatgtgcctgaaaataaaataggctcttaattcttctttctttttttgtaggaaaatgatcagagaaacgattaattatcaggggaaaaaataaaagaagaaagggaggagagaatgcgtatattattatcaaatgtgactcagaaatttttgacgatgacgacgactgagagggaatttgatgtacaaagtagttttagtggtcagacgatacaaaatacaacgatattgtttttggatgtaatgacaagaaaactaatggagagaaatgattattaagaaagaaatgagaagggaaatggagagagagaatgagtagagagattagtatattattactagttgctccttgataatttttagaaaaactccaactaatgccttaatattttataaaatattacaataacattataaaatattatagtattatatgattatattcttatatattattgtaaaatattttataataatttctaaaccctagatttttgtaataatataagaatatattattgttgatatttgtttgtattgattttctatatatatgtgtgtggagggtattaatttggaaattaaagagattattaatgtgatacttgtaggattagattattattatcttacgctgcattatactgatggaaagtactacgaaattgcagtcttaaaaatggatcacaaaattgatttggacttgtttttattatttattcgttaattttgtaaaattactaaaaaatttccaaactccaaagaaccaatttcctactcatatttcatatttttctttcaagtattatatttgattcttggctttattcactttgagaacaattttttttttctacaaatttaaactcatcttagaattcatattgatattttggtatatattttttttttctcattttcctttttatttactaatcctagcacagacaaactattattaaatacaaataaatatgtttacaaagatatatgtatattgatacttagatttttttgatttcggatcggagttatactcccggtgttcttcgccagtccgtaactatgcggtctattttcatagtaaaatatataagagcgattaactatatatgcgattaagaacaaaaaaatataagagcgattaactatgccattaagaataggaactataaggtacaaaattttaataattattaattacttctttagtacgtgccttcatagaatgaatatgcctaattgtgtactgaaaatagaagaagaaagatctcagagagaaagaaaagtgaaaatcttgattaataatattatgttactaactgtgtgattttgcaacaaagatctaagacgagaagtgagtattcttcttttctattttcattctttttattctttcttgcttgctttcgttgttgcatggaaaatgagagagattattagaaaagaaaagaaatatataatacaaaccgttgggacaatgtatacacatattgacctaaccatcatgcacctagtagtactctctcttctctttaggttgtaatgagaaaaatgccatttaaagctatattactaaaaagatgaaataacacaaccattacttatcgagtgtatactaaataatcaattattatcattattacaatatttacattacaaaaaatgtacttaatatataaaaatataatcatataatactataatattataaaatattttataatattattataatattttataaaattttagggcattacaattattgttggagtttttcaaaagataatcaaaggacaactggtaataatatactaatctttctactcatcctctcatttttttaaaaaattctaacaacgattgtaatgcctaaaatattttataaaattgctacattaaagcaaagtgcataagaaaagaaaaaagaagaagatgaatgatatttatacaatagcggattgggtatgaacaaaaatggaaacaataaacctagtacattatacagaaataaattaattatcaagaaaatagaaaacagattaccttggaaattaataagggaatattatttgtgctttgaatcacaagagaggagaagagatgaaagattgaggcagttcaatagaaatagaaggtgaaggcaccatacattctttggatttgggtctaaaataagacaattgttttagcagtgaagaaggatgcgaagaatgaagacccttattatatatatagggttataatgtatgtcttttttcatttcatctatgtttcaaattaataaaaggttagtaatgaaattctttaattcaatattatttaatattcatctgaaattaatttataatttaattattttattgttcgttgagagaatattagagagagaaaaagaagagataaaatgcatgcagtgtcttctctctattcactgaaattacaaaaatgcctcttaaggcaatacgaagagtcattttacactcatactctctccgtactaccacaacacacacaactctacatttactttaccactataaatatccgaataacagaaaagaaaagggttatgtatgtctttttcaatttaattaattgattttttttttcgagagtatactaaatcatcaattattatcatcattacatttacattataaaaaaattacttaatatataaaaatataatcatataatactataatattataaaatattttataatattattataatatttatataaaatattagggcattacaatcattgttggagttttcaaatgataatcaaagaacaactggtaataatatactaatctttctactcattctctcatttttagaaaaactccaacaacgattgtaatgcctaaaatattttaaaaaatttctacattaaagcaaagtgcataagaaaagaaagatgaagaagatgaatgatatttatacattagcggattgaggatgaacaaaaataaaaataataaacccagtacattatacagaaataaattcattatcaagaaaatagaaaacagattaccttgaaaattaataagggaattatttgtgctttgaatcacaggagaagagatgaaagattgaggcagtgcaagagaagtagaaggtgaaggcattgtacattctttgcaagtttgggtcaaaaataagacaattgttttagtagtgaagaaggatgtgaagaatgaagtcccttattatatatagggttataatgtatgtctttttctatttcatccatgtttcaaattaataaaaggttagtaatgaaattctttaattcgatattatttaatattcatctcaataacagaaaagaaaagggttatgtatgtatttttccatttaattaattgatttttttagtagaatattgctattgccgatatggatcttttagtatttaccagacaaccatgcagtacagcactctctactcacttgaaatgacataaatatctctgatcacatcgtaaaaggagatggcacaaatacccctaactactatagagtaatagtacactataatatacactattaattagggattaaatacaactcagaatatttgttgttaaatgccatccatataataatcacaacacagaattacatgaattaattatggaaatcaatattagtagctaatatcttatatataataagactcttctcttcctgtttgttttactatccattttatcatcttttagaataatctttgtatattgataaacataaccgtagttttagagcgaccgtgtaatctattaccataaattattggattataatacacatgtcttgacaaaaatattataacattaatcctataaaaaatcatgaatactaaaatgtcatacgacctagcaaaaatttccaataaacattctatactctaaaagttatgtaaaattttagtacaaaactaagctaagagtcaagttctccatctagaaaaacaaaatacaaaaaatttaaaaatggacaaatgtgaagaagataaaacccttaacaaaatatgtcatattaggaagttcaaatgttaggcttatatatatggggaccggattttgtcccgttacgtacggacacggattgcaatccgtgatgtactgtaaccgtcagatgggcagttactttgatccaaaggctggggttcatgtaggggtttatgtaggggtatgtagggttaaa

SEQ ID NO: 313464 - DNA, 2612 bp, Cannabis indica
atcctagtttcactgtacacacttatgtctgacaagtgaatttaagtgtgtaagtctcctttacttgaataaaataaaaaattatcctaatttacattatttgtaacttgtctatattctctcaacatctgttcagtgtagttggtatttgggtactaattaattatcctcttttgaaagcataacatgtgtatttgtctctttttatgaaatttgattagttgcttgctctggaataacttattttttgtataacttcttcttgtttctttttttttttttttaaaaaaaaaaagaaggaggcgcttgtgacttgacttgtgggctaagtaaatttagttcttcatttatttggtaaatatcaatatttactctaattgtttatgataagtttccttttaaagtttaatatcttattcattgtattttatttatttgttgatcttgaaggaattttttctatattaattcgcctatttttggaaaatattatggtttattcttgtttccttttattttttttaagaaaaattaaggggaaaaagaggtggacagtttcctctttgttagtgggcatggcagtttatttttgtttctttttcaatttgtttcctttcttccttcacatctttatttaaaccaattcatttgtcatttaatctctccatcttctcatctacccaattactcttcttgttggtattttgtctctttgtttctcaattccttttcaaaatttcatggctaagacaaaaaacttagggcatccaagtaagattgtggaaaccgcccaaaccgctcaaatttcctgcaccgcaaaaaaaatgctgtttgaaattctttgcggtgcgatcgcggtgcggtttgggattttgaattgttaatatgcggttcaaaccgcaccgcaccgcatattataaaaatactaatttttatatttatttaggtccaatatgtgaatgttcgatttaaagtctactaattattgtattgttgacacttaattttttttttcatattattttcaagccttatggcattttgacaagttttgctcaaagtttgttatatttgtgatagtttaattatttagtgatagtctaaactgcataaaccacaaaaactgcaccgcaccacactattttttgcggtgcagtttttacaggtttttaatttcgctgtacgggtgcggtttgggaaattggaaaaaccgcaggtgcgggttggtttgaaaaaatagtcaaaaaccgcacacccgcaccgcgaacaaccctactgcttcaagtccaggggattcatcacctcctcggtgtgactcaaagaatgtggctgtcaagaaagctacctcttctgttcccaaaaaagggctcccaaaaccgtggcttgaaaattagtgagacccattcgattgcccaaatcttccgatttgaagtcttcctcttcaactgataaggaacctccttctcaaggcactacatctcctcctgctgaaactaggatttcttctgcagcatcaacttcaaagggcccttcttctcgaacccgtggccaacaagcttcgcttgaaaaggaacttcgcaccaaaaggtgccatgacagaccaattcctactgccaagaagcttaagatgagtcctccctcggcctccacaagtactgctgaagaagaacccatggatgctcttttgacaactccgagtccaaaactgagtcattttcttctgaaaaagaactttcagaagatgtggatgtctcctctgacagtgaggaaactgatctggagcctgagccacccttgccaaaatctgcaatagccccttctcgttctgcttctgtagccaaagttactgcagcaaccaagggtaaacaacccatgaagagctccattcttggtaatatctctccctcgcaagctgtaaatttcagattttattatcatgataaccagcgtgattggaacttatatgctacccgtaagtttgagagtggtagaaattatgatttgcatgctcatcgtgtctatggtattgtgaagtttgttcaatatcatcattgggaaaatactcttactggttttgaaggatatattgattgaattatcaaagaattttttgctaacttgtctgatgattttcttgatgagaaatatgaattctttcgtaaagtgtatgttcgaggacattggttttcctttactgagaatgatattatcgaggctttgtaattgcccaaaggtgtgacaaatgctatagtgactatgaattgtcacctcatgattactgatctcactggtgcacgagttgaatggaaacctagccaaagtcttcgcatcactcatctcacttatgtccatgcttctctcatgcagattgctcttagcaattggcttccaaactccaacaaaactgtggtgtctcaagacttggcaaatattcttcattgcatcacctcaggggcatccatcaatttggcttcttatatcttggaccaaattgtttcatttcgaagaggtaaaaaacgtactcataagcttgtttttcccaatttaagctataaaattcttttctcttagaaggatgtggcttattcccatgagacacttgagcctcccct

SEQ ID NO: 313465 - DNA, 1308 bp, Cannabis indica
tttggtgactgggttgaacttgttacttgggcctactgagggagaaatggaagaaaaaaaattcaaattgattgattatggagtacttcaatggtgatccatccattagcttcggtaaactgagcagactttttgagagttgcatagaagctaatgatgtgtacaagttgggggtggccttatttattatgggcattctcattggtaaaaaggagaagactattgttctgccttttgtgattaaaatggctaacaatgttgagttcttttatgagtacccgtggggtaagatttcgttcagtaattgatagaaacttgcaacaaaaattttatagatgtaaagaagcgtataaataagaagacttaaaagggaacttcttaaaaggatgcgaagtactcagcacaatattaggcatatgagtctgtatttgatttgggtaatgaattttcagtcaaaaagttacatcgctttccaagaatggttaattatgagagtaaggagaatgtgacacttagcaaggagaaagttataagattatttgctataaatataagctttttatgctttgcattttgtcatatttatttcattaatttcaatctataatatttttgtttttatttacagttgatagtgtacttcgtgttatgtccctgacctaatcaacaagagtttctaagtaccatcaccgagggtgaggcacctttatttgtggatttggaggaactggtgttgggtgatgatgggtaacctacttaggatgctttgcgtagctaggtccaaaagcttgcctcaacattagaagagcaggcagaggcagccaaaatctttagagatgatgcaccacctccatgagctccgccaccaaacgaacatcatgttcctccatctgcatctattcacagcatctcagaggctcagcaaccagtatgctctatcattttggcaaggttggagagtgttgagagggcacatattgttttgaagcaaggccagactactattttgaaaggataaaaagagattatgagttacttgaaaaccctagtggaactcttggaagatcacagaaagccaaatacagaggcacagccacaggcacaccccgagtctcatgtagatgatttctttctgtcgaatgattatagacctaatgatgcagatgatgttctctatacacctcaaaatatgcagatcacatcaattggagatactcaagatttggaggtacaagttttagacactactccatcatcaatggagaagagaccaaaaaagaggccgaggtggtttgatgagtacaccga

SEQ ID NO: 313466 - DNA, 1048 bp, Cannabis indica
gatcaatctagccatccatcgcattttccattgtcaccgaacaaaaattacaaaaatattatattccacatataaactaaataatacccctagagtctaataaaatcttcggaattgagaaattataactctaatatttatttctaaatattgggatccattattaaatgaattcacaaataataataaaataataaaaattagtgctaattgcctttactaatccaaattactaaagcgatcattacagatagctttgataagaacatcttttcctgccattgaaaacatagatactttccagcctttaactttttgacatactttattcttaatcatttcaaataattccttttattttttccaacaaaagacgacaatcccagatacttcccataattatccactacctgaacccccattagagaagcaagtctcacacgatcactctgaattactgaggctccaaagcacatctctgacttatggaaattgacaatttggccggacgcagtagaatatatttttagtaactctttaaaacactggtattcttcctctgtagctctaaaaaaatacaaggctgtcatccgcgaagttagatgggatacctgtaatcccccacgaccaaacaccaacccccgaagatgattttctcttttagctttatagatcaaacttgaaaaagcctcaacacaaaataaaaacagaaacggagataacggattgttgggattttatgccctaaataaaatcaatttcaatacaatctgatttattatcaatagaagattagaagtcatttatgtatacatgtagttttaatgttcatagtttaatgtgcacaatttctgttaagtccagaatatatagttattcacaattacagtgatgtcaacacagtggaaggtaattgtgattatatgcttcaaaagataatgtctcatgattcattagtgcactggatttacactaatgtgatagtcagcgataaagcttacttatgttggaaattattttaccaagatcttagatctactcacaagta

SEQ ID NO: 313467 - DNA, 768 bp, Cannabis indica
gttcagaatttcaaatatgctttcagatctgtcttgaagcgtcaatggttacgggaatgaccttgccatcagattcgaggtgcatcggtggaggaccgaggtggagtttgaggtggagcttgggatcatactggttgtctaagctgagggagaacgacagtggctctatttgggcggtggtctaaatattagattcttttgttgttgatatttttgtgttctttggatttagatatgagaaaagataatagttgtggggaaagaaatttagagttttcgaatatgggtttggggatgagattttcatctgagtgtatttttgttggatttagattgttttaaatttagttagagattcgtttaatttttttgtgtgtgatttggttatgaaaacaagttgttgtttcaatagtggtgggtggtggtttcggtggctattgatggtgttggtggtgactgtatgaagatgaagaaaattatgaatgaaaaataggatatgttagaaagaaaaaatacatactatcttttttatgttatttaaaaaataaaaaaaatatttacgtgaactaataaaatattaatataatacacatattaagtggttttgctattaaaatttggactttggagtaaattgttatctaagtaaaactattgagggtactttcacaattaactttataatttttatataattaccttcaaataaggtgtcgagaagtttcagtgtatcaaataaaaataatgtgagtcttggatgtctattac

SEQ ID NO: 313468 - DNA, 2568 bp, Cannabis indica
ctattaacattgttaaaatctaaagactttttatacttaattttaagtaaaaaaaattctaacatggatgaaagttcaggggacatgatttaatacatataaaagtttgagaggcatgatttggtagatatcaaagtctggggagcatgatttagtacctaaaacagtaaaattgaatgaaattagacaaaagtccttaaatttaacaatctcaatagttcagggggaatttttaacggccaaaaaagttcagggggcatgatttagtacatgtcaaaagttcgagggaaaaaattgctaaaaaatatagtaatttaaaaaaaaaaaaaaaaaaaaaaaaaaacaatttgaaacctttttgttaaaaggtgttttaggcttgggtgggagccttgggcgtgagctcccccacctttaagcgggctatataatatatatatatttttacatatgtgtattatataaattaatcatacttttgcttaattaactctacttttctttatacctatactatagtgaatgggcttagattatgagcattttttaatatttaatatttattttttataggtggtattttatgattagttagtaatattttttttaaaattattttttaaagttatatgataccaatatgctattaaaccaatacaataatgagaaaatattagtaagaaacagtgttattttttttagcaattatgtttgattattgtaaggtatattgagcttaaataattaattaaagtagtaaaagcaagtagtccatacaatgattaatacaatattttatacctatatttatatttatataggtagctatttatgtataatagtgaccgccgttttcttcgccaataatccttaccgacaatatataatgaaataagtaaagcaccttttgaagtggttaattatttcttcaatttaatccttctttaattacattccttttattcttaaatgtatacacaaataattgctttagttctatatattttcactttgaatttcaaaagttaaaactaatgtacatttagaaaagaaaatttagatcatatttttcatttaacaataattaaatagtgacgagtgtggtaactcaatatttttacatttattccatgtataatataatctaataattttagtgtaattaaataaaaaaaaatatttgtatctcaaaaatttataaattcactatattttaataatttttatattgtatatctttaattatatattagttttttttttaaaaaaaaatacttccaattcatattcttaaaaaatatacctatcaaacaaaaataaattatattctaaatactataataaaaaattatacaaaattttattagaaaaaaaaataatacatgatttttaaaaatatatataaaaataaatatcaaaattaatacaaaataatatgagattttttttttttgtaaaatattaagaataatttttaaaaattattttaaatttattttttcttaaatatttaggtgtacttatcattttttttaagatgcaaaaagaaccccccaactaaatatcatatttcacatattttaatttaataattattataaaaaattattattcgttcgcgaggtactactttatagtggtgcccaataccagtgttaatctagggttgcacttagactaaatcagtgactaaaattttgctcagggtccactcaacttaagggctacaaaatatattttccttttaataatatatatattttttagtaatttttaaaagtactatatattttttaaataaaaagtccaataattttctcttttcttaagcccatacaatctcaaggtgttttaaaatattaaaactcttaattttaatataaatatataaaacaaaaattattgaacacaacaagatatattccaccttgagttataatgttaaatgcacatatgatgtggatttaatttcaaccacaaaatatttaatcattagaaatctaattagttttacacaccaactctaaggtacataatacattaaatcttaatctaagtacataatatttatatacattcttttttacataaaatataataaaaaccaaaactatatatttttatgtattagatttggatcatgtataaaaaatagttggagtaaatgagaagcaattaaaggggcatagcatgtgctaagatttacaaacttaatgatcaatgttttattcttacagctactaaatcactaattataagcaacaaaaagcaaaatatatattatgctgcaaattaaacatttaaatctttttgtaacatgaaaccatgtgcatgatattagataattaaaaatgctgtaaaaatgtataattttttatttatatataggaagagaaatcttaaagatatctccacaattaattctaattataatgtttttataaacacattaaaataaattaaatgcagaaaaagtttatttttattaaataaaaataagaggaaatcttgaaaagaaataaccaggattctaatttatggtggaagaaaaaaataaaaaataaaata

SEQ ID NO: 313469 - DNA, 1097 bp, Cannabis indica
gatgttctgtatacttatgctcttatattgcaaaaatacatgattcatttttaatattttaagacaatccagtctgtttggtgacacactctaagtttttgaacatgttgctttgatactattattttgtttcgactcgaaccctaagctatgatagataaataatatccataactttggtagtaaaaagtcacatttgacccgtgttgggacataatatttacaaatgatcatttaattaatttatattacaaaattatataaaataaataaataactcctattattaataaaaaataattgtaataaaataggatcactcgtgaataaatgtagaacaataatatccccacagttttatagtcaccaaataattagatttaataagttgaaaaacaccaaaataatacttatatactccaacttattcctcatccgtaactattcatggatatttaaatgaaacacccattaataagtagatacatattcagactttgaaagaaaattaataactaagatgagactaagctattcacatcattctacaccaacaattctcgctcattcacaagtaccaaaatgagttcttgaaagaggaaatataagggcgagcttataaagcccaataagaaaacaataggtatcaaaggactagtagtttaataaaaatttctgcatggttagctttaaagaaaaaacatctcatcatcatcatgtataaacgaaatagagagaccacaaataattacaagagacaagctacacatgcatatcacaccatccactagagacctagctctcaacaccaatcaaattaaacgatatcctaaattgggtagttgtacctgatagcaaccataatggcttagatttaattcactttttgtacagattttaggtctttcacttataggtgagtgcacacctaatcttacttatgatgacacagagactaggtcatgaaaaaaataatatgcataaatcatgatcacatggctctaatcagtaatcagtataactaaaatcaggcaaacaagaataacaaaagaatatattccctctttattttagaaaatttagcagtatgcaatttg

SEQ ID NO: 313470 - DNA, 945 bp, Cannabis indica
ggtcatcaccaaggtataccttttcaagatttccagggacatacctctcgaagaattctttcttcgaagtaacattgaatgatgctccagagtctaaaacccaagactcttccttgctctcgagagagcatatcaatgcatcatcacctcctaatgtagaagtaacatttgcttctgctttcccatcttgactttttggtgcactcttgcactgatttttgtagtgtccaatcttactgctattccaacactcaatggtcttcaagctctgggaattatttagattgcttgatttggacctcctatctctagatttacctcgatagttcaatcttccatggccattccctctagttgattttcttcctcttgactctgtatgtaatactgaagaggttgatgattcacccaactctctccgtcgaatctcttcactgagaactagatcacgaatatcatcaaatttcaacttattgtttctcgatgagctactcacagctgtgactgtagcattccaactatctagtagagaagacaataatattaatacttgtacttctttgtcaaactcaattccaactgaactcaattaggttgtgatggtattgagttcatttagatattgagctaccaatgcgccttttatcatccacaaattgaataatctcctcatcaaatgaactttgtttgaggctaatggcttcttatacatattagagagtgctgccataagacttgttgtagtcttttcctttgatatattaaaagcaacattgcgagacaacatcaattgaataacttcaagggcttgtctatcaagaagatttcaatcttcatctttcataccctctgacttcttttcaaagagaggttgataaagctttttctgatataagtagtcttcaatttgcatcttccaaaatccaaaatatgtgccatcaaact

SEQ ID NO: 313471 - DNA, 1529 bp, Cannabis indica
aaccatgcaacattaaatgttatttctgatctatattaataagcaaatctgattatattgaaatgagttttatttagggcataaaatccaacacatttctgctgtcttggtggagctcgtcagagctgaagttccacggctccgattgagccacctttgagttatgttaagtcaaagagtggcagaaacgagttccactcgtcgtgggcttctagatcccgagcttcatgtctccatgcatcatttttaattagagacagccattgtgcacggtggagatccaaactccagagtttgggaaaccactatagtggaggattatgcctatttcggtataatttttattacgatggattttttttgtttaataattatctgtatttagctattatatttttggaattaatttgcttgtattgagttcactgtaggcatttttattttgtattggcggtaaaattgataattttttatgagaattgtactagaatgccttggaatattttttttatgtattttaacaagtttttaaagatgaaaaatcttcattttaccgtcgttatattttataaaattgaacaggatgttaatgagttgttctaaagtttggtaattttggaattacttaagactatctttaatgatttttttttttttgaaaatgctaccaattagtttcggttgtaaagcgacactaaagaaaaaaaatatatatatacacaaaacaatttttaatggatattactcattaatgggtactaaataaatatagttttcttaaccaaaatataattcactaacattacttatatgatctactattggatgtcactgttgtttactgaataagttggaataaaacaatctgagtcacatttttttcttttgtgaaaaagaatctgattcaccaatggatcgagcaaggggaaattaagatgccgagaaaactaattaaagcgaaatgtaaatgcaggttcaatacaaaaaaggatcagaatttgcatgttagaccaagtcctacctggacaaccttatctgtggttgtggagataagtaattaatattcattctagttctctttaataattttctcatatctgaagactgaattgtgaatatcacctttcactttttgaaccaacttttataccctcaattattttgtagaattgatgcctttaacttaaagatgtagtgattctatctacttattaatgtaaaaggtaaaaggagaacattgttattaggcattattggtgtcgattacattttagagatacaactcgttagtgatattctttaaaaaattattacattaaattatatgaaacttgatagttaattgcaccaataactatatgacatataggcgaatgttaaacattaatagtatattttagcattgctccaaaaatatagttaaaatcttaaccctaaggtaacttaggcaattgcttaaggtcttacaaaattaaaaaactacattttatgggtaacatacattgtttttttatataatatgtgtgata

SEQ ID NO: 313472 - DNA, 790 bp, Cannabis indica
  modified_base (744)..(744): a, c, t, g, unknown or other
gagtcgtcttgggaagtaggggagattctttgttaattctctccggctcaagatcatcatgagaaaaagaagggtattcattgtcattttctccctgctcgagttcgtctagagaaataaaaggacaatctatttcgctgaaggcattaactgttcattcttcttcacctttcagattaatgtcaatttggaacttaggagataaataaacagtgtaatttgttgcttctaattgagaaactcctctaaccttcttgaaaaacttttgaagcttgagaaaaccgtcaactttgactaaaaactcttgaatagtgtgtagtgatttgagtttcaagtatttctagaatggactcataacagttagtccaacttccatttccatatccttagcatcttcacttagtatccttgtttgtgtggccacctctaagaatcattgttagtaatcctttagagggttgtcttcaaactgcttgatacagaccaaattgttgggctcggtctgtgccttgatggggagaatcagtcataaaatacttgtttgggtgtttccctagattctatagatcctgagaaagcttgagataccgttattgtgctatttatgatagcatggttagaaagattcggcatcaagaatcctctcgaatgcgttgaatgacaaggtcagaagctaacgattcaaacgtagcttcggagaactactttgtaaataagaaccatgagtcatcataagacgtgacntatcgaactcgaaaggaaaaatcggcccgactcgctatatagatcc

SEQ ID NO: 313473 - DNA, 980 bp, Cannabis indica
aacttgacttcacaactttctctttttagacacattctttactatttaaaaaaccttttcggttttaaacccttccaaaaatttctcactagtactcgttcatagatgggacaagtttgagtactatttttttcactatatttgactttattattacctataaattttaactaatagtacaactctaagaaagttttaggctcatccctcgaatttttatgcttcaaatttttgacggagattaaacaatttgttataaccacatgcatattttgactaactaaaagttagtgtcaacttttagagtgacatgcttttctcattaagtgtacttaagatttgaaaattaaatatagaagattatttttcacacaatctgatcaatttctcacaaattttgatacaaagcatatgaaaattatgcactaattttagacaccaaatatatctaagttatacttaagttttaagtaccaagcatgcctttaaaatacacatataattcattcttttaccaaattgacttgataatttttcggatatcacccccactctttcacacatctatgtgaaaataaatatttgtctctaactctttatattttatttctttcttgaaataaattttcactaactttgacaccaagcatgtcaaagtactaatatttaatttattttatttatagcttctcaagttttattagtccaaaaatgctcttccaattttgttactcatttcataattttaattccactttaatttatttgctcttagttatgacaagataagcaaaaaaaaagtgtaactctcatagttcacataaaatgggataatgatcattaatgaaaaagtaattctaaaatctctttattctcaaaagcataaacacatctctttcatccatcactattattatcgtatactgtatatgatacttacatatatatatatatatatatattcaatggttacattttta

SEQ ID NO: 313474 - DNA, 3995 bp, Cannabis indica
atttaatcataagcataatatcatatatgagtgctacagcacttaactctgcatgctaactattttcttacttggtgtcctaagtatgtggagattccaaatccccgggtgctcctgaacaagtgtcgataatcttagtcacaattcttaagatttcacaaataagattcatccccaaattaaccttcacattatcatatacttggcttttcaattacacataaacatatagagctcggaacaagctttcccacaatatacaaaacatcccaaacggagtttggattcaagagttatacataaagtaagttttacacccaatttgcccagaaaatcctaggcgggccgcgaaactcacaagtcatgacgtggcatctaggttgaaaacccaaaaactccaacaggtgggctacggcattcacagcccatgccgcgacacctgggctaaaaacccaaaaaacaccacttcaaaaaatacgaatttgaacccgaaactcattccaaaccacaactcaacatcatatttcactaactacagtcatcaataatagagagttaaaaccacaaaatcaagccctagacaacatcaatatatgcaattaaatcaagctcttcaagaattaccacaatcaacaaacttgaactcaaaatgcccaagcttcaacctcacaacttaaactcaaatactcatacacaagctcaatgattcaaccaaaacttctagctcagaaattaaagtcaaacctaaaattacacattctaaaatcataaaaaacttgccaacaacaactaagatgcacaccttactatcctacccacacaatcatgcatagaacaacacaaatcatccaattctcatactcatgcattcacaaacttaacaacaacaagaacatgttttttaagatttaattatcagcacttaaactcaacaagagaattattaaaagcttaccacaaattccaaaagcttcaagccacaaattacaccaattgaagctttgatttgaagatcaagtttcaagaaaatgagaaatgggaaggagaatggggtcggcgaagggcttagaaaatcagaaattaagtttttaattttacaaaaattcaattttgttgataatatcaaatatggtcaaatgatcaaaatgccccaaggtcaaaataaacatacatactcatcaagggcaaacttgtcatttcacccccacacacacataacatataaatttcagatttctcatttatccaaataatgccaaaattaaatcccaaaaatgtattttgggctccgaacccggttcgacccaaaatacctaattgtgattatactgcgccgacttgtcaggaaacacctgcagatagacagcataattcatatattaaattatataataatataatttctcattaatacacatttaactagttagggtttgttaatccaaattcttaatcttagggtattacaaacacttcctaccatacagcatctcatagggagaaattcctacgtactatggtagctattattgtaggaaaattttatcaaaggaaagtatttactccatgaatccttaaagtacatgacataggctcgtagtaagtcttctaatatctgaatggttctctctgactgcccatcagtttgagggtggaaagttgtactaaactttagttttgtacccatagctctctaaagatttacctagaattttgatgtaaacattggatccctgtcttaaacaatggatttaggagctccatggagatgaactatcaccttcatgtatagctctacatactgatccactgtgtaggttgtcattaccgattaaaaatgtgctaactttgtgaaacggtccacaatgacccatagtgagtcatatattcccgtgattctgggtaaaccaactacaaagtccattgcaatatcctcctacttccactcaggaagtgctaatggttgcagtaaccctgtcggcctctaatgttaagctttgatttgttgacatgttaaacatttagtcccgtaatccactacatctttcttcattccacaccaccaataatagggtttcaaatcctgatatatcttgaaggttctcgggtgcaacggataaggtatagtatgagcttcatcaaggatttcctttttaagctcaccattatctggaacacaaacttgagttttgtaaagtaacattccgttatcgagatcaaaagatccttaggctgaccggccaatacctcatcttgaattttaactagttcaggttcttctaactgtgtcaactgtgtctttctgatcctttctaacaaatctgaataaagtgtcaggttatgtaatttcctaaccacaaattcaattttagccttaatcatttctatggctaattgaggagctatcatcacagtattgaaaacctgcccgggacattttttgctcaaagcatctaccactacattggctttcccaggatgatacagaatctcacaatcataatcctaaactaattccagccactgtctctgcctcatatttaaatctttctaagtgaaaaaaaacttgaggctcttatgatctgtataaatctcatattttcactgtaaaggtagtgtcgccctacttttagagcaaaaactacagctgcaagctctatataatgtgttgggtaatagtgttcatcttccttaagctaacgagaggcataagctataaccctatcaacttgcatcagaacacatcccatacccagtctggatgcatcacaataaatgacgaacttttcttggtctgaaggcaaagctaacaccggtgtcgttattaactgttgcttcaactcttgataattcacttaacacttgccagaccatacaaactgttagttcttcttagttaactctgttagtggcgttgagatcttagataatccttcgacaaaatgctgctaataccctactaacctgagaaaactttgcactttagtcactgttcttggcctcagcaaatttttaacttatttgatctttcccggatcaaccataattccatcttttctgaaaatatgccctagaaaggacacttccaacaaccagaattaacactttttaaattttataatcagcttatgatccctgattcgttgtaataccattcggagatgtttctcatgctcctcttctgtgagagtacacaaggatatcatcgataaatattatgacatagtttttgaggaaatccttgaatactctattcatgagatccataaaggtcattgaagcatttgtctatccgaatgacatcaacaaaaactcgtaatgaccataactggtctgaaatgtagttttcagaatatcttcttcctgtattctcagccgatgataactatattgtaagtcgatctttgaaaatacagtcttcctttgaagttatattttagctccttgagttctactgaagccatcctggatgtcactttcgaaacaggatctaccccaggtgccaaatcaattataaaatttatctcttgttgtggtggtaatcggtaactcctcaagaaatacatcaagaaattcctttacaactctaaccacctttagcccaaatgtttcaggtctactggaatcaattacaattgctaaaaatcctacacgtccaatgtgtagtaaattcttagcccttaaaattgaaataatcgggatttgagacccctgaacagatccaacataaacaaatggatcttcaccctctggttgaaaagttacccttttttccttgcagtcaatactggttgaataattggatagaaaatccatcccaagtatgatatcaaactctgttagttccaattccactaggtcaacactcaactccctattttccactctaactgacatagacctaattcgccttttggagataattaattccctgctaggaagtagggttccaaaccctctctcaataaaattacaaggcctacccaattgattaa

SEQ ID NO: 313475 - DNA, 1131 bp, Cannabis indica
atcttgataatactctgctacataaaggatacaagggttagagatctgaacggaaggagtcacttaattcagctgcacccaatgtaaggtttcctaaactttatatgtttttatttcatcgttttagaaagttcatatttagggtgttaatcaacataattgtgagtagatctaagatcctggtaaaataatttccaacaagtttatcattcaggctcaaatttggttaacgaaaatctgcattaacatgaataaaattcatgaattagtattgtccagacaaataaatgatataaaactaaaaatggaacaaaatgggcccaaaaaagggccatccacgcgcccccacgcacctattcttttaagggtcgtacgacatgtcgtttggtgaaaacgacatgaatagagtaaagaaaatgacccgtcgttcgcgttgaaggggactgaaccaataaaacaaacgacgcggaaaaaagacatgttgttttagtcgtccctgtcacccaaaaaaatttccccatgggttcgcgggtctgcaactcggatcggcgcgacccgatttgtgactcggtcgaataggccatctccgaccatcgaatttgacgtcgtttaaggggttttgtttccatttttaatcatatatcactttccaaaacccatttaattcaaaaaaaacacaaaatataatcaaattattatgaacccaaaatgggtttttctctaataatgcactctataaaaacttggtatttcacaataaaatcatacagcaaccgcctcaaaaaactagaaaaaaaactattctaaaatatttaatctcatatgacccattaacaacatattattccgaagataaaaaaaaatcaaatttgaaaacaaaatgggttaagttcaaatattatagagctctaaaatcaaatatactagctctaataccagttgttaaatgatcacaaattatgagcattaaatcacacatataatacactaatcatcattactcataaccattaatccaagatgaatactttattgttggaaattactttaccaggatcttagatctaattatcaatatctgaacctggatctcttctctgaatctttgatgttgaaacctccttcttgctg

SEQ ID NO: 313476 - DNA, 765 bp, Cannabis indica
tttttttttttgaaaaagaatttatgtattagttgatatgctatgattgctatctatttttatgttaagtgaatattattgctaaaattcatttaagaaatttgattattacattagatatgtagaatacatttttttttttgaaagggattagtaaaagagaatcctttgtgcttggtctggtctggtcatatgactcatattgaaaatgaatgatttgactttaattaataatggttcatcgcttatatataagagtgcaaaactagattatttagtcataattggatgctctcccttctcaaaaatttcaaaaaaagtacaataaattgataggataatgatttcattattaattttttaataaaaatacaatttgtgagagcagaaagaaaattaagcttcaaaaaatcatatttgaaaagattttctagatgtccatatatttttttaataagatatcatttttttagttgcaggaaataatatatcaattgatgatgatgatatgatggagataataaaagatagaaaaaatgatttggtaatatattcttgtctattatttaatctctatcatagcttctttgatcatatacaataaaatttagggtggttttacaatgtatccccttaaaaggaatgtattaaaatttagggtagttttgcaatgcatccccttaaaaggaatgtattgatgcacccctacttgtttcggcatctagaaaaaaaaaataagtctaatttttttttctatatttatgt

SEQ ID NO: 313477 - DNA, 1182 bp, Cannabis indica
gaaagtctaattcaacacaaatatattaatatatcaatggacactaagtaaaactcggtaaatataattctataattactaaaagttcaattccatatttatagtggagtaatcatagaattaataaacatgattatttggttgatgagattcaataaataaatctagtttatttgagtttaaaattataggtccatggttcccgaatcgccatttcgaaacacagtcaagggtaaggatagaagttgtatatgaaagtttgaaaaaaataattttgatttgttaaaatagtaattatttactttgtaataaataaataattttcaaatttattaattaaataaattagggaaaagacaaaagttgtgtgaataaaagatatcattaatgtcttggtaagatataggtgacgccacatgcactgtgttaggacacggtgaaggtgcccctatttagggatgttttggggttaattaattaattcaaaagataaatatatatatatatttgaatttgaatttaaaaaatagttatagatatttaagttggttgagatattccctcaaagtagttgagagattctctctaagtggttgagatattctctcaagtagttgagagattctctcagtcagttataggaaataaatatctataacaaatcaagttataaatatttattcaaataaatatgatttaataattattttgaatttaaatatttactcaaataaaatctttatggttttaatttaaatatactaaataaacaaaaagtggaaacgtcttatttttgggaagcttaaaaaggattaattagattaatttcttttccatcataatttcaaaaggagttcttactagaactgaacatttagacccaaaaactcgaaaaactgcccacccgccccgacttgttgccaaaaaaagctaaaaaattaaaaacccataggatccggtcgggtccaacccaaaaatgggccacacagatatcgggtttgggttttaaaaaaaaaaacttataaattgttgggttgtaattctaaacccgaataactaaaaatagttttttttttctttttttatttacattttaaaataatattaaattattatctattaaatataatataataatactgacaactttaaaggtgaataatataatactgttttttactt

SEQ ID NO: 313478 - DNA, 791 bp, Cannabis indica
aaacggagtcaaaaaattaattaaaaatttactaagaaatcaaaaattaaattctaataaaatattagaaaaaagaaatatctaaaaatgactctgggaagtgctgcacacgaggagttagatagtgggcgtcactggaagatggtttcttctacctccgggtgggtctggaacgggtacgagtaacctggttgcaggcagtcgagtcgaagaggtttcccagccaaaaaattcaacaaaacggacgagaaaaggagggattttgtttggaattcaatatctaatcaatttatagagaattttgggtataaacaactaaaacattataaatcgaattgaaatccattcaaaaatttaagaacaaaaagaaatacgactgcgatatgtatctcaaccagtttgaaaaataaatcatggagaaacattgtaaattagtcaggaatgagatttgtacaattaattttagtcaataatcaatagaatcaaaaaatccaaaattaatttcataatataattatataaaccctaaaattttgaacataaaattatctctaaatactcaataaaattatgcatatgttatatcaatagaaagagaatttcatgatgaataaaactcctaagaaaaacaaaaaaataaacataaaataagtacaaaattaacatgtaattagtaaaaattaacatacatattaattggtatacaaattataggtactaaattacataaaattagcaatctgataccacatgttaaaaaaattaataaatcaagatacaaaatttgtata

SEQ ID NO: 313479 - DNA, 1419 bp, Cannabis indica
ttcaaagaaacttaaaaaagctcttggaaatcttctaatccaaaggttaaaggtgaacttaaaatagactttaaatgtattgccaagaagggaatgtctaatgtctctgatgttctagaggcttctggttctagaaaaagactcattccatttgaggttgaagctcgtaagacaaagagaaccaaatcttcaaaatcaatcaaagatgtaagtctttgattgttgctttttttagtttttttgtttgttatatctttgtttattttttgtttttatttttagttatgagttttaatttttcttttctttctaattttttaagttttgtcaaattctgtcattcaggatgaagtttttgatttagaagtttaaagtaaaagacaagatttgtatattttttttccatctttgttcttttgaagttgcctattaaaaaaaaaaaaccaagtcaatactatttaccttaaaacggttgtgtatatatccatacaaatggaggactctaaaatagtgaaaacgacatgccgtttaaatgcatgtaataagacgattctaccacaattcacgcgaactaaaaattaaattcatcagcaatagataacaccaaaacgacagtttatgaaaaatcgtgatacggtttttagtgacattcacttagtccgacgaaacacacatatatatgccctgtttttattataatgggatagttaattaattaatatatatataccatataaatatatacttggaaaatgagaaatattatgtaagactttctactctattgactattattttaaagagaagtaaagctttttaaagtttggaaaaattatcttaaaagtgaattacaaagtactgtatacatcttcggcataaaacgtgggaaatagttagtttagtttggatcttacgacaatgtttccatcctttaaaaaatatctaggaaagactatatataattttatactctagcattaaatttgattaattagtcattacattccataatgtatgatgaagaaaatgtaaacaaattaaattctctatttcactataccacatgcaaatatcgtgtactatacgcgaacactttaaaagtcaacttactcagctttggaccaacattaactaatatatattgcagaaaaaaacactaatataaagcatccttaataaagtggcaaataagtggtgctatattttccatatttttgtagaaggattgttatagatagattttctcaagggaaaaaaaaaaaagaaaatgtcaagttttgacagacagaggtagataggtgtttttgtaaaaaggcctctttgaaggctttgttctgtattagtttgttgtgcaataaaattcatcttccttacaaaaaaatacaagtttcttatatatttgagtatctattttttttt

SEQ ID NO: 313480 - DNA, 912 bp, Cannabis indica
attaacataaataactgctaatttccaaattaactaagcgggctttacatgggtagtcgctatcctcttcttcttcagacactgggatctgctgccaagtcggttacttgtggtccttaaaatccatggcacactgatcctttttttagaagaccacaggacctataattgttgtcatggagcaagaaatctcccactcgcaaactaatgggtaggttcaccaggatttaatgtcgcctttgaactacttgtgttaggattgctctctttaaagcagctaaagatgagaaataaaagaacaaggaattagttaagatatccaaccatgcaaattcaaactctaaaccaacattttgggaatgatagatacttacgtaaaattctaaactagatggtatttattgggtgaagtcctgttgtccaaaagaattcattcttaaactccttcttattgggaataaaaatgattttataatcattggaatgggtgcccaaatagtagaagccacatgaacaattcttcctcacagggcatactttagttgcataaaagcatgtaatctcaaagggggttggacactcccaccctaagatatgataaagttactttagacatgcgaggatcctataagaatttggggcgagctaaaaggcgtgaccccaaggtaattacaaaattccttgaaatgttgcctaagggaaaggacagcccctgccttaacctgcttgacccgccaagctcctatccatgaagagtcaccggtactgcaaccttcgtcattcaagaggcgagatgggggaaacaactaaatttgtcaggcgtgacagaacttatacgagataccttctcatttttaataccacgacctcaaaaattgagccacgtaagggcgattgatctaactttagatt

SEQ ID NO: 313481 - DNA, 682 bp, Cannabis indica
aaaaaaaagcaaagttggccatccaactggcaaatttttctttacaaaagtgtcacaagggaacaactagcgtctcggctttaaggccatttccttacaataaaaaaaagagataaataacaaccaagcctacattgtaggagacttggatgggtcttcctcttccactgcctcggccttttcctcctccttcctagccttttcataataagccaaaatctcctcctcatcctcctccaagaagcttgtgtccaagttgggattcgccatcaaggcttgataaacggtacgaaggccgaccttcttgcatcgctatgtggttattaatctctttcccttcgagtttgccctttttcctcgcgagcaccttcttaagttcattaccttcattagtcttggttgttgtgtccttctcggctccttcgagcctttttttgacctctcggcttccagtttaagaaaagtgatttcctactgagcgttgttccattatttaattacggcgctgcattaggctcgtgacttttggaccttgccctccaggtatttgagctactccaggattccctgatgagaggaaaaagaaaagaaagaagtatggagaattatgagcaaatgaatataagaaacggggtggaaaaagaaagaaaaaatatatggattaatacagtaaacttaccat

SEQ ID NO: 313482 - DNA, 579 bp, Cannabis indica
gtgtgggaactgtgtatgaggaagcgggatgagggtcatttgtagctgtaggaatgtgtgttggaggatcaggtgaaatgcttggtggtgatggtagtgtctcggtaccacagtgggatacaccagcagggagggcattattagtattaatgaatgcattagaagtattaaaagttgtagtaggtacagtaagtgaagaatcatatacctgttgggactgtgtagttgataaaacactaggataatgaccttcattaaagatgacgtttcttgcaatatatattcttccttgagcattttcacagagataacctttatggtaggaagagtaaccaagaaatatgcattgctgagatctgaattgcattttgtgagcattataaggtcgaaggtgcgggaaacatgcacacccgaatggtttgagtattgtgtaatcaggtttagatgcaaagagacattcaaaaggacttatgttgtgtagaatagcagtaggaagcctgttaatagtgaaagttgcatattggaaagcatgccaccaataagaaaaatcaagattgctttgtgctagaagagtaagac

SEQ ID NO: 313483 - DNA, 1335 bp, Cannabis indica
agatcctggtaaaataaattccaacaggaatttgtgaggagttttttagaataatattactttctccaaggtgttcttaaaaaaaatatctcttgcccctatctcgtgttttacaagagtatttataggccaacttttcttcatgcgctggcttggattgatcatccttgggcggagatctgaccgttggtttggtaggtggatttttcccatatggcatttaagggtgtcagattgtacaggctgggcatcatacacgtgtcggcccagggcctttcctttttgaattttccttattcttagtcgttggatcattcggttaggtacaatggtacacgcatgcttcatacgataacatgtcgtgggggacaacctctgatgtcgtacctgaaaaagcctggtcactaggtccgtagtctaacatgtacgagcagagcctccacgaaatgaggttgtggcttggtttggcacatttcaaaatgcctttgtccctctgggaaaaacccataccctttgcgggagccgatggcttcggttcccgggactggggaagacttcggcttacggatgtccctcgcataactgactaacagggaacttccaatcacagaggccttttccgcgagctggggcctttatcttcccggagcgtctgtggaggaaattgatcggttgatgacttcttaacttttcttcattaaaatccacgtgtcacaatcacaaaaatccgaataacacgtatctatattggatctatagagcgttctatgtaatcaagagtgcaattccaaatctataatggagttaggatgaattaataagttaagaaatttactcgttaaattttaaatctacttattgggagcttgatttaataggcccatggtccccacattatctaggataatatcatcgtgtagactcaattaattgatttaataagtcaattagaattcgaaaatagactatgtcttattagagaattttcacttagtttgggctaatttgagaaaaaaatagaaataatagtttaattgttaattaagatattttgtagatctaattaataaatatatttaacttgtatttttgtttgataataatttataattattagattaaaatcggggtttaaataattaaatgtgataagtggtaaaattagaaaaaagacttatttctttcattaaattgaaataaagtgacaaaataaaagagatttttacactacatactgaaattttcaacttttttactgtgaggcagaatattttttcaaaaatactgtgttttttttttaaaaaatattgtataagtttttgttggaaattattt

SEQ ID NO: 313484 - DNA, 2643 bp, Cannabis indica
ctctcactcatccacttcatgccttcaaccaaatcaaacttagttttctatgtcagacaactagtagatgagagagttccttttatagtgatttcacctccttcattgttcttcctatttcggcccatagtgatggagtgtcatgcccacacttagcaagtcaagtactcaatcatagtgagtaagacgctggtaaccaaacccgaaggagagaaagagatctaggctcagatcttgataatactctgcgacagaaaggaacaagggttagagatctgagcagaaggagtcattatattccgctgcaaccaatgtaaggttttataaactcttatgtgtttaatttcattgttttagagatattcatatttaggatgttaataaaacatacttgttagtaaatctagatcctggtaaaatattcccaacataaagtacttcttggcgtacccaccaacttttgacatgtttgtgctgttgatgtcacccaaccactggtggccaacctggctgaagaagaagtacccagtcctattctgcttcggagtagactttagatcaaaatagtacccaatctcataaggattgcgctgaggccagcctagctccgtatacaagacaaacatcgtcgaaaggtacttgatacttttcgagctgatctgagttgggcacattccaaagtaggcagcaatgtctctaaaataaggatggagcggcaatactacccctattcaacaagacgctctgactaagctaaccaacctaggggaagctagtgcgccctttgatctctaagaggtatcttgcaatggacacccctcactaaaccactagcaagtatcttgctaaaggcatcaacagagagggtagaagcgggagagacccagttggctccctgtgatctcgcattcagaatctcaggctcaaaagattgatttaagacatgatcaaggcctaacactgaaggctcaccaagcttgttcaacagattaccattggcatcgtaatgactcaaagggcagttggagaggacaatacaagtcttgtatctctttctcctgactagtgcggccttctcaagatcagactcagtatcagggctctcagccccttggttgacgtcaggcacctctacctagtcaacctttggattagcattaacatgaggttgagtagcttcctctacaatcctgacttgaccccttgtagccaccctggctacatgggggtcacattgaggcactctacgacaagtctgttttgttttttctatgatcacaagataaccaagggacctacacagctgtcacctcccctatccgacactcagaaccacgtgcatagaagagataagggggggtgagcaacctaacaaagctacaaacacattctagtcaacggtacccaagggtaccttctaggtaaatcacaaagtacaaggtcaattatcgaccaagtaccgtcttaagtacacttacttagacatatggtaaatcttaagttatacaattgactataatggactcattacggagtcttatatagagttcccaagggcaaccacgtataagactacagttgtatatgcctctaaggtcgtcacgagaccctagctgaggtcaagaaagggtaaaatttggctgcccgcttagagccttggccttggccggccaggaatccaatttccaagcataggccagccaacctatggggtatacccccttggccagccaggccccctaatagctatccttggctggccaggtttggaacaagacctcctttgccagccagggattgtacggatctgagcatgtgtttttcaagaactcaaacatgttctttgtgacccaaagagccaagaatcacaatgaaggtcagattcagatctttttcatctagaaatcataaattacgtatcctaaggctatcatgcggatcaaaatatcaaaaggacaacaatctaatgtaggaatcaaaagatattcaaagggaagaacgatgttcatgcattcgtggcaaaattaaccaaatcaagtgaaatagcaggaatggaaagcttacccacttcgagaaattgttgaggaagaaggcggaaagcttggatcatcgaaacaacatgaaaattctgagagattgatgctttgtgggtctagccctctaaagagaatgaggagcttcttcaaatattaagtgagagaagtgaaagtaaaaagtgaaaagggtttgcccccaaaagaacttatatagtacatatgggaccccttcttcacttactttacatacacaacaaagagacaaataaagtagacagtttgctacagcaaatgagatcagacagttaaggcaaagcatttcaaaaggctaaaaatgcagcaactttaatttagcaaaggctacatcagttccaaccgcaccaatctaactggtaagtccctatttgtacaaatgtctgcatagggaattggggcaaatgttatccagatttttgcccacctgacgtggcattgcttacattgacaaaattagcaccatgtggcaatacagctcacgaacaacaaggccaagtcagtgcctcggccaatagggatcatattgggttttataccctaaataaaactctttacaatctgattagttatc

SEQ ID NO: 313485 - DNA, 2162 bp, Cannabis indica
aaattccttttcttccctcccctcgttccgtgatcactctaactgctttctgggtcgttttctttcatctacatctccttccccttcacctttcccccccattcgcacaccgtaacccccccctatcggactctctcacacactcgatccattcaacactatcgttgacatatgaaaaaatcctctgtatttgccttcactgacgatgtccaaccatcccaacttcatcctccactccacgttatgcttgccactgtcatttttgaagcttccatacactagcctactttcatcaaccagatgtccggccactggaagggtcgattccctgtggaaatttcagattacggaaacaatttatttaaagtcatcttccaatgtgctggggataaggttagagttctgaacaaggagccttggcacctccaaaatcacttaattgtgatgcacactccatctgctctgcaaaatgtctcaaagaaggattttgcttttgcacctttttgggtccaagtttatcgcttgcctttcttaagcaagtctaaacctttggctattgctttggggaacctcattggtgaattcaaagacgtccatgaggactcccttgatgaaggttggggtccctttcttcgaatataagtcaatatcaatattaacaaaccacttcctcgtggacgaatgattagtctaccaaaggttaaggatgagttttggattgacttccgatatgagcgactaccggagttttgttttgaatgtggtttactcgatcaccctttcgaaaaacgtattgccttcatggaaagaatggactcgggtaatgatgatgattttccttttgggccgtggatgaaaggggccaaactcccaactacagaaataccgtacggactttgccaaggggaatgcttggccgctcttaactcgtcttgctcgatcctcacttacttcgacaatccctcgtctaaacacactcaccaaaccacaacctcgttctctttttcaaggtgaatcatccacacccttggtgccatcccatcgggtttctaacatccatacttctacacatttgcataatcccataccaccaggcacttataccactcttgataggcctgtaatcccacccaatcaccctaccacatcacttacaacttcacccactacagatattacaaactgtagtaactccaattgttccactaccatcaacttctctaaaatttttgttccagatgtggggaatacatctcgaccacctatgccttgtgctacttatcccccattcccaaactccaatacacctcctactcaccctcactcattggctatatccacacatgcggctgttcattctttgtccaccacaccaccaacaacttcactccttacacctgatgcaacatccttaaaccagcagaaattaaaaggcaaggaaaacttgaatccaaataaataaccaaaacgacagcaagaccaactttcaatgagacaactcttaaaacgttgtcgtaatcaacaagactgcccacctgctccttcttcgtctcaaggagatggctcaaaccattacgttttcttacatgatggattcggatgatttcattgacgatttagcggaggttgtgctgcaaccccgcgcttcaccatgaaaatcattagttggaacgctaggggactggggaatcccaaagcgtttagacatttgcggctgcttgtttcacaacagtctccccaagttctttttctcatggaaactcgccttggtaacaactctatctcacggtttcgtcaatctttaaattacagtaatggtttggaatcaccacgagttggtcttagtggtggactcatgctactttggaaaaacaatgtcaatgtttctctcaatacttttggccctacatactttgactgcattatgtcctttgcagatggcccatcttttcattttttctgccttttacggagcacctgaaacatcaaacagagcgcattcatggacacttttgaagcgtttacatgacattgcaccaactcttccttgtattacaatcgatgactttaatgaaattttgtcacaacgagataaatcgggtggtgcccttcgcaatgatacacaaattcaaaacttccgtcaagctctcgatctctgtcaa

SEQ ID NO: 313486 - DNA, 1234 bp, Cannabis indica
gtaaaataatttccaacagtccgttcttccgtcatacaatttcatttaaggcattctaacatgctcctgtagttatgcatctatatttcttttcacaaatggtttcgtgtccttttattctgagtcagacacagtttcattttacttttggggttagtgagctttgttaactcttcaattttatgctccaaatgttgagttttatcatctggagattctcttctgcaaacatggtcgttaatatgatttcttaggctgtccctgtgaagtttggctttctcagtctaactttttcttttttggcatttagtttcctccaaagatcattcatggaaagacttccacttctgttgtctgatggcagacacacctcttcaacatcatcacagtaatttatatccttccaggcagtaggatttttggcttttggataagatttatctttctgtgcaactctacctttagaatcagtttgatgaccttgtcttgaggcatgatttcttttctttttcatttgaggttggctggaagatttggatttctttcgctgttcagcttgagtagccttctttgaagttttacctacctttactttccctttgtccttatgagaatcgtaagtttcaagatttttaggattagtcttcccgatggtgttattccttaaagtcgaatgagtagttcaacttgtagtagtcagtgctttgttatggcctccactatcctcattttattgtgcatcaacatagaaaactactcttgcaatgataatttatcttcaattatttcaactttctggccatggtgaccacatgatctgtctcgtctagatcaccctcctttttagcatcaccgtcagcgagcatgtcttggtgatcatcctcgagcatttcttggtgatcatcctcaagtgagtcttggtgatcatctctaacatcatcagaataattctcccttaattcatcatcttcggccataggatttttagggataggtttcttactggtatgatccttcttgtggcaattgatcgccttatttggatcttctacagctcccgttctagcattgggatcagcatctcccttttggggatcattgaaataaaaaccagactcggttcgggagagtaccatacgtaatttgggatggtatcactgctttcgtcaactctcaatgaaaacaccaaaatatttactgagattttttaaaaaaatgaattatttaatattag

SEQ ID NO: 313487 - DNA, 1273 bp, Cannabis indica
aaatcataactactataataaaataacttcatgttttaagcttttaattgattatagtaatgagacatttcagtttttatgaaaatgtctacggtgatacatattaacaatcacacttaactattttaaataaataacacttaacattttactttcgattaataattttgtatttactaactacatttactatacacactattctactcatgttcattgtttatgattatttttttaaaattctttttgagacatcatttttctgtagaatatgcccctatttataggaatataggttttttgttatttgttgggatcagtttaatatgtaactgttcatgaaacatggaaaattcccacgttttatttaattgcatgtggaataatatttgataactgcttaactttagctgccttttcttcttattctttttgttggttgctgattttgataagtgtatcttgcttaacatgagttgtcctccttatctatcttcatgtagaaaaaatgctaaatgttagcaagtggttcgtctcgctacatctcttcatttgagtgaatattgcgagctaactgtcttgctatacgtaatccgagattacagtatatgattacatttattctacttgaacgaatatatatcttctttttgactatgtattctaagacagacatatgtctcgtcaatatctgttcaatagtttttattcttatctcgcttaagactataaagtcagcgagttttgaatttaaaattttaatatatttttttttttttacatctaaattgattttttactaatgttgaatatttctcatttttattttgagggtgtacgatttgatagttgtcaaattttaagaggtaaatttgttaatttaaaaagacccgtgagcatttaaacgaagtaatgagaggaaacctaacatatactaaccataaaccatttaaatatattgcaaaccaaataatatcaaattatttaatttggtctaatggttgtaccagtagtttattgttgacgagatccgagtttgataccacctatgttacttttatttttattttagaaaatatgatttcgaaactaactttagaataaaaccaaggatccgtgaaataagtgaaaaccattgcactaattctcatttactataattatttaagtatctaatataataaattattttatatacttaatttatatttaatttataaattaggaatgtttataatagttaccttttaaataatatattcttatatttgga

SEQ ID NO: 313488 - DNA, 547 bp, Cannabis indica
ttagggcacaaagcccaacactcaggaccgagaagactgaaatagtgtatctgtacatcaggagccaggggaaagagggaggaaaaaccgtaaacaacccctgttgatttaaggcaaaagctcaatgacaggcacggtgatcttaggaatcacttggaaaaggagaaacaagcaatatcagtctcagagggtgccataaatgagggaatccgggctgaactagctatcctctgaaaagatatagctaaagtttctcgaaggtaaaagggggatgattcgaaatctgattgtgaagaccgagaaccttgggctagaaatatccttgaagcagagctcctaaaaaactttaaaatacccaaaatgacgatgtacacagaagatatataccccagtgaccacctgtactggttcaaccgggtaatgacatgttggattatagttttaccaagatctagatttactaccatgtatgtcatataacatcctaaatatgaatttctaaaacaatgtaaattatgttgggttttgtgtcctaaataaaacccat

SEQ ID NO: 313489 - DNA, 809 bp, Cannabis indica
taaagtttaaaattacaaaaatactgtattgtagttgttgtctaaatttttataaccatgacacgtgggatttagcagaggaggccaaaataaactttagctaattagtgccttcggccccagctccaaggagggacttttgtgaaggatgcatccatcgcaaggcaaggacgcatggagcgtcaaggagcctgacatctctagttcccgagagtggaaggaaggccttgtctcccgggaaggaaagcatcccacagaagccgaggactaccttaagcaggccaatgtgagttacgagaatacttaggataggtgttatcctcatgtgatgtcgcagaagatctctgtctgtacctgtcgaaccacgaaggtgacggtaacgctttttctggtacaacgtcagtctttatctcctatgtcaggccataatacgaggcatgggcaccaccgtacctgcccatggtccagcgaccatttacaagggcgattcaaaagaaagcaaagacctttgggtgacacgtatgctatgttcggacggtaccagtcatatctctacgaaccgcacgatggagcgacacctacaaaatcgatagtcagatcccttatggtgggactggtcctgattaatcggtttacttatttcttgatctttaattaattggtttctaaaaatttcagtaaatattttggtgctttcattgagatttgaggaaagatttaaacctacattatttctattattacgatcctagaaaataaagagaggaatttgctcaaaaaatggagaaagtgttgggttttatgcccta

SEQ ID NO: 313490 - DNA, 840 bp, Cannabis indica
aaggtgatccgctctcctcttatctgtttttaatttgtgctgaaggtttctctgcattaattaatcatttcgaaagcagtggacatatcagaggttgtaaggttgctaatggtgctcccaccatctcgcatatgttatttgccgacgatagctacttgtattgcagagctaatgagcgtgaggctactaatgtgatccgtttgcttaagatttttgaagaagcttctgggcaggttgtgaatttcaacaaatcttccattttttatagcagcaacacaactcagaatattagagaccacatatgtcacttgatgcaaatacaagaagctgatggaactagcatgtatctggggcttccatcgttagtgggcagaaacaagaagcaatcttgggtttcataaaggataaactacaaaaaagagtacaacattgggaaggccggttcctttctaaagctgggaaagaaattcttctaaaaacagtggctcaagcttttccaagctatgcgatgtcagtctttctacttcctttggaaacttgtaaaagtcttgaaggtataatgagctcttttggtggaaatcgtcaaaggataaacaaggtgtgagttggcatagttggaagaaactttgtaagcacaaaacggtggaggcttgggttttagagactttagagattataatctagctttattggggaagcaagcttggagattgtaactgagagactcctagtttgcaaagttataagcaaggtattctctaatggctcgtttctaagtgcttcacttgggcataagtccttcgttcatctggaaaagcatttatgaatccaaagacctga

SEQ ID NO: 313491 - DNA, 836 bp, Cannabis indica
gcctccttaaccgtcgactcagcgctatcgtgcgccaaatcaataattcccttttccacagcatcctcagccgttaccttcgctgccgtcagaagaacaagccgccgagccgctggcgcgccgaccttgcacttgatcaaagccacgacccaagtcgagatcggtagtcgaatatcgagctcgctcatgtagaggaatcctctgtctttcctcatgagaacgtagtcgtggcttaaagcgagtatgaatccggcagcagaggcgtggccggaaacggcggctatggtgggtaagggaagcgatataaggtctgcgatgagtgatttgagcttggaatcgagaagaggaccacgggtttgggatgaaccaacccaattgaggtcgtagccattggagaagaactttccttgggcggtggtaatgagagcggaagatgaggaagaagaagcctctgatctgactcggcgtatggctgagtgaattgaatcgataagagttgggtttagcctgtgttcatcttgacccgttagggttagtatgaagattttgcctttcttctctaaagtgcacattcagtcgtatttgattttgaggtcaattttcataagctttagagactggttctaaaatctataattctattaatatatataagagtcagagataacagtctaaaatctttattatttgttatctttttatctctcttatttattctattaatataattcttttttatatttttacgaaattctttatagtaacaactacaatttcacatagtaaaaataatatattgggtaatttttctaaaatatatacctctatttatttta

SEQ ID NO: 313492 - DNA, 461 bp, Cannabis indica
agcctagctttaaaggtctctactttcccttcagtatttctctaattcttaaaaattcatttacaccctatagctgtaacaccatctggcaagaattcatagtcccaaactttgtaggtacgcatggaatccattttttgatccatgtcattattccacttgtctaagttagggtcttcaattgcttgttggtaagtcaatggatcatccttgtatgtacagagaaaagaacgcatgcctcgtgttcatagcagataggttatctcaaaaccctctcacaacaatgatgtaccaagttttcctgttcaagaactatggcaactactattggtcattcaactgatggtattgaagttgatgtttcataaatctgctcatttctaatttcccgcgataactatttgagtacgtggtttgtgatcttttatatagttatgttctacatgttggaaattatttta

SEQ ID NO: 313493 - DNA, 963 bp, Cannabis indica
aatatttatatataaaaaattattagaatttacaattaataaaatatgtttagaaaaatggttaatattagaacaggaatatttaaaaataatgaaagtgaacatgtttagaacatctgatctgattggactattgtagtatatatgttttgggttttgagtttacttatgccactccttaagtaactgaggagtgagagatctggccccaagggccacatggacattcatctgatcaggtgcagttcacgtgaccaagcgatcccgtatcggattcagccccaccaccaactccaatcggttgcccaaaacaaaaaaggcttctgcactacagcccacgtgcaccctttcaaaaccaacgtccccacgcctgcataagctctggcccttattgtgataccatttaattacaatggcccacccatattttctttatcaaaaagcaatttacttgtactactctttaataattacaagacaaattacacataaaataaaaaatataaaagtaacactcaaacataaggtatatatgaatgaaaatttctgtttcaaaaatgaaaaatatatataaatgaaaatttgagtgttattttttaaaaaatatataaatgaaaatttccattttcctctctctcaaaaaaaaaaaaaaaacgtaacaacactcaaatattagttatttttaagagacggaaagaaaatttaaaacaaatttaaatgattaataatttctagtaagaaataataagaattcaaaaaaagaaaagaataaaaaattctagttgaattctgatcaaactaaaaaaatattttaaaaaaacctagttgtaagaagaccataaaaggagagttttgtgggggtttttttagcgataattacataaggaaattacataaaagtaacataaaaataacatcaaaataataacaaaaaataagcatacaaataacaaaaaatacaac

SEQ ID NO: 313494 - DNA, 1145 bp, Cannabis indica
gcaaccactgtaaggtttcttatgctttatatgtgcttatttcatatcgttttagaagttcatatttaggatgttaaacaacgtacttgttagtaaatctaagatcttggtaaaataattccaacacctcatggtgaggttgccctgtctctttggaaaagattgtggaatagtaaaaaatctgaaaggctgaagactctatggtggtgtatcctggccagggctcttccagttcggtctgagatctgcaaataattttctattgaggatgtgttgtgccctctgtgtgggacaaagaatgaatctattgaacatatgttcttatcttgtaatgtggctttccacttgtggaggtcctttccttggggcatctttcctatttgtggtactggcatccggatgtgggactgggtcaaattcatctgggaccttaaaaacaaaggcatcaattcatgaggttttcctttatgcttcgtaaagtgttgacaccatatggcagatcaaaaacgataaggtacataataactgtctgcttgatgtgattaagtgtattgatagtattcgctcttcttttgaagtttaccatgcttctttgttcccttgctcacctccgagcttggtggttgcctgacgccctccccctcaagactggataaagctgaactgtgatgttaaagtgttgttggacactatgtgtactgctgttgttgcaagggatcatcttggcaaggtgatatgggttcatacttctagattggagtttgctgatgcgttatgtggagaagtggcgacttgctgcactgcgctggatgttgcaaagaatcatggctttaagcttattatagttgagagtgattttgaaggtagttatcaatgctcttaagaggattgagttcaggtgggagcttgagaactatgttactttttgtattagatcctctccctcttttattagctgtattttctatagggaaattatagtaaatggccccaaatcataggactatgttagtttatgtcctcatttcaaaaaaatatagcaaataaccctaaatcataagactatgttagtaaatgtcctcatttcaaaattattaatttttttttatttttttagaattagaagcaaattatttaaacattat

SEQ ID NO: 313495 - DNA, 1502 bp, Cannabis indica
aatatttatatacctaccgttggtttttcttacaagaacattaagagatagaattaatcaaatcaaaagtagaatgaaatgaacaatagtaattaacttatttttaaaaaatatatatataaattagtaagtaaattggattagttttactagtatttttttggttttatttttagtattttcttacaattatggtttatactttaattagaaaataaatatattgaaattaaaattaattaaaaccaataatatatttaatttaaaataaattgaatatcaacgcaacaagcgtttacataccaacaaaaaaatcaaatatatatcaaatatatataagattaaataatataaaagaatttattataataccataattagttttatatgattttagttgatatattcaattaatacttttttttaaaatgtaaacatacataaatatacataccttatattaaaagaaaacaattaattaatagtttattatctctttttttttagaataaaaaacagagtttcttctttagtaaatgtattttagagagttttcacatggtcaaattatggtattgtcgaaaacttgtgtgaattatgctatgacttaagaaattaaaaaaaaaaaaattataaatgtaaacttgtgtttaaaaatggtgttttcctatagtccttttctacaaaaaaaaaaaaaaaaaaatggtgttttcctcttaaaaaaagaaaaaaaaaagattggctgtcattatttattgtctaaaaaacaagcttatttgatttggttttttttttttattattattaacctttctagtatgggtaaatggcagcaaaacccccaaaattttcaattttggtttcacttaactcccacaactattaaagctcatcattacattacgattatgtttgcagctccacttaatttgagaactatttacttgaagctaggactcaattaaaaatggaattctcatcccttttaatacttctacacaatcatctctatccatctttatttagtttacataaataacaaactaaaatatgactttaaatataggaccaaaacaataaaaataagacttaaaatcttgcgatgaataagaaaataaaaatacatgaagaacagcatattacgtgtttaactaacaactagttgacattttaaccaatatatctaattatctagtctagttttaacaaaaacaacaaatagtttatttttaatatttaatattattttatttatttattgtttaacatatttttgccttgagtccataattaagcacaacccaaaaactatttcaatactaatataattatgggattattttacaaatacacaaaaataacaaaataattacaaaaatacagttttacagaatattaaatatttttacgatttttttgattttatttacaaaaaatacgattttcttatgttgtattcttgttaatttgttgttgattttttgttatctgtgtgttatttt

SEQ ID NO: 313496 - DNA, 1219 bp, Cannabis indica
agaagggtctattcttaccatgtctccatgtgacgatgcgaagaggtccatgttttccctagaaattttacctgtacttatttattttgtggcgctaaatccttcctaatcaatagtcttatagctggaaaagtgtgattaacctccacttcttccagttcttctacaagtccaaagttgttttcatgatccccaaagcgaggatctatgtatgcgcctcactttaggatggccttcattgtcctttgctaggctcagagctctttgcggacatcttctctttcttggctttgcacaaggccaagttgtaatagtgacaggtagactgttggtctcccctcaaacatcctagctaaggccttgttgggaactttaggcaaaggtggtcaataaatgttactacctttaggttgtataaagctagacgacctatcatggcattgaaggttgaaagcactttgctttgtatgaattgtgccatcagcgttctagttgttgggttctctccaactggtaggggcaatcggatgtaccccatgggtccaatgccttggccaaagaagccatacattacttgtgtgtaaggtgccaagtcagttagttggagccccatcttttcatatgttgatttgaaaagaatattggaggaggctccattgtccaccaagcaccttacaacaatcatgttctaatctgtgcagtaatgactagggggtcattgtccaagcagttgacttgggcagcatctctttttgtaatagagatggtgagctctccaagcttgggttgcttggaacacccctttttaatggccagggcatcacttttaggctcgtgatggagtgtctgcgcatagcgctcccttaacttcctgatgtcgcctacaatgtgaggtccaccattgatgaaccctaggtgcccggtaacttgaggtggcatagagtctcagttttgggcagcttgttcctaagattggtccatctgcacataacgacacaagtgggggttgctcttccttataaggggttcaatatcccttctcatgttttgacactccttggtgtgatggcctaagttattgtgatatcaacgaaactttaacaagtccctcttgctcatctcctttcttataggaggcggcttcttgtatgggacagtgccatgagtggccatgtaaatggtctcaggtttcttagttaggagggtgaagcaagtgtac

SEQ ID NO: 313497 - DNA, 704 bp, Cannabis indica
tttagtacataaacaattattgaaacagtaaattgaataaaattgacaaaagtccttaaatttaacaatctcaatagttcgaggggaatttttaacggccaaaaaagttcagggggcacaatttactacatgtcaaaattcagagggaaaaattactaattagcctatatcctataaattatatatcaatatatgtgtacaaacaaactccactagtttctgatgtctttgtattttgttttgtcaaaatattctagctgaaatgtcaaatttcgtatattgaaatgaaatattattagttaataattaattaatcaatcaattaattgattaaagattatgtctacttcttcctataacttgactatgctagtttcgtgtgtaggaaacttttctagtgtgtgaagaaaaatcacattcaactttatattactcatgtatttaattattgaacctatttaatgaatttgctttttcccatttgacaaaagtgaatattattgtattttattgctcatgggatttaaaatgtttgatcattttccaacattaatcttaaaaaatgacatgttgatttttcaaaaatattattcttgcatgtgcctctaaatataaagggtaaataccattttgaaccctgtgttttgcaaaagttacaaattggaccctgtgttttttatttaataaaatggaccctatatttt

SEQ ID NO: 313498 - DNA, 2551 bp, Cannabis indica
tagaaacaagatgcaatatagatttgtcccatgtgctttcttagggtataatatgtctcataagggttacacgcacctctataaaggcaaaggactctacatctcaagagatgttctctttaataaaattcacttttccttaagaacaccctctcttgcttcttgttccaatgcatcacctccccctgccccaccaactcctcctagttcagctgactcatcctagtctcttggttcctctactgcaagctactctcagtcaatttctcagtctgtctcttccattccaaagcattctccttccataccttttgttccccatcctacaaacactttacctactacacagacaataccttctgttgctaccaatgtttcaaatttagtttacccatttccactaacaatttgcctgcaactgcatgtattcatcacatgaccaccagattcgaagctggaatcaaggaacgaaaggctttattggttgtctggaaccgaagacagtaaactctgcattacaagtttcacattggaatgcagctatgcaatatgaggttcatgctcttcctagaaacaaaacttggatactggtcaaactacctcataacagtgtccccattggatgcaaatgggtgtttcgaacgataaaaaatggtgaatgaattgtagttttattcaatagaattatatgtatttatatacaaaattagagagtaaataggaaactaactaaatacaattaatttagctaatatattctaacccgcaccccattcaaagcctttgtaaaaatatctcctaattgctctccagtcttaacataccctgtggagatcagactttgttgaattttctcacaaataaaataacaatcaatctcaatgtgcttagttcgctcgtggaacacaggatttgaggcaatatgaagagcaacttcattatcacactacaattttactgtaactgaagttttaaacccgaattaagtcaaaagctgacaaatccatactatttcacacacactgtgccatagctcgatattttgattatgcacttgatttggacacaacattttgcttcttactcttccaagagacgaaattacctccgacaaagacataataacctaaagaggatcttttatccaccttggaaccaacccaatctacatctgagaaacactcaatctggttgtgtccatgatccttgtaaacaattcctcgtccgggtgctctttttatgtaacacaaaatttgctttgaggctgccaactgatgaattgttggagatgacataaattgaccgacaacactatcttagaaagcaatatatggacgagtcacaggaagataattcagctttctaactaatctacgatacttctcagtgtcttcaaatggttctccatcactcgttagatgcatagcagggttcattggagtactacaagattttgcttccaatttttctcttagctaacaaatcaagtacatactttctttgagatagaaaaataccttgtctactctaagtgacttcaactcccacgaaatacttgagcaccgccaaatcctttgtatgaaattggatataaaggaatgatttaagggatgagatacctctagtatcatctctagcaataacaatatcatccatgtacacgaccaacaaaataatactgacagttgatcttttatggaacacagattgatttgacttactttttcaacaaaccaagtttctcaacaacttggataaatttaccaaaccaagtacgaagattttgtttcaagccatataaagacttgcaaaggcgacaaactcgccctaactcctcttgagcttcacctaggaggttgctccatgaagaaaaacaaatttaatattaagtcaatgtaaaggccaatgagtagttggcatagaaatgaatagtggaatagatgtcagtttagcaacaggagaaaatgtatcataatagtccactccataggtttgagcataactcttggcaacaagactagcttttaattaagtaattgttccatctggattgacttttaactttaaacacccatttacaccctatgacccattttcctaaaggtaaattaaccaagtcccaagtactattcgcaactaaagcattcatctcttctatcattgcaacaagccaaccaggaggagacatgaattcacacacaattttgggaatagtgatagaagcaagagaagtaataaaagagcaagaagaagatgacaaatgattataacaaacaaaagaagatcatcgttggggtcccaatccggtttacctttacgtagttcaataggaagatcattgctggggttccaattcgatgacgaagaagcaggtacaagacatgaaacatgatgaggtagaggaggcggaggtgtaggcatgtcagaagctgtgaccaagttaggtggaggaacaagagactcgtctgaacatgtatcgggcgcaaaagaagtgatagaatataccaacaaattatcatcctcccccttatgagtaggagtaggcgaagat

SEQ ID NO: 313499 - DNA, 962 bp, Cannabis indica
ccttgtatactctcaatcaaaaagcagagcacgagcaacatctctaaatggttttacaatggctcaggtccgtgaagtcgatacacatcctccaagttccattaggctttgggaacaataccagattggcaagccaaaccagatataaggcttcccggaagaactctatggaagttaattttttacttctgtcttcactacttctgctcaaacaagatctaatggtcttctcttctgacaaactagatctgttttttcatcgatgttcaaagtgtggcagatcacgtgaggactgattctggtcatatcaaaatggctccatgctagtacatcacaattattctttactatggacacaattttctctttaatggctggaggtagatttcttcctaccttgatgaccttattatgatcttcttcattgatgcacactgcttccacctcctccattggtttaattactctttctacccctacccgagggtctaactcatcttcttcctgaattaccccagtgttggctagatgggtgctctgggatcttcttgcttctcttctcagaccatgaagactgtcttagcagagatattataacatttcctcgcacttttttgatctccctttatattctcatgcttgagaacttcaactagggcaggttgtccaagtataacattataatcagtggggcaatccactaccacaaatgtgtagtatttgaaggcgaatgtcgtgttgcttccggatgctcctccacttgatgtgactagaagctatatctttcccattggtaatagagattctccattaaagccttggagttgaattggatacgacattaaattattttccactaacccaatcacatggaaagcatttttaaagagaatgctaaccgaacttccattatccactagaatttgggacacctttttattttcaatttgagcttcaatcac

SEQ ID NO: 313500 - DNA, 735 bp, Cannabis indica
ataaataaaaataattttaagtaatattgaaaagaccccatattagaatatcatcaacatatagtaataggtaaatctaatcattgtgatagatgcatagatcatatatacttttgacatattcaattttcttcatatatttatcaaatcttaaattccactgtctaggtgcttgctttaaaccatagagagatttctttaagtagacaaacgtaattaggatctttactttcatacccttctggaagctgcatgtagattttctcatcaaggttttcatgtaagaaggtagtccttacatccatttattcaatgtgaagttctttcttagttgcttttgccatcatgaccctgattgaagtttgtttgacaacaggagaaaaaaatctcattaaaatccacttatgcacaaaatatgttcccacatgtcttatgcacttaaataaaaaaatttcgtcaagtttcgagagttatggagagagacacaagcaaaataatgccagttatacgaatatagctaaaaaactcgtaagtaatagtccattaaatttagggctatttacaaaaatatgggaaaaaaaatcaaagttttgataaatgtggcatgcaaacttaattgcattaaatatggcattttttcaaaaacaaacttaaaaatatgggaaaatcattaaagataaaaaagaatgccataaaaaactataaaattatggttcatattttatcatataaatt

SEQ ID NO: 313501 - DNA, 2467 bp, Cannabis indica
gaagtcttagagctacaactagatctatcctacaaggaacaaccaaattagattcttgaccggaaggataaagttctgaagagcaagaccatagcattagtcaatgtattctaaagaaacattgaggtggagaaagccacatgggtgttagagttcaatatgaggacatattattcagagttattcaggttagatttcgaagataaatttgaagaataattgtaatgactgcatgcttagacatagaaattaataattaatcagtatattatagttaattatgatataatatgtgcaatttagaaaaagtctatatcatcggccaatgtgagactctaatacactttaatattatttggttttttatgtaatataatttgttagatcgctctctaaattaatgaagttaaactccagctatatagcaagtatattgtaatctggtaagtgaaaaacttataaaacattttgaaaagtgaaaattattgtaaaagttaaatgaccatatgatgagatcaatacgtcatatgtacaaaaggaggataaaatagctgcaaaattcaaataaagctaatcgagtggcagagatcaatagaacgcatcccttacctataatgcaaggcacccaagtgataatccaatatgctgtaaagggttacaaaagacaaatgctaaagggtactattggtgtctagcaccctcctacgggtcaatattactattagtgtaattaagtattgggtcctatatagtttaatataatttttataatgtatcgctaaccaattgtaggtgacacatctagaaagtactatggtacccaataataatgctctttacaaaaagattgaaattaatgaatatatatttaatatttaaaatagaattttatgaattgaagtgtattgaatggagcgtgggagacagcaaaggagattccaataccaatttacctttttctttgggcaaagtccataccaatttacttttgttttcaatcatcacttctttctttatatataatctacttatatataaatataatgtaaatctacttgtttaaaaaaaactagttcttataataattttcacatgatattgacacttcaattcgataatcatattccatatactgtactggttatggtaatttagtattgcatttctcttatttttttttttttgaaataaatagtatttagtttttgatgttaagaatattaaattttaaaataaaataaataaatgtaatgcatttagccctccacgtatctatatttatgagttaacaaaagtagtagtaacgatgtaagaggattgtaacattaagtatttttgcctccaaaataaacattaaatatttaagtgtataaaatctgaaatattatgtatttataccgcaatttactacatatatatatatagaccaattataataggtgtgtcattttttatcctacagataagtattttatttttgaaatttagagaaatcaatttataatgtaatgaagtcatacattataattatagtagatatattataattatagtagatattttataattttttgaaaatgcatagtaatttaccataccactaaaaacaacatttaaaatagttgattggacatataataataataataataaaaatattgtgcaactaaatatttgaaataagattttagcatctgtaaactatttgaaaatgaatggattgactgctataaatataaaagaaacaaacatatatcatataaatattaaaaattaataattaagtcctatttagatattgcataattttcttatataatatatataaatagtattattagacttaataagtgtgtgggaccagtagaagaaggttggttggttggttggtgcttttatgcagggtattggtgatgggcatgtgatgtgggtctcacaccgatacattaaaacctgtccttttccaagctccactactctatcagcccttgtataaaattgctacaaaagctagagggtcacaaatgtttgcttcttctcaaataatataaatatacataataaccaatataatctcatccaattggatcgatccgatctaatccaatctaatattaaatgtcaatctcaaaattcaattaaaaaccgatacaattcaattacatttatatattaaaaaattatttatataataaaaatattgaaaaatattatatatattaattatatttttattagattttttttgtatattaaatttgtaacacttcattgttttgtgtatttattttcatgatgttttgttttattttattacttagaaatattattgtttaaattatttaaaacttttggtaacattacacttgtaagagtagtatgtttatgaagtattaaacttaaataaaaggtggtacttagtttttacgtattttttttttcatatttataagttaatattaaaatt

SEQ ID NO: 313502 - DNA, 708 bp, Cannabis indica
aaaaaaaacaaaaaaaaaatcttgaggcgcatatataaattagctttttttttttttttaagtaaatatatttcattggtataaacttaacattggaatttcatttattacaacaaaacaaatacaagatgcttcaatggagatggaggtggcggcgttaatggcaatagtcctctaacttttattagtggaatgataatttcccatctaattaatgaaaaaaaggcccctaccaaattcatttacattagttatttgacacctcaatacgctcaatcaatgaaccataatttacataaagcattgctattaggcactagtggtgtctaacactctctcgacatgttgcgttgttattgcctagcgatacttccgaaaagttattatattaaactatatgagacccgataattaattggaccgatagtgatattgacacataggaggatactatgcaccactagtgtcctttggcatttttcatttacatatttgaacaaagtcttggacctttgtccaaaaatatatttttctttaccacaagtacttaagaaaagaaaaaaatagaaatcaattttctaaatttatcaaagctaaagagagtttctaacaatatgttctctttatagagactagtgtgtcacaatatgaaccacataagtctatttttttttgacgcggtgattaaaatcacacatgataaacaaa

SEQ ID NO: 313503 - DNA, 3261 bp, Cannabis indica
agatgcatgtccgctaaatcaatctttaaaaaaaatatatatgtaatagtaaggtacttttaacttaattttgatactcgggatcccgatccatatggttattaatatataaattattaaaataaattttcgagtttattattataaaatacgggcgttacaaggtgctatatgtatttccaaacttttgtatgtttgtgtatattgatatgtattcatatattggagaaatctagaaagatgtgaattttagaagggaattttgtattccttgcataaaactatcctttaatttgtctaagacacaatgctctttagagatttagctagattttagagattatatatataatgagtgtttctttcaaaaaattatggatggataaacacaaacttagttgtttatgtgtatatgcatacacatatttcattgaagatttgacatttgagaagttcttgttcattatttgaattgttgatgtttttcccaagttaaattttgagtttgttctttaagcttggataaagtttaactttacaatctaatttgattttgtattgacctcatgggcctgtttgtgggcctagtatcaatatataaatgattttgataaattggtagctttgttttctagtaagttgagtgctagtagaaattaattgtaagtaatatgttattgatgctatctttgtaaaattgaatgctagctataccttacttgtaaagttgactgtagatgctagccatacattggggtgggaattgaccgtagatgttttttgcttataggagaattgaccgtagatattttttccttgtgggagtgacaattgaccgtagatattttttgcttgtggaagtgagaattgaccgtagatatttttttcttgtgggagtgagaattgaccgtagatgttttttgcttgtggaagtgagaattgatcatagatatttttaactcacttgtaaattgattgttggagtccaattatgtttttaaattgggttatatccatgcatgatagttatctatggaggttgattggtctttatcttttgttaatttatttaggttggctggaacaaaatatttccaagtccaagtattgagttgtcacttgtagtcctatagagctttgggtcgaaggttttagactcttctatgtaatggtgttctcatgcgatggaaaacatggatagttcagtagagaatagtaaaaggtctttgccagattatttgattgaggatcttgagtgtaatgagatccctgtgggagtcccatttgagcgagtaactcttgtgcaaaatcctgagtgtgacgaaacagacgtgggtgaaacggtcatagtaaacggagaggacccagagacaataggttacctgattggtccatcagatgaaggtcaggacggatgtcaagatgagtgctctggtgaacctaccaagttcattaatgtgaaccttgaatgtattttgatgagtgttgatttgaaatatggagaattgcttatgacataccttcatgtgtggaaatgagactgcctaagtcttatgagagagccgactgggatatgggagattgggtgtgtctttacaaagcagcttttgattgtggattttgcttgcttttcactcctttggtgactgagatactcaacctttatggaatatcttctgggcaacttatgcccaacggttggagatttctcctgagccttgagcatttttactaaaaaggttggtattacagtagaccccataatttttaagagatgttactatgctaaagagcatggaaaagagaagggtagagtggtatttgtttgtcgcactaggaaaaatcatttgtaacttgtttggctaaggctgacgattcagattggaagaaagcatattgcttctttagaggtgatggtttatttgagtcaggggttgagaagagtttcccattctctgggcaaatattgagtgagtgttgaattattttcttttattgtgttggctatgtatgttgtaatgtctttttggtccttggcatagatactgactttgggattcaacctaatacgaacgagtttgttgattgaattattgaggatattgaatctataaaggagtagcaccataatttcaagaaatttctcccaaaaggttgcctgcaaaaatcacaagatgttatagaataaggtatctctgaacttcaatcccttgacaacattcacatccttcttcaaactcgagaacctgagaaggttggaattaagttcactattttgactcacatgaccaaagagcaacgcatttgcatacaagatgtcccaaaagaggacgatcagaattcccaaagctagtgatgccatggctagagccaaattgataacagctaagaaattgaagactggagggtccaaacaagtttctgagagtaacttcactaatgttccattaactcatcttctcttagtatgtgcactacaattaagaggaatgtcgacttatttgacgcagaggttgttgatgaaatgattcttcaaatccctcacactgtatcggtctattctaatccttcatcaattgaagggcatgtagatggaattttccatcccgctgatcaagcatgactgattgagcttggttcgactggggttgccaacaataaagtggcacgcttacaagataaggccattataaactatgattgattattatatttttagtcattaaaacttggttataacatttgtagattcttcaagccatgctattcatcagagaaaactatcctacgttggagaagaagaataaaaaattgattgctgataatgcttccctaaaactggagaatggaaaacatgtagaaatagagcgtgaacttaaagaaaccattgaatctttgaagggtgagcttgagaaggtgaagcaagagttgattaatgagaagaaaagggcaaaggaccttgcctacgaggcagaacaagttgcattgactgctgttatcaagactcatggagaactaatgatcgagtcgcaggctagaaagaatgaaaagtgggatgtggttggtgaaattgaaacttaccgtgcccacatgggtttggattttgatggtagaaggattgaacaacttgaatatgcttttattgaggaagcaactgctgagatacttgaccttggtactacgaaggatcgtgaagaaccccatgaaaatgcttagtttcgtttgatattatgcttagtggttcatgtgtcttaacctttt

SEQ ID NO: 313504 - DNA, 2794 bp, Cannabis indica
aagcggacaaaaatggttattatttttgcacgtgatcacatttttaaccccacctacttcgaataaataaataaaaaagattaatataaaaaacttgaaaaggcaagtactacattttaaaaaaaaaaataatggatgtgatatttaaaatgtacccgattcagaatacagtttgattttttattttttaaaaaatggtgcaaattaataacgtacgtaatcggtccagcaaaacttaacaataattattgtaacgaatattcttatattatatcattgctttcaaatgaaaaaaaaagcattaattcatagttaagaagaaaaaaaaaaaaaaaaaaacctgactagtgtaggtaatcaggcttccaagttctctttactctctttagaagaatttactatgtttcacaaaataagcagtgaactcgggacagagatcctatatttatataagtgggacctttcatcaaagtctccacaattaattgtcagaatattttgacaatcaattaggaaattaaattaattggtgaataaaaactgaccatacatagaaatttattaaataattgatttggaatcaattttaatgaatatgaaatattcatacatctaaaaattaattaaatgattttatacttaatataaaaaatatttgaattttctcccacttggtcagcatttagatttaccatataaatttaatgtttctcattacacaatacatatgaatcatagtgttaggttctcattatatatcgagtattatcttccatgtattacaatatattcattatataataatatactttatgtggcaatgtacttaaacaaatctatttatgtttattttggtcctctaaagataattttctcagatgaaattaaggtccacatgaatatgaaaaaatattaaaattagagtttcattgaatgattttagttgtgcaaccaaaaactacataaggggtaactgaatcccatatttactttatgatccttgaatttgtgttgcgacatgactttagtgaagaatattgtgatactcaattcagtgtcgcgtgtttaatgaccacttatcacgcattattatgactaaatacctaatatcgatatgcatgcttcgaccagtactcttatagttcttagccataaataatgtagctgaatttgtcataaaattttcttaatggcctgtgttaacgcagatttttgtgaactgaaatattagcctttttgtaataaatatagaatttattgtacagtaattaattactaaataaataataaataacaagaagattttaacgtggttttgaatttaaatctttatagtccacgattccatcttattaaggataaatatatttaaatacagaatacaatcatgtaatttagcaatagtatctttttttctctctaaaatttctcgttcttttaccttgggttctgtccttatttatagatacacagggtgacagttattttcttggaatctattcatttaaaattgcttatgaaacgtatacatttctcatatttcaactttaagcacatgggaaaatattaaatgattgttcaactgctttttgtctttatctagagacggttatgttgactatgttggatagttctcgttgattgcagattatctttcttaagcatccttgtagaaaaaatattaagtgctaagatacaatgcgtcctacaattctcctttgtcgttcgaaatgtatttgcgagacggttacttccacatgtcaaaagcgaggtgagtagatattgaagttgattccactccttaaacatactcatgagtatgtggataaataagctacaagctcttactcacacgtaagtgaatcaatgagttgcaagctctttgtttactcgttctaaataactttcattgtgtattctgtttatcctgagatggacttgttgtctcaccagtctcagttaatagttataattcacatctcgttattacctatatggcagcgagtttgaatatttctattaattgtaattctcgaggcgagttattcaatgtgcatttaataatgcacggcttgggctggttcttattgctagccaaaatataggtataacaattgattcgtgtacatatgttatacattcaaatttcttaaatgtattaggttgggggttctgttgtaccacatttcataaggtatttttaagtctataactctattcgggctcctgtttgcaaggtaggttgtggttgctaaggcttcccccaaaatggtttttctaatccaaaactaaacagtaaacatctaactgtattcaacaaggttcgattcattctttcagcaacaccattttgctttgaggttttcactacggttctatgcctagtgatcccaaactcttgacacatcttgtcaaatttggagttaataaactccaatccattattagtcctaaggttcttcattttaagatttgattggttttctacttgagttttccaatttctaaactattccagacactcatccttagtggttaacaagtaggtccaaatacaccaactgtaatcatcaattatggaaagaaaatattgcttaccggagtgagtaggcaccttgtatggtccccaaaggtcagcgtagacatattcaagtatctttttagttgtgtgcgttgctggagtgaacttcaacttatgttgtttcactaaaacacaagcttcacaaaatggtaaggcacaagagtctaaattttcaatgataccttgtttgtgcaattctttgaggccttgttc

SEQ ID NO: 313505 - DNA, 3120 bp, Cannabis indica
ctcaatcacaatatggaaatgtgtttggaattacaagcaaatttactctagaagtatgatgatacaatagaaaatctagagtgattagcaagcacactttaaagaattaaacacaaattttggctcaaagtgtgtgaaaagtgtttgttggatataagacttgggagctcattaaactcatttgaatatgttgggtgtatgaaattaatgctaagtcaacttgaatttttgagtaaaaatcaagtttatatagtgggggtgaaatgtaaccgtttatagccattaacacgcatttcaaggagaattctactgtgaactggaattcaagatgggaaatagaatttttgattgattacgactagaattctggattccaatcgaaattccagatggcttacagtggcaaattttgcattttttaaacttaaacgtgcataactttttactcgattacctgattttagacattctaattttaaaaagtaaattaattttttttatatcatttggtgagaaaacttttccacaagttagtgggataaaatttgtacttaaaacttttttaagtatggacttaaaaatcactatacaagactaagcaatgtaaataaaccttcatggagtcttgtcttgagttgcttgagtcttggaatccactttgagtcacttttgagaattttggtaaaattatcgtttttgcccttgaaattaattttgccttagaaaaatttattttaccttttaattatactacaaaatcaacaaatcattagtaacaaataataattaaatatttgtcaatcatcaaaacaaggacaccgaaaagtttgaactaacaatctccccctttttgatgttattaaatatttgattattttgaaaagagaaaggaaaaattgacgaaatatatattagattagtttccccttaatgtgtgaaagggtaaaaaaaattaccttttaatgtgataagggatcctccttccctgtgtacatcttccaggtcgacattttgaacttgaggggtagctccaggacgttgatctcgggagtgaagggtgatccacgtgcttagtccagctcgagatcaatgactttttggccggccaggccttggaacatattttttaattcttgtaattgctcttgcacagatgggtgaactagttcagcctcttggccgacctgtgtcacgtcaggatctcttagagctaggtcctggatgctaatacctggatgagcattgaacatattgttcgtccagacctctctttctatttagatcattcctgagatcatgggttgtacccaatctgttaaatactgaaacaccaggttgcctcagtgattgactggtttggctagtttgttggccagaattatcagtttggatggagttattaggtataactccacctaaagaattgttggatagggtttggctgcctaccacttggcccacaggtggaacttgtgaccggggattggatggctaaccattatgagtttgggcgatatgcccagcaggaatttcttctgtgctgcccagtgggatactggacgttgtagctggttgctgattagcaatcttctaggcttttcatatcagtacggtggcctgtcttgttcggtcatcaatggctgcctcctgagccttcgatgtttccatctccctatccctccactcaatgaactgacgactctgctcttcgaacgcaaggttcattgcagcacggagctcttccagatcatgatgcaaggtgttagtgtgaccttgcatgagtccaagagcattgcggaggttctaaatctcagtatcatctcatattatcgtttgagcattggttttggatgggattctattgttgtgagtgctttgatcggctaccgaaatggtattccgcgtctcttgcacaggggatgtcacaccttggcccacagtaggtggctgcgtgtttggctgctcaggattggttcttggtgggacccttatatttccaggagtttgcaaggtaggtgctgtcagcagtgggtcactctggtcaaccatgcctctgcaagtttgtaccaccattctgagtgtctattaaagcttaaggcaaagagcaaacttgagttcaactctcaatgaaagcaccaaaatgttaaccttacttttagccaatgacagtgagtcaattaataagcgataagaaatgtagttaagacagagcaaaaataggtaagcaataaagaacacaagattttaaagaggttcgacccctagcctactccccttagattgtattgaattgagaacaaagaatacaatgtttcttctctcaaagctctcataatgaaatctctgagtattttctctaagatctctctaaagcaattctttcgatcccttttacaatgaggataagtcaccatttatagggctaaatgtatgagggaaggtttcccttttacttacaatatctataattggtaagaacatacattacatatttagaatacataaaatgggggattgggacagcttgccatatccccttgatacgatcccctaattgtagggatttcatgtgtgcttgagcttcacaatctcaaaactaaagtagttaagtcttgatgctcagctcggagaaatgacttcatttgttgttcggatcatctgcctttgctttgcttggtcaggtaaactttgtccgtaaagatgtatcactcgaaaaatgttcgaaacattttcaatgtcaagcataaggaataacagacacgtgccactagcacatattgccacatcatggtgcgaaaaatgggataacagtttcatacagagtttccaaagaaaccacgcatgaaactaaggttatacatgcctatagagccggattcttaccgaagtcaagaaaagacataaaactggccacctgcttgaaatcaaggcccatgatggccaatgctcacaagccttgcggccaaggtcccatgactcagccaataactggccaaggtcaccaaatccaggcatgaacaggcaagctttaaagggaaaaaccataaagctggccaactctcatgatcaagccttagggtcggctaggtctcaagcaagacctcctaggccgaccaaggt

SEQ ID NO: 313506 - DNA, 677 bp, Cannabis indica
taagtaagaatttttttttaaaataaaaaatatgaaaaattatttaatttttaatttttttaagaggagccatgctttagaagtagataagatctggagaaaaaaatactaattaataatgccacatcaacttttaaatgataaaaaagaatgatagttaacaaaaatattatatctctaaatagaagagtttacgaaattttttcaacatgatatacattttaaatgatacaattatatagtgttgtaagttcaaaagacaaaatattaattatttcttaaaatagttatacctaaataattttaggagtcacagcacgtactatctcactagtataatatatatggtgatgaaattattaggacacaaactcgttccaaattattacaattcaggatcatgaaaaaataataaaaaaaaaatgctggttaaaattagtttgaatccgaataacaaaaaaaattatttggattgggttaggatcaagggtcaatccttgtaacacgatatgtatttgattaattaattttatttatttataactatatattttcatttaatgtaattatttaaatgcaagaaacaaattaattagaactaaatatatatatctttatatattaaaagtgtctatctaacggcattttttggtttaacattcttggtttaacagaat

SEQ ID NO: 313507 - DNA, 871 bp, Cannabis indica
gtgaaatttttgcttaacatatagtcttaatgttttttatacgatggcgtaaataatagttatttaatacattctgcaatattttgaaaatttaaaacaatttataatataaaagataagattaaaaaaaaatcatagaacataatagagtcactcgtaaggattgcacagatacacccatttttagaagtgcactgtaaaataattcataaaagcatctccaaatcatgttctctaaatacactttttagctaaaaataagagtaaggatttaattaaatgagctccacccatgtaaaatatggtttccgataatagagaatggatagggagttatctacttgtttgttaaatttttttaatagtattttaatcaaaagtattattacttttttgttaaattaaattatattggcggctaaactacctgaactttacggtttgtaacagttaaccacaaaaaccaaaattttggcggcataactacctaaactctggttccgttttgctctgtacacctccgtcaaaaaatcacaatatactaactaaaatagaaagcatgattaaagtaaaaataaaaaaatgactatttattttattttatttttatctattttaatttagttaaaaagtcaaaagtgtggttgaagatgctataaacttatacattgtattaaattaacaaatttttaaattgataactgtaagggtaaatactattttagaccttgtgttttgcaaaaaatactaattggattttttattttgttaaataacaaaataaaccttgtattttctaaattgtacaaataagaccctgaactaatttttatcaaaataaaacttaataataatatgatctatagatgtt

SEQ ID NO: 313508 - DNA, 1656 bp, Cannabis indica
aattattgtttatagatatttaattgggaaaattttatgcttttctattttttaccgtaataattatgcatattgtgcatattataattgttttaatttaagtttaaaaaaattaaaataattttagaataacaaaaataaattttaaacattcaatttttacaagtaatttttttatatccgtattgaagtaattaattattttaaactataatttttatattttttaacattataaattatgtaaaaaatgagaataaaatatttattaattcaaaattaacatctaattgatccctatttaattgtgtctaataagtttataaaaaattatctaaaataatatatagtcaagaaaaagaaaagtcaaaaataacatgttgggtattaatgacttaatttttacattgacatacatgcaatcaaagtcattattctaccttatattaattaagtcaatttgtgaaattgttgaattttttttaaaaaaatctaaaatcacaataaaatatattaaatccatttgttatgattaataaagaaaaaaaaataaagctttctttcctccataatttttactcgtaataaattaataatgcttgtttattttcataaaaatattcatcatgatgttcaattgtttaatataatacaattatataattattaattgattaaaatcaaatattattattcaactaaaaaagattctaataaatagaattgtccctcctcgttgtactttattttcttttttattttatatatttattaatttgggtcttaggaataaaaaagccaattaataaacatacacaactactcataatagaccatacatgaattatattaaataatttttttgttaagatactaaaatgaaataatcactaatatattaatgccactcgttttgtagttgttcaattattattttttttatttttttccaactttagtgagtatgatattgattaaataaataaaatattttaattattttttttatttattttgtgtgtatttaatagctgggacagaaaatgtgcaatatttatttaattaaaatctaaatgcaacttacaaaattactataaatattttatgattaaatataatgtaaaaaagatgacagaagtttaatactccaatatgaaacttaactattatgaactttcatcattatatactcctttttatacttataattattatttataataactactggctactcatcaaaaagaaaataaaataaaattaaagagattttagttttatttatttaagtgtttatatattacaatgtataatttgagacataaattcaagacttttagcacacacgtttatgaccacttgaactagcctcgattaaaaagagattttagttaaagtgacacattttttttactggcacatggattcgtaaacatttttaaggattttaattttttaattataatttttacgaaatcctgtaaaaataacatagtataaatatttgagtaatttacggcatgtatacttaagtttaatttccgattacagttaaagttatatctctaaaactttgtaagtacttgattgttaaattttaagtcattatctacgtgttattttcttattgatatatttaaactatttaaaaaaaaa

SEQ ID NO: 313509 - DNA, 1805 bp, Cannabis indica
gatgtgttttatgcgtgcatgaagaatagggttggcaacaaggagagctgtactttgattgtcgcacaagatggagggaattcttggttgataaatatgcagctcattcaggaggtactgtatccaagacacttatgagacagtggtggctaagcttctgaactttgcttcagttgaagatcttgatatggcaacttgcttttgagacttccatgcaactagattaccacaaaggtagatacaatatctagtagacattcgatcatccaaatcaaaggcccaatcagcatcatagaatgtttcaaggttgaactcttaaactggtttcagaagcaggccatgatccaaggtgcttgcaatatatcttagaatccttttcacgactatccaatgttgttacagtggcttgtgcatgtattaacaaactttgtttacatagaaggcaaattcaggccgagttattgtagcatattggagtaacccaactatagatctatagatagtaggatccttcataggctcactgccatagttggacagtttaagtccactgttcattggagtactttgagtgttcacattttgcatttcagttttacacagaaggccttggagatacttggtttgagtgagtaacaagcctttagatgtgtgaatagtctgaatcccaagaaaataatcaagttcacaaagatccttgagtgcaaaagtgttactgagatctgctataagggtattcaccatgctatcgttgttgcccataaccaaaatgtcatctacataaacaagaacatagatgctgactgctgtagtgaacttgatgaagagtgaagtgtctgcaggtgatgagtgaaaaccaaggctgattaacactgttgagagcttgttcaaccgtgctcgaggggcttacttcaagccatatgtggctttgttgagcttgcatacatagtcagggtgtgtggcactgataaatcctagaggttgttgcatgtaaatttcttctttaagataaccatttaagaatgcattgttgacatccaattgtctaattgaccaatcttttgttatggcaatggtaagaacaactctaatggtgattggctttacaacatgactgaaggtttcagagtattaaaccaacttgttgatgaaatccattggcaacaagtcgggctttgaacctttcaacaaagccatctttgttatgttttactctgagaacccatttgtagccaattggttgtatatttggtggaagtctgaccaggatccaagtgttgttctttgtgagagcgtggaattcattgttcatggttgcattccattgaggagttttgagagcagattgaactgttcttggctcataggaggctaacatggcttttggttttatgatgcctgccttgagtcttgtagtcattggatgtgttgctacatatgtgctggtagtagttaggggtgttcatcaaaccacccaaattgctcaaatcgcccgcactgcaccacaccgtaaaaaaatgcagtttgaaattctttacggtgcgaccgtggtttgaatttttcctaaaccgcgcggtgcagtgtggtttgcggttttgaattgttaatatatgaatactaatttttatattcatttaggtctaaattgcggtttgcggttcaaattgcatcgcatcgcacattataaaaaaatactaatttgtatatttatttaggtccaatatatgaatgttcaactcaaagtccactaattattgtattgttgacacttaatttttttttttcatatttattttcaaacctta

SEQ ID NO: 313510 - DNA, 1750 bp, Cannabis indica
atatagtacaaaatggtccccattgtccaactgcagtacgcatgtgcacaatggttttcacgtggcccaacggttagctctgattttgcatgtaatttatcccattagtgggcttttagaagaaatcctaggcgggccatgggcatgtccataccttccacttagcctataaataccctcttatttctaaatagaggggggatcacatccaacatagctgaaactctaccaagtttactcttcgccttcttcaccagaaacttagagtacagagttagggtttcttacaaaaatattgtaaacacatcaaaaacgccctaagaggctaataaaatgacttgtggactaaggttaattaatacccaaaccacgtaaaaagtctttatctctttatttttgagttttattatttcattagttctcaaatatttagtttctaaaaatctcgataaatattgtggtactttcatttagagttaaagaaagacgtaaagcctatagtgttactacagccatggttttcacaagaaagatgcttcctaagaaaactcttcaaggtggccttgagacggtcatggaggagatagaccccctcttgctagagcatgcatagttaggcgatgcgagaggtggggatacgtctaacatgaacaattgagaggatgacccaaaaaactagcatcgttgattatgatagagaagttgagaacgataaagaggaggaagacgatggagagtacgtcaaagatgggtacaataaagatggctatcattatgagcaagaccttgaagtagtttgagtgtctaatgagttgctcgagacaagacaaaagtttgcccatcaagagaggttttcttgaaatatgaagaaaatgatggctcaacttcgagctaagtttggagatctagatgagggggattctgacgatgatccctcagtggaatgtgtcagaggaaacactagggaaaacccaacgaatgttagaacctctgctcctgtgcaggacaaggggaaggcgaaggttggtgatcctaagaaccttaatgctcccataccttcttggaaaaaatgaatccaacgcacaggccttctcagatgtatgaggaaacggatgccttttggctcggatgcccttcaacccagaaaggtcatgtagcgccaaaagggactagtacaaaagtaataaagcctaagggaaggaaaaaccaccctagtgattcggtaaaccatgacggtgggacaggaggatagtactctgacgatagttggtccatggtggatctcagaaggcatttagacataaagtacgagaaagcaaaaagtgagaaggcaagaccatgtggtaatgaccttagaaaccacttgaatgacaaagttcgtggaagagatctctcggacagtgacaccaaaaggttagaagaacaaattgttgcattgacaaaattggtccaaaaataaagtagggccctcactaactctgaggatgaggacccaaagctctgcctaaaaaggatcacggaagctccgctaccagagaaaattaagatgccctcaattgagttgtacgatgggcacactaatcctagaactcacttagccaagtataacaagatgatgcatgtggcaagagtcaatgaggatgccaagtgtttgtacttctccctgacccataccaaatatgctaaggactagtggaagagattggctcccgaatcaattctgtaacgccctaatgctaaggcacgctac

SEQ ID NO: 313511 - DNA, 1558 bp, Cannabis indica
taaatgtaaattttttgcttaacagtggcaaagccttggagaatatagacaacttcaatttttacacgcagattccattgaagcagcactaaatcacttgtacgttgaattctgtggtcaagagtcccaagtagtcgaatgtttcagggccgaattttttaaaacgaggtgttgttcagtaaaaaaaatatttagaattgcactttcaaagaatgaccaagcgattttatataatcggtggtgtagacgatctaaacctcaaacaaacattcttggtgtctattccagaaccactcagagaagaaacattcaaactcctttccgcaaacaacaagacgctgtaaaacgcaacttttggagaactatttcaaatggtgatgagagccttggaaaagatgtgctctcaaaacaagttcttacaagagtacatgagcaaacaaaataactcgacagagcatgcaaccaaaaggtcttacaatcaaatgttctaccaaaaacacatgctcatgctcaaagtggaagggcgaaaagaagaaaagcttcaagtatagatcctcaaagaataaaaatccttggaaattccttcgagaaagaaaaatccaggaaaatcatcaaattggtgtttcttgtctggaaaaaagggccactttgcaaaaacaatgtccgaaaggcaaaattgccaatatgataacacacatagaagacaccactggagtgtctctctctaataatgatgtcgagtccgtcttctcagtcgaagatgaaatctccccaaatactatgtgcgcattacaactgacaactgattttgacgaagacagatatggtggactcttcaacatgcctgcgttcactgctggttaactgatcctgattgcaaaaatgcatgtcatcccaacaaaatactcaagaccaatcaaagtagctgcattttttacacgggagcatcatacacaatcataaatccggacattctacccccgaactatggaagaaaaagaagcagtatttccatgtcgcaaataatcaagtcctccacacagaactagtcagctagccaataaagctgcaattcttccccgcatgttctgtgtccacagtcattggatcaaaacttccaggaaaggacctcataataggattcgacctttacacaaaaaagaaagggcttagaatactcccacaaggattggcctacaagaatttcttcaccaaatgggagcaaatcctgaattattttcacatggcaccagacgtattcttaccaatcaaagaaaagctgattcaaaagtcatgtgtaaagtctcactaaaaattctcagccaaatgcaatcacccattatggaaaaatgaagaattctacatctctctcccattcaaacaaaatgaagatggcgagcaaagaatgccaacaacttgaatcacaaggactgatcgaggacactaactcaccatgggcgtgccatgccttttatgtcaacaatagggcagagcaaactagaggaagacaaaggttggtaatcaattatttgttagaatatatattttaccaggatct

SEQ ID NO: 313512 - DNA, 1094 bp, Cannabis indica
ccccttaaaaagtactttttaataaagtaatttttaaatgattactagggtatttttgttttaacccatttttgaaaaattgcatgctttgggttttggcatttcagaacttcgaggcacatcgttagcattaattgctctaaccgttctcttttacaatgttcccatccgttagatcaaatttctcttgatcgaacggttaacagtaattgggtgtaaaagctgggaattacaatcgatttcaccatttttgtacattgaaccttcaaatcttctctgtaaattctggctgtttcctccttattatttgcataccctcattgtccttcacatatttcttgcgtatctcaatgatttcaaccattgtcccaaagatcttcaaagctcaatctcacgatttttagaatctcaaacatcaagcttttctctacccacgaattcaatccaagatagtaagtgatacattctcatcttcttaattgtttcttttttgaactcatattctctctttcttgattgatatctttttatctgtgttgtttggttagttttaggtaattttgttttggtagtttgaataattttagggtttcaaggaaaagtttaggtaattcagctcataaattcttaggttaaattgtatttagattttcaagaaattgggataacatttgttcacaaacatgacccactcttttctagaattacaacaccataattcttagaaactgattgccctaaaaaatttgcccactcactttcgttcaccaaaaacaaaactcaaagcggtagttgaaagaaagggagccctcctggtcaaaaaagggaaaaagttcccttcgaaaccaaaacttatgttcctaaaaccattgttgagatatacgatgccaagattagagatcatctaataaaaaccaatcaggactagattttaagtcgttgtaggcgatttttgcaagaataattgatggtaaacgttgtattctacgagatgcagcttggcttgaaccctaagctttatcttttattcctttagcgagaccctcgtttttacctcaagtcactgttgccttttcaccaagtgacttaaactt

SEQ ID NO: 313513 - DNA, 1199 bp, Cannabis indica
ttaattttattaaaatcttttttgttttattaagctggatttattttctaatgatgatgatgattttattgatgttggttcttctatggcttgtggtgttcaagttgttgagaagatgatattttatggtccattattattttaaatttgtttctattttggtttttttttaatttttctcttttattattttttttatatttttgacattagttattttattttagatagagtcttcctctatcgctgctgttgctggtcagtcttctagttcttctggttttcaaggttatgttcaaaatgatttctatgacattgctgtttttgaggagacaccaatcttaattcctggaaagagggacatgaataaagggactgttattaagtctcactttattgaactaggttctgttgatgctaaattagattcagtgtctaattctcttgatgactctgatttcaaaattgtgaaatatgttcatagattatgtccattggatgataagattggggaacctgttgacccaaatttggaggctaacattgatattttgtttagggtgttagctcaagatatatttctaagagggggtgacttagaaatttaaactaattttggtaaattaaaacttttagcacaaaactatgcaattaaactattaattaagtaaatgcaagtaatatggcaagcaataatgtatagcaaacattcaaacttgtaaagtaaagagtttaaaggtacaaaatagcaaactctcaatttatgtaaggtttggtaaaactaagccatctacgtccgtccttggtcttcaaagaaatggacctagctttgagttccattatcgagccaagttaacaggcttgactaacccttacaaccgggaaaatttcaccaaggtgtttccaaacctcttacaatagttttgaactgccaagggctattaacctctttcttgaattgttgtagtaaaaatctcactataactgggttttttacaataccagtgccaacctcacctcaattacaatatggaaatgtgtttgaaatgacaagaaaattcactctagaagaatgttgatacaatagaaacctagagtgattaacaagcacacttgcaatgaataaacacaaaatttggcacaaagtgtgtgaaaagtgtttgttggattttaaacttggaagctcattgatctcactt

SEQ ID NO: 313514 - DNA, 1474 bp, Cannabis indica
  modified_base (333)..(333): a, c, t, g, unknown or other
aaatactcaaatagttcatacatcacatcagctattctaaaactattttaaagagacttttccaatcctttataatacacaaaaagagtaaagacaaaaagagaaaagaaaaaaaaaaagcaaaccaataaaactgttcataatatgtgattaatttagggaatttttccttaatacacctcaattgaaaaataatcacacaaatcaccacactcatttaaattataccaatacgtctattaatacccatatacaaaaattaatatataaccacactcttttacttctcttttacttgtgtatcacattttattttatttttaccttcttttnttttgttgtctaaaccatctaatttatttttagttttttattcttttaaaaaaagaatttactaatacactattaattttttttgtcagccccacttttaactttttctctctttttttagtttttatttttattcttctttcttttatttatttgtgtcgcaatttaagtttttttaccatagttttaaaaaaaaattatagttgcatcataattatttaagattaagaacattactatcacgatttagtttttatgtggtccattttaatgtgttggaaacatgtagtttttaactattatcaaaattttaaaatgaagacaacgtttatattatattttgttaacaaaagaaatatattaaatttagtagatgttattaaaaaaattactaataagatactagttggttttgttttaataaactttattatgagataatataatgttgtggatcaaagtatatttacgttattttatattttagttatataatattgttgatcaagatacatgtacgtacctttttattttttatttttatagtaacttttacgttaccttcgaatatactaagctacaataaattataaaaaattacaaattagctcattagtaaaatatgtataaatttttgtaatatatataaatttttttatgataagtaagatattatatgctttctttataagttttttttagaaacttgttgaaataaatttataaaataagcttatataaaataaataccatatggtaacttttagatatgaaataaaaaatatttttagtaacctataaaaatagttgacatattgaattttattggttactttttttttagttaataaaatataaaatagacaataaagttacttttgattcctaatatttattcagtaatagtgaaaaactctcttttttaacatatcaaaatgatcatctcaaaaaatagatcatactagtactaacttgagctcaaacgactaacggtgtagctagaattattttctaattgtttctttgtaagttattttagaatacaatttagttacttttatttattgaataataaaatatttttttattaatccattaaatatggttggtatatttaattttttttgtaaagtttgttttt

SEQ ID NO: 313515 - DNA, 438 bp, Cannabis indica
gagtgtgaagaaatacatgaagttaacatgattaacacggaaattatttttgaattggacatggattaatctcatgaaacttatacaaaaatatttggaatgtggttagatgttgatgattctattcttgatgttaattctttgcttaagtctaccccattaatggataataaaaagtagaaagccaaaattgaaccattcattgcattagaacatattgagtaaactcctaagccaccaaatttagatcttaaacctttacctgaaacattgaaatatgcatttgtaagagagtttaacgcctatcctattattattgcatctgatttagatgaaaaataagaagcaaagttgttagatatccttagaaagcataaaaaagccataggttggaccatatgagacattaaggatgttagcccaactgtgtgcatgcat

SEQ ID NO: 313516 - DNA, 675 bp, Cannabis indica
tagcccaactgtgtgcatgcatagaattcatttagaagaaaatgcaaaaacctccacctagtgggctcgaaggatggttacctggtcatcatccacctcatggattcacgtctctactgagcgagagcattgcctacaacaatgcgtgtttcttgttggtcatgatgaagctggttggcatgaccctgaatttggcctacaacttatctcagcctagctaactcagaatcatccctagagtccaagcaaggtcagccaatagaaggttggccaactcttggcctagtttttcctacataaacttgcgggcattctcattagtattatgagcaggttgctccacattgatatgctcttatgtaagagattctatgggtggttccaaccttggagaaatggcaggatcaatagagatcacaagattagctagattgacaatattagccaaattagtaggaccttctgtggtgggaggaacacaaacattgggatctaccgccatgggatcctgaggaggattcgtaaaagtagttcttctagttagaaccatggtgcttaattagaatgagatggatgaaaaccaaatagggctctcaatgaaagcaccaaaatattgacttaaaatttagccaactgatagcggagccttattaattgctgactatcaccatatat

SEQ ID NO: 313517 - DNA, 1958 bp, Cannabis indica
aactaagcggtctttacaaatacttcctggatccgctgagcttcatcttctgtagccttggagtaaagataattatcatcagcgagtaacatatgagagactctaggagccccattggccactttacatccatgaagccatcctttgtgttcatattttcaaagcaaagtagagaaaccttctgcacaaagaatgaagaggtatggtgataaagggtcaccctgtattataccttttgttggaatcattggaccaacttccttattaccatgagtaacacagtatcttgcagacttgacatatttcataatgagctaaatccaattttcaacaaatcctaacttctttaacattgcctcaagaaaggcccactcaatgcaatcatacaccttgctcatatccagttttaaagccataaaactatccttaccctttcgatttcttctaaggtaatgcaaaacctcaaaagaaacaagaatgttgtccgagatcaatctaccaggaatgaatgcactttgattttcagatatgattgagtccatgaaaggcttcattttattcaccatgacttttgttataatcttgaacagaacattgcacaaggctattggacgaagatccgacatacgttccgggtttctcgtctttggtataagcaccgcattagcatccccacacccctcggcaagtaatccattctcaaaaaaagaacgtacatttttgacaacttcatctcccacaatcggccagcacttttgaaagaaagcatgagtcatcccatcaggtcccgggctcttatcaggatgcatttgaaaaatggcttttcgaacatcttcgtcctcgattggttgacaaagctctgaattcaccaaatcaatcaccgcactaggaacacaatcaataacttcatcacacacacaacttgaagcttggaataattcatggaagtaatttgatacaacactcggcaaacccgactcccatgagacccaattgccatgaacatctcacagttgagtaatctggttatttttttcctagtactagcagccttatggaaatagctactattatggtccccttctttcaaccaaaattgtttggacctttgcttcgagtaactctccctttgatcaaacgcatcataaagtttcttctttgtttcggcatatctttggactgaagtagtatcccttaaaccatgaagctttttcaaatcagccttataactcataatacggtggtttagagtgccaattaactccttcccatagctagataattttttagcacacatattaatcttgttaaagatgctgatattttgttcttgggaccaaaaatcacgaataatttcaaaacaaagaggctccttcaaccaagaattttcaaaacgaaatctacgactaggagcaaagttattcaccacaaccggttcaagaaacaatggagaatgatccgaagtagcgaaccccaaattagagagagtagccgaatgaaataattgattccaagttgtggaaacaagagctcgatcaagatatacctcaatccacacattcgtacctcttccttctttcccaagtgaattgatgaccttgcagctcaatatcttccaaaccataatgcagcaaggtttgttgaaacccagttaagagccactggggatgtcccctctcttatcctcttgtcgaacaatgttgttaatgtcccctataacacactaaggaagcgatgatcggtcttttaaactttaaaggagtgtccaagagtcacttcttctatttctattaggttccctataaaattctgtaagacgccaagttggagaagtaggcgatatagagatttgcaaatcaatgtgattcttagagtaacccaacaaaaacccagattccttatttttccaaagcaaagcaataccacccgaagccccattagcatcaaccacaaagaca

SEQ ID NO: 313518 - DNA, 1344 bp, Cannabis indica
tttttttttttttttttctgttgattgtgttctaatgttgtctgcatcttcattgtagagttcgggttatctcatgcgatttttctacttgaagattcaaagagcaataatcaaaatgtagaaagtggccggtactgaagagaggaaccaaaatataaatagaggaatagttcttccatttgaaccacattggatcactttcaaagatattgtttactttgttgacatgccacaagtaagttttaaatgaaaatattgagtttattttgctgcctttgtaatcaaattcaataatgcaactcatgtacttgaaccaaactaaatgaagaagcaaggaattagagatgatgataagttgattctttaaagaaatcaagtagtggtgctttcaggcctggtgtttttgacagtgctgatgggagtaagtggtgctggaaaaactactctaatggatgtgttagctggtagaaagacctaggggtatatcgaaggagacatcaaactttctggatatcttaagaagtaagaaatattttctcgaattttaggatattgtgagaaaaatgacatccactcatcacatgttactatctacgagtccttgatctactgagtgtggcttcgtttaccaactgaagttgataccaattactagagagatttgtttgacattgaattgaaattcacactatttattggaatatatccttaggtaggtatatacattactacacggtatagtgcaataggatttaatctttttcttatataacatatataaataacattaatttaattatagctccattaataataatataatatggttgatttactacatttgttttattgattgtgaaagatcgaaactttaaatagcaataatatatatatatatatgacaatatgtaatatacaagcctcataaatataggattcaaaactgtgtagtatatatattatattgtcatttatatataatatatatatcaagcctatgtgtctcaatttacaatttacacatgcctctaaaatagtatattatgtgtttcatacgccaagtacgtaatcctgcaaaaataagtaacataaaaaaacgcatgcaggttatagctatagggtatattaaattgacctttcccaacggttaataagagggtaaattatgagaaccgttggaaacggtaagaggagattttttccatcagtttagcaccgatggaaaaaaaccgttgggatagctattgccaacagtgaagaaccgtgggcaatactaaatagaatttttttttttaaaaaaaacaatacattccaacaattcataactgttggaaatagtatata

SEQ ID NO: 313519 - DNA, 653 bp, Cannabis indica
aagctcgattgcccaagggattctgattatcgaatccctaaaatataaaggttccactaatcccatatattatttagagaaatttaatactactatggaagtggatcatgtacccaacttgtgaagtgtcgcattcttgtggcaacgttggaggagaatggccacgattggttcagccaattgcctgaggcatctatctcaacatgggagaccttcgtcgaccttttcctcccacattttcaagccacgataacctataagccacgccatagcactctggctaatataaagcaagaacccgatgactatttacaagactattttaaaggttctaatgctgacgtaacaaagtagagaaggctcccgagtcttcactagtacgtatgttgataataggtactctgccaagaaccgatttctggaaggaactgcaggcttgaagacctaactcgtttgttgagtccttcgttatggcagagccgcataagaagattgaaaattctttggctgagttagagaaggggaaagacaaacgcaagtcaccagtgtcgcggtcacgatttcacagtcctcgaggaaaaaaatcccataggaaggagtccgagaagacgcagtccacagagacagcggagtccaaaattggccaagtcccc

SEQ ID NO: 313520 - DNA, 720 bp, Cannabis indica
aatatttaaacaattaatattatataaatcattaaaaaattatcatgtttacgcttgtatatacttgaacagttagtatttaataaaaaaatttggatcctaaagttaataacaaaacaaaactcaaaaatttggtctgttttgccgctgaaaagtaattagattaggagctacaaagtgtaacaaatatagttgaggcagtattactattaatatctcttataaaaataaaaatatatataaaaaggtttagctgtaaattatttttattaagagtagtgtgtgaaaagaaaaaagaatagtattgtgttttggttacaccatctccaattattgtacaattttttatttattttaaattttaaatttaattctttcttaatttttgttatattattttataatataataaagtatagattaaaatgtgataaatatatgtgaataatatatattaagtgtatggtaaataaatatgtaacttatgaatttaacctacacttttataacctacatcatgttgtaacttggagaggagttacaatttgttattacttgtaactcatgtgttgatcacacattattagtgtaataaaagggttgttacacaatttgatgataggattcaaatggtatgaaatatagttgttacaacctatattaatactcatttatattagagaaatgaggtgttgtgtatttgaattctaagtgatcacc

SEQ ID NO: 313521 - DNA, 1084 bp, Cannabis indica
aaatatagagttattctcacttttatctcattgcaggtggatttacttttggctgcttatggctgcagcttgtggtcttttcatcagtgaagaagctttaaatatctgggtctgtcctctgttctggtacttctgtttcacaaagctcaagaaatttgtcttgctctttttagtgaaatttgtgtgtttcatgatacttcttcccttgtatgcctgaattgatatatttatattaaatgatttaggttggggtatctatagcaaggatgctaactttggatgggtcatggaaatctcttgctgagtccttctctaagaatgctggatacataacttcgacgattttttgggtgtactggttagtttcctaatgccattagttctttctattaaatatgtttgatgaaacttcacttgtagctctgtagacactttaagtgatttcatattgaaacagcaatctgacttggtatagttattaggggagtatgcattagtgacttaataccattttatttcggaaagcttttcaaacagtctggggcatcttgatgatgtttgttcaaaggtttgttctgcttggtttcaacttctattctcttacattaataatgtattctaatcttgatggttattgcagttagggattggcaaagagaaagctttgagcataactcgtgccgttaaaaaatatggcaatctcattggttttggtgagctttcagttctttgcatccttataagcttttttgttctgttttcagttgtcaaagttcacaagttcaaaaataaaaaagggaagaaactatagacattgaaacatgtttgttcatttatatggtctgcagttgaacgattttccattggagtaagaaatcctacagcatttttggccggtgcatcggttagtgatcaatgactaaaccatcattcgagcttgtttttatctagttttacaacaaatatttattctcatcccttgtgattgatgtgttttttctgtaagcaggggatatcagctgagtgtttctttgcaggagtttgtggtggtggtttgatcactcttccaattcaggtcagtcta

SEQ ID NO: 313522 - DNA, 588 bp, Cannabis indica
acacaaaattaggaaactaattttttttttgaaagaaagaggccattgtcatagaatggccccgattttgaaaagataaaaatcctcacttgtggcggaggaataccgtggttacataagtagaacaggttccccagctttaaaccatactagggaaactaagacaaaattcgctcccctgtctaaacaaagtacacttaaggctccctaggggcataaacaaaaactgactccctcccattataagtacctatgggactgcctccaagctccttacagcaaagatctccaatctctaattaaatctaagaatgagaggttttcgaaatgcttagtcttgtatacccatgtagctgtccaaaatttgattttttcccataggacctctattgagcatgccgctccttcaaaggttctattgtttcgttctaaccaaaccacccaaagaacagacagtaccgccgttctccacaagcttgtgctccgtttactgctaccgaccttacttactaacatacaggggaccgaacacggcatagcccactgaatctcaaattcgtttatcagcattatccataaagatcttgc

SEQ ID NO: 313523 - DNA, 940 bp, Cannabis indica
atttatgttcgattagacaagaaaaaagaaaagtaaatagaagagaaaacaaaatgagaaaaaaacacacaatcactctccaactacaacatcctactgaaagagacagccaggaagaactttgaaccaattttccactttgcccagtccaaatacacaaggccattccatgtaaatgcctctctcaaaagcagcagataccataagcgtgaattcagtattgacccaattcctcaatacttctccacttcaaccaaactgagttcacatgacgcatgacacgaaaagccaactaaatgtaaaaataactcaccatcaaagcacttcccttacaacttagaagcacttcctgtggacaatggatggacctgactcatcgtattcgcccttggaaatccacatctgaataataatcacaaccaaacaaccaaatatttagtcccaaaacctcagtgtaatagcacattttgaaaacaaaattgagacagggtggttagttagttgaagaaaattaaagatgcgatgcaatgtgttctcacctgctggaaggtgctgagggacgcaagaatggaccctccgatccagacactgtattttctctccggtggagccacaaccttaatcttcatgctgcttggtgcaagagctgtgatctccttgctcatcctgtctgcaataccagggaacatagtagaaccaccactgagaacaatgttaccgtagagatcctttctgatatccacatcacacttcatgatggaattgtaggtggtctcgtgaattcctgcagcttccattccaatgagggatggttggaagaggacttctgggcatcggaatctctcagctccaatggtgataatctggccatcgggcaactcgtagttcttctcaactgaggagctgctcttggcagtctcgagttcctgctcatagtcca

SEQ ID NO: 313524 - DNA, 1062 bp, Cannabis indica
taacattatcctctaattataaacacaactgatccatttaataccgaaaattaatattatatcttgtatagaaattaattatgtataagcaaactttgtaaataatgttttgtttttttagtactattcaattttggaacacgcgcctatgaaattttgtaaattataagcgaatgttccaataacgttacgtaatttgtagaagaacctgatgagataataatcaaggggatattgagaataaattttttttttgataactggtgggtatagaaacaacactcaaccaaacttcattaacaactcagcaaaacatcagtataaaagttcgagaatgaaactgaaaagaaaaccagaaactgaaaaggggatattgagattgatatatgttgtgaaaggcaaattaaatatactgatagaagttcctaaatgtatagctaccagaagttgtctttttcctttggttaggattgccaggcttctttaggcttaagcagcttggtcggggttgtgttctgcttctataattcgattttcgctattgcaattagtcttgtctttctgacatttttttgagtatttagtcttgtctatgagacatggttttgagtgttttattcttgtctgtgtgacatggttttgttttatttttggttcttatttgttctttgatgcatcgctatcaaatcattgttagtcgttagttataacaagttttccgggactgaaggggttagtagtgcagttacataccttacacaatagttgagagatcaagctatgaggttgaatgaacttgctacaacagtttctactgctgtatcttcttagcggtggatgaaagaaaatgtaggtgttcttaaggttaattgtgatgctgcaatcattttcatatgattttattttatgtttttgtcaaacgatttgggaactattaattatttgactcgtttttctaattctaaccctggtcttatttagggaagatgtcctaattggattgtaggctattattttagttgattaccattaataaaattctatgatttattcaaaaaaaaa

SEQ ID NO: 313525 - DNA, 1624 bp, Cannabis indica
ccatttggccatgttagtgctcgagacaaaacagcacaaactacccttagtaacacgggtataactctctcaatttttatccaaatgacttgtttcaacttgcattggaaaaagtgtgctccgtaatcatggcttaattctaaagttatcgagtccaaaattggtttacaagacagactgatatactttactcgggaattgagtagtgtaattaagtgaagggtgttggaggacactgccacagcccatgtggcattatatgcgaacagtgaaaatccaaacacatgttttcagcacttatcaccaatgtcatgaattccaagccaagaggtgacatcccttgtcactccatttcaaattggtgcatccttaggcgaaaataaccatttttccaatgtttgtgggattttgacctagaaacaaggagatttttgtagatatttattttattgtaattttttattcattaaagatgatatgtgagatttgttagtgagacaccccgacatgttgagggatcactataaaaccatgcagcctatataatgagagtaagaggctgaagtaggggacttcttctggaccttcttttgggacttacttgacggctactaagaacaccatacctattctttcatcttttttattgagtccaccatactcattcgacaccaagacctcaaacaccattgatatacatccattttttctactttattagtttaatgttctcaagaatctttttttttttttgtaacaagaggaaatttattcaaaaaactgaccagtacaaacacagctgaggaacccaacagcaaccaacaacaagcaaacggcctgcaagaaatagcagcagccaaaaaactaccagctcattacaacattaagtaaataatttgtctttttactctctttgaaggggcctaaccataacactctcagctgcagcaattttctcacagctttacttaaactacaaggagtagcacaggtgaggttgtataaactttgatcaaatttatgaatattgggtctcccatgggtcttgtgttcatagatctcatgtaagatttcacctagaaatcttttgttgtagttttttccacacactgttgagaacataactatagtatgtcgaatctaatcaataaaaacaaaagtagacatagcctcattaccatcgcaacatgaggctgaactactataaatctctggtgtttattttatttattgcggttttattttgttaagttaatttatcacagtcctctttattattatgatcttcttagatcagtttgacgaaaaactgcgttaacattaacttttccttctttttttttctcatttttctttcatttttttatttttgaatttagcattcagtttcctttttcttttcttgctctatttttcatttcaaaaccacatttcaaccattactctttcgaaacccacattcaaaacccacgaaaaccacctcccagcttaaccttcgccatcttcttcttctaacggccttgtttatcagtttatatatatatatatctttcattatatatataatggctattacatgtgtctccgtctctccatctctattaccaaaaaaaacttcaaaaat

SEQ ID NO: 313526 - DNA, 1249 bp, Cannabis indica
tagtgaggctaggccactatttagggatggttttcctttttcctataatatataaaataggaaattacttttattacataatcacggtacacgaaataggaaactggaataggttgccatatttctctaactcaatcccacgattatagggatagtcctcgtaccaagactttacaagatcattctgaagtaattaactccttataagtagctcgacaagccagacttctaacttttcggatgctctgtcttccactatagtagagtaatcaaaaaattaaatatgctgatgaattatacagaagttgttttggacatttacctctgcccaggtgccaaaaatgcaggacatgtgtcacttggtccttctaccatgtcaatgtgcaaaaatctggataacatttaccctccaagtctgtgtgggaccttcctgtttgcacgtggactttactcgttctagagtcttatctgagcgggtgacacgtgtcctaggcgtcgattgatgatccgatgtgactcgtaccaaaggtctcttcaatttcaactcattaatgttgattgatggttttgcctcaaatcacgtcttaagattcacacatggagacaatcatttttccaacaattaagtatacaacgtacactcttggggggatttcgagacatttaaaatttgaaatgattactcctcctctttgaactacgtataaataggattgaaaaccctaattaatcactttagcaattcttattcttgaaaaatcagatcaaagatcattttctctcaatttcttgaaagaacttccaataaacttcagtcagcaccacccgagcacatcaaacgcttcaaattagtgagtaagttcttcatatctctctttacatttcatgcttaattttttgggtttctgcctacgaatcttgattgttctcgaacttgttctaggataaccacataaattttaggtttaagatttataaatcttgattaagcttaaccaagtcatttgattctaactgcgctttgattttaacctcacaatactaattttcacttatccattaagggattagtgagaatttgactccaactcgaaattttgaacttctaggcttaaaattccactattgtgtgaaatttttggttttaatccctctatttgacctggtcagtacagccaagcttgttactgttgggttttatgccctaaataaaactccatttcaatgtaatccagtttattcaacatca

SEQ ID NO: 313527 - DNA, 2230 bp, Cannabis indica
ataaataatttcctgattaacataaataactgctaatttccaaattaactaagcgggctttacagttctacacagtcttcctcactattttgagtattgtcttgaattgtgcaggcaattactcaacactaagcactagaaattgagaggggcacaatgacagaatttaaaaattcctataagaagataaaaagcttttttttgattctattttatgtcgaggagagagtctccaagtcactagaatcaaagccttcttattctatatgtagtatttcatatagggttatgttcagaatataatgaacttagaaaaaaaaaagataaaagggcctttaaaaagtaatccttggctaaattcctcatggtcttagagcattaatttttttccattcaatccctttaaatgtgacattcttatatttttctaaaaatgtcatttttatattctaattttttaaatactatttctatctatttaataacaataattaattattaaaaaaaataagaattaaatatatttattaattagactacttttaagtttcttaattcataaaaaaagtctaatttctcttttctttctcaaataaatccttgccaaataaaattcataaataagatctagtcttatttaaaatcataattgatttaataaataaattacttgagtctacaaaataatattatctaagctagtgtaaggaccatgggcgtatctaaccaagctcccaataagtagtcctagaatttaccgagaaaattttctatcttattaatttctcttaatttcactatagatttaggattacacccttgattacatagaatgctcttgttaacgcagattttcgttaactaaatttgagcctcacaaatatgattcaacgcaaaaataaaaaagagttgtagaaaaataaaataagaacaacaggttttttttacgtggttttgcagttaaaattctgcatagtgcacgagtcaatcttattcagatttctgagtatgttttttttttaaggcctctcgtgtaagagttttttctctttcttcttgagattgtctgccactatttataattgcgtggtgacagttaattacaaggctgaccaaaatgtaattacagttatcatcccttaaatcttgggatctgattacatattacaaaatgtaaacgaggtgcatgattttgaaagtcatacaactgtgattttcccgcttttactgggtcaaaaatatcgtgtgttaaacacatcttttaattgctgattctggagatctctcgacagaaacttgaatatagtgatcccaatggaaagcgggaaccattcttctatccgagatcgacaacatacgacgatcgcggatataaggaaatctactgacttgccaagtttgtgagtctaacttccgttagcgggatgaaactataggaagttttctcgtagcgagatggtcatctcatattattgtactccgagctggttcgacttttatacttagtttgcttatttgtgagccgaggtatgtgttattcttctccggtgcctctttttagccacatatgatttcttgttaatactctaagtaccagttcgtacattaattcttcgcctaagactttacagtcagcgggttgtaaatatactctagtacttacacaatttatgagttattccataaaaagatacgacaccaattcacattctctttatcttgacacgtgtcctccagccgaatttcgggtataacagctctattcaccaagaatagatacattatgattacctgttgtttcaatctaaacaatcaatgacaagtgttaatagaagctatagatttcatatctagtattagcgctccctctcaattagactattatgttccaaagatgtatgtatgggctagtcctatgagtgataacgaacaagttaaagaacttgaatagtacaattagggtagaacctaaccatctcagaattgagatcattgatctaagatcaactaagtgatcttgacaaaaaaagttattaaggtgagttgatgatatcttttccactgtcaatattggtccagcctgatgtatagccaatacatctgatacaagcttactttgtcattgccctagaaaatacattccacttatacaagtgtatgtaaactatatttgtcaatgattaatgttatcccaatttttgaactctgacgtggcatcatatgaatggtg

SEQ ID NO: 313528 - DNA, 3432 bp, Cannabis indica
aatcccttttgaaaaaacgcatgacctctaatttggcagtttttgaggtacatcaacatttaataaccatctttttcacttctttttcaaatcctacccgtaggatcaattatctccctgatctaacggattaaccgaagagtataaaatggaaaaaagaaccatctttgtattaccttggccattttagaaaccgtgagaattttctaagctttttcgtcgaaaaaccattaccagatttgctcaaaaatttgcatgtcatctctgtctttaacattttttctacgagtttcatttgatttaatatttgacttcaagcattcagaagaatcttcacgccgttcgttgattcgcagattgcagagtcgttcatcgtcccaaaaccccttcaaacagtaagtgacttttctcattattttcttacatgtttgttacgttgtatttctgggtttatttaccatcttcttggttagcatcattgttgtctcatttggttttagaaatttttagggctgaactgtatttgggtaaatgttagggtttagacagtacgtaggttttctaaattctccaatttaccaacttttggtttgataaatttcttccagtaattgggattgctttctccttgaaccaatgtctcaatctagttcagaagtttatcatccaggaaatttagaaattgagcatcccactgaatttgccatcccctacaaacccaagatttcaaaaccccaaaccaaattagaggtaaatgatgccagaattagagatcacctagtgaaaattcaccaagaagatattgctagttgccacagacgcttcttgcaagagattattaaaggcaaatgccatttcttgagagaagctgcttggctcgaacctcccagtgtgtcttctattcctttagttgagcctctatttttacccaaggtcacaattgcttttgaactaggtgacttggattttgaaataatgtctcctaaaccacgtaaatcaaagattcatcaggaccccaacgtcacttttgagtcagagttaatagagtcaaaggtgcaagccatcagaggttatgtaggtgactcattgcggacttgtggtattgaatacaagcaagactgtcgggttaggtttgtgcgagctggcgagttcagttgttacccactagtgcgacttactcatgaaacctctaagggaaccagtagcaagatcagtacaagtggctcgactggtataggggcttggagccttgagcacattagggctggagctataatccccctatgagactactttaaggacttcataaaccacctcgggcttgccccgtttcaactaaatcccatctcctacagaatccttgcaagtttgagggttctgtacaaaatcctgaattaggagtgccccatcccctggaaatagagtatctctactctgttaaggctgttccagcgaggaagaatgcgacagggggattctaccatcttgggactcacacaggtgattgcatgatcatcgtggattttccaacaaaacttatttcaaggacgaattcttctggacgaccggcctttctcccattggcacaaccaccttccgtataatttgtaagtaattatttgcattagacttggtcaaattaatccatgcctttattctagtttttctgaatttaattttgtttctttttgacagctgtttcaaaaagacctgttccttctcctgagatggccgagcgaagcaggctcttgctgaatctcccgtatggccttaggtcatgcgacttacttctgagcgaggtcaccctaaggtttgtggatctcctaactaacaaggagtttgcttgtgattatcaatatcccaagtattcttcttggcagaaggttcccatcccagatgaggagaaggcttatgattgtgtggctcgggcacaatatctccagaatactgctcctagggaagccgaagaaggagcatcccgaggtaatcaatgtggttggtcacccacactgcttagggttgagcttaacaccctagttacctttggagatagccgctttaatttttatatttggcatcccctcctcgtagaccgtattacacataggtttgatagttgtatcgcaaattctatgtccaaattagctatactgagtcgtactacggagtagccgagtagtacgggactatgatggatagggcaagtcatttagacgcgagctggaatttagaaccaattaatccttgtgatatattcaggatcacagtttgtagggatgttagtggatattatggtccttctaacccatcttctagtgatacctcgtcttctagtgattatgataagttctttaggcaaaaaatcatgccccaatctctccttttacttgtcttcaattaatgctaatactttatcttgtctcgcataaatgcatttcgagggtctcgtccacaggaaagggaagaagagagtgacctcctcagaggctccttctgaggtcaaggtggagcccctcaaaaggcagaagaagaccacaactaacaagaaataagcctcgtagatcgctaatctcgaggttcctaaggctaaaacccaggatcaaattcctcctccggtctccgcaagtactgacgagcctctccctaaagcgactcaagcctctgcctcctcaagccaggccattaaaacactgcctgtcgaggctggaaactggctcagagtttaccacagagtttggagctgcgtgttggcgtcagttcaaggctctccttccccatgattgggatttaatcaaccatggggatttggagggagtgcttacaaggagtttgtctcacagcctcttggtaagtttctttatccttatttgttcacttcttttattcctcttctccttctttttctttttactcatacatctttatttgtgggtttcaaggcttctttcttctcttttgccgcccaacggtgaggcttggaaaatgtaaaatacttggagagcgaggtccagaacttaataggccaacgcgaggttgtggccaagaaatggaatgattcccaattggagattactcgtcttaccaaagaagccaagaagatgaagaagaatcttgaagctaccgggaaggagacaaaggacaaaaccgatgaatgcgagaaactaaaagaggaacttgaagctgccaaggtgacacttgaagggaaagaggttgaaacacaagagcgatgtaacgtcgttggcctccgtaccatttatcaagcttggatggaaaatctgaatatggatacatgtttcttggaagagtctgaagaggaaattcttgcttactacaagaagaccaagaaagaggaggaagaagctaaaaaggcagcagaagaagaattggccaagtctcctaccatgtaggcttggtttttatttttattttatc

SEQ ID NO: 313529 - DNA, 627 bp, Cannabis indica
tatttttattttttaattttaaaaacaaaaaaacaaaagtgtgttctgtaaatttattttcatttttatttgttgattttattcaagtcaggtccgagaccagttctgaggtcgggactggggcgggttcaatattaggatcgaatctaggtttagtttccaagatttaagttaaggtcagagtccaaaatattaattaaaaaagctatttaaaaaaaaaattaaaagggattttttcttatttttaaaatttagatttttaattaaaaaattgaaaagtaaacagttttataaaatttgattttaaaaaatattttcatttttttaattttaaaaacaaaaaacacagaaaattgttaacacccgaaaaattttattttatttatttatttatatttttttttgtaacaaagggattttgagcggaaaacgggagaaagtgactataataatttgccaacccctgaaattgtatatacattcatgtatgcttttatttttattagatttgtataaatataattatttctatttagtcaaacaaagaaagctatagctggaaccataactttgcgtggcagcaaaatatgctatcctctaaagtgatatatgagacaataaatttgt

SEQ ID NO: 313530 - DNA, 735 bp, Cannabis indica
caaattgagatagttcaagaaaaacaaagtgcaaatgatgacatacttatccgcctttctccagttgcaatgagcttctcatcacgaaaactttctgaacaacatactttccaaatggatctttcatcatggcctgtaaaatttcatgtaatttgatactcaataatctactttaaggcctcaagacaccaccagaaaatccatttagtttatatccagtcagcttaataccaaatatataataggatgcctaaaagtctgcccaatgagacaaaatttcataaatttagctagtatatatgatgtaaaattgcctatcgttataattgttggtttggatagacaacagcatataagtaataaaaaatatattaataatgttgatctataaaaagatatcaattcaaccatatatgatagatatatatgttataataagaaagaatcaggtatacctataagggttcattttccttggtgtaaccaagcatttcattcaccaaaagttgacgctcctcagcagcaccgaaagataagcacttcttaacaacattagaagcaaatttctgctgactcatccgtacaattcggccagcaagttggcgtataattgctgtcctccctagtggtttacaagttaacatagattttatatacattactaaaagatatatacacataatttcaaaactgaaaaattataaattaatcacataataacatacaatagtataa

SEQ ID NO: 313531 - DNA, 743 bp, Cannabis indica
caagttaacatagattttatatacattactaaagatatatacacataatttcaaaactagaaaattataaattaatcacataataacatacaatagtataagctaaatacaaacccccaaaaatcagtttctaatcaaacaaataaaaattgagattggttatacacagtttatattaatccaagatgaattgatttaactaagattaaaaaaaaaaaacccagaactagcagctagtatgaacacatttcaaacaaaagagacctaaaaaaattagatccagtgacgagattcaaacacttagaaccaagtattagattcaaacaattttcacaatcaaagagagagaaacagagaaaaaaataccgattgaacgcgcgagacaaatcaccggaggccatttggccctacgattgcacgagttcgcctgaggagcagaggtgttgaggtcgattggtgtttgcacgagagaaatggccaaagtttggccttttgtcgcacaagagaaagaaggagagatagcggttgaacaattagggttttcaattttgagtgatgatggagagagaaagagatatatatggtattaattttgtgttttaatttgtccgaattttttttttataatgcttgatatagtgacgcgctaagagtgtcgggttatgtatacccaatcgcgtttggcgcgtcactataagccaacatttttttaaaaaaaataaatagtagaaattatgggagtt

SEQ ID NO: 313532 - DNA, 1989 bp, Cannabis indica
atagcagaggaggtcttcatcatcccctcagctttattgaaaaggaggctttctttggcgctattaatgaggtgttgtagtagttgttgggcattcttagtccatttaaagtgtgaccaactcccgaattaatgcatctaagatgcgggtgatgtcttccccctctcgggtgcaccttaaatcgattgtaggtgcagtctccatttttcccttggtcttaaccatagagttctatgtcgtccattcatctgtattcgtagtggaagaggccttcttcgtcctctcagctatcttgatagtggaggaggtcttcctcatcccctccactgctagcaccatagaggaggcttcttcatctcccctattgttttcacaatgggggagatcttcttgttgaatgtcaatgatgtgttgcaacattcacgtgctactttttggttgccaaggagactgtcgatatcacctgttgttgagaacttgacaaacatgtggtagatagatgagatggcttagaggtcacagagtgttcaccttctaaggagacttgttgtcaatcactataaatgtagtcattgttgagattttatgccctaattaaataaaatctaaatagaagattagaagtcatgtaagttaaattaagactaatttaacaccctaacatggattcctaattaaaacaacaaaataaacacataagggatttatgataacctcacattgattgcaacagaaataattgactcatttcgttcagttctctaacccttgatcatttctatcacagagtatgatcaagaactgagcatggattctctttcactcttctacactatcttgagtattgctttgatatgtgtgggcaatcactcaataccaaagagctcaaaatttaagagagaaatacatagagtattttaaaatttcatatagtataatgtaggcttttctttaatttactttgtctgacaagagataggtcaaatggttagtgtaaattaataactataacatactatatatagagagtcattagggttaggcttagcactaaaatgggctgaattaaaaaaaaatgaccaaaaaaacactcatggctgaaatcttcttaggcccaatgagattgaattttgtcatttttgttttcttaaatgaaacaatcttatctttcttcaaaaataccatatttcaattctaattatttaaatgttaactttttctatttaataattatatttaattactaaacaaaattattatccaaatatatttattaattagaccctctaaggtctcttaattaataaacaaactctaagttcttttttcttctcaaacatgcccttccttagtaaaatttataaataagacatagtcttacttagaatcctaattgattaattaaaatcaattcattgagactacaaaagaatattatcttaattattgtggagaccatgggctatgtaaccaagctcctaataaccagattttgatatttaccgggtaaattttctatttaccgagtaaattttctaacttattaattcctcctaactcgactatagattcagaactatactcatgatttcatagaacgctctatatagaaaatatagatacactatgaatatatccattattttaatcataaaaattattgatcctctatagacggtctacattgagtcgggacaaaattattattttacctttcaatgtatttcatccttaaaatacttagttacttataaatgatatttcgagaaactaatataattattgaaatgagcacctatcatttatcatgttaagccaagatctaaggaaatcaccatttaacttctaaatagttatataagctatagatctccatatttatgattaacactcccactcagttagactactaagttcccaagatataagtatgggctagtcccgcatgtaagctggtaacaaacaagtcaaagaactcgtgcaatacat

SEQ ID NO: 313533 - DNA, 1938 bp, Cannabis indica
tttggaggaggtggaagggatattttggtcagatggctgaattgtgccactacctctctgacttcctgtgactgtgagttatggccttatggccttatgggttatgggctatattgtacgcgaaagcgaaatgtttattgatagtgacagagtagtggaggcattgcagtggattaggattacagacgttggtttggagtgaggttctttgggattgggccacctccaaacacaacaaaaatttggcccaactctcctaattgttatactttaacataaagggtgaattagcatttttgcttgaattttgacgcgtttaaattttatgtctaattttattcaattttgtcaatgtgactattatccatgtactaaattattctctctaaattttaatatctactaaatcatgtctcctgaactttaacatgtactaaattgtgcttcttaaatttttatcaatagactttatttaataaaattgaataaaaatccttaattataataatctcaataatttaggaaaaaaaatttaacgatctgaaaagttcaagaggtgtgatttggtatatgtcaaagtttaggaggcaaaaatttaaattagcctaaaaaaatattggatacttcattcaaaaggggtccaccgatgtattcctatctatttcagcttttttaaaaaaattagtctaatttttttcatgatcatctatactgtagttatttaagacatcttgcaaaattttgagagattcaaaaaaatttaacacgccgaaaataaggttcaaactgtctattgcactcgaaactcttttattttatacgcgtgtgaaaaagactgtttggaccatatttttcaacatgttaattttttttaatttctcaaaattatgttggatgtcctaaataactacaatatagaccaacatgatcaaaattagattaaaaaattctcctaaatgcccctaacacctaaatgggatcttaaactcaaatattcacgtataatgtcacgtattggattatatgttaatataattcctcattaatacttaattaagttatttaaggttgttaattcatatcttatttttcagaatatcacaacaacagacttgaaattgcactcttgattttataaaatactctatatgcatattatagataaattgaaaattatccactattttaatgaaatcaatcaatgatcttctatagatagtttacaaagagaaggaactaaaattaccattttacctctcactgtatcttatccttgaacgcttaatttcttgtaaacgtatttctaagaattaatataattaattaaataagatctattcatttaccgtatttaaccaagttcaaagaaaatcatcgtttcacttctaacatagaagctataaaatgcctatagctatgattaacactttcactcaattatactacaaagttctcaagatgtaggtatgggctaaaccttagggtaagctggtaacgaataagtaaaataattcgaatagtaggattagcttaaagcttaatcatgttaggattcagatcgaattgatctataatcaactaagtgatattgactgagaatagatataacagtaggattataataactgttctcttgtcaaaatccaatccaatataaatatatacatttaatagaagtctattttaccaatgtcttggaaaagacatatcacttgccatagtttaagtaagtcaaatcgttgattatcgcgttagtgtaaatccagtacactaaaaaaatcttaagactaaagatatttgaaacatataatcataattatttttcactatgatgatattagtataattatgaataacaatatgttatagatataataaaatctatgtatattaaatatataattatgtaaataaacatgtggacaagggattgaaaaa

SEQ ID NO: 313534 - DNA, 585 bp, Cannabis indica
agtgtttaatctcttatattggtggtcgatgtgagatagaaagaaaaaatataatataaatgtaattggtagataaatcaaagtataaattaagtattacgtcgtaccatttaatttgttagtgttaactcttatttataaatatataatatatactgtgaccgcatcatcatattaatatatgtaggtagtggttgattagtctgtatacgtagcagccaaggacctgagagagaaagaaaaatttagtttgggtttgtcgatcaaatgtccctatatatatatgactattatttcatatggagaaagaaaatgcatggtagttttcttatttatgaatatacattagaatcacgcttgtctttctgaataataagcggtgtgataggaagataataataaattatatatatatatatttagattttctaggtcatttaacagtactataccagatcttccgattctctacctgtttaggcgcgcaaaatataatgtggacctagtcaaacaaaaatatataattatttaatactttatctatgtattaattttttttttacaatttcgggccctgagcgttcg

SEQ ID NO: 313535 - DNA, 788 bp, Cannabis indica
aaaaagttggaattaacacttattttcctggtgtttctcttaactatgttcgtcggaatgctaactccgctactcatgggctcactagattcactttacgggtggatactgatattgtttggagggttgtttgtcccgtccctattaaagctattgttgtaaatgaacttgttcattaatattaatagtttttctctcaaaaaaataataatttaggggtttgtttatttttatattttaaaatagtttttttttaattatttttatagaatttcacatagaaattcctataataactaatgaagcaacttaaatcgtaattaaaatctgtttagcaatccacatagaaaccatcagaaaaattactggagtaacctaaaccataaatctataaaaaaataaaaaataatatataaaataattcccatttaacagagaatataatttaatttggtcatgtgtatttagtatcttttatttaaatacgaaatcttaaaaggttctagtaatatttagaatttttttcggtattatattattattagtataattaaatattatgtgtcatataatttaagataataattttaaaaaatatcgctaactaattttaaaacattattgttatattattttatataatataatatttagattaaataattaagttgtaaataattaagtgtgacaaagtattaattttgtcaaattgtaacatacattatggagttacaaaatgtatgtagaatgatcacaaaataggagttgcaaatcctttaaattgatga

SEQ ID NO: 313536 - DNA, 1088 bp, Cannabis indica
ccggtttatatgaacagccctaacctttgcaatagatcccagtctttaagataagagtttgtgaggcctccctcgactcgccatagcaccggtatgaaactgaagtcgcaagccccatcagagctcaaatcgcaaagtgtatttacttggtgcacgtatatataatttttatacatatatattttagtggtggcataagaaaatattaaagagtgtataattgtttttttgtgtattttaatgtctaatttatttttaattacttgcttctattcaattgcaatagttaatttttaattgagtattttttttattaatgcaatgagttgctccttaaaaagcatccatctgggcttcattccgaagagcaccactcaatttattacttttagagagaatttcattgaagttgccaataacaatccaaggaaggaatggagctacatcagcaaatcgctgaaaaagagtccatgatgttgatctgttgctagtttctcgtgcaccgtagaagccattgaagtgaaaggttgaacctccatcaatcttcatatagcagtaaaaaaaaagtggagttgtagtttaaaatggtaacatccacatcatctttccaaagaagcattaggccaccactaacgcctatgcgaggcgattctatagcattagtaaagtgcacggactgtagcacacgattaatagaattaagggagagtttagtttctataagaaacaaaacgtgaagcgattgttgttgaacaagcaatcgtaaatgtctgaacgcactcaggttccccaaacctcgtgcattccagctaaaaaatttcatgataaattgtggcattgcctaacaaccttcgcacttgagtcattggagaagctagtgttgggttttgtgtcctatataaaatccatttcaaaataatcagatttactaattaataaaagaacagaaatcgttttatgttgcatggttcacgtgatttatttcatgattatatttaatgtataaattttattaagtccagaacatatgtaaatatataaatatatatttgttcatgattatagtgtcatcagcacagtggaatata

SEQ ID NO: 313537 - DNA, 1288 bp, Cannabis indica
gaagtaggtagtcatttgaaatagtagtgaagtaaaataaacttaattggtatgatgagataatttaattaagttattacgtaaattattagattgaaaattgtaatgaagtttctggattattaaatttggaaacattttataataataataataataataataataataaagattttgttttggtacgctcgactcgattgctttggtttccagattcttccaattcgtgcaagatttggactttggttcagctaaaagcgtgttgaaactttatcaaactcactattatattatatcactataaatatatatatataacattatgtatcgatctacaaagactacaataataataataataacttatgtaataaaccttctaaagggttatttgatttagtaaactcatttccatatctaagaaaattttttagtttattttttgtatgatcgcattgtatatatttaagattatttataaatttttaaaaaataaggtttaaacagttatacgagaaaaacagttatttgtaataaaatatgtaaattttattttaattatttaaaaaaaatttagaaatttacaactaatattaaataattataacaattataattataaaaaaataaattaaaaaatttaacttgtaatgctaaaataaataatagagtttatcgaaacactttttttaaatttaccttaataatatatgtgttgttttcagttttgttgagctgtggctgaattttaaaataatttattttagtgggtacgtatatatatgtagataataatatatatcaaatttatataatatgtgtgtaagagaaggaagaaaacccaccaaggaaaaaacaaaaccagttcaataagagaatatatcagatatttgcacgatttgtatatatttattaattatatatattatctaattatataaaaaataattagttgatgaagtgtttaagactcaccaaaaattgaaagcgtgacaataataataataataataaataaataaaataaatatatagagaagactgaagaaagggttgccgtttttgaactaattaagcaacatagatccatttgtagaccccaaaatattaattaacataattaattttcttcttaatagaaagatgctcaaacaacacaattgatattaacctaatataactaattaagaaacataccaaataaactaataaaaaaatctacaatgcatcttttagaaaagatgtaccgatttatttttatttgttttggtatctaaaataattt

SEQ ID NO: 313538 - DNA, 690 bp, Cannabis indica
acaaaaaatcttacttttaatcaaaacaaatattataaataaaagtagaaaagctataactaattataaatataaatcaatattcgtatgttgtgactaaaaagttcatgactaaagatattagtcacaaaaattataatttattatgattaaatgtgtttttagttataataaaattaaattagtgacaacttttatttaaatactatttttttaaaaggaccacaagtaactatttgttgttataactaaaagtcacatatagtagaaaaatattatattacactaaaaattagtggttagtacgtaaaagtacttttttttagtataaatatacaacaataatgatattaaattagggtattttgttgccaactaattttacatcatggatctccattatataaatttctaattggacaaaaaaaaaatggcaaacatttttattccagtatgtgtataatatattaattaattaattttttacaattataacaatattgtctaaatttttaagaataatttttaatattacaattttagtgtaacgtctccgctttaaatttttattgggctcttatacttacggaattatggtttttatacatagtgtactttcttctcactcgcacactacttgggaaaacttcccaagaggttacccatcctaaaattactccaaatcaagca

SEQ ID NO: 313539 - DNA, 515 bp, Cannabis indica
ctgacctgttatggaaaatcctggctcagctaaattgtcttcagcctcaaatcaagctgatgcaacgcccactgccgaaccagtcaatacacctgttattacacctgctgcagccatacaatcctcgcccttcgaaagtctggcccctctcaccattaaactcgaaagagctaactatccatactggagatctcaagccttgcctgctcttcgcgcacatgatctcgaaggatatgtgctaggaactaagccatgtccaccacagtttgtggacaatacaatcggaggtccgattcctagcaagactcgtcaactcaatctcggatgtgccatgtggaggcgtatagataagtctatactcagttggcttcccaactccatctccgaatccatgtttggacatgtgataagttgtcttacatcgaatgagctgtggattactcttgaacgcctctacaccaccagctccaaggccagaatattgcaactgagatttcaactgttggaaattattt

SEQ ID NO: 313540 - DNA, 686 bp, Cannabis indica
tgggtcaaatataacacaaactcattttttatgtcaaagttagcacaaaatttagatcttgcattgaaaatagtctaagaggataagatcatctccaataaatggtgtaaaatttgtgttaaatttagctctaaaaaattagttaattctatatttaacccaaaatttacaattattctaatacattagtgtaaaagtaacttcaaaagttacaaaaagtttaaaatttgtaatcaaagtatgtcaaaatcttatctatatatatatataaataaaggaaagcataagagcattgatgtggcattttttccttccatttctctattttctctattttgttatgttttctaatttttttctattgaataataagaaaaaaataatgtaacctccccattattaattttttataatctattagtattcttttaaactattagtattctcatctatatatatagatattttattacacccaaaaaatatgatatatgtatagtaattttgtaaacctatataattgattaatctttaacaattcaaaatatatgcatacatatttatattgcaaaaaagtatatacatatagctatatttatatatctatctatatatttatatatataattatacaattctaatgttaggatagataatgtaatcctttaacttttctaaagagctaa

SEQ ID NO: 313541 - DNA, 1027 bp, Cannabis indica
tgtgattaaaaaattaaaaaacaaaaatattaccaaacggcacctatgtgtaaagaccaaccaaagggtaagaccaatatttttagtatgacaaatgtagagtttattgtgcttcaattgattttaacaataaataataaaaatactgttataaataataacaacacagaaagaacttgaatcaagaacaatcaaactaatcaaaacaagattagcaacaaatatttcatatcagaaaaatcaaaatagcaagaaaaaaaacagaaaacgaatgtaaagaaagcaagatttttatacaagttcggccaaattaaagggcctacttcttgttacttccctgagctatcttctctattaaattgatgaattacaagtttgagttgttgagtgaacagtaatagattaataaccttgaaacttagcttgtgtttcaactctaagaacattggtcttggtccagtttctcaactttcttcacccattttttctctttctatgtctctctccaactcaatctcactctctctcaatttagtatgaattgtgttacaatacccatatgactaaaggcttttaaataggtaaaagaaagactcaactaaataccaagtgcactaactaacataaaagaatgctatagcatttcaaacaaaacttactagaccaatgttgtagcattcgaactcactaacagttgtttgttaaaactgttataatccaatttgtttgctttatgaattaccaaacaaaaaataccaccttaattcatggaacccaacaagacaaaacctcggggggagtgatctagctatcttaaaatggagtaaatgttcagcagttctaagcaatgttgagtgagagagctttagttcctgcatctgcaggattctctttaataagtaccttctcaagtttgttgtgatattttgcacacgcaagtgtacgtatcgttacacgtagtaaacttaacaagagtgaggtcgatcccacagggattgtagttaagtacgttgaaattaaactttta

SEQ ID NO: 313542 - DNA, 604 bp, Cannabis indica
ggattgttttatattataatattcattattttactatctttctttcatattatttattttttcattaaagtatgtagtagtagaattttatttattgttgttttgtagatcgattttgtggaggacctacgattacagagactttaccgataagtttaattcaaagattgtctctttcgatacctgttatttgttttttcagatagtatttaagtattacaagccgaaactttggctcttttgctatcaacaaaggaagaatattttttaatgagctgggagcgttgtttgaggatgttatagctttaatgtttaaatttttaagggcaattttgtctcatgtggctctcgatatgatttctgcagctcataatttggcaaagcatatccttcgattaacgattgactatatattaattggtctttaataagattaagagtttgtatatgcaaaatgtttaactttcgggacaacttaagattatatcatgtactctcaaatatgggtactgtagttatacatctcttttgtatttttgatatctatgtatttttgtaattttttatatgaatgcatatgatagttatttaaaatattctataa

SEQ ID NO: 313543 - DNA, 1179 bp, Cannabis indica
gactgtagcgattctctctgaaccaccatctttctgggctattttcttggctgcttttgctttgtatttaggctaggggttcatatgcttagggttcctaggaatttccattttaccaacttcttttcctttctttattctattattgtggctagggtatcttgcacccgatgcatgacaacatgaatttttgattgtggctacaaatgcaattttcttacttaagtcttccatttccttatcgagcttttaacttctcttgtttaacttatcctgaaggtcttgagccattgatttgggcaccactccactcttgcggggtgcattaggtgacttgagtctctgcaaggcatgcttcctattgagtttctccctcaagtgtgagaaggcagatttggtcagggttcttagaggttgaagtgtatggtctcgttgtggtgaagactgtgcggtgttgctcgtggatgattcaggagcgcctattgtcttggtcttttgattatcctcataggtggttctgcttttgtatagggcatttgaccgtcctttcagcaaaccatttagcacctctgatttttcaacctgaggttgctcacttctctcgcattggggcgggtccgcgtgctggggcttacagaataagctcgcttctccttttcaagttggtggcgcaatgtgttgggatttcgtggaacctgcgagagatatcagattggtgatagacatcgtggtgttcccccattgtttttggggatgagtgtcagtgatgaaacaacttcatcacgctccttaacacgtttttctcgagtaggagaaaggttggcttcttcagcgggcgtcgatgtaggcacttccatttccggtaggtctttttgcctttggatgttatcctctggattgcttccttggtctcccctgccatgggcatgttatctttgacccttcccgataattgatgcctggatgtctttccttgctgcaaccagttggttgttgtccaaacggattttaacttttaggtgatgtcttgaatgccttggcatgtcagaatgcttatcaatctttgggtagaaatgagacttgagttttacttccttcccatagacggtgccaaactattgacaatcgaaactcaccaacaaattaatgttggattattattttacaaggatctagatt

SEQ ID NO: 313544 - DNA, 878 bp, Cannabis indica
ttttgttttgacaaaaaataaaattgtcttttacatttactcaagtttcttttacataaaactagatttttatttttccttttctttagagttattacttattaggaataacatttcctttcaagaaaaaaaaagtaataacaatacaaaattagtgtgctcaatcaggcttaatgattacaatgaagtttaacttcaataaattaataattttaattaaattatattttgtctgactctgactattaatttgtaattttttactggtatattacatattgttttcaattattacttcatatttttaaatgcatattatctgtattgtccaattgatcgtatctaaacctttttccatagtaaataaacaaagataaaaatgtggtcacatcaaatacattccagtattcttccacctcgtttgtttcttgtttttccttccaacaagcaaagcagtccaagttgtatgattctataggccatgtctcgatgcactttaaagtatcaccatattttattctttagccacaaaagaaaaaccactagagcttcatgttttatttttctttcaaaagaataataatataaaactagtgtgttcaataattgagctaatatggaccaccttaacattttatgatggatcaaatataaaggtggttgtgcctttttaatagtctctctttctctatatccatttatcaatccatcttggttaaatttgcttttatctaatgacaaaagaaccaattcaaaatttgcatttgcccaaattttaaaatttcaacctcaaaggagctaataataattctactttagttttccatgaactgaaaagatgaaactctcaaaaagctttctaactctaaaaataatat

SEQ ID NO: 313545 - DNA, 1092 bp, Cannabis indica
ccctataaatagtgatgcatgctcactcggcagagggtcgagagattttacttaaagagatattatctaggaattcatattcagagatattattgtaagagccataaggaaaggaacctttctccttgttcttgagttaatacaaataacgaggattaaactattattgaactgctcagggctgaacctctataaaattcatctgtttttatattgctttactatatatcaatcgttataaactacttgttgcttgctaaataagactcactgtcgttggctaaaagcgaggtcaacatacataaaataaatcaaatagtgcgttaaactattcacttttatatataagtacttaagttgcaattttttctttataaattaaatataccaaataaaatccattaattaataataagaaaatagaaagaattttatctaattaacttcttaatttttaaccaaaacacatttttacttcaagaatgttgaagtctaatcttttcgagtttcatcgatttattaatttttgtaggaaatatactcatttagtaccctgtgttttctcgaaaaatatatttggtaccctatgttttcaataatacttatttggataattctaaaaaaaaaggtaaaaatttatatatatatttatatacttaaacgttaaaaatttattaaaaaaaataagaatattaaagataaaatcaatagatgtattttaaataattttatcataatgaaaaattgaaaagtgagagaatcaaagagagaataattagcagtatttggagtgattttagagttgtagggaatatactcatttagtacactgtgttttctcaaaaaatatatgttgtatgattaattattatttttttgtgatctaattgaaaaatagcaacatatatataattgactatgctaatattttatttatttttgtaattacgtaaatgttaaattttaattttattatgtaacatatatattatttaaaattaaatatttaaaaaatgacttcttctacattaaacaactttcactaatgaataaatcataaataatttgaagttatcgataacggttaagtcg

SEQ ID NO: 313546 - DNA, 814 bp, Cannabis indica
ggttttaccaccaaaaaattgatttatgtacggttatgtgtcactaattatagaattcaagtagttttgccatcaataatctccactaaaatttaccgcgtctacacttgtggacactgtgacatgttcaccgtcacacttaacagagccttttaaacggaatgagtaaatagctaatagaagtgaggtttggagattttaccaccaaaaaatcgatttatgtggttaagtgtcattaattatagagttcaagtattttttccgtcaatatcccttattattatgatagcgtttttaatgtgttgtaccgcttttcgaacttgtctcgtgttgtgttttttaaactaatctattcgtgcttacgtgttgtgtcattcatgctagtcacgtcgtgtcgtgtcatacttaagtatatattttttgtgtcttctcgtgccaatgtgtagcatcatttcatgtcgtatccaaattcatatttttttgtatatagtcgtgctcgctatatgtacttgtaccaattttgtattgtgtggaaaaacacaacttgcatttagagcactaatagttacaatccaaattagatagtgacttccaaatatactttaaataattacattgaactttgtcacaataaattaccgtggaaatatctcaatgacttggtgtaaaaaatctaagctctcccctaaacccaaaatgtaggacacaaaaatagaaagaagaaaaagaatatatggatggaaatattaaataataaaagaaagagaagggtagaaaggtaaaatccgtattaatgcttgctggaaagagaaga

SEQ ID NO: 313547 - DNA, 636 bp, Cannabis indica
cccaaatcccccacggccctggctttgaactcggtctctgacccgaacccgaattcgaccttagaccaagacccgacttaaataaaataaaaaaatgaaaatgaaaaatgaactttacagaacacattattattttctgtttttaaaattgaaaaaaaaatggttacaaaatacatttttattcttcaaacataaaaattttacttttattttgtgattaaaaaattagaaaacaaaaaaattaccaaacgacacctaaatttttttatggtaaattatagttatactatatatcttacatatttttttgaataatttagaatcttcaatccaaacaattaattacacatattttattttatttgtatgcaattgatttttttaaatttattttaaatactataaaatatttaaaatttattagcgttgaaaaaattgctggaaaatttgccggtgctagaaaagttattgtctttggaaaatttgccaaaaaagtcaccgttaccggaaaaattattagaaaattcaccagaaataaatgtctcagatataaataaaattaaaaccgattctataacataataaataaaaataaataacataaaataactcaaaccggttataacataatgaata

SEQ ID NO: 313548 - DNA, 1423 bp, Cannabis indica
ttaaaatatattatatttttaccaggtattacaatgtctgaggcccaatctgcatcatagaacccaacaatgttgagagaggtagattgctgaagtgtgagaccataatcaagtgtgccattcaagtatctcagactgcatttaacagttttccagtgtgactctagaggagaatgcatgaattgagatactttgttcacagaataggagatctttggtcttgttatggtcgcatattgaagagcgccaacaaggcttctgtaatggtagggatctttgacaggatcacttccaatggtagagagcttttccccccagacattggagtgggaaagctattggcaaactagaacttggccctgcatagaacatcaatgagatacttggtttgggagaggtgtaaaccaaaagctgtgtgagtcacttggatgccaagaaaatagttgatgtcacccaagtctttaagagaaaaaaaatagaatccagttgagagatgaggctggatatttcagttgagtcacttcttataataagaatatcgtccacatagaccaaaatgattgtagtgtgatggggaaggaatctaacaaagagagaggtgtctgttctagaattctgaaaaccaaagtgatgcagcgtctgcttgagttgatcaaacgaagctcgaggggcttgcttgaggccatagagagctttatgaagcttgaaaaccagggatttatctacatctttaaagccagggggctgctgcatgtagacttcttcatgtagggtgccatttaaaaaggtattgttgatgtcaagttgttttattggccactggtgtgagagagaaatagtaagaataattcttatttttggagacttgacaacagggttgaatgtttcctgaaagttcaggccatattgttgatgaaaacccttagctacgaaccttgcctttagcttagaaactggtccatctgtattttctttaatgttgaggacccatctacaatcaatgactttcctaccagggggcagcctaacaagagtccatgttctgttctttttcagtgctacaactttagtatccatagcagcatgccatttgggattaacaagagtgagaggtactttggaactgatgtaaacttttggtttgtatatgccagctttggctcttgtagtcatagggtgaacattggtagaggaggtaggggctgtgggaatagtggaagcagtgggagtggatgattcagggcattgaagatgaagtagatggatcaatgtgaaatggaggtaaagaggataggttaggtgctgaagggtgaaaaaaaataggtgatgtagatgtgacatggacaggaatagtggtgttggagtgagaaataggaatagtagggagttgagattgggtggtttttgttggaaatttatttta

SEQ ID NO: 313549 - DNA, 1385 bp, Cannabis indica
taaaatatttccaacagtataatggtatgcatatgtgaattacatgtttagtgtacacatttataaagcctgatagataacatatttttacagcgatattagtgtacatagagatgtactgagtatcggcagtatatgtttggctaagtactgattgatgatatcacatcggtataggactagagtaccgagtataggctaatattatggtcaatagtactgtcgtacaaatgttcttgactcagtaccgtgtcaaacacggggatagggttatggttgggtatatgggggcctgattataagccgaattatagttatgtcattgtttatgcttttcttaatgagtttgttgaatcacagatattgtttgcatgtgtaggtaagggcttgcatgtataggtaagggcaaggctaaggttgagcagccgtgagagaaagcagatgaagattgtacatgttggggcagttaggtctgaagcgtacgatatttgagacagctggacgtatttgtttagtcgctagcgataacttttgtattatatactatgaaacagttctaaatattttgtaaacaggatcccagtcttatatatgttattattttgatatttataagtagttaaacaaagttttaattatttacaattttcaataaaattcgttgattagcaacgagctgcacaattaagtcaaaatcacgataacacgcctaaactagtagggtgttacacggctattctatattcagattatttacttgatagttggattccctttggctggcaccatctcgatgtcctaaggcttcaatggtcttgttttctttattctacaggctatcggtgcctgcgatcttttcattctaatcattacagattttgccttctacaacatgcatatataatttaaacacaaatatagtacacatttatgtagcaagttacttttgacaagtgagacccatcttaataaaaaataattagctgaaattacttgccacataagtgtgtgtcaaatttatatgtaaattgtgtgtgcacatatcattactcttggctaaaatacatgtttaaaatagtgtgaacactatctgaatacattagtttataataattttaacaatttaattctaaaaaaggttcaaaagttaatttttaaaaataaagagtctaaaggttggagggcttaggcttggggtccagagttttgattagggttagggtcagcgttcggttcggggctaggatcgagtttgtgtaggggctaggttaagggctaggttgaggttcgaccttgggctggagttggcatccgcttgggatctaaaaaataaaagtagatgaaagacaatacaaatagactataattaaaaaaaaacaaaaaaa

SEQ ID NO: 313550 - DNA, 552 bp, Cannabis indica
gaaatagaggcagtgccctgaaatctttatagtctctccattccaccaacttttaacaatatcctgccattcttgttcccacaccaaactgaaatcttcttttttttttgggccacattttatactatcttcattgaactgggaaatcaactatcaccaatctaagccatcaaactgttgtagccactcacagtacaaagcccctgctcaatactttccataatagaattccattccactcctgcccaccccattctaccaacacttaacccacctaaactcaatcaacacacaattatccacaactttcccaaaagcttccatagccccatctcaaccacaaactcacaatctccatcacccctctatttcctacctcatcttctcctataattaccattataacaaacgctttctttcagtaattttaattatttattttccatataatattacatgaagaaaaaaatcctcatattacaactgaattcatcaaaattataaaacaatatcgactaattttattttcatcaattagtaaatattcacaat

SEQ ID NO: 313551 - DNA, 1710 bp, Cannabis indica
ttaaccaaaaaataaaataaaataaaaatctcatctttttgggattgtgtttggataatatctttggacacattttttgcatgaggcaggagttttgtcataataataactacaaatgtaatttggttattggatttgggaccatatatatattaatgtcataaatgaggaaaatagctaaataattattaatattaagtttcatatattttaattaaaaaaaattattaacaaattaatactaaaaataaagtaaggtttttttttaaaaaaaaaaatggaagagatgtttcttaaattgagttaatgccctaaacctagttaggggaattgggattaaaaggcatatgtagtttttttttttttttttgaaattaaacaaaaggcatatgattagattaaaaagtataaccaacaaaaaaaaaagaaaagaaattaatgaatgaattaattatttattaacaatacattaggataaaataactttgaaatattttatggtgtatcccctaaaaagaagattattagattttttttattattattattttgatcatataggaaaattataattataataaaattttcacaattttttttataaaaaattaaataatttattatattagaatcaaggtgcaaacaacttatttcacgtgtgtataaaaaaataaatacaagcatataaattagctatcggttaaataaattattcataaacttctaaaattagtagaaggacaactataacaatatataccgttatgaataaaaataattaataaaattttaactttccacgtgccgaaaatagattaaaatataccggccggtagtctaatttacagggagatcaccaaataagtagacaataaatttaatgttaaacgtaatttttttttttgtccgtatcattaaattaggtgaatttatcctaagcttttaaatgaagaaataattctaggttggatctacataatgtaatgtaacctatattataaattagcccattaaataagatgtattaaaagctaggattaacattagtgttagtggtttgggtaaattaaaggcaatgaaatataggttttggtaggaggtatgtttcaatttttatcttctgtcattgtaaaagaaagctcatgaaacacatttggccactcatgaagaaatagtcaccccatttatattatttatttttctaaaaataagattttccaaattgtttacttggattacacaataaaataaaatatttaatcaatgttgtaattgttttgaggtggggttgcattgttattattggctattagctacccaacaatatgtttttttggttgttaaatgaaccatggtgacaaatttaaattatatacactttttatatttttatatagtaatgtgtaattaatttcaaccatataattaaaagtgctatgaccctacttaaaattatatatggctaaaattgaataaaatttattatgtataacaattatgtccaatttgaatatatatatgtctatagcattactttaaagataggaatagaaagagattatttaaaaaaaaacacatacacacaaaaataattaaaaaaaaaatacaaaatagaattttgaatatttttgtgatttttaagatttaatttacataaataaaataagattttttttatgtatttttatgttatattcttgttattttatt

SEQ ID NO: 313552 - DNA, 1403 bp, Cannabis indica
ggggtttccaatattgttttcctgatcggctccgataacctgagaagaaaatgcaaggtaaatatgaaaacaacaaacaaagagaaattggagaaaattaagaaaattagagctttggagggagggagattactgaaatagaaggccctgaaggttggagatagattccgccatttttccgacacaatctgagttctgagttctttaactcggaacgaatcggatatagggggtttaggggaggttcaagttcttgggtcttcttcagtctaaaaaaaaaataaaaaagtaaaaatacaaactcttttaattaaaaaaaaaaaaaaattgaaataatttaccgtataaatatctaaatttattttcattgcaaacgaaactatgacacattatttaaaataatatcacataattttattaaatagtcaggtaatgtgaactattaaggtaaaattaaatttaaattaaactaatgaataaacttaaaaataaaaatttaatacaattaatataccttaaaatttaaattgtaaaacaaaaattaaatctaaaataacttttaaaaatctagaatagaaatacaaccacgagtatcgttcgagagagaaaagagtgggcgactctatcttcttagacgacgaacatccgtcaaagtttcatcttttccgaccacgggtatcgttcgaagttccatctactctgaccatggccatcgatcgagggagtaggctgagaaggatagggcgatgggtatgtgattgtgaacaactacaagaagtcgcggttcgttcatcaaagacagtatagaacccaggtcgaaggttcaagtgctacattcaaggttgaattgttgctccattttttcttcttgttgtccaatctttttggatattatttttgtatctttaatattaatccatatgaataaccacgattttaaaattttcatccaatttctcatcaagaaaaaattttatttttaaatcaccccctttgatgtgaaaaaaaaaaaaagtaactaagaaattgaacttatagatattctaacttatcatgtcgtaagaaatgaaactttcttacaattcaatggattaaattttcgtatgtgtatattagcttatagtttgtttgtgcttgcttgaggattcagattaagaattagaatttttaagcacttcctactaatcttttctctaatctgaaaagatttatgattggaagttacgtatgtgaagatttcgagtcctttcttaagcaaggtttcatgcctcccacaccattactcaccataaaagttaggagaaagttgaaaaatatcacttttattaatcaattaatcaaatttacctctaattttatatttaattgaaacatacctctttttatatgtattgtacccaaaa

SEQ ID NO: 313553 - DNA, 1354 bp, Cannabis indica
tttcgtcaaattggagaagaagagagtgagagatcgagagagagagggaggaggagtacaagaatgagagagagaaagagaaattcaggtggtggtgggtgctagtttttgtcgaatgggagaaggagagagcgagtgatcaagtgagagacggtgagaaccgagagagagaaaattggtattcatcattcgtgcgtggtggttttcatcgagaaaatagggtttggggttcggagtttggggtttcctgcaaagagagagagtagctagggtggcttagggtttttgttgtgtaaaatgatgaaggaatagctattgggggttatattatgctcagggtatacgcaacggtttataactgttgcctatactaaaccgtgcctcatatatagtacaggcgacgatttgaaaccgtcacatataccccccattaaaattcacattatactcttaaaaccgttaggaatacccaatttttccttaccgcttaaaatattcatttaaattattagcgacagtcacccaaaaaaacattttgaggaccgtcgctaatttcccctttttatatatatctacaactgacatatatctacaaatatgggtacaaatatgcctaaaatatatttgctggtatctcggtgcaactctatgtaaaacttatcgataccctaatatgttattctaatggaaactgtcatgcaagataaacatgtattcatatatacaattattatactaatcttacttcaatttcaaattttaggttcaaatttaggtgtgccagtcaacttaaagaatttgaggatcaacacttttccccgagttcataagtgtaatttcaaatgctcctgtgaattattgtgtgatggacctcataagaggcgtgggtgtgagcctcttggtagagatgctcttggcgacatggcagaagttgttcttgaggcctctttgttgagtgggtcatatgagtgagatagttcccaataggattgtatctaagtactaattaatttaactcttggttccatttggcaattaaaaattagattctcaaagtaagtaatctaagaaagaattaaataacaacacaataaacaatacatttaatcaagaaatgaaatataggaaaactaattttgattatttcgacttcctatttcaataatgaaaactgatattcttcttctattttgtatcatagcagattataaagggaaatttcactagttgaccttaataaaacatcccatatcaaaatttatacccttcattaatttgtacaaaagaattccactattcctcatttctacccaaaatacccctcaaatttaattttcctattctctctctctct

SEQ ID NO: 313554 - DNA, 1380 bp, Cannabis indica
gaatagtaaaacaataaacattaaaaactcaaaaaaacaaaccaaactcaaaatatggcacaacaagccaaccaaactcaaaaaatatggcacaacaagccaaccaaactcaaaaaaacaaaccaaatgtagaactaaataatcaaacaaaaaaatggttaaatgttagagtattaatttaactgatgtcttgacttctgtcatggtccgtaagtgctctgtttttttagttttgtttcttgtgttttgtcctgttttcgatatttcctttggttttttcccacgtttctttgatggcatcctctagtaatcccaatcaacaactattcgaaatagccattgaagaagagtcagaaggtggactcgatttggaagtactgggccctagggagacagaagagtttgtgtatgattggcacttatgtctggtaggtggctttatcactgcaggggcagtggatttcccgtcaatgcaacaaacactagcagctttgtggaagcctggtaagggagtatacataaaagaattagacgctaatcgctttttgtttcagttctttcatgaaattgatattaagcgtgtgatcgaaggcagtccatggtatttcaatagaaaagctctaattatttctcgtatgaagaataattctaaccctcgatgcatcactctcgatactatggacctctgggttcaaattcacgaccttcaatctgggtgtatgacatctacggtgcttcaggcagtcgggaactacatagggacgtttgttgaatcatgtccaaacaattttatgggcatatggagggattatatgagaattagagtctccattgatctgtctaaaccgctgaaacgacgtatgagactccgaaagactggcgaagagtggttctggatcacgttcaaatatgaaaatgtccccaccttttgttttatttgtgggatgttgggtcactcggagagattctgcgcaaagctgtttgatacaccagcaaatgagattacaaaaccttacggagaatggatgaaagctccgctccgtcgacgaacaaagctcattggagctcagtggttacgtactggttttgaaaacgtgggtgccagctgcaacaacaacaacgtacccgatctttctgcctcaaatcgtggcagtaatggagcagtaattatgcagaatcaacacaataaatcacaaatggccgtggattgtgggaagaatcaagtggatgataccgctattgataagggagttagtcaacttaataactccctccagcacgtgattgatgaattggcaaacaatcagcccatttcaaaaaaggaaagattattgttgagtctaaaaaaagaaggtctgactcagaattgggccagagtgt

SEQ ID NO: 313555 - DNA, 952 bp, Cannabis indica
tattatttttatattattttcatgtgtttttcttattgttttttgtatttttataaattatcataaaaatatgtatataaaaaaactttaaacctaaaagtgtaaatgtttttacaaaaattaattagtgttttatataattattcctttaatttttgagatatatttataaatacccaacaaaattaaaacaattacaaaagtgcggtttttactgaattttgaacatttttaccattcattaaatttttatttacaaaaatatgagatactgatcagggccgactcaagcagtttggggccttggacaaaaaataaaaattgggccttttattaaaaacaattattaattaatactacataaattcaattttgaaaaaaaaaatactttataaattttaaaatagatgaaaattttaaaatcatgtgtattgggaccacaatattttaacggtttttttatatagttatgaacttttattatatgtatactatacattatcaaaaaaaaatattataatatatgtaaaagatgataacaaaccgaggccttttaatatagggtgtcttgtgcaatggtccaaactgctatatgcttgggccgaccctgctactgatgttctcgttctcgttctcatgtgctttttgatattttattttactatatgtgttaaaaattcttcaaacttgttttccgcaataaactattcttaatcttttaaaattttattataatgatgttgtaacgtaacaaacaccattataagagaaattgaaaaaaaaatcaactttttttttaattaaaaaaattaatgaagaaattgtaatagaagattttaattagcactctaagaatagaaattggaaatgtgagaaaaattaattagcattaaatgtctaattgtacacgtgtatgacatgcaatgtgcattatcgatatgatatcgatagt

SEQ ID NO: 313556 - DNA, 1182 bp, Cannabis indica
gccaagtagtttgggtcctcgactccagggggccatgagtcaatcagatgattgaattgcctcacttgattttcatcaaattcactcctttgctccatgtaactctggatatgattgttctgctggataatgtagttgagttgagcattgatatgttgcatccctgcatcaagaggagtggcaaccgcttgaggcatttcttcatttttatttttgtctttggggacatgagcttctggttgtggatgttcacaaggaggtggcggttaaccatatgcatgtggtggcttaaggttgcgcaccaatgtccaatcaatctttcattgtgtctgtacttgattattgtaaggatattgtggcacaccattagcaacacacaattcagttttaaacccctgctaggccaattccggcatgtgtagttcctgagaccatgttatcaaagctctgtagaattataaccccaactggatagtaatccccttcataattgcataaacaactctgagcctatccaacagaacatccgaaaaatgtttactaggcatacgcctagcactcacgaaaaacatccaagcacgagccacttggttcaattcacaacgataaagcaattggggttcctcatccacctcatgcaatctcaaccccagaaaactaactgtttccgccaagtccacagggtcaaactttttgttcataaacctcctgtagtgttcttcattcactattagtaagccaaacagattatggatggtatcaatgtttacatgcacatttgttttgcggactcttaccctttcgtttttttcctcagaccaattttctagaaattcaagagccaaagtttgattgactctctctggaacattcacaaacttctcccagtggcgtatctgaattttttgcctcatgctctcgaacaatgggttattcgggatggaattttcatcatattcgatacctcgatccacaatgaaagctttcttttgcaattcaaagtatctctcttgtgcttttagattcaaaaatctatccttttcaaaagtggacttcgaacctggcgttggcagatttgatgatgaagcacacggttttttcggttctagtacgcttgggcaatacccccgtcgcgaccactgtagcagtctcatcattttcttgttttttttcttcatatat

SEQ ID NO: 313557 - DNA, 1706 bp, Cannabis indica
ggtggggggcctaaggcggccgcctccttcgtcttagcacagggccggccctgcagataaccaaggtgactttgagcatggtagctaggtatattggtcataatatacttctatgtcaagacttggttaaattttatggtaggaaatgtaactccccttcttgtatgattaaaatagatcttaaaaaaacatatgatacaaatgaactaggattttatccatgagatgttagaggctttacattttcctaatgcttttatttccttgattatgacatgtgtttctacctccaagttctccttactcatcaatggtgctttaaatgacttcttttccatcaaaagagttttcgtcaaggagatctcatttttctcccctcctgtttgttataggtatggaatatttttctagattgatggttaaagttactaagaaagatgatttcagcttccatccgagatgtaagactatgaagcttaatcatttgtgttttactgatgacattttgccattttctaaaggagatattcaatctgtgatgctcttgcttaggacttttcaaaatttctttaaaacatctagtttacaagccaatcctagcaacacttcaatttattgttcaggtatgtcttctttggatattcaatttattttagatagctcgggtttcactcttagttccctccctttcaaatatctgggcattcctatttgtgctaagcgtatctccaagtctgatggtgatgttattattgagaaaatggttgctagaattagactttagagcactagacacatttcttatgttggacgatgagtgttaattaattctgttttgatgtccatacactcctattgggctcaacttatgattttaccaaagtacattcttggtaaaattaataatatttgtaggagcttcttatggaagggtgtttcggactcatcttgcccgaggcaagttgcttggcataatatttgtcaatgataaaaaaataacgggggtcttggctttagaaatatttatatttggaatatgggagctattagcaagtacgtgtgggatactgccatcaaaaaagataatctttgggttcattgggttcactgcttatacattaaagagcaagattggtagggttataatgcttgaagcgggggtttacaagttgtgtctgagacaccacctcctaccgagaagaaggatgaagttgagaagtacgaatcaatggttaaggaaagcactactacaatatgggcctttagcttccctttttttaacccattttataaaaagggaagctaaagggtgtgagaacacccaccagattcgaaattgacatttagaggcggttttttggtaaaaaccgtaggtatatatattagtaaaccctatcccgtcggttggaaattgggattttttaagggtttgtgggagaccctatgccgtcggttcctagcaaagaaccgacggcataggtgcacactttattgacacgtgtgcacctatgccgtcggttctttgctaggaaccgacggcatagggtctcccaggatataacctctgcatcgtcttcttcttcctcacttcttcttctccagcatatacccagccacttctacagcagagaaaacccacgaaaaccctcgccaaccacctctaaaaacccccatatctttctcatttcttcaccatttcacctcat

SEQ ID NO: 313558 - DNA, 1350 bp, Cannabis indica
atatttattgtgctaatagactatattattatatagtacgtttatattgtcttactgtaaatgatttttgacaagttagtgtggtttagtcataactgggtattttgggtccaaactgggtttagggtccaatatattctattgtgtgattgtgttataatacaatttaattgagaatatctgaatgtgtatatgaaaatgaaatgtctaaatttcccttgaatgatctaataaatggaatacaggcccaagggagcaaaatggtcttttggccatttaccattatttcttgtgaaagatattatttgattaagtgttaaaaattaaaaaaaaaatagaaatcattttttggttctttctatcccaaaccgaccccctctcttctttctcaactctctctttattctcattaaattcttgaggaacttgtgaaatttgtaaacaattggagctaattttttgggttaagcttgaggtaacttctctaacttagtctaattgtttaattttagtagtgtatgaacttgatttgagttatgagcagagtttgcatgttgtatgtgtggatgatgtccataagagaaagacaatgttttctttgtgattatcttgtattcttaaatttcagtttggaattagatgttgtttatgtttatattttggtttgtgttaattacgagcatgagaataattccagttcattgatgtatgttgatgttgttgtggttgaggagttgagcatgaaaatgttatttttgtgctcttgagtttgttgaaagcatgaattggaaccttgtcatatataggtatttcaacatatctatttgaagtgtaaatgcctaaaagacaccttagtttggcatgaattttgttatttatgacataggtgaagtttggattgagtttgtgcatttttggagatataaaattggttttttggattttttgaacccaatagccgtagccaaaaccttgcagagagcattcccaattttgtcgaatttgttttggccataacttttgactttgaactccgatttggatattctttatattgttggaaagctcgttttgaactctattatttggtctagtgttagagtcctaaatgtgaatatttatgaaatgtgatttgggattaaccctattgtgtgaaacccaaggattgtaactaggaataccgacacttgttcaggatcacctgtggataaagatttctcctcatacattggaaattaggtaagacattgaattatgtacatagagtagagcacggtggcacaattatatattatgtgattagttagatgaaagcatgaattagggtcattaccctaagttaatatgtgt

SEQ ID NO: 313559 - DNA, 2232 bp, Cannabis indica
aggagcaccaatcttactctctcggttagcatgcatcttcattttgtattttgatttcatacttcttcttttagtcatcctttcctgacttagttctattgcagatatcttttttgtcttacttggatcatcaaaggggtcttcaaagaatcaagcagttggaatatgagctttgaaagtccaacgaccaacgtgaagttattgtgaagcaatggaccgattctcaagctgagattcttcggttgaacggggaagctaaagagcagagaaaatcccacaagactgagctcaagaatgcccaaaaagctgccaaggatcacctcaaggcccatcaaaaaattcaagaagagcttgatgatgccaaagagaaacttgaagaggccaaggccaatgccaaggctagatgtaattatgttgcctagcgttccatctatagggcttggttggaaaatctaaatatggatttaagtttcttggaggatggcaccgaggagatgcttgctttttgtgaacaagccaaaaaagatgaagatgctgcagaagaggaagttgaagaagaagaagaagatcccactaaatctctaactatgtagatttagtttttatcattttaatttttgaacagtggcccttaggccgagacaatggtttgccccctgtggtatttttgtaatatatttaaacatttgctttgttgaatggccaacattgctaatttatatatatatagctttttatcttgctattttcgagttatcaacatttaattattgcgtttttattcacaacaaaacattctcctcaatttagcttaggatatttttgggttatatgtgttccatcgtcattatcttattttagacgagcagttaataatctgccatgttttccgcaagaagtttgcaatttgctatgttattcgcgagcattaatctgttatgtttagagcaaacttcaaatattttgaatagttttttataaaacaattttgaataatttttttaaaaaacaattttgaataatttttgattacttatatgaatagttaatcctctatttatattttagcttatgttttatttctcaagatacatttgtatcttgtttataatacatgctataatcatgcaagccgttatttactcagatcgcatataacttcctgttgctttatgagaaagaatctcacttacaactgctaatttaattttctcttaaagaaattttttttcaattcttgactttatactgcccaaagacaattttaatcaatcatcatttcctttgtgaaaaaaatttaatttttaggtgtttagcatttttgtatatatttctaggtggaatctagttattatgcacatatatgcccccaagtaattttaaagaaaataaaacttttttattcagaacaatgatcgatcattacaaggattaatacaacatttacataataaactactggtaataaggtcgtaaatgatcgctgttctagtgattctttattagcgagccattaagtcaagctaaattataaaccgcagttctaactacaacttcaatgatgtacgggcctttccagttcgggttaaacactccagttgttggatctcgcatgtttgcaaatacacgtctcaacaccaaatctcctacattaaacaacctctttcgaactcttttgttaaagtatctcgtgttacggtgttgataagcagcattggttatttgtgactcattgcgtttttcttcaagcagatccaaggacatattcagaagttcttggttttgctcctgattgtagaattcacgcctgtgggtcgcaatgttcacttttacaggtagcattgcttctgagccaaatgcaaatgaaaaaggagtgtgtcccgttgctgttttctctatagttctatgggcctagagcacttgtggtagctcgtcaactcatcttcctttggcagcatctaatttcttcttaatggtatccttcaaggttttattaacaacttttacctgcctatttgcttgaggcctcgatacagacgagaagttctcaattattttattcatttcacagaactcagtgaataattcgccatcaaactgagttccattatcagatactatcttgattggaatgccaaacctacatattatgttcttgatgacaaaatcaagaaccttcttgcatgtgatggaaactagaggtttgacttctgtctattttgtgaagaagtc

SEQ ID NO: 313560 - DNA, 1208 bp, Cannabis indica
ttattttttaattattttatagttgttgtgaggtttgatttttcgttatttttttatttttatttttttacttttgttgagcaaagtgtattctatatattgaaactttacaagcatatttttataattaaaaatttagaccgtaaaatataaataaacacacacaaaaaaaagatattttttgcaaattctcctatattttaaaagtaagacttatgaaggaactctatcccacctaatcaatttaggtttatttttaggatataaagatggttagaaatttttattttgcaatctaatccctattttgatttttttaaaaaaaagaaaaagaaaatcttaatcaatagatttggcttgctcatacttaggttaggacttgactccaacaagagatgtaaattgtgttgtatctcactctcataacataaactagtgtccatattctctatgctatagtgtcaaatctaggtgactatataaaattaattgaaaatttaataaaaaaagtaactataattatagtatgtatgaaaaaatacttcaaaagaaagaatgaagagaccaaagtgaaaaagatgaccaccactattggttcacattgctttgctcattcctcattccatatgtttaagattctcaaatccctacctaccaagttgtggagaagtgaaattttcaaaaatacaattttttttttatcttttatttataattttatggcttaaaatatttatttacaaaattaagtttgtattgctcagtaaaaagaaaaaaaaattaaaaaataataagaaattaatctcacgacaactataaatcaaatataaataaattataaaacaacaaaaataaccaaaaaaataatcccataacaactataatacaaatataaataaaaaaaaagtagctaaaaatggcttattatttttagtgaagagatatttttgtaaataaaaaacttaaagcatactaatgaaaatttttctgggttaatgtacttttgtaattttattttaaatttttggtgaattgtataatttttttctaatcctaatattggtatgttaataaactaaataataaaatatttttagaaggttaaatattaaaagttattgattgaaccctttattttgttgaggacaaattagatcatgtatttttcaaaattgtaaaacgaattttttttttttagaataaaactt

SEQ ID NO: 313561 - DNA, 1235 bp, Cannabis indica
aatagagatgggataggagagtactctaggccaattctccttcccgtatgcatctctaattttgtaccatttatattatatgctggacccacaagtgagattatctcaaattaattaattctgaaattaatacattagcatttatttaaccatagcaagaatagaactctaagtcttaaattaattaattgattaattataacgaaaatgacgaaataattaaaactccatattgaataagaaaaaaaaaagtaaaataaaaatgaaaatcttctcaagcgtgtgaacataaacaaaaactcgtgcgagtgaatttaaagaaagctgaaatggcaaagaaagtcaaagaaagacactcaccctgaatttcgaagcattcggactcggtccgatccgagaacccgactgtgtaattcggatcatcgatggacctaagcatgtactgcttcttgccggccgattcgttgggaacgatacaagcttgtagctcagtgaactcatcccggccacggcgaactcgtacatgaattgaagtatctttcgccctaaaagagttgtggagaatcttctggactccactccgaccattcttgaagggggcttttacggtgattgaggttccgattcgaagctcctcaactatgtcgccggtctggagcatatcatcggtccattcatcggccttggaggtccctttgaggcactcgatcgataacaccgtcggtgattttgagtctctgtttggtgagtctgatgatgatgagttggtctgcgatcgatccatggtcattttggaactctgcaattacacatctatatacatataaatactgtacatatatacatgaaaatgaaagaaaaggtatatatatagtatatagatatagtactgttatatgttgaaggcaggggactattttattctacaattctagagagagaaatgtgaaagggtttagccaagatagagagagagagaaatatttcaaaggttgggtgggtataacattctcattgttacagagaaagtcaacatttttttaatagattgtaatttctcaagctctctaaatcattagagcattcctattagacatttatgtgattaacattatacacttattgttttataattggttaaggatatattttaaagattattatattaaattataagttaattaagatttttgcttcctctttaatatataccaaattatgatccctgaaatttt

SEQ ID NO: 313562 - DNA, 2497 bp, Cannabis indica
ttcttctttttctattcttcttcatttcttgtttgagatttgagattggggatttttttttgtcttgttttgtatttgatattaattttcagtgtcattttagtttgtatttgaatctgaatttgagattgattgaaataaattgcggttgtttttgtggtggtcgatggcggtgccgttaatagttggtggtgggctcactagcctgtaatggtgatagtagcgtcaaagaaaaaaaaagtttgatattgattttttttaaactattgagaagatgattttctctttgtttcatatatgatttatgactttgtgaatgaatgggtgcttttacgaatgggtgtcttgcgaacggtaaatggttgtcttggtctgtgaataatctttgtaaatagaatgaatttaaggtgtttgttaaagttaacttgtttttgagcatattctgttaaatagataccaaactgttaaaagataaaataaaaaacgttacttagttattttatataataggtaagatataaaaataaattagatgcgcatttattttggacggcaagcaagttgaagagtgacacgatgtaactaacgatatttttccaattgctaaagtaactaatgtttaacataacactcaagagtaattggtgtaatatatattgagatcattttatgaaaaaacaaatatgacaccaatagtaattgagaattgctaaacgcagcaccattatatagaatggttaaaaggaattatttgtgtaatatcatatcaaactagtaaacaatccgtgcttcgcagcggatgagaatataatactaaataataacttactaattcttaatataattactttaaaatatataaaaaggtaatactaaatttttatttctacctctttttaattagctcaaatataagataaataaattaataatagttagaatatttgttcaatcttctaaaagtgcattgctagagtagaatttgtaaaattgtaggctcctcattgtcgtgaatcttagcttatcaagagtgtctaagcttttaaccgccaaagtgatagtctttctggtaaaggttttgataaaaatttgcatttaaaattttaaaattaaaacaaaatctcatcacaattttataaaagaaactataattcaaatcaaggaaaaatattattttcaaaaaataaatttgtagaatttaaaagaaaaaatagacgaaataaaaaaatgtatgaaatctaagaagatcattgatacaatatgaagccctaaaatgatataggaaacccaacattattcatacaaattttttcaataatatgaaattcaaaaatatgtaaaaaaaaaatgtaagatttttcaaaattattctgtagaatttaaaagtaaaatacaactttgacaaaaattaaaaatcttaaagttatatgaaactgatatatacaattcatttaattatctgtcgaaggctttctttgcgatagattataccaagactcagtaaaagagatatctaaatacagagaagcgttgttattgtaaatatgacccttggttataggatttttcatgtactgaaaaaaaaaattaataataatatatagtaccgaaattctctcacacagaaacaaaaaatatatatatatatatatatatataaacatatattaagatgctttcagtgtatacatataaagatatatacactgaaatctcttaaactgacattaaagagtaagctagcttccaacaatgaaccatttataataatttaaagaaaaaagaaaaaaaaatgtataggatttaagctatatatttggtagtatgatatctcaatcaagggtacatagtattaaaattaaattgattgcttaagttttattgttcattatttcaagtaacaattaacttgctataaattactattggaaaaaaacatataatagtagcaaagagagattaagagaagagagagctcataaatattatttattttttttttttgaaaatttagcagagtacttcattagaaagaaacaagtctagacctctcggtcattacaaagcagattctccggcaagtcggacactggaatacaaccaaatatctggtgggtaaacgcccacttagccacattatgggccgcatagttacaaagtctactaatattcttaaagttacaactaataaaagaggagaggatctcaaacgaaaggaggcatagttctcaagtgcccaatgggactccttcccattgggaacattgatagctagtctcaagtcactctcaataataataaacttaaaccctaagtcaatagccagagaaatggctgaacaacaagtccctgcttctccgcacaaagcattcgaaaagtccaactgagtcgtatggatccaaatcaccttacccagatggttcctagcaacaacgactgtacacatgcttgccaatcccactctaacatcacaatttagtttgatccaatcctcagg

SEQ ID NO: 313563 - DNA, 847 bp, Cannabis indica
taataacaataataataaaaatacataccgaagtagaaatcgtcttcttcccgtctgttgcgcgaataaggcatcgaaattcgaggatttctccagaagatttcatcttattcttttgcacatgagatttcaaaggtgctaaaaacaaaaacccacatacgtaaatgcaatttacaaagggggaagaaaaaaaagcaaatgatatatgaatttggctataatcacaaacacacatggataaagagtatatacatcgtttaagggtgacccaaacagaaccaatgtcggtgcttcgctcgaacatgctagtaagctcattgagaaaaggatctaacagcaatagaaccttgaacgaaacgaacaaaaattgtaaacagtttcagaaaacttattataattttttgatcgaccataaagaaaaacttatataaagaagaagaacagaaaaacgattatgctatatgagtagagaaggataccatggcgttgttcagttcaatgcgattgggatctgtaattctcaatcagatctcttgagctactcttcttcttcgccaagtttcggagttagccaagcctactacatgaacgaatttagagaaacgtattagtacggccctcaaaagaaaccctttgggtttgggccctattatttctttttgggtttgggcctattattaaatagttgatgggaaatttaagggaaacttacaaaaatactggaatttgggttaacttctacaaaaatactgccacacggaaatctttgcaaaaatactgtatctttataaaacaccagtaaaacacaaaacagaataactcaaaacaacagtagaacactagtaaa

SEQ ID NO: 313564 - DNA, 1453 bp, Cannabis indica
tttaatttaaggtttttttttttcttttctttatattttaagttatatgaattaatagtcctttatgcccccaaaagccttctcttggacgtattcaaaacttctatgtacgacaggtccttatcataccgaatgatccatcgcatcacacaccaccactacccacaaactaaaaacagttgactttcaaaaaattagtgttgactcggtttcattgactttgtcctctgcaaactctcccaatcccaaagattagaaactccaaagcagtttcctctctttgctttatatatatatactcctttgtcaaacccaaacagagtttaaaatttcatatatttaatttagagaagaacaaaatgcagtacagaggcgtagagattaccataatctcagccaaagatctgaaaagagtaaaacacttgaccaaaatggacgtgtacgtcgtcgtttcgctctctgggggtccagagatggaacagaagacaccagtggacaaagcaagtgggcccaatccaaattggaactacccaatgaatttcaacatcgacgaagaagaggcccataagggacgtttggccctaaaattcgaggttaaatgccaccgcagacttcacagcgataaagatattggagaagtcaacgttccggtcaaagagctcttggataacggcggtgacggcaagttcatcaaatacgtcacttaccagcttcgcaaaccaaacggcaagcacagaggtcagctcaacttgtcttacaagttcgctaatcaagtcctcgaaacgacgtcgtccaccaaggttcatgatactgtttatcaagttccggctttagtaacggcttactaccccgttaattacgctgccaccaatttgaacttgcctaagtcggacccttctgttggatatccaatccagggtgggaatccagtatttcagaattcgggttcgggttcgggttcgggttcaagatcgggattgggttatacggagtatcataatccgatgtttgtttacggcagctcagaatttgttcagccacataataaggctgagaatccggaagtggatgcctgcttttttcaatagttattatgatgatggggttggtagttaatgctaatttccttcgtattatgcttcgtttgatttttatgatgtttttatttcctcgaaaaaatgtgaatagattttttgtcaagaagatttgattaaccttcctattatttatggtttttgtttaattaactaatgctatatagtaaaagggcttttttttgtagatggtattcaaaataatttctttacggggaatatgattgtttggaaaaacgtgtaaactttatttagttgtgtaagaattttatatattattttaaaaaattaaaataaaatatttttttattatatgtagttaaatttttttattagatatgtagttaatgttaattata

SEQ ID NO: 313565 - DNA, 677 bp, Cannabis indica
catattttatttttctaattaattatctaattagtaaaagaaataaattaatatatatacacacacatatacatacatatacatgaattaggggccagcctttggctgtttatggtggtggcgtcgagtggtggtcgtcgaccaccttggtcgactggggaaggaggtcgctggtgcatcaccgacgatggtggtggagttcacagagccaggctttgtttgtgactcaaataggtcgacagaatcgattgctcctccaaggagctcatggatcacggtggtccttccaccactttcgtcgaccatgggccaagagggccaatcgattgcttttactctggctacgggaccatggggtccctacggttgctttggtgcaaacccgagcccgactttgagtcctcctccttttctccacgtgcatggggctgcatgggtcacatgcacgcatgaaaatcatgtgcttagaccctcttgagcctcatgtcttgcaactgcaacccatcggggatcgtggctcgttattcaaggttcaaaacttgtcatctcgataaaactggggtttactccttaaacccgagctcactcatcattaaaggtattgtggattgttgaagttttaattcttgacaaaaatttacaaataaatttaaaataaaattgttgggttttatgcc

SEQ ID NO: 313566 - DNA, 1536 bp, Cannabis indica
aatcccagcatcatgaccccaaattctaggcgacatggtctcattgggacaaatggggtgctaggattcccatttcatttctcttctatgacaatattggctctcaggtcaaagctccagaaaaagaaggcaccattttcttacaggttatcttcttcttttaaattattattgttactcaatggatttttttgaagaggttcatgctaagaaaattgagggaatttcctatcacaaaagatgaaattcttgaagttggtatttcattaggtgttcctcatttttttctaggcctatatgtggacattacaggaatcgtaaaaggaaaggtccatttgatttaccataactattttgaaattatacgaatactataatattaaatctttgtatttgttatcaaaaattttatactttgttgtacttttgttattgtgaagatcaacatttcttattgggtgcatcattttctggtcgaagcactggtactgacggtcagagggatgctcttggaaaagtttccacaagtttttattttacagcctcatttatagtactgaaatgtatcaacacaagttcttggccacgtgagtttcaaccttcaattttaattgaaaattgtaatttcaaggttttacaaatggttctcaaaggtacattgaactgatttttccttttgaaagattactgaataatgcttatcaataaggtaattttttaatagagtactcatatgtgaatttagattatggtcggaatatatatcatatctatccactggaaaaaatagagggaaaggaaagagggttaatacaatttcacagatgaagttgcaaggtgataaaattagaagaaaggggatctctctttagctattgaggtatgtcattaattatttaatataattgttgtttgttttctatatatattgagatacaaagctctctcactatatgttggtatttttaattagagtaaatagtatgccttcctctaagctttgacataataacatgcatgttgcttggttgtaatgtatatagaatacgattactttactatataacttattgtttctatgctttttctttctctataatctacatagattagatattatttttaccatgttcaatttctttcttttttattttttatttaattgatgtgtaattttactgatttttctaataattgagaatagttatttctaatcattttactgcattttattcttattcattttatacactaaacatttttttttgacatcttcttcaggtgaagtggagtgaagtttcaactccctaaagatacacttgatattgtgttgatgtcaatgacttacattaactttccttttgatttgtttcttccaaaaagaaatctttttggtcgtagacatgctttttggatagattttatgtataatgatagtgatgataaaatttagttcttgtttgttatgtttagtgtatctttgtagtttaacatatttgcataaagaaacatgtcatggtatttgatttaaaggaa

SEQ ID NO: 313567 - DNA, 737 bp, Cannabis indica
agactataaattaccttagtaaacttgctattgcataaaaattgataatataaagataatcatattaggccataatcaatagatacaattgaaatcgacagccctaactttaatcattgttattttctttattaacttacttgcttcttactttcgctatttttcttgttttaaattttctctcaaatttttattcaaccaaatagaagtaaaagtttaattttaaagtacacttaactacaatccctgtgggatcgacctcactcatagtgagtctactacttgttacgacacgtacacttgcgtgttgaaactaccacaacaagcactttgttttgccaaactcgctcatttataacattccagatagcctagcaaaaagccaccaacaatctcttctgatccaaattaagcaagaggaagactgcaacacaccagtctaagaaggtggaattcagttacatacttattccaatacccacaagatcctaacactgtttagcaactgaacaagtaatcaacacatgaacaattatttcatattctagagaaaaaataggacaaaaagtacccacctccactcgctttgagcgaagttgagtcatggtaggaaggcacccttttccagctctcttatgcaagtttttcattttttgggggagttttaatttccaaaaggacttccaaaactgatctacggtgggattatccaaagtaacaactgttgggttttatgc

SEQ ID NO: 313568 - DNA, 1645 bp, Cannabis indica
agaatattttaaaatacttttttttgtgcattatagggtcttccagctcatcatcctcatttttatcttatttatatgatgactcaagacacaactacaaatttagaatataaaagttggttagtatgtcttgtctttttgacatggtgagaaggttttgttgattatttttttctgtcaagtattttggaggaagtatgtctacgtcgtacgattcagtagattctgttcgagatcaattttcgatcattccgttagatgaggaagaagaggcggcagtccagtatgaacaaccattggtagaggatgcagagattgacacgagatggagccttgttggacgattcttaacagaagctccgatcgactttatggcgatgcagaatttaatggcagttctttggaaaccagggatgggtatgtaagtgaaagatttgggggaaaataaatatatatttcagttctatcatgagatagatgttcagcgagttgttgatcgaagtccatggacattcaaaaatgcacctctgatttttgagagactaaaaccaggcgacgttcctagggcagtacgactacaccatctcgaaatctgggtgcagctacacgatattaagtcgggttttaaaactgaaaagctggtgacggatgcgggaaattacattggcagctttgtgaagtccgatgaaaaaaattttaacggagtttggagagattatttgcgggtgcgggttcggatagatattgagaagccattgaagcggagaatgaagctccaacaaatcggtggggactggttttggatcaattttaggtatgaatttgtacctaccttttgctttatttgtggtattattggtcatacagagcaatattgttctcgtctttttattcaacctatatccaccattgttaagccatatggtaccttcatgaaagctgttcctcgtcgaacacagtatgctatgggggcgaagtggttgagatcgggctcttctagctctggagttcagggaggtccggcgccggtggtgggaggagggagttatgggggagatgctgttccaagtaatcagggattacatggaaattttgttcctagtttctcgggtacaggggtgaatgaagggttaattgatgttaatgggagaaatatgggggatcgggttggtgtgatagctgggagtaatgagggagtaaatatatatgatatggggaatagacaggtggcggctaaggagggaataaatatatgtgatatggggaatacacatgtggcgactgatataattgaaaatgaggagggattgctttttttagataataaaaggaaaagattgggtaaagaagaggttaatgggccgattgggcctactgatgggttgggcatggttaataggccaagtgggcctatggagggattggttatggaaatggggtttgataaaagtgctcactcaaaaaacgatttaacggcgggctcgaaggatcgggctcgccaatcattatgagtactttaagttggaattgccatgggcttgggaacccagggacggttcaattccttaaagatgttgtttgtcaaaagaaacccacttttatttttttgtgtgaaactttgtgttctaaaccaagattggagctt

SEQ ID NO: 313569 - DNA, 2094 bp, Cannabis indica
aatttacgggtttgagtttctaaagtggttatagcgctagttgcaataggggtttctatatgattttttgttgcgatttaaattacagtgctagttgcaatagaaaattctatataaaatttcgtaaaaatacaaaaaaaaaaatgtttagaagtataaagtttaagaaaaaaaaaccctataaaaagccagttatgaaattctcaccacaattttgaggtgcctgactcctcaatttattttagcttttagattgaatgataaaagtataattttttaatcctacgggtaaatgttactctaaaagcaaggttactattttttcctgtgaaaactggaagcctagtaaatttaaagttattgttgtactattttacattaaattaattgttaaaatggtcgaactatttcattgtattaacattggtatttttctattgtcgtgtttaatttataaaagaacatacatatattaatgttttgtttattgttttaaacaaaagttttttttcctaattaataagtgtcatttactttttgtcttattgaatattttttctcaaagaaagaaaataatttaataatttttacttatactaagtgtgactattttctctcaaaaaataaaaaaagtgactatttaacaaaaattattggcttaacgatttatttttatttttccgttaaagttaataattaaaactaacaccgttaaatcaatcaattaattattattattattttgaaaaaaaaagaataattttaaatatcaccatttaatttatttattcaaatataactaagacacttatttaaaattatctacaaaattaaataattatttttatataaatcttaatttaaatttaaattatatgctaatttaattaattaatcataatttataacaaatttattagttatattgtttaaaatatttactatgctaatttttgcctacatgacgtggtaaaacatcaattggccttataaagaatgttacagagagcaattggcttgagatctcccatactgactggattttttttctttggaatgaggacaaggttagtatcattaagcccctgaggaatggagttagagttgaaaaaaagttgaaccacatcaactacatctgatccaacaactgaccaaaatttttggtagaaagcagacgtcataccatcgggtccaggagctttatcgggatgcatatcgaaaagagttgccttcacctcatccataataaccgattccattaagacagtgttttgagattgagtaatagagggtgtgatacaatcaactatcacatgcaagtccaccaaagaagcttggaaaatattagaataacagtcaaaaatatcctgatgcaagtcgttgtcccaatcagtcagttcccttgatcatctttaagcttttgaattgtgttgttgttccttctttttgctatagaagcgtggaaatacttgttgttacggtcaccatctttaagccaaagctgcttcaatctctgtctccaatacacctccttttgatggaaaatattagccagtttcgttttttcctcagagaataaagagcacaaatgagcatctcttaactttttgagtcttttcaaggtagattttgattacgctattctacctttaaaatcccctgtaattgtatcccctcacttagccaatatttcactacaataagccactttttcctgaacagagcttccatttttggcttcccaactgtctttaacaagttgaaaacacaccggttctaacaaccaggctgtaaagaccgcatatgattaataccttgaattattaaataaattagggtttatgaatgagattaaattaataattatgaaatgcatattttggaaatatatttattatcatatatgttattatgctattttatgtaaattactcaatttctgtgattgtgttcggaagcggtggaaagcgacgttgggcctttagagagtcgcgtttatatgtttaaattattatcggggtatcattgttagataatagaggcgttagaattttcggggtttttttaattgaccattttacccttggtttgttt

SEQ ID NO: 313570 - DNA, 665 bp, Cannabis indica
aaacattattataaacacaaatatcaaatatgaattttgataaaaacacacataatcccagttgggtataaaccctatttaatatttatccaaaggggtaacaatagcataacattattagttttgttaagctaaaagagtgggttttgattagttagggttttgttaattatgattggcatggtttgactaccatattgtacgttcaaagcaagctcagatcagagtgttttactcattgcgtagcactacagattcaatcttgggaaaagcaacttcaatttgacactaaacatactttttttttggccacactacataaaaattatttggaattggtacttggaacacacattagggtacttttagaatttatttatgaaaagttagtaaaaagagagtttttttttgtttttgttaatatatgttttaatataaaccccttattttgtttgtcattataagtgtatttgtatttctaacaactctagtgggtggcttacaatgacatcttgccttgaagtttgtgggtctcctttggccatgaaattttcagtttcagttacatggtcactctcagtctcatgtcatttgcattttacattttttttttcaaaataaaaatttactcatttgttacataaggttcatctacatagtttgaa

SEQ ID NO: 313571 - DNA, 564 bp, Cannabis indica
tatgccatgactttaatatgaaaaattaattggtttttaatttgtcccaccatctaccaaatgaatgaattattaagattcattttttctttgttctcattacatatgttcaaatggaaatagaaaatcaatattgctaacatataattatggccgaccctaaaagtttttgggtctttggaaaaaattaattcttggtcccttttgttcttaccaaagaattttgtgtattttttaaaagaaaatttgtttttgaaatctcagtagatcttatgtgtaggtctgactcgccttactccagactaattatactttataatgtgtgcacactatctaacttaggatttagcacaaggaaataattttttttaataaaataatataatatatttaaaatttattcaaatatttatttttataatattaaatataatataaagctattacataaaaataaaaagtttgtcttgaatgaatgtgaagtggtcgagatcgataatatagttggcacgataagagtggttattgttttaagggataattacataagatactattttttgt

SEQ ID NO: 313572 - DNA, 1047 bp, Cannabis indica
agttattacatataattgtaataaaatatgataattatagacatagcattaactttggtgtaatgattaagctaaattgtatatataataaaagtcaaaagttcaaatcccacaaaaatcactttttttcttctttttaagtttacttttggcccatgcctttaaaaaaaaaaattacgttccctcactttaaatcctaagtccatgtctttttaagctaaatggggtctgaattatgtttactggtgttgattttgtggtaattaagcagccataggttagttgaagctaagtttgagtttttgaactcaaacttagctcaacaataagaacttttaattcaggggttcgatgatgctatttttggataaattattatcattatgctctaattaggtattcttgaaagtttaattggatttgggatagaattgtagtagaaaagtagagtattaggatttctgcactaaaacagtccaacatttttatagaaactgtgaactatttccccaagtagaactctaaaaaatagtaaaccgcttggggatttggttatccagttggggtgatttcgagtaactcaatttttgcattttatcgatatttagggaattgtcatactatttatcgatagagaaatttctagttttgagtttaagtccccagaagtgttatagcaagacacttaccagttttacctaattatgacctagggccactaatcgtcgagcaacaattttcacttaggttggccaaccttcctaattgcggagttgaggaaagattagtataacacatgcacatttgcacatgttagcatacatgtttatatttaccaattagatagcatatcagtgagagggatattggtgtacataaagttgcacctgaatacaaacgtgatatattttggcaatttagaagtatgaattgatgctatcacatcagtacgactacagtgctaagtataagttggtattattgtcaattatatttatagtatggattgatgttatcacatcagtacgactagagtgttgagtatag

SEQ ID NO: 313573 - DNA, 1623 bp, Cannabis indica
gcctaaatttaagattggaatagagcctctaaaatatttaagagactctgattatacatgatcatgcatcataaatcactaacaattataaaataaaataaataataatttatatatataaaaatgtactctctctcccatttaaacttttcaaccctagtctatatattaggctaaattaaaacacaagtaaaaacttttagtcaaacaaaacactaggatgtacggacatacatattatttacaatctataaagttaagctaaggagattaactaacttgaactaataattaataagccttcatcacattgggattggtaaatttctaattattctcatccaaaagaaaattctaaaagttgactttctctcttctctccttaataatatatatatttacataagtcaataatactaagaaattaaaataatagagtaaaagaaacaatatatcaaataaattaagtgtgtaaatcatgtgaaaaagcttcatgaaatccatggttgatgccctaaccccatctcacccacaaaaatttggtaacatagttttatatatatattaattttaacaaacaaataaataaataataagttgcaaatatatttagattaaatgcaattataaatgcaaattgaccctagtgtttattcattaacatgcaattgttaaatctaactaatactagctaactatagagattattagagctaactatattttttttcttgacttaaaatgattgatcctaatcttctaccaataatccaatgctatcaacggttaagtgttacctaataaacctatatttttaattaataaaagttagctagctatttttcttaattaaattgacatcattatattaatcacatcccttagaatagctacaaaagtacaaccaccaatcaagatatatacatatatatatatatgtataatgtagtaattaatcaattcaacacatcattgattttgattgttattctcctttaataatgttctttttacaatgttacaatacttaagaacaaattggcaattttattcaagtatttatgtacatttatttatatatatatattggttattgaagatgggtcatggaaccaaaaagaaaaaaattgtccactatgatataatttaatattttctttccttcttgataatttatttcttaacgagagaaaaatccaatacaaagattagataacaacaatatttatattaattgaaaaaaagagagaaaagaataagaataagaataagtgtgatgatgatgattattaagggttctaagttttgccaatcacctaacaattaaaatgacataattaattgcatagctttaatagataagtgcacaaaagttaatgataacccagttgttatgttgaccttttttccatatatgtcccacttttttttttttgtttttgtttttgcatagccctttaatacactattttcacttcatgaagttacgatgtacttttaatatttgactattaatttaattccatgttttacttaatagaaatgttaaaaaataaatagtagtgttaattaatactttttttttttgtttgtattattattattattggtccaattaagtat

SEQ ID NO: 313574 - DNA, 726 bp, Cannabis indica
gattggataataagtttataaaaatatggcatatcaaataccataaaaaatcttaaatgtgaaaaaataccatagaagagtgccaaaccttaaaatgccatatttttctaactttgttatgaaatcccatatttcatgtaattttcacaaaaattaaagtaaatggctaatagtatatcacttaaaaaaaatgagaacatgcaaaaacatataaacttgattgaatatgagcatgggagttgaatatgagcatgggagtttaatattggtacacgtttcaaaactataaccgcatttcatgaataaaatttgcagcggtaattatacaaataatttaataattacgttggcgagcgtaattttctcaaaaaataatcgactttttttttaaaaaaaaaaaatacaagaagaaataacattcaatatggtatttcaaaatttgatgaaattacatagtatacttactttatattacttattttaatttttacctcgtatttttatattctttgagatatacccatttttatagatgatgtcacaattacaccctttaagttaatgtaaattatatgctagacttgtagagagtagtagtatattagacaactcactcatatggtatattttaataaaatagaatattaaagtatttttgattaatggatattaaaattaaaaaaagtatttttcaatttatcccttaaaattttgtttgaaaaatat

SEQ ID NO: 313575 - DNA, 1162 bp, Cannabis indica
ataatttccaacaataattttgtctatctttatctattcgctttctttcattttgcatcattatcttcagttccatttcaacctttctttgttctcgttcatttgactcttccattatttgcagtttcctttcttcagcacgagctttttttttagcttcagtagatttcttattaaattcagacatcaaatcacataaatgagcacttgccatttcaaatacttttttttttatttagcgattctttcttagattttttcccaagaggtcttttgatacttgagtcattgatatgatttccagattgtagctgattggagtcttgaggattagaaatgtctggaattcgatcattaggaacaatgtacaaatcattatttttgtatcattcttttgcctttgtacaactaaatcatgccatttcactccttctttcaacactttcgagcaatgttcaaatgtaaatttcttattctccatctcaatatatagcaattttgcgtgaagaacgtacaaaatcaaactgcgtattagaattggcatgcaaataaataaaaataaaaaaattaaaatcttattatatcaatagcactcactccaaattgatgtctattttctatttgtgtgagatatctacaaaatttgttacaacatctcacaattgcccccccaacgacatcgaagagagtcttttgttcgtgtgctttgaatagtggagttctccaagactctttcccaaaatcgttgtgaagtctgtaagtttccaataatcggatctcgagtgatgaccaagcaagcattgttgagagtcacatcttgattattcaaaaattattttccacgtttagaagtatttaggttttcttccattaatttgtatgtctatattatttccttaggcaggctctgtttctcaaatatgagggaatgaatgaataaatggaaagtaaattgtattgtaattaaaaagaagattaattaggatttttgtcccctgaactttgacatgtaccaaattatgctccctgaacttttaagatcattaaaaatgccctctgaactattgagattgttggatttaaggacttttgtctaatttcattcaattttactattcagtgattgtttatatactaaaccatgctccccagactttgatat

SEQ ID NO: 313576 - DNA, 581 bp, Cannabis indica
aaatgccgttagatagacacttttaatatataaagatattgatatacttatttagttacaaccaaacaaaaacattgaattcaaatttaaaaaataaagtataaggacatcataatattgtataaccattgaaatttcatttaagtgtttcttaaaaattgtctctaaccgatatatgctaaaaaaattaagaataataattatttaaaggagcaaactaagtgtagaatctcaaaataccataatacatcgaacaaaaaatattaagtaccaaaaccaatccaaaaaactgtgtatatttcttttgaaaatttgaataatatagttataaaaagctaaataacatagatacatgtaaaattatttatagatagagaataagaaaaagattgtacaatcatatttaattgatagaaatttatatatacaaaaatgactaatatatatgggcaagattatggtaggactcaacaaaagttccctaccggtagggtactttttttaactatcaattttaaatcgtgtggttattattgtttaagatatatatttttatcatacacttaatgtatacaataaaa

SEQ ID NO: 313577 - DNA, 1386 bp, Cannabis indica
cggggcgtttctcagttttgtggtgagagtaggactttacactaatttgataaatgtgacctaataaaatgctctcatgactttgagctactccattttggctttttttacgcattttttcttttctttattcaaccttgattgatcatgtcaaaaataagaataacgggaataaacttcctcagaaatttactattatcatttctctttccacactcatcaatcacatactacccttttttcttctcttttgagttctttctttctgtagagtcaccaatattatcctatgtaaatgaattcatgtcaccaatttacactggagctctaataatattttattctagaggaatatatatttgatgctactattaatgggaagactgttatttaagaatatcttccaatgaaaaataatacacttatccatcccaagagcatgaccagcagcataacctactaatatatagttgttctatatacatgatttacatcaacccttagaaagttagatagcagagaggaaatatcatgaattatctatatcataaaaaactaaagcagaatgctgcataatttggcaaccatcaaagcatctacctctatggaattcggaaacaagccatggtgatgatctatcactatcaaccagttaagtgaatctaacaaagacaacgcttctgtaaaatcgatttaatcggatgctattaattgaaataatgacattcaatcaaataatataaaacttagtagtattactataaatttgcaaggattatcaaaagctaaaatgcagaaagtaaatcaaaatgaacaccacaaatttacaagtttcacctcccttagaaacacattctaggcggctagtgcttgagttttccgaatcaaggtaaataactttcaataagaatcaatgtcaagatacaaacttcagtttgtaaatcaaatgtatgtaaaacaatacaacaaagattcttataataatttaatctaagatcttgattaaccaaccaagattcaaatctaagtccccttagatttgaagacaagctccccttgcttcaattgagctgaaattccttcagctatgactctgaactctcttcagatgaagcagcctccattatcacttcatcatagaagcttgaactctttaacaatggaggaacctgcaagaaacaaagaaaaagaagaaaaagatttatgccttataacagagaaaaacctctatcaaataatcaaaatgagtaggagttggttagaatattgaagaatcagctatgtataacaccaactcactcaaaattgactttgacagctcactaactgttggattatttattttaccaggatcttagatctactcacaagtatgttgtttaaaca

SEQ ID NO: 313578 - DNA, 1020 bp, Cannabis indica
aattttaatccctaatataatatgcatataatttcaaatttccctattataattgctgggaaaaataataatcgtttaagggtagcaaaataataaatatattaagcaaagaaatttaactaggtttgataaacttaccaaatctataaagagatcgatataatttacttataactcaaaattatatatttattatcttaggatctcttcatctaaatctcaatacactctttgtttcttccatattctcacaacactacaaactcacactaaatttttttttcacaattcactcctcttctcacacatacaccattctctcacacacacctctctcacacatacaatataacattattgacgcgcttttttgtctgatctaagaaaatcgtaaaaataaagaggattgcaatggattagtttgactaaataaagatgcaataaaataaaatagtcaccagagatttatactagtttatccccatgtcgcgatgataatagggctacgtttaattttgcttttactaattagatctgacacaccagaattatgttctaaaatatgtgtagataataatacaaaagaagtgcatgagatttgatcaccattttttggtagtagtataatatgccattagagcaattaagtaatatagagctattacaccagggccttcttaaaatgtgttgtgtaaattgtaatatttttgttagttttaatgaatctctgatttaacttggcgacttctttgagatttggtgaaatctaaatttaactatattgttaggattaaactcacttaacttgtcaaatcagtatgtccatctatatgctcatcttagatgaatttgaagaaagctgctactagttataacaattggttttaataccaacttaaaagggaccccaccaacaattttaaataggggttcctttattctcaaagagggagttctgagttttgatatctaatctccaaagctcatactttagatttagtttagagagagagagagaga

SEQ ID NO: 313579 - DNA, 620 bp, Cannabis indica
atacttgtgagtagatctaagttcctggtaaaataacttccaacacttgtctgtgtcacagacaagactatcttcttcatgttcatagtatacatgttgtctcagaatcctctcactacgatgatgtaccgaggtttcctttttaggaaccatggtaaccgttgtcagtcgttcaactaatggtgttgaaatcgatggtttagaagtctactcatttctaatttcctcaagtttcctttgaatatcctacaaacataaacatttcaattttgagagcaagtttcccattcttgggtttaagaacataagcaagacaaccctaaatacgaaaatgtttcaaattagattttgtcacattccataattctattggagtattgcttattctcttcgagggtgctacattcaaaacataagtagccactagaagtgtgtatccccataagtttagtgggagtgatgagtaacacatcattgatctgaccatgtctaacaaggtccggtttcttctctttgcaacacggttctgttgggttttgtgccccaaataaaactcatttcaatataatcagatttacttattaataaagacctgaaataacattttatgttgcatggtt

SEQ ID NO: 313580 - DNA, 1355 bp, Cannabis indica
ttcatctccattggaaacttttcagagagaatgagaagaacaaaagaagaagagagagagaggagagagagaccttagctggaaagacaacataaaagaaagaaagataaactaaatttttggaagacagaaccaactgtcacaacattccattatattattttattaataattattttaataatatattattataataaacactcttcaaatcttgatattaaattactttgtttataataattaatgttgaaataatactttttgtattaataaaattctatgctttaaatttaggccaagattaaaatataattgaggatcattgaccttatacattgaaatggtttagaaagaataaatgcaaatagatatccaagattttattaaataaataattaataataaattaataaatgaattgtgaaagagtgggtggccatgtcattgatagagaatcaatcaacaacaaaagcaagctcaccaatataaaaagttgcatctttttaaatatatttcttttcttctatcttttctccttaaaaaaagtggtttttttttaataaattattttaacttttggtttaatgaatttatttttagggtaaatactattttatattatattttgtaaaaattattaatcggaccatctgttttgttaaataataaaataaattatgtattttttaaaatagtataaattttgaactgattttttttgtcaaaataaaatttaataataatcctatttagagatgttattataaaactggttatatttttttatatttgttcgtattagaaattatttttatgttagttatattaaaaaataaaattatcgaaaattgaattcaaggtctattttgtcctttaataaaataaatttaattagtaatttttgtaaaacacaaagttcaaaataatatgtattgttgtggatgtgagttatcattcttttattagtaagtgcaattgaatttattatttatataaattttgtgttttaaataataattgaaaaaagacaaataacttgtcatatcatttgtattaacacattggtatagaataattgagataatatctctaggaggactccataataaatgctataaatttgaagaaaatacaactttatcaaaaatataatatacaacagatattctattttacataattttttacaatacatagtattgttctacatgtggagccaaacaatgttctaaatttattttaggctaattaggatttttgccatgtaccaaattatgttctctaaatttttaaggtcgttaaaaatactccatgaactattgagattgttggatttaagaacttttgtctaa

SEQ ID NO: 313581 - DNA, 939 bp, Cannabis indica
agtatttttgtaaaaatttctgtatgatagtaaaattataatcttttatcaaaaattcaatatttttgtataatatacaaagggggatttcattaggatctgagaaaaaattgacacacctattttttaaaataaggtgaggcgagcaaggcatgcgctttgagtccccaaacgctcaaggtcccgaacttatgaaaaaatattattagtatatacattaaatattagataataagataatatattaaatgggcccaagtaaacatttaatcgttgaaaagaatgggcctttacatcacatagagctatttatatgggagaagttgaagagtataactttttttaaatacatattaactaaatttaacttcaaataaaatttaattcaaatatacctatttttacaagtattatatctatattattctcacactgtcacataattaagacataatttcaaacataataaatttgtattctttagagatggaggtgtaggtttgtaggataattgggacaaaattttaattacagaagaatggagactatcataaagtgataggagtaaaattagtagaatgattggaaaaaaggtaaacataataaattttgaaagagggggtaaaagttaaaggcatcaatttaaaagaaatatgtagtgtaatttttttttataggggcttatatatgtatccatatatattttggaccgtgagtttaagtgggttctaaattcgggcctattctgtcttagttcaaggccatatatggtggtggtgtaattttttcttagaaatatatagtgaaaattacatgaaatatgggatttcataacaaagttagaaaaatatggcatttttaggtttgccactcttctatggcattttttcacatttaagattttttatggtatttgatatgccatatttttataaactt

SEQ ID NO: 313582 - DNA, 1737 bp, Cannabis indica
aagactgtgaagaatccaaacaacaagaaggagaatcgggctcatatcttggtgatctctgctacagaaatgatactattcttctcaatcaataataacagattgcattttataattcctcttctcttcttctctttctctcgattgcatctctttcatgactgcatcttcacagaaccaacgaatccacacgtagaaaatcttgcatagaataggtgataacaatcctattgacacgtggatcatcataggtgattttaattccatccttaccatggatgataagataggtggtaatcccaataaaggaccctctaacagtttaaaagaatttttagatcactttaacatgtcccctttggatccactcaaccccattttcacctggaataatcacaatgcgaataacaataacatctaggagcgcttagattggtgcattgctaatgcaccttggttcagtaatttcccccatgctagccttcaacacaaagatatttttttgcttagaacatcgagctttactgcttaactctgataacacactctcactgccctctcataataaaacaaacatttcctttttgaaaatgttaggttaagtgaaccgagttgggacaagacctttgaatcctctagggttgcccaacaaaattttccttgtgccatcactcgtctaattgccacccaattcacatgtggcaataggctcaatgattggaatcgcaaatcgggattccaattcaaaaatcgaatcaaccgcttggaaaaagatctcgaccttgccaagagtaaacggtagtgggatgaggacaatgtccacaaaattaaaacccttcagtcccatcataatagactcttactcaaagaagagacttactggaagcaaagagccagagcccaatggctctcgtaagggaatcgcaataccaaaattttccaccgcaccgcctcttcctcaaagaaaactaatcaaatccataaacttaataatgcttaaggtactcctgtaacttcctttgatgacattaccaaagagattgagcactattttgaaaatcttttcatgttttcaaaccccacttttgaagacatacgttacaccctggaaggcattactacatctctttctgttgaggacattcagatgctccaggaaacattcatgagagaagaagtggaaaaggctttctttcaacttccacttgataaagctctgagtatagatggttttaataccaatttctaccgtaagaattggtcatttgtcaagcatgacgtggtggatgcttttctccttgttcttaatgagggggagacataccccgcttaaccgtactctcattactctcattcctaagatcaagcaaccagccatgtcaaagatttcagacccattagcctttgtaatgtcacctacaaaatcatttcaaaaacaatagctaataggttaaaatctgtccccaataaataaatttctcccactcaaagtgccttcctccaagggcgtctcatttcggataatatccttgtggcctaggaaatcactcactccatcaaacttaagtctagtggtaaaactagtttgtgttggaattattttaccaggatcttagatctagtcacaagtatgtttattaacagagaaaggctcagtttttgtgaatcagaagtgtaattttcctgaagccttcactacctatttatagcattacactagggttaggtttgaattat

SEQ ID NO: 313583 - DNA, 775 bp, Cannabis indica
tcgttgtcgttggctaaaagtgaagtcaacagattggattttagttatcatgcagattggattaggttcaaaatatgaaatttgtacttagtagagatcgaatgcactataagaaaaatagtaaagaatatattggatgagcattggtattgagaatgatgaagaaaaaataaaaaactcttcaaaaaaataaacgaaattaataaaatagaggcaaaaaattaattggtaaaaattatcaaatgaaagtatgaaggactaaactcatgtaacttaataagagataggataatttaccaaacatcctagaataactttattgtgtaaattgattcttattgatttatattttgttgtgtatgaaaatataaatatgtacatgtgctttccattgtaataacgtgtgtgtactctttcaaactttatatgtgtactactaactagttcatgcattatttacataaatagtgtatttaaaataaataattaatttaatatttagaaaatttaaatacattgaacacttaactcgaactaagttgaagaatcaatatattatgaatatgtattattttctatttcattcatgattacataaataaaataattaattctatatctaattttcttaaatacattgaacattataatcttagaaaatattaattaatataatatgataaaattttgaaattgtcaaattaattgaaatggttaatttaatataaataaagaaaaaaaatattacttctaaaggattgaactcatgacgttt

SEQ ID NO: 313584 - DNA, 1634 bp, Cannabis indica
ttttacaatcagtatactccttttttctctaagatttttcgtcccttttgttttttataatttgcccctatttatagtaatatagattggcagttaattacatttaatcaaatccataacaatattccctgaaattgttggccttaattacgctccacttaaatacgtgcagttaatattagaaaataacacagctatgatttaaactgtttgtaaggatatcaatgctgacgtagattaggacacgcaaccaaatgtatctcgctgaggcgtctcacctagtacataagtgaattacttagtttacttgcattcaagaattggcatgagcaccagtgtactgagcaaacttaagaactattctttgaccataaggccttgcagactggacaatcatgtccttcaagttattacacttagttattatatattatacactaagtgttctaataaccaattcaatttgtcaatacctctttacatacagcgaggtagatgcctcgctatacgttgtctatgtctcccttgggattatgccttctgatgcgaaatagtttctggtcaatacgtgaatcaatagtttgtacatcctgatctcgcttaagattgtggagtcagcgagttataaatatactctatcaattctgcatttcacgacttattccattttgtatttaatgatataattactgttatacccgaaattcagccatcgtttcaaaggaggacacgtgtcaaactaagaagaacatggatcaatgcatgaaacagtaattatatttgaaaatggaataacgcattaaatacagaagtgacacagtatatttacaacctcctgactataaggtcttacgcgaataaagacatacaaactgttgcctcaagtattaacgagaaaccatacgacattggatgtgcaaggcgagacttcaacctctttacgtatgagtagacgtaagcaagatatgatgactgtgaaaatacttagcgtataatatacaaacgaagtttaacagtaaggtgaacccaaggaactaatagcaaggcgcctatctcgctataggaagacacgctcgatcagcttcagacatcttttactgaaatttatagtattgacgagtctgttctctctagcagaagctgacattcaaatgatgttaactgctgaagtactctttgttattaagaacttcaattatcaaaatgaagcgttgtaccttcaagtgaagaagtgacaaggcgtacattatcaacctcggagagataggagaaaaggctccagctcgctatcaaggtcattggtattgagttctcgtcgagacatcccagagcattgtgatttaaaacgtgtttaatacacgattatcttgactcagtaaagcgaattaatcacagctgtgtgatattcaaataataaccgcattatattacatgatatgtaatcaaaccccacggttttatgggataattgttgtaaagattacactgtaatttactgcctgactaggtaattataaatagaggcaggttagactgaaaaaggggatgaaaagaattcatgaaaaaaagaaaagcccaagaatagtattagaaatctgataagattgacttgtagactatgtagaattttaact

SEQ ID NO: 313585 - DNA, 1820 bp, Cannabis indica
ctatgaaggagacgatctactagatagggcgatcagatatggtttgatttggtcaacaccgtgtgctttgattatgggaaatcaatctgtgaattaattacttaatattctttctaggaagtttccctactaatcttgatatgatactatgtgtgatctcacagttggagttttcttatttatgcaatggaataaaaagggaaactagaaggtcttccaagaacatgctgtctcgtcccttcggtcacatggtatcgaacatgcttccagatactgctcatcgaaggggaaaagttttatgattgcagagccgagatacgtttttgaaaggacttattcaaatgggcttggcccactttacctttactatgggaaccgctgatgggccttggatgctgacctgcactccacgtgtccaatgctagaaatgcgaataacattcacccccaagcttctagaatgttgcgtatggtggaagctttcaccactacattaatatggacatgtggatgttcaaagataaaatcatgaatttttgagtgctattcgaccccaaaggggatgattttaagattcaacccatacttcttttgaaattatgttttcccataaacgcttagtgacgacctctctttgtactgccccatcagtcacggatatgtccagtgttgtctcaccaaaccactacttcagatcctacccaatacaccaattttataaaatcatttcttatgcccagaagaaggtcatatagaaccttgaggtgaagggaggatgtaccaaataacttgagaagtgtcaccacttttccctataaatatggaacaaatgtaatagaaaagggggagaaagaaagagagtgagaactcttgataggaaaaaaactctattataataacaatattacatagataaatccaagtgactcgtagactaaggtcaattaacacctaaactacgtaaaatactttttttacacataattaatctttgcttattaagataggtagttactcaaaatttcggtcacattaattattaaaaacttcatttctattttacattcatctcaaaatgataacaattgtgaataatattaactttcttttagctcataaaatataacttaatatatttttctcaaatttaatgcaataatttatagttatagtactcttacaatcagataattataccaaaaaaagtgaaagctcctccttgctaaaaaaacttaattgggctattatttttacattatcgataaagtaaatttaatatgaagtgaagagagggaaaacacacagcacaaaagcaacttgcaatgaaaaagttaaaaaaaaattattaaaatttgattaccctattgtaattttattataacatgtaaaagatatgaaacataataataataataataataataataataataataataataattgttattcgtacttttgtacgaatgacacatggcattttgaagaaagagattaacttaataatttccaaatagaaatcccctaatacaatcttgtcagagagaagcctattggaactaggaataggttgagatggaagagtacacggaagcctacttaactctaccttagcttcccaaacgcagaattaacatcctaaaaacgaattctctaagggtttaagaaaaccttacattgattgcaacggaatataatgacaccttccattcaagatctctatgttgggttttgtgccctaaataaaactctatttcaatgtaatcttttctattcaattattaataaagaaatagatttaatttcattacttgtttaatg

SEQ ID NO: 313586 - DNA, 1562 bp, Cannabis indica
aatagtttagtcatctaactttgaattatttgtttattattattatcattattattatggtaataatatttgtttgtttctgaacgaatgcttaaagtttttttttttcaaatagctgaaggtaataaaaattaataagtttcttcaattttacttttagatatgtctaatatttgagtttgtagttaaagaagtagtactttttaagggtcttgatggtgttgttagattacaaggtagtattggttcatgagattgtacaatgtcataaaggtagtttaattgtggtaaagttctaatacctctgttcatctatggtagtatatattatattatatgggtaggatttggtacttcataaatgttatctacatttttgaaagggtgacacgcgacattcacaactgtaaagttaatgggttaggatctagtaaaatgatctaccaccggggaggcccaacccatacggaaggatgggtccaagcccatcttaggcccataggacatgccttgaagacaagatttatcttaatccagaagagcctcctacgttcctaagaagaagagatcaaagccctccgggtgagcatttgggatactctggggatggtgtaccaagaggcacctcagagatcttgtacaagatgatatggtggccctctaacaccaaatgccgcaaatcatgggtttgtccctcatgtcagagcctaagagtgcgcgaaccaccaaaagaaaattactcttttgtctaacgacacgaatctaacactacagtacgtacaaatagtgcatgcatgacatttgtcaaggatcgtgtggcccttagacgtacagaatgcctctgccccacgagctaagtttcagctagtggacccatagtcatgtatttcatgtaattacccataagaggtccaagtttacataaaaaccctagcgggtcgcggatacacccagacccagttcctagcctataaatactgacttataccctcatgcaaggggtgagagatcaatgtaaaacactatagcaagaagctagggttcttgagtttataaaattcctattataatacatcaaggtcattggactaattacaattaattcgtggactagggctcattaatacccaaaccacgtaaaatctccatctctattcatgttatttgcttttttggcaagggacatgtggactctaggttagcatccaaggcccactagtgggcccgaagaaggtaacttgggccaagtcaatgtccaagaagaccctttagtaaggcatcttcctttcttgctcagacaaagctttttccaaggatagcccgtattcgaaaatagtcccaatactgcattttggaagtctagtacaatttttctttttatcaaattgtaaagaataaggaattaactctccataaatttgggctagaatatcatatcaaactaacatgaaaaactacctaaaataaagatcaagtaattaattcacaattaattacccaaaactataggacatgataacgacagcttgaccgtgcttaatttgcctagtcagcaaactcat

SEQ ID NO: 313587 - DNA, 700 bp, Cannabis indica
atatatactttatgatataatatggttgtatcattattttactctttagtgatttctttctattgtgctattatgcatattgcatagtgatattgtgttttccactgttgataaattttgttgttttgttttctttctcttttctcattcataaaacaattattaggtcgtgtttagtttttttttttaatatacgattagttatcgattctagataacagttaaatgttaaagagatctgtaaatttcataacattagggtattaaggtttggatgccaatagatgtaatatttgtgtgcctatgaagggtgatatatctatttatgatttaccattacttgtgtctattaatagggtaatatatctatgtaaccaataaaataatgatgagtaatttagaatttatattttatttattaataattaatacttaataaataaaaaacaaaggagtgctaattgcaagattataacctctatatttatggcagtatttgtcatagacaataaaggtgtgtttggaagtaactgtgtaattactaagtaaggtaattactagggaagtaattacacagtttagtaattacactatattttaaaatacaaggtgtgtttggatatgaggtggtaattacatgaattcctaatatcttgtttggcaaaatagttaataattacatgggaaaataaattttttt

SEQ ID NO: 313588 - DNA, 1162 bp, Cannabis indica
taactttattttggtaataatggttttgaaatttgttataaggaaattttataaacaagggatccccttagtagtattttaaaaaaaaattatatgtatattttaaattatcaaactttatttgaaccacacttttcctaagctagtaggttattgataataagattgtaaaagcatacacgtggcgttcatgagagtcagggcattacataaatggtcaattgagttaagccaatttgacataaaatacaaccacgatcgataataaaaggccaagcccttactgatttcattctcgaatttacaaatgacgaggtggcaattattacagaagagccagtcgatcctgaagtgccatcgggagaaggatggactttgttggttatggggcatcaaatagtgagagttcaggcggttgaataatattgataagtcccaacaaatttaaagtgcatgttgctttaatgtttgaattccctgcctcgaacaatgaagacgagtatgaagctctatttgtaggttcaaagctcgctcttgaaatgaaagtcgagtaacttgaagcattcaccgattcccaaattatggtttgtcaagtcaatggagaatatctggccagaggagaacgcttggcgaaatacctctctgatacttgtgagctattgtctaaaattaaaaaaaagttattgttagtagaatacctcgtgcttataattctcatgcagatgctttggcttgtttggcctcaacaagagaagcaaaattactcaacgtaattcctgttgatgtgttggctcatctgacaattcatcgtgaagaaattatgcaggtcgatgtaactgaacaagtcacttggatgacccaatcattacttatttaaaaatgggcaaactccccaaagataagcttgaggctaaaaaatagcaatatcaagctgcccgattattgtgataaatccaacacgcaagtatacgtatcgttttaacaagtaatactcaggtaagtgagatcgttcccacgaggactgcagttaagtaccaatcaattaaattcttgtttctatttggcaatcgaatagataaattttgaacaaaataaactaagcaaaattaaataagacaaacaaataaaaggtttaacaatggatgtgaaattagggatatga

SEQ ID NO: 313589 - DNA, 733 bp, Cannabis indica
aaggggtgcattgtagaatttcttcaaactatatatcaaccaaaatactatatgtatatacattggccaggacgaatgcagaaattataaataaaggtgcatatttttttgtacatctaagaaaaaaaaaggataattctatgtgatttcatatatgtaaaaaaattaaaattaaaaattaattaaagaattaatactattttcaatttaaattatttttaaatatgtaaattgttggagtgttaattacttagagctttggaagaaaaagagaatgaaagagactgtattaaataataataatttaaatgaactctttaaataaaacattttggagataaagtgggtcccacaacaccgaatttagcacgttgcatattaggcatggcgtggtcccacctgccctgaaaatatcgtttttggataactatgaacagaaagttctcgacgatgacaggtggaaccaatggaaaacctccacgtcacatgctcatcaacttgagggaatcatgttagttgcacctgaataaatccttttctttttccctggctaaaaggaaaaaaataaataaatattttggtatatatttatttgttttgatatttaaaggattttttttaaaattttataaaaatattaaattttgggtaaaaaagtataaatttactataacacggaattttttataaaaatactattttttataaaataaccgtaaaataacaaaacagt

SEQ ID NO: 313590 - DNA, 1192 bp, Cannabis indica
atttcttttttttctattttattgatgaaatgatgtacgtatgtatagtgaaaggattgtagagagtattgtataaataggcttggtatgaaggcttaattcatttagtattgtgattgatatttgcttttaaaaaaataaataaattattattaataataaattaattaattaataattttagtggtagattgtagatattttttaagtgatatttcatactatattagagtgataattagattcaataaaaaaaattagaaaaaataagaaaaaagaaagactacttttaagtgtttttaaagtgccacatcaccgcctcatacttctcctttatatatatgtatagatatatagattttttcatgagatttttttctgtattaagaaattgatctatataactactgcctcattttttttaaaaaaattatcgattcgattactaatgtcaaactaattaatgttttaatataactacgtagtaacaactagtgctgcaggctgaattttatgacacaacatgaaactggtataaacccgaaaggtacaagtacgattaggcacgaaaaaatacgagcttgggcatgacacaacacgagaaatatatgtcctttagcaagatacgacacgaaaagcacgaaaggcacaacacgtaagtacgaataatagactagcccgaaaaacacgacatgcgacaagcgcaaaaagtacggcacaacatactaaaatacttataatttattattattaatataataataagaacatatgaatttatcaattataaataagttaaaataatacatttaaacataataatgtatatatatattaaaattttatcattaaaactattaaaatatgaaaaacaaagattatatattaatgtatttataggttgtcatataaaaatctgagtattaataagtaaatattaaaatttttaatgatgttaataatatttttatatgattatctgtaaagtattgtccaaaagttatataaatataactaaagctataaaatatacatataatttatgaattgtgaaaaaaatataaatagtctttttaaattagtttgaataaaataaatatatatggacgtgccctgttgggtctgtagcagttttgtatttttaactactcttttgggtttttaactgttttttcaaaagttttcttttccc

SEQ ID NO: 313591 - DNA, 2256 bp, Cannabis indica
agtgtcagaatggccacgagaaaatatacacacaaaaagaaagcagtgaaagtagtcctacccagacaatctaattcagcctagcaaagtcctgtactataatactggcttcgtcatccccaagaaagctattcgaggggagaaaccagctggaagacagataaggtgaatgatccaaagggataggtgtgggaggcccggaccccatcccggactggcctagaaaattacctaagttggaaaaataaaaacccttggcatgatcaccccaccgggtatggggcattctaaatctaaggagacgttcatcaaattttataggcctacaccgagaataatcttgagcgtaaggaacatgatggaccgtaaagggagacttaccggatccggatgtgttggcatcaggagccccagtattaggaaccgggagcagcagcttaggccgagaaggcgcccgttctttccccacttctatccggagggtcctcccagcagaagcttgtgccttgatataggctaactcttgttccctcctaaaaaggtacttctagtactggtcctccgctgaggcaatgatgtccgctcggagtgccttttcagcatccggggtgcgaatattggggcaaaggaccttagaaaggtcgacatcatccacagactggctctctgtgatgagcttggccttccggcagttcaccgttgtgaccaagtctcccatgttaaggccatttttgtcgtaagtggagaagaccttagcgtgctgcaggaaaagctgggtaggagcattgcgatacattggagggatcctggctcactccgtgatagttctgggcagtccacagcttgaaagccagaagagaagaagaagcggtggcggtactccttaacatttttgtgaaaattataagggaccgtaccctcgttggaaggatggccccgaggggtgaaaaaacagtctttaaacttatcccccttcttggggacagaaacaagttcataaaaatacaaaatctcaaccgggctaggtgaagcccagcctcgggctacataaaaaataaaaggccttaaagcaggcggtaagcttgaggaatgagtttgtaaggcgcgaggccaacaaaaactagaaaattaataaaacagtcttgactagggagcatggctcctgacatgaggtgggtctggctccaagctccaaagcctccatagttatgattgggcgtctcatcgtcctgaggtaaatggtgaaaaactctagaggcggatggcttgatgccagctacagtcacaactttctctaactgatgggcgcaagtcagagtggagcgaagctcatccacctcacaaccattggaccgacaggtgtagttcccctaggcgaccagacccttcatcacttcctataaggtggccatagtgaccatccccttgcaggaagatttggctccggatgcagaagttgacatttggctctgtaaaaagaaaaaatcaagtagttagccccaaaaccaaaccctagtattaaaagagggaatgggggtcccctaaccgctggaaagagggcccctccggatatttgccaaagatggaaacccaaaggattttccttagcaaacatcggctgcaaaattctcaaaagcagcgaaggcagagggaaagtgaaaaacgtagaaacgtggagacaaaaaatcgccccatatctcaaataatctttcgacagaggggtcgatggcgaaatagaaggaagagaaataacaaaacacaaataaaggagagcctctacaccacgtaacagacttagccacagttatttcccagatatcaaacacttagccaaaatgtttttgccctggcgtgtaagtaaacagtaaagacataaagtgttcagaaaacatacatgaaggttgagaactgggagtcggtgttgatcgacgataaaaggtggatttacagcgacgaaagaataacagcaagaaatctacggtttctgaaattttctctcgaaagtgttcttgagaagaaatggcgaagtggtgaaagtaaccaaatgaaaaagaaaagctagcttttataggcaggaacgggtgtaaaatagctgtgatcaggcgccatcgtacggtgggaagcgcgatcgattcacattctacagatccaacagttgggataaatgctcatcagggcggttaaaaacgcttaagtatttttctgcaccgattaaatgcgtcggatcattaatggacgggaagcgaatcgttgcct

SEQ ID NO: 313592 - DNA, 1323 bp, Cannabis indica
gattgagtaaggtatgatactaagatagaaaaaaaggtatgatatgtaaaaatctcttctactcacaaaaataaagttatttttgtaaataatttctaaatttaggtgcctcatgaaaattcctctattttggttgaaaaatcaaatgtgggctaacaacaaattacaaacagttcttttatagcttgtctttttggatatcaagttagaatttggtaaggtgtggtttaagatgcatgagattctatttcaaaattaaattgacgatggaatgagtagtccattagcaatgtaagattttcgtgttgtgttatagtcatgtcgacacatttagtaattatgtcgtgtcataatcgtgttgacacgataacacgaattaattttcatatattatataaaaaaatcacaacttttgtatttacaataataatcgtgttatcgtatcgtgttcgtattcatgtcgtgtgatctactaattagtcgtgtcgtgtttgaggtctcgacacgtttaataaatgtgtcatgttcgtgtttgagattttgacacgcttaataaatgtgtcgtgttcatgtttagcttaatcgtgtcatatcataaacgtgtcgacacgaacacaacacgataacacgaattgtaatgccaagggtgctggagagctaacaccatattctctacccttaaggagcattctaagattttaactttctaccatgaacatatatgatttttgctctatagacatacaatcattaacatataccaattctcagagtttcttaaatttaatttgtgtcatattattcctagacccaaacaaatggtgaataccaaggcctgtctcaaaccagacaatattgaagatatttacgaaaatgctattgctgtacaaactaagaatcagcaagcactccaacatatgttccacaatttgaccaccacttggccacctcgtgggcatcacctagattgtatcgtaccatcttggtcggcacgctacacacgacaagcctgaaagcacggcacgttagcacagatagattaactcgaaagagcgacacattagaaagtctaataatttaataataataaatatttatttatcaattaaaataatagttgttgctccagaattcgcccaaaatacgtggaccagtcgagaggggacacgtggatcagataacctgtaaacatttgctaagtctttgcgcgtcacaagaaagggctgttagcatgggtcctggagtaggctcccggagtacaaggtactccaggaggcgtgcatagcgtgaaggctctccgggatgtgtcaggtctctcccgag

SEQ ID NO: 313593 - DNA, 1301 bp, Cannabis indica
ttagagttaattaaattggttggttcggtaattacagttagtattctaactaacttctaccgcttggacatggatatataaagagggctttttccctcttctctgtaatgtttttcacataataataagaaatacaatttctctatttctgttagactacgacgacgctagaactttttagatttgttcccctgatttagtactcaaaacaaagatttgatcatatctccatctttatttttaagtcaaaataatttgttataaaaccaaaatttacgtatatattttacccttttttataaacaactaatttacagatatatagtggtttcatccctttctgaatatattgaatacaaatgtagtattttcagatttataatttctatgggttaccaataaagtgctatatattttgttatcaatatatttaaatctttcaaaaaaaaaaaaaagtgaattggaaaacttgcttattgcttgttgctcggcttattgcttgaaaaacgtgtgttcatctaaagcttcatacggccttggatttagaagactagtggattagaacataaggaagtatgtttgggcgattgcaaacaagaaagataatttgtttgtaaaatgtatcaacagtgttgatctgaagaaccaaaattagtgagactatgaatgtgctaaattctagctagttggtattagaaaagattggtagttgtaaaaaataaaatcaagctcaaattgaatcttgataactttgtttctcaaaattacagcatccaacttgagcataaactactatttgaacaaaagggataaagtcactttggactaaatatttttgggagagaatgatcactccaaagcacaggtttattatgtggcttataatgtagagaaggctccaatcaaagaaaaagcttgaaaagatcgataatatagtgaatatggatatgacatggttattatgtgggaatgctaatgagaacattgagcatttattttttgaatgtgcttataacaggaaatatttggagaggataaaacattggctgaattgggatgtaaaaagcattcaacttcagtcactactgttgcgatgtatttctcgagccaaaaacttcagcaacaatcgacgaagcatgctatttgttgagatggcagtcgtggtctactatatatagcgtgtccagaatgatgtactttggaattataaattgtggatgattgatcaaattatttttagagattggtttatgagattatatatatataggggtgttcatccgatccaatccgtacttttt

SEQ ID NO: 313594 - DNA, 1001 bp, Cannabis indica
tgagaaaaaatttgactaaaaaattatttcagatactaaaacagataaaaatgtatagatgtattccttttaagagggtgcattataaaatttccctataagttaatatcaaacataatattattttaaataataataattcaatacaatctaatgagccctagatgtttttagaaactgcaccaacttattaagaagggtacactggtctttccaaaaagaagtaaaaggcaacccattggctgttgtggaattttgttgaaattataagtataataatataataaaaatgtagacatactgatacgttttttttcaagggaacataattatggatgattgttttacattaaaaaatgataaaaggaatagttagaagttagaaggaagagattagaggaaatgcgggtaattagagagaattattgggttagagcatatgcagccgatatcatttaaacactgaaaccgaatcattactgtcgctaccgctcaactgctttggactctccaatacaacggtcaaacctctcctttttccttttatttctcattcaaatcaaagtaattctgttttttttttttgaataatcaaagtaattctgttagtattttcgtggtagtggctaaaactttctaaatgtattatgaaattgattagaatattttttaaaaattattatattgtttttaatatttagaaaggtactaaatattactagtgctttttaatatttttctttctattaaccacattatctagtattagcggggcttaatactagaagcatttaccattatctaaggtggcgtttggtaacacttttttaatcagttttttgtttttaaaagtagaaaagtgaaaatatttttcaaaaacatgttctataaaactgtttttacttttcaattttataattagaaatcaaaattttaaaaacaaaaagaatcacttttaatatttttttaaacaatttttttttcttaatcaatcttttaga

SEQ ID NO: 313595 - DNA, 796 bp, Cannabis indica
gggtttctccaccatccgtcttgacgtttaagagattgactaatctctacaaaaggcttctaggaaaggttgaggctttactccctgctcccgggcagctggcccagatcttggagatggattttgtgcgtggtcaggacctaactctaagcatggtgtaatgttgccattgtatccatactttaaggaaattgtgaactattatcacattagtccaacccagctcactcccaaaagtatatagcacttgttttccttgttcgtgttgtatgcttcccaaggatggggtcaaccatccgcccacgataccaactagttgtttgacttgaagtccagccccaagtaaaatagatctaggtatctctacttttcctagatcgaagaaaaatggttaagtggcaccacagataccaacgtgtccaaaattggtggctatgtggaggactattactttgtcaagggcatgaggaccaatcataccaatttctagcacatcccttctttctgtcggcctccttttactttggaactcaagaagagggctcagaagatactctaactcccttcaaaggctcaaaatatttgacttttggctactgaggccaatttcattaagtataagctttatccatctaatggaggtcaagggatcgagcaagtggcagaaggagttgtatccaaataatgaaaggagatcatatctgagcaagaaacaccaaagaacaagaaaaagaagaaagctcctcaagatgaccaagtacctattgagcagcctatcaaaattagagatggtctt

SEQ ID NO: 313596 - DNA, 4664 bp, Cannabis indica
tgagacgtagttctcaatctccctacaggtaacctccctattgagagcactgatcactaccctcgagtcactctcaactataataaacttaagtccattaagcttcgcgacatccagagcaagacaacaagccgctgcttcatcacataaagcatcaacaaaatccaacttagaggtatgcacccagatcaccctacccagatgatcccttgccacgaccgcagagcacatgctgtccaactccacttaaacatcacaattaagcttcaaccagtcctgagggggagggcaacaggcatccaaccaacgcataggtgcataagggatcaaagaagcatagtgaactgcaaaagaggaacgaatattgttaatacatttataaacatcaacctgaccattattatgtacctttttgttttgagtccgccatatagtgtccatgtttagcgaggcataaaggaacacctcatcgacattagtgcccttctttttaaagtcccatatgaatttgatccagttccataatcgaattccagtgccacaaactggataaataccccaaggagaagacctccacaagtggaaagccacgttacaggagagaaaaagatgttcaatagattcattctctatcctacaaaggggacaagtaacatcctcaatagaaaaccttttacagatctcaactcgcacagggattgccttggacaggagacaccgccagagggtcttcattctttcaatgatcttacaattccatagcttattccatagtgaaggagcaacgtcacaagtgggagtcctatcaacagctagggctaggtaggcagagttgctcgtgaatttaccattattttctgaagtccaaatccatctatcatcaccctggccagacagattaccccctttcaggattgcagaaacagtctccttgtcaaagagactatttaacttttggatgttccagctgccattatctatcaatagctcagccactttatccacttcacaagtggaggaaccattagcacgaggacataaatctttcttatgagctatccaagggtcctcccagaccttagtatccttgccactcaccaccaccttgcatgctcctttttttaaaatggggatggctcttaccacacttttccaaaacctagaatcgaaatctttggttcatttctttagttttgctgaaacccaaacccccaagagacttagggaggcaaagcttgtcccaagctttaagctggagcccacgattccccttttcagacctccaccagaagtccctaaccagcccatccgtctgagttacaagacggttcgaaagcttagttgtttgcatagcataggcaacgacaagcccacagactttataagggttgcacgacctgctttagacagagtcttagctttccagccctgaagtttagaagtgagattatccaagataaagttgaaatctgcatccttttgcgtggatctaaataaaggtagccccaaatatttgatgttaccttccggagagctcaatcccaaagcctctttaatacctcttttcatgccattagatgtatttttgctaaagaatatgaggttttgagcttattgacttgctgaccagaccaagcgcaaaacctctcaagacaatgccagtaacctttgacttcctccatgttcgctcttcccaccaagactaaatcatccgtaaagaagatatgagagataaccggggcccctctactgagcttaatgtccttaatagagccattgtcttgggcgtcaatcagaagtctgaacagaatttccgctgcacaaataaagaggtaaggggataaagggttgccctggcgaaggccacatgagggtataattttactaaactgctcttcattaatgcaaatgttgagcgagatggtagcatacattgggagatccaacctctaaatttttagggcgctccaaaaccagcaagcacatggtcaataaagttccaactcaacttgtcatacgctttcataaggtcaatttttatggcaaagaaaccttcttttccttttttcctgttgaaggagtggatgatttcttggataatcacattattgtcctgaatgttccttcttgggacaaaagctgcttgggtaggagaaataagggaagggagaaggggcttaattctatgggcaatgattttagagatgaccttatacataacgttacacagggagataggcctgtactggttggttcttttcaacttttgaaccttggggataagcacaatattcgtagcattgacacccttatgcattcttcctgtccgaaaaaagtcagacactggatcacaaaagtccatacccacagtttcccaatagtgcttgaagaaaagaacggacatcccatctggtcccggaaccttattgttactcatggcaaacagagtactacgaatttcctcatgagaaggacaatgaaccaggtcagcttggtcagcaatagagatcctatctttaataaggtagctgctattgaaatcattaccgacgcttgtacccgagaaaattccctttaagaagtcaataaattcattaccgattagatcccatctagaaatccaaatgtcatctttattcaagatactttcaatagcattccgtctccctttgatagccgcaaaaaggaagaaaaactttcatttatccccttccttgagccaagaaatcctggccctctgtttctagcataactcctttcgctcctaagcctcattgagagatcgacgaatagcattggtgtcccaaaccctcatacccaccgggagccgctggattcgatcaagcttcctttccaactctttaataaaagtgtcaactttaccaaattgagttctattccaatgcaaaagagcgacccgagtagcccccatcttcttgaaaatcctagcgggcgcccaagagtgaataaccgacttccaggcatagtcaaccaccaacttgcttctttcatcctagtccaacctacttcaaacttaaagctacttttaaattattcttcctggccgctagagaaaatgcaaagaggtctatggtcagagttgtaagtcagagaggagcatagggcaactttcaggaaaagcctaagccacgccccatttactaatcctttgtcaagcacaaatttgacatgattctgcccagatcggtgattatcccaggtgagcttatcaccataaataggcatattgataagcccctagaatttaccaaattagagataaacgggatgaagggatccctgcccttagagccaactctgattcacttagcataaaattagtatcacccaggataagccacggcccaccaaacctatcccctaaattcatgaactcctcccagaaatccttcttagcattagaatagggtggaccatacacacaagacaataaccaagggtgggtcgggggatccgagtagaagagcaccgaaatatgatttatagaacaagcaacacattcaaacacagaaccgatcttccaagctataataataccccctgcactcccaacagccagcacaaggatattaaagtaaaagtgaagggagttaagtgtacgtaccaaagaagtagcattaactttgagctcgatcagaaaaataaagtccggggagcacggtcgaatcagggacttcaactcacaaactatagaggtctgccctaaccctccacagttccaagcaaggcctctcatggctcctgtggacgagagatgaccatcttctccacacgggtatgagagtgagccgacccgagagagccagagcagccaatcaaaaaagtgccaaccaaaggtcgttccaataaattgtttcttcctttgaaactcccatcaagcagctcatcagattggttgatagagatcgagttgtcatttgatggattcttccactgcaaccttagtagcatgttcctggcaaggtgtatcccaaggatattcctgactcaccctcgggtgttgctgtggtatcttatgaggtctagagcaaacaaaggaagagccatcaaataactttcttttcttggatggagtagttctagcgttaattttagaggtcggcatgaccccaatgtcacttccaatattactaatctcatataggtccaagcacctaaattctttgagcttttgcaataaagtaccttgggcttggaagaaattagataaagtctttttttcgtcatgttgaaagttgatcccttgcccacaaattgagctactccttgagataatattcaccacttcgtaatttttcataaggctcatgtgtccaaaaatattatgtaaagaccgcttagtttaatttgaaaattagcagataattaggatttaattatgaaaattatatattgatatttcaataattatttatgttgttatatttgaattctgaatgcatttttacgtcatatagtgacatttcataattttgcattttcggtgctcggcaacatggaacgcggtgtatggctcagtagaatcacaatctaatattttagcatagtgggacggtttatttagacattaggaatgtcgggattggtcgggaatttagagttttccaaaaatacccttaagtgctttttaaccctttagtgtg

SEQ ID NO: 313597 - DNA, 952 bp, Cannabis indica
aaaaaaaaaagttaggaaaatttgagtttctacactataaaggggatctcaaacaacaaaattaacatactattggaccccatcatgaaaattatgctaattttattaagagttagtcccacattattgctaatgtgtagaaataaattgtgatatataagataaatgagctactcctcaattaattttgagataaaacctcattcatcttatccttaaattctaacaaatctttctattcattccaaaataaactttttatttcaaattcgcctaaatatctcaatctctttttctccttcaatctctatccttctatcacctctttctattccaaaaccatagtgaatcaccattaacagcggtcaacattcaccaccacccactctcgtcgccacgagagggatattttagtaataattaaagagaaaattagcttaattttgttattttttgtgtacccattggctccctattctctaaatatgtaaagatatggttattattcataaaaatagtatactcaataattaatgtgttggcatgttcttttaatttactattaatggtacatccacaatgttatggatctcactaaacttaaaaaaaaaatcacaaatcacatgcacacgatgatataaagatcatatatatatatgaaatttctaaagtgaggtattaaaaaaaatttatcttttgggcaattaatgtaaacttttaattgaccaagtgtatagtaatatgatggtccttaacttagatcgcatagaaattaggattgatggaaataattgggtcccatttactagctgacttctctctcttttcgtactccattaaagaactaagataaccctctcaaacattggagaacactaaggagaaatatactaatcattaagccatatctttagtttattatttgtttttgtttttggtaaaaaaaaaaaaa

SEQ ID NO: 313598 - DNA, 620 bp, Cannabis indica
aaaaaaaaatagtaaaagtagtaattaagttgttgttttttttagaataaattgttattgttaatattagtatttttaatgtataattttttaaaaatttcgaatagtttatggtttaaaaaactctattatcgatattgtaaattatttaaaatttctttaaaatttatatgaataaagttgtaattataataaaaaatcactataataaaaagagatatataagatgtgtttggagattgagagagatgttgtaataagcaatctcatttttaataatgatctcgatattcagggccggttttaggcaaaagtaaaccgcttgagacccatttttagtgaagctttaactttttaaaaatgtcatttttaagatataaaaaaacttataattttttcaaaaataccattttatatagaaacttagaaaaataacaatttttatattgtcttaagaaatatgaaaaaggaaagagtgtattcacatgataggcacgtgtaagtgtaatgaagcggctatttgacaaatttttagattattactggtggatttttatagaagatgcatatttccccacggggatggggccccgcggggacccgcccctaatagggtgggg

SEQ ID NO: 313599 - DNA, 2467 bp, Cannabis indica
caaactaaggccttacttccaggcacatccgataaaggtgttaactgatcaacccctgagacatgttttattaaaaccagatccttctggaaaattgataaaatggtcagttgaactggggcagtttgacataacttatcacccaagaacatccatcaagggtcaagccttggcagacttcctgatagagggaataactctagacaaaaaccctcttatttagcgagacgtagacacttggaaattgtatgtggatggagcatccaacgagcatggcttgggttcaggggtgatactaatttcgtcagaaggcttcaagtttcactatgctttaatatttcaattcaacacttcgaacaacgaggccttgatcactggtttaaagatagttgaagtgttaaaagtcaaaaatatcatatgccataatgagtcgcaattaattgtaaatcaagtcctaggggaataccaggctaatggaaaagtacctagagaaggttcggaagaactttgaaaagtttgattatttcaaaatcgagtaaatctcaacagaacaaaactctaatgtcgatgccttacgaaaactagtctcgcaaaatgaactagatgaacgctggtgagtttttgtttgatattttggccaaatactcatcttgtgtattgtcttttgtagatgaaccctggtgagtttttgggaggaaaacactatatcgaccaagatcttctccagcttttatatgaggaccaacatcgtcttcgtgctagtccgccctcttcaagcgattaactttctaactcatgttttgaggattgggaggtgagtagtgaaggtacaacatcatttttactctgagcagatcgcaggaaaaggctacgagcgatttatttgggaacttaggaaggagtggagacgctaccttccgtccaactagacatatatcttctggccagacgtggctgatacccttcttatgggccgcccaagtcctggtgcctttgacattactattgctgctcctaccgtggtagttgcacgacataccatccaacacatgtttaggaggaggatgatggcccgcacgaaacagactatgcagaaaattaatgcagctgaccctcacgtggcccgacatgccatgttgcctagcgccaaacaagctcagccactattgaggaagacgattatgaaggggacgtcaaagtctaggaggtataaaatcaggatgacgaccatcctgatagcccatccgaggctgaggaggagggagctgctcagcctttgtgctttggaggctacaatgaggccggggagccggtgtttgaggtcaatgacgttaacaactcggtgtctgaggtcgatgacgtcttggtagagggagaggattacatcacccaagagtatgccgaggcagtccctcatagggggcatattgccttaagggctcggtgggtgtgtcctccgtccatcaaacctgaggaccagttacgacatttggagaaggctgggtacctaggttgtttgaaagggagggagattgtgcctggtcgggtgctcacacaaaacaaggtgcgatgctgcctttgcactcgtacttcaaaaggattacggactactaccgcctttgtttgactcagttcacacccaagggaatcaagtacttatccgccctattcatcctttatgcaactcaatgatggggtgggcattcttcgcacgacaccaactgtctctttgatttgaagtcaacccctaagcagagcaggtcagggtacttctatttctctcagctagacgataagttgctaaagggcaccgtagactctaaggttagcatatggcactttgtgaatgagtattactttgtgattggcatggagactgtctatactcgatttcagcagatccatgcgtatttccaccctccttttacgcttgggcttagggaaagggcgcagaagattctccaactatcggtggatgctcagattatcactttgtttaccactgaggccaactttgtggagtacaaactctatcaggcgtatgttgtaccaaagctcgtgaaagagaagaagaagaaatccaagctgagccgagttgaggatgccgagtaggagaaagagctcattcaactgaagcgtgaggctaagttgaagggaggtgctggagccaaacagtatgctcaagaatattcagtggaggaggaggctcaagaataatcagagcaggagaggctaggcaagaagaagaaaactctctcgaccgagcaggcaccaatagaacatgccattcggattagggaacctagtgtgcctgctcggtcgtcgacccttgtggagggaaaagggaaagctatcctggtggagcaagaagactcttcagatgatgatgctccatcggtgattgttcgggagaatgccctgtaagcatgtagagtacttcaagttgcatttattttctctgattttt

SEQ ID NO: 313600 - DNA, 1717 bp, Cannabis indica
tttaaaaatattaatattagatctaagtctattttgtatatgtgttctatattgtatattatatatggttttagtatggtaatatttgtgtattgggtggtgatatctaagatttgatttcggtcgtgagatttagattagatttataattttttttttactctgcaactgtctaaaattgaggaaaaagtgcttatctcaattgttctcacttttgccgtcgattttaaagggtcgataacattcattatcgacttttttctatcgatgtctattctactcaattttacatcgttcggtggtataggcttcggttttaaaaccaaacaacaatataatttaccaaactgggaaattcctttttttttttaatattgtaacaaaagagtacctatacagataagatagtatctttttattcaaatagattatggaatgtgttctccgatcttataatttaatgaatatgatcaggtcggtaaatatttataacctcctcctaccaaattgcattgtcattttctagggtgttgagctagagtgccttctggcagtggtatagatattaaaccaatcggtatacaacatatatataaataataataatttaattataaatatagtatatttactttcaaattcaaaatggttattaattagtcatgagtatcttctttgctttcttatactatagtctagctttagtccttatccaacatcaatgggaatagaatgtagtatatttctacaatatataaaggactattatattagataacaaaaaggcactattgtacactaagaaagaaagaaaaactatcacgtaaagagcaatttaattatatatattatataagaataacatcaacattctaccaatcatataaaatgattgctttatctactatacacacatacaataagattctagtaaaggatagtaataagaatcctctaaaaggagctagcttgctagccaaacagaggagtacaactaattgaaagtgatttcaatcaaatggtccctctatgaaggaacatgatattgatcaaccacaaatatgtggaactaatattgaaatacatattatctcttatggtgtttgacccttaaaatacatagtaatattttttgcttttaaaaggaattttttttttttttagaaaattacactctatactcactttttattttttattttaatttttaccttcattttattattctttaatttatacccaattttttaagtcatatcctcattatgtacattaaaaactctaattttgataagttatgtgaggttatatatagtactttgattatagaagagagtatttatcaattaaaattattttggaattatttgattaatgtgtaataaaaaatggtagttttcaacttattcctttttttttggttccctggattaggtaggacctaggcacgaaccttgatcgcttatgcctaaagccggacttagataacaatatatatatatatatatatatgaggaatttacactcaatattgtgagttttaaaaatttacttaaatatgacatttttaggtttgaccaatttatatagtattttttttcaggtatttttatggtatttgatatactatatatatgtaaattatatttttaaagcccacatttaatgtttttatttatttttaggcagttttataggataatttttagtaattttt

SEQ ID NO: 313601 - DNA, 769 bp, Cannabis indica
gtaaaataatttccaacaccctgtgcatcttctatgcagttaattaaattatagatgtgacaaccgcataggtcctcttattatcttgtgtgattcaggactggcagtcatggcgagaatgaaataaacatgtcatagagcacaacgatgtgatgctcatgttgccagggtggcaacaatgctcatgatgctcatgtcagagatgtagggaaggctactcagccccgtgttgatttagatctagtggttgactaggggtcaagagtcctgacactgagtctaaagttgaggaggctgcacctgtcaggagaaggagatacacaatttgtattgtcctttccaactaccttttaggtacctatgatgatgatggggagccactgaacaaactcgaatagctttcggtgataggtttgtatcaagtcttaattcagtcttctaagcctcaaattctagatgttagatcacaaggagacaggtgggtctctcccgcatctttgttctctgctgatagttttgatgagatactatctagtggtctagtgagcggtgtccattgtgagatactcgctagagatcagagggcgcaccagctagcccttagttaatggcttaattggaacattatatacactatggggcagtgttgccgctccaccttacttcaaaggcattattgcttatttcgggatgtgtccaacataaatctccttaaaagtatcaagtacctttcggtaatgtttgtattatataaggagctaggctagcc

SEQ ID NO: 313602 - DNA, 2566 bp, Cannabis indica
cacaaaccccagagcttagtcacccaaaaaagaaggtgatgatgaaacacccactaccaagaaaaagccaagtagacactctgctgtttgtgattattttacaaaaattgagggaggaatctaaataatcctaggtgcaaatgtaattataacgagaaacactatgtttgtcatagtactacactaggaacaagtaatatgtggagtcatttgaaaaatcaatgtaagaaatatacatttagggtacctgataagaaacaaaagttattgattttcaaaatggtaatgagggtggtggaaatttgttggttgaggcctttaataaggagaattgtcgaaatactctagcaaagatgggagtgttagatgaacatgcatttaaagttgtagaaggtgaaggctttaaacatctcatgaaagtggtgcaatctagatttattcttcctagcagaatgacaattactagatatatatatatataccaactttatttagatgaaaaattaaaattaaaagaggagttgattaaggtgagtcaaagagtgtgtttaacaattgattgttggacatccatccaacaaatttcttatatgtgtctaacaacacactacattgatagtgattaatgtttgaaaaaatgaatcataagtttttgtcaaatttcaaaccataaaagagataccattggtaagacgattgaatcgtgtttattggttgggaaatagagaaggtgtttttcgtgactgtgaacaatgcattagcgaatgatgtatctgttagttttgttaagaggagagtcaatgcatgaatatggtctgttcttgatggtgattttatgcattttagatattgtgctcacatagtgaattttattgtgaatgagggcctaaaagatttgcatgattcaattgttgttatttgtaatgttgtgaggtacatttggtcatctcctgcacgattagaaaaaaatcaaagcttgtgcggagagagaaaagattgattataaagggtgtttagttgtaaatgtgcctacaaggtggaactcaacttttatgatgctagatgttgctattatctttgatatgagaatgcattttcaaggtgtgaggaggaagatgatgtattcttgagttacttcaatgaaaatgaaagtgggaagaagaaagttagacctcctactagtactgattaggagagtgttaagatatttatcaagtttatatgctcttattgtgaagtcacactaaagtttagtgataccttacttgttacatcaaacactttttattatgaaatttatgaaattcacactcaattgtctgatttggcctcaagtgatgaacatttgttatctgttatggcagtcaatatgaaaagaaagtataacaaatattaagggatataaaaatatcaatgttatgccgtttgttgctgtcgtgcttgatgctaggtataagatgaagtatcttaaatattattttgagagtgtttataatactgaaattgttgcaaagattgtgctaaaggtggagcaaacccttcaacatttgtatacttgctatagtatggacaataaatctaagattaacgatgagaaagacaatggtagtgtatcaccaccaaagagtaagatcaagcaaatttaaaaaagaaattattatctctatatttgcaacaagaagtgatgaagtgtttgactgggaaggtgaatgatattgagaggtgtttgagagatgagattgttaatccaatgacttcttcatttgatgtccttactttgtggaaggataatgctaggaggtataatattttgtcattgactgcaagagatgtccttactatttttatttttttactgtggcctctaaatctgcttttagtactagcgatcgtattttagattcatttagttgagtccaaaaacggtagaggcaatagtttgtcaaaattagttaaaggcatcacgtgaaggcattcaagttgagaaatatttggatgacactcaaacttatgactttcttgaacaaggtaaatatattactctactttttaatttattttcaattatattttaataagtttttttttagataattcaaataaatgaaacacaacatcaaaggagatgcaaaaaattgaaactctgattgttgactaaggaatgaaaaggtatacaaagttatatacttagtgttattatttttttatttttattatgcataaattacttaattttatatttttcttaaattcgcatgtaagtcatcttcttgagtggatgaatcacaaagctagttttatttatcttttcaactttatttttcctttaaaactttataattcttattgtgaacaactttttttttagacttgagaactttaacattcgtcatttatatttttagtttatggttaactacaaataatgttggagtaaacctccacttacactgataatagaactaattacaagggcagaagtgtaaatacaagcaaatccctattttggccttcggcctctaaaaaccctaacaaaagttagttagaatggattaggttataatcc

SEQ ID NO: 313603 - DNA, 730 bp, Cannabis indica
ctagtaaatctgattgttgaattgggttttatttagggtacgaaacccaacacagacaacatgtcaacgactacactgacacgacttacctaaatgcgtctactaagaagtcatttcttgtttagattgtaggaagccaaaggtgtatttggttagtgtgagtcattattttcatgtatgatagacatattaaggattgttattagttgttgaatacatgcatattctagatatctctttgatatgttgtgtgtgcacacttgttgatgtaagttagtggcttagtctttgtgctatattcgagtagatccagatcaatagttatcataatattttatgaatctcatatatatgtctcattatgtattatacttggatcatgtcaatacaatatgaagcataattagtcttatagacattagtatttcttgagatttctgtctgttgacatgattgcatagtgagagcacatatatatgtaattatgtaatccaagtgggagaatgttagaatattttatgtgaactaacataattaagtgttgctcactcagtattgatattagcatataatggtaactaataatcggtaatgcatggtaatattatcgggccataataggatagacataacgtacaaacacgctcgaagcccatggacacgctctaaaatgtttttggtcagcccattgggccaagacaatgaattctctctatttggactataagac

SEQ ID NO: 313604 - DNA, 2738 bp, Cannabis indica
ataataattgtctaaccatatttattttaaaattggtttattttgttattttaattttattaaattataagattataaaatgatattgaaaatatctaattggatattttcaaaacatttatcttgttagatatttactttaatatgatagaataatttacataaactagatattttaaaattagtttctttttaaattttaaattttgaaaagatatttaactaaatttttataatttaattggttagttaaatgattatttaattatataaatatcttatttcacaattgttacacggatattgttaacgcaaattttcgttaactaaaaatactaagccttttcgtaatgaatataatgagaaataataaatatatatgtgacacgaaatatttttacgtagttttgcaattaaatctgcaaactccagaagtctatcttattcaatatattttttgaatgcaagatacaattgatcatatctcttttttctctctcaaattcttcatcccttttttctgtgaaatctgccccactttagaggaatgtaggttgatagttatttacatggatttatttgaaatataaccgttcacaaaacatggaaaattctcatgtttcaattaaatgcatgtgggataatatagaataattgcttctttttctcttatccttatagatggttaatgttaatttggacaattgtatctcgattatctctgagttattatccttgtttattataatgtggaaaaaatgctaagtattaacagatgattcaccttgtcaagtctctttagattagcaaggtggttgtctcgctattcgtaatcctaaggctgttgtgcataactatatccactcttttaaataactaaattatcttcttgggcttgtacaccacgagagaggtgtgtatctcgtcaatataagttccaataagctcttatcgttatctcgcttaaggctatgtagtcagcgagttatgaatggttcctttaatcttttattaccgaattattttttttctttgcattaaatgatataatttaattatatcaggtggttcatattccattgcaagacacgtgtcactctctgaagtgtagccaaattttgggtaaacaattgccccttaaaaagttcttttttaataaaagaccttttttaaatgattacaagggcatttttatcttaatcccagtttgaaaaatttcatgctttgagttttggcagttcatgattttgaggcaagtcgttagcattaaatgcccatcttttccaactctctctagttctcactcattagatctttattcttttaatcttacgataatcattcttaaagtgtaaactcaagagaaaccacttatctgccacttttgcttttcaaatcttagaaaccttttgagaaaaccatcgtcgtttttcattaccttgcttgtcctctttgtccttgacctattttctgtgtatttcttcatatttcacctctaatcttagaaattctcagcgcccatcattgcattcatcacgatttcaatcacgaagttattcaatacccagaaatcttctgaaacgttgtaagtggtttatttcttactctatgttattccctttttcctgagttgatactttgatttttgctttcaattgtatcttgttttactgtgtttggttttcgattttttttttcggtaatttttagggctttaagtattgaacttaggtttattaaattcctagatttcttgtttcagtcaaattaaatccttccaggaattgggattattatttagttttttgtcaatatgttccaatttggttttgagatttgaactgcagatttcctcgaaattgaacgtcctcaagaattagccgttccattcaaatccaaaatccagaaacctaaatccaaacttgagattaatgacccaaattatcattaataaaaaccaatcaagatgaaatttctagttgctatgggcaatttttacaagagataactgagtataaacgtcgttatctgcgagatgccgcttggcataaaccttctattctcttagcaagacccttgcttttacctcaagtcactgttgctttttcatcaggtgaccttgattttaaaattatgtccacaccaagcctggtaaattaaacacccccaagatcctaatgtcactttcaaagctgagcttattgattccaaggcaagggccattatagaatatgttggtggtgtgttaaagtcttgcggcatcaagaaaaggcgaggatgccgcattaaatctgctgctccagtggaattcaactacttttaactagaaagagtaatccgcgaggagtgcggtggcgccagtaaaagtggctcgtctgggatatgcgcttggagcctcgagcacatcaaggctggagcatttctccccttaagagagtactacaaagaattctataattatcttggaaatgcccattttcagttgattccaagttcatacaagattctagtaggtttaaaggtttgtaccatatgttaggctgggagtgtcccactccccttgagatagtttatttttatttcgtcagagctgttcttgcgaggaagcagtgttcatgggggattttatgatctcggtacccaaaaaaatgatcgcaggatcattgtgaggttaccaaacaagattgagttcaaggacgacttcttctggactactggtctttctcctatcaacacga

SEQ ID NO: 313605 - DNA, 716 bp, Cannabis indica
ataaaggtttgtaatttgagtgtatatcattactacttttttcttttgagtcataattattggacaaaattataatttaattataagttattaattaattgatcagtattaatttatggaggttaattataatgtattgtgatccattactcatatgtacatttaaaatatatacttacatattacacacaatacattaatatatatgtgacatattttatattcagttatatatattttaaatattcattataattgattgtagaaactatcacattagtgtgttaaatttgagtctgtattttaagtacatatcattacacttaatatatctacataaaactaagagtggggattattcaatacacaaaatagattaaatagtaagtaataaaataataaaaatatcaatatttaagagtgagaatttaatgttaataataagataaaagtttagggaccatttataaatttaccaaaacatatatagtttagaattaatttatcaaaaaataaaatttaagaattaacttgccaaaacttatataatttaagaatttaaggtacaaataagatttttatgtattaggaaatgagaacttatttatatgtatatacaaataagatattattagtacctaacactcatctttaatattgttatattactattagtgtaattaaatattaatcttatataaattaataaaataatt

SEQ ID NO: 313606 - DNA, 2353 bp, Cannabis indica
atactaattttattttaataattatcaagtagaatataatttaactatatttattaattatacccaaaaagtgtactaattgataaataaactcttatttctctttttttcttcaaaatgtctaaatttggtgaaaattctcaaataagacatagtttatttttgaattctaattgacttattaaataaattagttgagtctacaagatgatattatcctagacactgtggggacaatgagcctatgtaaccaagctcccaataagaaatctaaaatttaccaagtaaagttcttatcttataaattcatcctgactccactatagatttagaattacactcctgattacatagaatgctctatatgctaaatatatagagatactatgaattatctattgttacaatctaaataaataaatgtattgtgggccaatgaacatgtggctgactctcaaactgttacgtattttggtaaaaaaaaatatgggcaatatttaccccccaatttccatcttgcaattttgtaagttgggacttgttattacttgaccctttagtttcctctcggaggggttgtgttatgatgttatggttatacaaagcacgcatgtttgtaagaacatgccacatgctctgatgtggatggtttacatatgctttttttttctattagggtttatgccctgaaaagtcagtaaaaatatttttgattattaaataaaaagttatatatgtgtaaatgttaaattgttaatatttattattaaataatttatattaaatatcgaaaaatttcttattcataaatgaggttgtggcttgtagttgtacaaataactaagaccacttaactatgaataaaatagtcggaaatatattaaagttatggattctttaatcaatagttgttagtacagttcactgatgcccgttctttggtgcaagtaatcttggataagactatagagacatcgaagtgaaggtattgtatataatagagagtatatatgacaaggatcgatatgaataaatttattaacatgtcgtttatcataaagacctaattcataacataacaatgatcaatagtagatcgacctaaatcttgagttatcatgaactcctgttcatgttattagtttctttgattcacccgttaaagtttctcaaagaagatgatttttacaacttttattttgagaatccaatagcatggatggctataatcatgatgtacaattatgaaattttgactttcctaacggatcgaatgttggttccttttaagtgataattctataactggaatattgtacacaaattgagatgagatcttgaattaaacttccatcagtgaattaatagaactagaagtaaagaaataattagaaaggtaaaacagtattaagagtgcaattcaatatcaatggacactactgttaaactcagtaaatatagttctataattattaagagtgcaattccatatttatagtggagtaatcatggatttaataaacaagagattatttagttgagttaataaataatcaagtttattagagcttaaaattataggtccatagtccataaattgccaccttgaacactgtcaaagatagagataaagagttgtacaaagatgtttgaagaaaatctattttgaattgacaaaatagtaattattattttggtaataaatatataattttttcaaattaattaaataaggaaaaagacaaaagttgttaagacaaaatttgtcgagacaaaatttgttaggacaaaagttatcaggacaaaagacaccaaccttgtcctaaagacaatggtaggcacctatagcattgtattgtctctattagatttgtctttttggattaattaattatttaattaattcaattaggtaaatattaattttctgatgcattatataggaacgtatagaatgaagtaacggaaaaaaaattattttttttctaagtgagaattcgtctatgcttactaattaattaaatacgtttgaaaattattttaattaattaaataaaagtaataatttaataaataaattttctctaaaaagataaagtgacacaacacccgcccgtcagctcagctcggctcggctcagccgaatggacagcgacgtgcgcatgtgtagtggttcggtgtgtgagttctcaccaatacgcacaaaactaggtactcattggggcctaacccaagttttaaatttgcacattatatacacttctaataaagtattattatctcatatagaactcaatacactcatacactttattttttttttttgatcaagaagaagaaaacttcattaatc

SEQ ID NO: 313607 - DNA, 535 bp, Cannabis indica
ctaataatatatgcaaaaattaatttatttcttaacttcaatcacccgtaaatgaaataattgactttaactgtttcatttgatgaatttgccaaaatttaatctaagtgagattatatgttcaatacaatggagattcatgagaggagaaataccttttatttttcacttgctacttactgaaacactgaaacagagaagagataaatagagacaaggggtggtggagatcgacgtcggtgatgaagttcagagtcgagcaaagagagggaatcattgatgagagctatcgtgatctagtccatgcagtcactgttgagaagaaatcgatgctgctatatatttcagagaaagagaaccgcatcggagggggaatggttgagtcaaatgacgagaggaagggttaagtcgtctgacggagagggaagggttgagttgatcttagaagagggaggcgcgataggagagaagagaactcaatttttttaaggttacaatgcgatacgaagagggaagggtctggggttcgatttag

SEQ ID NO: 313608 - DNA, 2035 bp, Cannabis indica
aaaggatgaaatagagaagatggtgcgggaaatgcttaaaccgaggatatgtgtacctagcaccagtcctttctcgagctcggtgttgttggtaaaaaagaatgatggaagttggcaattttgtgtggattaccgggcattaaacagagaaacggtggctgacaagtttccgatacccgtcatcgatgagctcctcgatgagttacatggagccaagtttttctccaagttagatctgaaatcggggtaccaccaaatccgaatggcgacacaagatgtggagaagactgcgtttcgcacgcatgagggtcactatgagtttttggtcatgcctttcggcctcacaaacgcaccagcgacgttccaagctctcatgaactccatttttggggatctcctccgtcacacggtgttggttttctttgatgacacattggtgtatagcgcatccttggaaactcatgtcgaacacttagaggaagtgttgcagcgattacaacaacatcaattgtatgctaaccgaaagaagtgttcgtttggacaagagagcgtggagtacttgggacacattatctccgcacaaggtgtttcagccgatcccgccaaggtggctgccatgacaaggtggcccgtaccaaagacactcaaggagttgcggggattcttggggttaacggggtattaccgaaaattcgttaagaattatggccttattgcacgacctttgacggatccgctcaaggaaagacgcttttgggtggactactgaagctgaacaagcctttaatcagttaaaagaagccatgtgttcggtaccggtgttagctcatcctgatttctctaccacatttgtggtggaaacggatgcatcagggattggtttaggagctgtgctaatacaaaaccagaggccgatagcctatttcagtcaggctctatcccctcgttcccaagccaaatctgttaacgaacgggagttaatggcaatcgtgttggccatccaaaaatgacgtccctatctccttcggcacaaatttgtggttcgaaccgaccagcggagcctaaagtacctcttggaacaaaggttggtggcggaggaacatcaacgatggctcacaaaaatattgggttatgattttgagatccaataccgtcccggattggaaaataaggcggctgatgcactttcaagggtgcaagttggcagtagtttgagcgctctttcagtaccaaatgtgttgtcaataccaaagttgcaagctcaactcaaagacgatccgctgctgtctaaagtcctcatagagttagaacaaggacgggatgggggaggttatacactcacacaaggagtattacgctttcggggaaggttagtgttgccttccacttctccttgcatcccattattgttgcaagagtaccacgggagcaatacgggaggccattcaggtgtgtttaaaaccttccagcgcctggcagcgaacctttattggcccgaaatgagaaaagatgttcaaaaacatgtggcagaatgtgcggtctgccaacgtaacaagtacttggctcaatctcccgcgggtttgcttcaaccactcccgattcctgagcaagtatgggaggatgtttccatggatttcatagaagggctgccattatctcatgggtttgactctattttggtggtggtagaccgtttgaccaagtatgggcacttcatccctcttcgccatccttacacagccatgacggtggctgaagcttttgtgagagatgtggtaaaattacatggctttccacgttccatagtttccgatcgagacaagattttcctcagccttttttggaaggaattgtttcgcttgcatggcaccgcccttaagcgtagtactgcgtaccatccgcaatcggatggccaaactgaggtggttaatagatgcttggaaacttacttacgttgttttgtaggtgagaaacccaccaaatgggtgaagtggctggcatgggcagagtattggtacaacacctcgtatcatat

SEQ ID NO: 313609 - DNA, 1571 bp, Cannabis indica
ctgaatttatactgacgtgataacggaagataaagtttacttacacaatgatatgtggaatgtcctttccatggtatatggaaattgttatcctgattttttccacctgacgtggcatgtccatgtgcttaacatcaatgccacgtaggagtacaactcgtaaacaagaaggccaagccatctactcagcatttttaaccgaaaaggggtctaaatacttaggagggacaatgaaattatgaacatgccacttctagggggctggcaggccacccctagccggccctatggccagcatggacattgcaagtgcatggctaggaaatttttgcctagcaagtttttggtgtgcaactttaatccgtggacaaaaagtcaagaaccgaatggggccgtttacatcccaccaaaaataagatggaaatagcagatactacatggtccggaaagcatggactctgcaggtgcattagcagcaacatttttgcctagtaggtttttggtgcgctgatttcattcctggacatcaagttaagcaaccaatttagccttcacagcccacgaaaatagagggaaaatataagtaacttctctatttttgaggggcaatttagtcatttgaactttattaatttattatgtaaataatagctttatttgcctatttttaagggatattagggatgtaagctctactatataaatagtattagtaataccctaaaaccctaagtcttaagctctaagtttgataactcatctcatctcatctctctctcacacacatagcctgtccctatcaattaagatttaacaattatagttctcacattgtaatcttaagagagccaattaagatcccactactatagtgatctaagtggcattatctctagtatcaatacaactaaaaggggagtaggtcattacccgctaactaaggggccgagccactataaaatctcgtgtctatttacttttctattctaaccgtgtaacacatggaaagcacctgtattaaattcgaattttctgtcggttggcaaagtttaaggtcaatagtttggtgctttcattgagagcgagttattagtttatctaatcaaacgtcatggttaacacaaggagaactacagctacaacatcttcctccatgtgtcttccccaagatatggcgattgatcttgttgttcgcattctagtcacaactagaatatccacaaacccgagagacgtggctaatcctttcacctcactaggcatgacgaacctggccaccaaaatttgccaagtcgacacaagcattcttgtgggtataaataattgacccatgccttctagggaggatcctccactgacacttcccactggaggatggacccactgttggaatatattttaccatgatctagatttactaccatgtatgttatttagcatcctaaatatgaatttctataacattgtaatttaaacacatataaagtttgaaaaaccttacagtggttgcagcggaattaaatgactcattccgctcaaatctccaacccctttatcctttctgtagcaga

SEQ ID NO: 313610 - DNA, 1505 bp, Cannabis indica
aattttttttaaaaaaaacacaaattagttttgatatagtataacaaataaggatagatatgaaataattttatttagtatacttcataataatatttaaattaattataatttggataatataccaattagttacttttcataaaaggattcattttaaataaaaatatctcatgtagataaacgttaaattttaaattagttattttaaactatatcatcatctttgctttaaattatgttcatttatgttatattacagtatcttattatttaaaaaataagagagaaagaattttttttttgaagttgaagagaagagagaaagaaatatttattttattttattctttttatgtatagttatttaatttttttaatattgcaagcctgtctcttaaataaaaaacaaaagagaaaatgactgttagtttagttataaaatgtaaaacagtataataatttaaaaaacgttagaaaggaacgttaaaattaatatttagatagattgagttattattgataataaaagacaaaaaaggtatgtacatgtaaattatcctataatcaatgtttgaacattaggagtttggaattgtaatttagagtaattacaagttttgctatatttgttttactagataattacacagtaattataattgaaagttattgagaagtattaattactctccaattcttataattcaaattaagtataatgatattgtataattatacaatattaacaaattgtgtaattagtaactcctttaccaaacactaactatgcaattactaattgacatgatatctaaacacgcattattatattttaaaatagaatgtaattactctcatatataataacactacttaataattacataattattttcaaaaataacagtttaactattttttaatagaccaaacatgtcaattggtattggataaagccagtgaggctagtttagtgatacccaaacctctaaaacattaataaattataatatgttacactaattttttttttctagcagcctatgtgtagccacataattttgcagcaaattatcattattattaataattaattaattacatttaaattattagtttaaagacatgtcaaaatttaatacataaaacaccaagaatgtataataataatcaagttaattaaaatatttatctcgacatatactaaattatgctcctaaactgtttcaaatcactaaaaaaatttctcgaattactaagattgttatatttagggctcgtttggcacagcttttggaaaagctaaaagctgcttttcaaaaaagttgtaacaaaaaggtgtttggtaatctttgggattaacttcagttgtgctaggcaaatttccttgagggcgggttgctacctgagttgctagctggcccatctgagtctgcaggtctttaattgaagatctagtttcagtcatgaattgaagcagtaaatctgtttgcaaactagaa

SEQ ID NO: 313611 - DNA, 760 bp, Cannabis indica
tttccaaaaaaccgacgccataggtggtgtcagaatcccttccaaaaaattccaaccctatgacgtcggttctttaatatttgctgaaaaaaagtgcctctaaaagcttggtttgtagtagtgagaatttaacgtctcattccgtttaattctctaacgcttaatcctttctatcacaaagtatggtcaagaattgaacttggtatctcctcctgaatatgaatgactgcataatcttctacactatcttgagtattgtctttctatgaatggaaaataattcaaaacccttagcgcatgaaaataagaagaagactaaaaaaaattttgagctctatatactacgaattataactctcaatctcacttttctgacaacaatattcagagttctctaatctgtatacatagtatatgaatacatatacatagaaatgtataactagagaatataataaatctctctctctctctctcaaaatatctctctaataattgtatatatctgaatatgtgaataggtgtctttttagtttagagctataacgtccttttaagttaaaatttatcttttctcaaaaatatctatttttttttcatttaaaattttaaatgttaattttatgtatttaataattacgtttaattatcaaatgaaattactatttatcttatttattaactagatttttaaaaatctcttaattaacagataaaccttatattttctttttgttcttgttgctcctaaattcgccca

SEQ ID NO: 313612 - DNA, 770 bp, Cannabis indica
atcgaaaaaatatgagaagaatttgaaaaactaaacaatgagtctctcgattctctcagtaaaataaatcacataaaaataagaatttctctaaataaagttgtagggatatttaagaaaaatatctttaaagatatactaataccacgtctcttttacgtagtagggaactcaacttgacatgttgaatttgcttggaaaagcacaaggtatggacctttctcggcttgactctgaagtaccttgaacaaagtcttgagtgagtatatctcgtctaactatgtacatattcgacatgtgttatattttttagtgccacatcatactgtgcaaaaattgagataataaggagtgcgtaagtattttagtgaacaagttgcctttttttatgtaaaattttatatacatatatacatataaaaaaagaattttttaaaaaaagaatgttagctagaaaaaaaatatttgagttgggtctgacccggcccgacttataaggggagtcaaggctgacccatgctgattcataaagcttaatggtatgaagcggggcaaggaaaacagatgatggggggagttgatagcggaataaggtcgacccaaccaccctgtttacaatgagatcacctcaattagtgtatacaattagggctggatatgggttgggttgagcgatttttttatttggcagttttttaaaatcacaacccatacctgcccaataaaagtttgggttgggcggttttatgagcggtttgggttgcttaaaa

SEQ ID NO: 313613 - DNA, 741 bp, Cannabis indica
agctgaatctgctaagtgttggtcattctgcgcggattgctgactgcttggcttcgagcatgcatatgaggtatcctatttggactatatcctccgagtagatactcagagttgattccacatgtcaccatcatgtgatgccatgtcagagtgaaaaattgggataacaactggtatcctcctactcgtgttcctcgccgtccactaaaacataactacgtagacacggtgaggaccaataggtgatggggccagacaaagaaattaagacccgatgtggttacgatgactaactcaagaaggttcttcaggtataacgactcaatcaagcttgagactccgacactgataccagatctgttgtccgacaaatacttcccctacctttacgttgggttgtgtagtgggtcagaaactgatcctgtaatggtggcagctgagaggagaccatcagtaccgtcggtgtctgttgatcctccagtcaggcctagttatggtattattggttgaggcaggccatttttggcacaatttgcacagaaggtttttgttgtctggtgttactacaaccctatagtaacatcagagaaagtaactcgagacattataaaccagttaggaagttcttgtcagacaactacctattctactacgagttcgagtctttgcttcagaagccattggatgctgtaacgccctaaataattagggacgctacccgaaatgcttatgaaaccctaa

SEQ ID NO: 313614 - DNA, 2524 bp, Cannabis indica
tgaggaagaaagtcgttattagtttagtctttttctactctttaatcttctaatgaaactgattttgtatctaagctgaaatggatggtctgtattatttttcaaagtcctgttacaaatgtggttagggttatttatagcagttttaggagaggaaaaatgcctctattgtctcaagcgtccaccatggctatgcacaagttccaaaatttgtaaagtagggtatgtgcccctacctagtaggatgcatagggtttaagtgagaaaagaacttatccttgattgaaatgacattttattatgtagttgtgacttacatccttgattaacgcgtaatcatcaatgaatgggtttaatgtgtctgacatgtcttttcatattcgtccgtagacgtttcctccatgctgcttttaatgtcggtgaatatttcatctccagtaccgtaggctcggtcaagctagatgttacctagcttccgaagatgaacaaaaggttgatccctccagacctagcatagttacacgaagaacctatagattatgtccacgaaaatcatgccttcttaagattttcttgagcaccttctggtctttaagctttagctgacacgtgtccagtcatggagttgccacgtatatagggataaaaataaggcaatatttacccccaactcttatttaaaattttgtaaatgcgacttgtatcttgtttctggtttcagggagtcacgtggaaaatatcctgcgtacacgtgggacatttattatttataatcccacctatttgatagaccctttcattaatgcagtggttagagaggtaatcaagcgtttcaatcgctcttttcctttcatgttgcaattttatcctgacagttggatcactgaaactcgaatcgttttgaaccctcacaattagattgcacttgattagttctggcatttaccatgaaggacctataaaagcttatacctcatgtgactgggttttttactcactgtgtttccatttctaggctttaccaccccttttaacaaaattcctaactcctccaacttcctcttacttttcctccgccattgctaggcgaacttctatcgttgtaagacgaattccacttctgcattaccttcatcatgtaagtttctctttctcttgacttttctgtacgattaagcaaagtgtaatagtttgttgttcatttcttttttaaggaagattgcgcgtgcatgttaaatctagcaagcaaggattcatactcaacctcattgttggaggcaggaaatgcaaacctcacgccggccaagagtctcggtccgttaggggatatcattgctactctagctctagatccatgctcatttaatgccccatcgacataaactttccacgcaggtgtatccagatctagcacaattgcattggcttctgtttccttgcagttgactataaaatcttcgcaggcatggcctttgatcgagacctggggtatgtaatgtatgttaaactggctgaagtccattgcccacttgagaagtctttcggaggcttctagtttctgtaggacctgccacagcgggtagtttgtgaaaactttgatcgaatctacctggaaatacgacctcaactttcttgatgcaatcaggaggcagaaggctaatttttttatcaaagggtatcgaatttctactcctatcatgcatttgctgacgtagtacaccgggtgctaaatcttttcctcttctcataccaatgctatgttaactgcattctcatagacagcgaggtacaagtacaagtcttccctgtgaaaaggtttggataaaatcggtggttcagccatgtgctctttcaatttcttgaatgcttcctcacactcttccgtgcactcaaatttttggcagtttttcaagatattgaaggaaggaatgcacttattagtggaatgggagatgaagcgactaaggtcaactaccttcgctgtcaggctttgcacgtctttatgttatttttgggaaggcatatctaataaggcttgtattttgttgggtttgactctattccttgttgacttactataaattccaaaaacttccttgatttgacgccaaaagtgaacttcttgggattaagcttcattttatactttctgacaacttcaaaacattccttgagatcttccgcatgatccacgcttgtcttagatttaaccagcatgttgtccacgtagacttccatattcctttccatgagatttttgaacattcagtttaccatacgctaataagtagctcttggttctttaatccgaagggcatgactaggtaatagtagacccccttgtcggttctaaaggtagtacactcttggtttgtgacatgcatttcgatttggttatatcctgaatatgcatccatgaaggacaagagttctaaatttgaggtggcatccactatctggtcgatcttgggcagtgggaagcaatctttcggataagctttgttcaagtctgtgaagtcgatac

SEQ ID NO: 313615 - DNA, 602 bp, Cannabis indica
ctgtaaaatgatactttataattggttagcggtttttaataaattttattaaagtaaaatatgtagaactcgatattaaattacactaatagtaatattccactggtattaggtattataagtgtcctttagctaaaaggtagatgtatcatatcgagtattttattagatactagagatgacgctttgtaattaattagcaatgttttataaaaattattatattaaattatacataaaacatgatgtttaattacacgataagaatatgatactttagagaatattaggcagtacttttatcttttagtattatatcattattaatctaattaagtattaaattttccataatttaattttataactattatatataataataccactaaacattcacaaaaactagtgtcttatattaataacctttctaattttatcttgtatagatcaagagtcagccaaaaaaaaaaaaagaatctttattaggattcatttgtatgggattatgagaagagaaaaataggatatgttcatcatatatattttctttttaaaaaaattacgatatgaaaattgcttttttaaaaaaaataaaataa

SEQ ID NO: 313616 - DNA, 966 bp, Cannabis indica
  modified_base (43)..(43): a, c, t, g, unknown or other
aaaccaccaccacactagagctaacctaaaattacacacaacncaaaaaaaaaaaaatattagccataatatatcacaacagagacgacctcaccaccagagttaggtaccgaaatctattcgacgttatggtcgatgccgtgatttttgccatggctatgtctgggcacgagaacatcccgttggtggtaacggagactgggtcgccgagctcaagcagcgacgcggggaaattagatgccaacccaatctatgtcgagctttacatgaagggtttggtaaggcacttgagatagggattcggaactcccctgaggaaagaaggggttgcagagacttacattacgagatgttcgataaggaagagaaacttgaaactcctaagaagaatccgacatgggtattctttatcccaatatgaccaagaagtataacattgatttttttgggtcgataaggactgtaaggaatttttgggtgagtcttattgttttgcttcaattggcttgtttctgttatagagtttgttttcagtaatggggtttgatgaaaaagtatggattgtgctttttgtataaagtagttttgggttctactggcttctgctgtttggttttcaagaaaatggatcaattttaaattttctttttctctgtaaatggggaagagtgggttattttacaatggaagttttctgcaaaatatgaggtggattgtggttgccgggttttatacaagctataaacctaaaacctttcttctaaagttattttctttgtttcctttgtttttttttgaatgaataataactacattaaatgatttttttttgtttaattttagggtagttctagtgtggtggtggttttggttgaaggtggatgaagaagaagaagttacaggaggttgggggttcaagtctttcgagaagaaagaaaaagagaaggagaaagaaaagaaaaagaa

SEQ ID NO: 313617 - DNA, 1102 bp, Cannabis indica
ggattaggtggcttcttcttagcatggcagttagacattttgaattatttagccaagtaaaagaattagtgactagtgagtattatccttttagagaaaattaagaaaaattaagaaaatctctctttttctctttcctttgctcgaccattacaaagaccaagaggaaaccagcaaccttcgccattgtttttgaaattcaacaaggaatcaagtagaggtaagccatagaactttaattctttagtagttcaagctcaaatttagttcttgtatgcaagttgatgaatttatggctattatggttaggttggtttgtaattgggtttctaagtttaatttgagttatatttcatgagttctagttgctggtttggggatttggtgtggtggatgcacaagtttgagtttgaaaactcaagcttggttcatccatggcatattttgattctggatgtatgtctgaattctattgcttaaattatgttgtttgtggtcattataagtgttctggaaggtttggtaaggtttgagcacgttttgagcaatatttgaattttttgggaaatctggtgcaaactggtcaaccagtttgacaggtcctataaaaaccggttaaccggaatagggcaggtttcccgaattattcaattcatcaattcgtgttagtttcagagcctttgttgggtgattctttattccttagggtattgtagtgtttcagttatgtatacaagaacctttagttggaggtttggatttcccagattagggtttttgcgtgtcgtttacccgtttatgtggtgtgattagggcatccatccagcaggaagttttccattcaggttgctcaactcacatgaatttgaaaatgaggtaagagtagcatagaacatattgtatatgtgatatatatatatatgcatgcttgttgtgattcgtacactaccaacacttttacggtaatagtacagagtgcattggtatagtgtgtaacgtttaaagagtatgttacggtgttaccagcacaagtatggaaaggtacagggtgtgtgtggtacaacacttagtggtacttgaggtacgaaataaaccctaccaa

SEQ ID NO: 313618 - DNA, 933 bp, Cannabis indica
ctgggaaccaaaatttcaacccccaaaactcaatttaatcccaaactttgtgaaactctccagtatacctgtatgtacccaaacaaactcaaactaaccaaaagaactcaacaaaagcctcaaaatccaattttaccattaaagctcaaagttgaagttctcaaactccaaccttgctttaacaacacaaacatcactaaaaacagcttgaaatctataaaataaacataatttaacttaagaatatcatagcataaaaccccaacatcacagtaccaaaatcccaacccttgcatcaaaactaaaaacaacaacaaagaaattaaagggaaagaaggctaggatgggataccttgaggtgaagcttcacaaatcaaataagattacacaaaattgcttgaaaaggaatggattctcagctggttccttggggttcgaaagagagagggagagaaaaacttagaaatttctaggttgatgattttgtttaatttcctttcttttctttctttttaatttaacttttaaattaaataaaaccaaatatagtaattgctaaaataagatataacctcagcccctaaaagctactaaaatccaaaaagaaataataataataaccacatgaaatgacctatttgcccttaactataataaagataaatattcactattatgactaacaagggtaaaatagtcaaataaaaagatcccgaaaattctaacgcctctaccatttaacgataataccccgataatctaaattataaaatgcgactctctaggcccaacgtcgctttccacagcttccgaacacaatcacagaaattaagtaattaaatataaaatagcatagaaacatatatgatatataaaatacatttctaaaatatgcattctataattattaatacataatccttaaataattaa

SEQ ID NO: 313619 - DNA, 1805 bp, Cannabis indica
tcatattgtttatttttttattaaaacttattttcaaattttgctatttactccgaaaatctaaagctaaataatagtataataatagtataataaaatttttaaatcactattaaaattattgcaatgatcctaatgtcattttcattaattccgaagataaatttaggacgaattataattttttttaattactattacaaagtataatagtaatttttatttttatttaaatcactattatgctttcaaattttaatgattatcactacattgagtattattaattttaaaattatgatattaaaaaaaactaaaataaaattaacataattgacacgtaacatctatctagtatatatatacctttcaactgccctttaaattttctgatttattatcgaaaattatacttaagcatattgatcacgtcacaaactatattatatatattatatattttgggattaaatatgtgttttgttcactccatgaaatagttgaaatattttggatcagatgattatatattaattattaattataaaattaataattagttaaaccaaaaattatgttttaaagaaattgtacttatattttttataatttttgtaatttttaacagcacttaactttcaatatttaaaaatagtaaatgtgatatatgtttagggttctatatgctatcgatccccataagatgggaaaaaggagataaagtttaaatatttaggtattattaaagtttaaattaaatatttatatgatgagataataaatttaaatttaaactatattaaaaagtaatatttttagttttatcaaaaagaaaaactttattaattaaaatataaaaatacaaacaaataaggtcaaaaccttattacaaactacccttccctactaccaagaccgatcctgaaatttagtgagtttaatttaaggacaaaataaatatttatgggctttaggcgcaagcatagtccagggcgaccaaccctgctgcctatcctaacattacataatacatactcagggccggtcctaggcataggcgggctaggcccgtgcctagggcccactcattttaggggtccaaataaaaaaataaccttttaaaaaatacaatatatagttttagtaatttttaaaaatatcatttattaagggtctatttttttttttttttgcctatatataacccatttcaactcgaaaccggccatgtgcatactgttaaataactatattatataatataaaaaagagattaaattaaattattaataaggggttttaattattattacttattatttagtatagtcagtttcatgcatgcatggccatgcatttatatatcacgtacgtactctatacacgtagtttttttttatctcttatacataattataattagggctcctaataatatattaagttatatatctaattaatgtatatccctttaattattatttgattataacgtgtacaaatcttcagacaaaacgggttttgaaaacgttgtattgcctcatacgtaccagacaagatccttccgagggtttaaattacataattaattagagataatgatatttttgtttttattaatgcgttgagaaaattataatacaaattatttattatataactttatacataatatagttatttattattattaggatatatataaatataaatatatcacaccatgattgggtattatccatgaatggttactaatcaaatttaactataaatattaattttaaaaatatcaaatcatcgaattt

SEQ ID NO: 313620 - DNA, 738 bp, Cannabis indica
aaccgtaaattcaaaaaaaaaaatagttaaaaaaaatagcatatggggtaatttccctttttgtttttgtcttatttatattttcgataattaattatatttattagtacattctttttataatttttttttttgacattaagggagggaggattcttacttgagacctcctctttttaaagagaagtgtgtattaatgcagattttcgttaacgaattatgagcctttttcgtaataaacttaacataggtattataaatattaatgatgtttattaaatataataataacaccagatattttacgtggttttgcagttaaatctgcatactccacgagtctatcttattcaagatatttctgagtatataatacaatattacaattagtgatcttttttttctcaaagatcttctgtcccctttttttttgtagaaaatgcccctatttatagaaatataggccggcatttatttacatttgaatttgaatcacataactgtttcatgaaatgagggctttgatcatgtttcatttaaacacgtgtagataacaaatattgataaccgcacaatcgcgcttatcatttttatcttcaaggcggttatcgctgacgtgagatagtggtatctcgttttgtatatagatgaccaataataacttggtttaatcatatgccttcctgcaatggcatgagcctaatgtactgagaaaacttaagaactgctctttgacca

SEQ ID NO: 313621 - DNA, 769 bp, Cannabis indica
tatcatctcaccctttcgaaacacgtggaagctataaatagtatttctaagtgttaccagaaacaatcgtaagctatagctaatctgaaaattggttaccagctgctagccccttagattcacatttttaagtcacatttcatttgaatgtgcatttattaaccattaaaaaggaaaatatatatgtatatatataatgccaactgggaataacctggacgtggcaataaataatatttataaaatgtttaatgcttaaatatagcaacaagaaagtttcaaaatatattatatatacatatagcaacaagaaagaaacaaaaagaaattatcttctcaaatagtattgagtgagagttttaaaacggtattaaagagattgtattaccctgccaacatttctagagacacaaaagttaatcaagttttgattatgtttcactttcaaaatttgttaggctacatactgttgagctaattaaacagctagctatggttaagaatattctctttatctaatattagtgaccatcaaggtgaaaagtagtgaccgtctctattttgtggggttttctttcttttttcctttgaaattaataacatagaaattagagccatgaaatgaacctattgtaatgtttatatatctcctttgaataattaaggtgccgtttggtaacacttttgttttctaattttttaatcacaaaatgaaagtaactttttgtttttaaaaaatttgtttttgaaaaacaaaaatgcgttctgt

SEQ ID NO: 313622 - DNA, 921 bp, Cannabis indica
ctaaaagatttaatttaccgaaacaagtttaaaaattcacccctcttagaaacatatcttgggttaacacaatggacccaattaaggttgtaaaagattggaacaaacttagcgggaggcctaagtgagacacttatggcttgcctcaagagaaatcaagacatctttatttggacacatgagaaaatgaatgggatcgaccccaaggttatctgtcatgccctcaacatcgagaaagaaaaggtcaagcctgtacaacagaaatgcaagctttttgacaaagagcattcataagctctcaaggaagatgttgaaatgttgcaggaaaacaacttcattagagaagatttttacccgatctggatatccaacccttttctagtgtccaaatcaaatggaaattagtggacatgcatcgacttcactgaccatagcaaagctatccgtaaggattgttttcagcttccctgaattgatcaactggtggacaaaacactcgactttgaactcctcacattcatgcatgcttaatctggctacaaccaaatcaacatgtgtccacttgacgaagagcaccctagcttaacaaaaaaaaacatctgcctcaatttctataaagtgatgcccttcggactcaaaaatgtttttgctacatatcaaatactagtcaaccgtatgttccatgacctaatcgggaacagtgtggaagtctatgtcgatgacatgttggttaatttgaagaaattttaaaatcaaattaattattttgattaattcttcacaagcttattagatgaagcttaatcccctaaaatgtgcttttagcgtcaatcaacaaagtttctcgggttcatagtcaattcaagaaaaattgaaggcaaatccaaaatagatcaaggcattgtaaagaaatgaagtcac

SEQ ID NO: 313623 - DNA, 2326 bp, Cannabis indica
actgtcttctttgtgattaagtagctgaatcacatcagcatattttctttgattttttgctactgcagtgagatttttagatccattttttaatggcttgatttacccatgcaacacactactttagagacttgtttgaagaatattaagcgatgaattaaagctctctaaattcagttgtgaatttcttgtaggcacaatggtgaatgctatggtttattcaatttgggaagcaaggaatgctagtttgtgggataaaaaggtatatgtatattgtaaataatatagtaaaaagattaaaactgatatttgtattaggttttctcattttaatagagaaaaaacaaatatagaggataaagagtggtttgaggctttaagttctagatgaggaactctttgatagttgcatggtattgtaaagagttgagattgagcaataaaattttcactcatttttttttttaaaaaaaagtaaattattatgaagtagctggtgtgggattgcttttagaattagagaaggtcgagcattttttagggagatattgtaggaatcgaatatcctaaaacatcatataaaagcatatatatcctaaattatatgagaaaacgttgatttttactaccttcaaaggaccacccaaaagtcactaggttggccccctttaccaaaaataaaaaaattcactaggttggtgtagtggtgagtaggccggggttgtaaaatgggggagatcaccaaggttctacgtaggcctcaatcattaagcacccaaatatatgttaccaatattgtggtcactttatacaaagggccggcacgagtaacttggattgagaatatctcaataagagtaactaaaatccatgcgcctagacttcatgagcattattattatgtattattattattaagtatcagtactacttattacctttaataggtgccgtcttatgattaattagtgatattttttaaaatttattttcttttaagttatataagacttaatacttaattaatttctttaagttaaattttcacggagactataggtagcttaaaattacaaacaagaaaagaactactatatatactggttggatagtctcaacatgatcaatgcaaaccagctggcaaaggtagctagttaggatgtaaacataaaagtatgaaataaaacagtactgtgccaattgcatgcttatagtaaattatatttagctacctagatgagtctaaaagcagttcgtatgtgtcatcaacttttttacatattcactgactcatctataattctacatatatgtatataattgatatacaagccgccaaaggttagctatagctacagtaatcgtcttattattataaagcctaggcttaattaattaatctatcattcttaatattgtgtacaattattgacaaaacaaataatgtaagtaatggtcaaagtaataactgcagttaataattgtttatttgaattttgctttcaattcaagcttgtaaattataattctcactatatggaatatgcatatatatgaagacaatgtctgagacaaaaagtacaatcctcaaggcgatgatctctcgttacaccagaagcagaaactttaatatgaatcatcacaatcatcattacgtgtctcaagtttaggcactgctacctgcttttctacagttggtactgggatctgggatatatatatataaatatatataatatgtttacaatattgaagccctacattctacgtacccacttagccaccatatatttaactaataattcggatttttttttgttttttttctttcagtactgtttgatcaataagtaaatatatatatatatatatatacacacatataatagcctcgtgacacctatctagctagtatattgtcaatatacataatagaacactttacaaaaagaaaaaggaaaaacattatatatagaactgctaaatacatatatatactaacatgtttaaactaataatggtcaaaattttgtcagtagctagaacgatcaagtgaaattcatacaaatattaattaaacaaaaacttttgttattttattaattaataggtatatttgagggatacataacaatgaaataacaacacaattaattaagagacgcacgatttggttatctctaaattcacaccctaagctcctaacactcactaaattattattagaatataataaattactcagtctaataccgcacatggacatactaaatattaagctataaaaacattataactcaaaacttatttcaaaaaaaaaaaaaaa

SEQ ID NO: 313624 - DNA, 1427 bp, Cannabis indica
tatatttctaaaccacttacaaaaaaaaagccatatttataaaataaaccctttgattaataacatctcttcaaaatgtcaacattgatatgttttattgacatttgacataaaacgtcactagtttatatatatttattaatagtatttaaaaaaaaaaatgtcattaaaatatataaataatcacatttgtaaaagtgtcacaaaatatgaaaatgactaacattttaaaatgtgagtaaaaataccaattttttaacaatataaaataatgccttaaattaatatttctaactgttttaaaaaaataatattactaaaattttcaaataataaataaatattagtaaaaaattaaaaattttaagatgaaaaaatgccattttacagctacacggtttctcttctcagtcccggtagaaattttttctgtcaccgacggtcaaatccgaccccaccgtgagattcgccggcccctaaaacctaacacccataagctctctccttctccgagcacgacgacgcatctcagacggctattgttcagccattgacggtgcaagcggacacagatcaagcttccttcccctttctcggtcctctcattctctctctcgttctttcgatgggatctttctctgaatgggtaattctctctctgctttctctatttttttctctcttctctgtatatgagttaatattattattttggtggcttggctatgaccccttaaccaatgattttaatgtggtggtgttcacacctcgacattcttttaaagagggtcaccaaattgggagtttgagaaacaattcatggaaaggaatttcaatgtctaacctatttccagaatttgactctgctactgttctgttatactatctatgggcatgtccattaatgttaataacttcatttattggtctattagctatgaaaatagtaatacaactaatgatgaagatgaactggaattatttacagggataattgcttttgatataggtaaggagaaatttaatcttataaagttacctaaattttggagaggtaatgatggtggggacatagctaaaatttttgggtgggtgtctttctatgatatatgtggatgaagacacagtagttcacatatggattatgaaaaattatggtgactcttattcttggtacaaatattaattttttagtttatatgatcttatttcagataagcttggtaaattttttgagcaatgagattatgttagtttctttatttttgactggttattattgtagtaagacacaagtgtaagataagaggatgatatcctgcattggacttcactacttatgcagagagcgttttcaggataaatgagtgacaatttcgtatatgttttaaaaagtgagtttaacacttttggatctttcctcaaat

SEQ ID NO: 313625 - DNA, 915 bp, Cannabis indica
aacacgaaagaaatcctctcatctcgacaacacgatccatccaaaaattggttttgaagctcttaattatgtgtctgctcccatctcgtttttgtggatggatgaggatgccatagtttagatttctaaacccagtgtgagtctaggtaaagctcccatacatttatatttaattttcttttgattgtatatgtatgtttattgtataaacttttggtttgaatttgtttttgagttttgtgatataatttttttgatttactgtgcatatactattgttcattttatcaattcctgagttattttttgcagatgtattcatgatattgattattgttaatgaatttcctttgatcttgatggttctcatacttttgtttacgaacatctattttactttttgtgtacgattataattttcactgtacaagcattttggattattgtaaaacaaaataaagagatcttctttaaagaaataaaagaaattgattgtatggacatgaacttagttttactccatctttgtaaatgtattgatttaagtttttgttacgtgatattttgtatacataaattttattgtaatgttaatctgttattgatataaattaatgaaaagtatttataaaattttatcttatgataatgtctatatatttgcattacaaaattctattttctaattatatgtttttttattaaaaaattatttaataaaaaattaaaatatatacaattttattatgaaattaatattaatttaattattttttagtaacatttttccaaatgatactaaaaagaatatagtgacatttgtacctatactcacatgggtatatcttacatttttcacaaatgttattaaagccattaatgttactaaaactacctaaaagtgacattttcaaa

SEQ ID NO: 313626 - DNA, 2634 bp, Cannabis indica
aaaattataccattttttttactgatttttaaaaataccatatttttttctaaataagagcccaaaataattttttttctatggcccactaaaaatcagggccgaccctgctcttgagtgtgggtttgtttaacaaagtcccacaccattgcaatgcaacaaacagcaaaaaaaaatcaaaactttctctaatgttgggtcttcttcaatatgagtttttttaacaaactcatttttttcacaatttataagaagatttggtctacacaattctttagaaagaaaaaaatactccaatttttatccaatgcaatcgttatagtgtggatcttaccacttagaagttagtattaaatgcctcatgagtaaggtattttataaaacactttttaatagatattacaatgggtactaaataaatttaactataaatataaatttaaaaaatattaaaccagtaaattgtaatctgatgatgaatatgtgatcatcatgcctgcataaagtaaattaaatgaaattattttgcaaattataatatttcacattgttagtttgataaattttttactgaacgtaatatgaagcaaaacatatcctacaactgcaagttcttcgctccgttgagttgttgacatttttaattctacatccatatttatgtttttatgtgtaaaaaataattataatcatcattaatctatatttacatataataaaataaaatgtaagttttttttttggattaaattattcatgcaacactttgaccaacattattattattagcacctctatattgaaaaataatacattattaattgggaaacaacactagtaaacaatagaatgttatagaagttagaaccctaattaattacaataaccaaatatttccttgagaaaatgtaaaatgtatataatattaattaaattccatataaacaggattattgtttaggataaagttattagcttatataattataatgaccaaatccaaaacattggtccatgcaattttatgcttattattgtatatatcacatgtttttacactctctataattgtcactccctaggtataccttcatctacatgggtacaacaatatatatatttttttttcatataatatacatacatatatttgtatatatctttttagatgtgtataagtaaaaatattatttatttattgtgttggttaactagattttcttaaaaaaaaaaacaattgtatatgtatcatagcttggtgtataatttggacataaaaattattattgtctatttgtaattgtcaataaaacattgtaaaatttgaaaaaaaaaaatatatgagtaaatatgcgagggtaagtctttagtgcacctctcttcgtttccaaaaattaatagttgttttggtagacttcttttttttttcgtatattttggaaaaatatttactccatttttttttttctatatattatagttatttagaaaaaattaagaatagtttgtaattttatagagctacaaataagatttaaatattttatttcacgtgtaattattattttttttatacgagtggtaagcagttatttgaaccttatttcaactctataaactatttgaaattattgaaaaatttataggctgtcataaataactaacacgtatacgattatgaaaaaaaaatacacattaaaaaactctcatgaatgccaaaataagtaagaaatctacgaaaacaattcttctggggttgcggctattaaaattcctatatatagaaaaattgtagaaatgttcgtctcctacttcaagcctttgtcggggcactactaccctaacaaatttatgactcttaatatgtctattttgatttgtttcttagaacgacgtactaataatctcgcaaactaatacgagttctttcagaatactttgttctcatcgtatacttcctgggaaatctttattcacgaaggttacttctgatgagactactctaggttaagcttgtttagctttgaagttcttaaataatggttactccttagcatatgtgatatataatacctatcaatttatttaaactttcatcgtcatatgtagtctcgtacctatacaataaaatcatcacatttgacatttttcaagtaatttgggaatatactcaatttttctcaaatgatttactatcacagttctaaatattcaaatgcactagagtatgtttcaatatttttcctattataaaatagttgtttaattaatttaattattaacaataacatatataataaaaacagatcattattatatatttatttaataatgtgcgtacgtacgtgatcatgaagttaaaatatagttcatgattttgataattaaagatgatcatatgcacggttggaataataataataataataataataataataataataataataataataataataataataataaattattgtagtatttgtttttcattgatctatttaataaacatatatatattctctatcaattctcaattatttagtgcaagatgctaaacaaaagacatacaaacaagtgatttgcagtatacttaaaaaataataaaagtaaattaatatatactaa

SEQ ID NO: 313627 - DNA, 546 bp, Cannabis indica
agcttattctcacacctttgttacttgaaaaattatgagaatatattaaaaacactaaagctgttcaagaaattaaaagaaaatagatgctatacaacttatatttatattatccattgatcttaaatataagatataagaagagattaatttaatgaatatatatatataataataataatatcccatttcaaaattatatatataatatttctttatagatttcccaaaatttggcccaagctatgaagcactattatataggacaaaaatctgtgtcaaatgaatctgtataatttttttctcaactgagacttatatatccttttttcgataattttttcctttttctgtaaaacaagaatattaaatgcaatttattataagtttgttgagaaactctttcaacaaaccacaatgacataaatgtcttagctaggtaggtacctatatttattcaaaaattatttttgacgtatatatatatatatttttattataaaataatataaaataatataaagtagatgagaagaaagaagaaga

SEQ ID NO: 313628 - DNA, 1211 bp, Cannabis indica
attaagaaactaagaaaaagggaatgttgattacattaatggtaaaaaatttagacatccacataattaataatatttataacaaaaaacatatacttatctttttagaaagcctaagaatgattaatgtgattaaaaatctttttccacttagagttcttgctcatgtattgaggttaaaccaagaacaacattatgtaggttattctattagcccacactaatctttgtgtgtagtgaattattcagaagaccacaatgtgagttcttcatcatcatccgaggatataacttaggaaaagaaacaagaataccttaataggctttataaggttaatttttttttgtctatttattttagatttaatgtatatacatatgattatcctatggatgtggtacgatgataatgagaaattattgttctactgcgtacctagtttagtaccacaaaaccaacaaatagtaccagagagattccactatgtatatatatcaaatgttctgtgggttttatgtatttatatatatatgtgatatgtatgtgaatagatggttgtgatattatgaatgtatgtgagattgtgaatgattaattatatggtgaaaattgggagtagatttgccttttattgttttagaaaattatgtaagccattaatgggcataagagttttatttaatttatttttctgaaaatattttacattgtaatgctcataaaatggagcttagacttcaatggaatcttgaccaggtatcaccacccataacagcattgagcttgagcactatatgcacgggccatgcatgacaaagaacgtgaccaccacccatggtggtcctccagttttttgtcctatgcctcaacagagcgaacgaccctagggcatactgctcctcccaatcacatgttccatttgacgagacttaggaccccgttcatcgaaaaaagaatgaaaaaccactggctattgtcttcctggttcatgcacgatgacggtcacactgtcgaggatcgttgttctccatctactgatcgtcaacagcgtgaatgaattgcatgcaatggacgttcgatatccctaaacccatgcatgaacagtgatttgttttggtctttgggtcatttgacctggatgtgcctgttgttgccagttcttcctgttatattatttataataatataatatatagattaaatatgtgta

SEQ ID NO: 313629 - DNA, 562 bp, Cannabis indica
caacaagtaaatctaacaactgaaaaaatagaaaagataatctccaaggagaggaattccgctcaatagcctttaccagcatatcacagtcgaagagcagatcaaactaagggaaggagagctttttcgagacaaagacacttgcaacaagtgcattcaactatgccttcaaagaatctcgcgcttgaaccttctttgcgaaaattgacctaacatttccctcgtcatctataatgaccactccaactgctactcttccatcagagaaacttgcattaactgaaacccggaacctcctagggcgaggaagggattgaagggtgtttactgacatttttggaaaatcaattataaataattagaaccgaagaaataaataattaaaagagaaagagtaagaacaatacaaacagtttttaggtggttgggacgttaacgagccttagtcctcgagtcaatgttattatgtaacttaagctagtaaagcctttgggaatacaatgagcgtaagttctcaagtttgcctgaacaaatattgcaagagaattcaacccttaattcg

SEQ ID NO: 313630 - DNA, 2046 bp, Cannabis indica
tgatgttgaataaaatggattacattgaaatagagttttatttagggcataaaacccaacatgaacaacctttcgagggtgacccatacacatggattaaaggaagacatttggtggacacaattaaagaaagattggattagtgttttgtgaatgatctttggacaaatacttttgatcccattatgacacaccatttgaattattacaactccgatcacagagctattgcagtcatagtaaacccgattcatagtgaagcccaacagcaaaaacgacatacacggttcagattcgaacaactttggcttaaacatgaagaagcctcaaacatcattcagcaacaatgactttctccaaactcaggtactgccatggaaatttttttaaacgatattggagcttgtgctagttctttacaaaaatagcatgtatctaagtttggaaactttaagaaaaatattggtagagcacaacagcaagtttcaaacttgaattatgtcgtgactagaacaacttctaccatggatgaattaagtgttcttgatgaattgttggcacaagaagaagagtattggcaacaacggtctagagtcgattggttacaaagtggagaccaaaacacaaagtttatccatgctcatgcttcatcgcataaattagggaataagatctcttctcttatggactgcaatgggaataagataacatcaaaggctggaatgaccacaattatacaagattatttcaatgatctcttctaagcttcaacgattgaccttcaagccttggatcttgttacagctaccattccaacaacaattactgcaaaaattaatgacacactcacccagccttttatcgtagcagatgttacaacagccttgaagacaatgagtcatgagaaaagcccaagaagcgatggtatgtcagaaatgttctatcaaaattattggcacattgtgggtaattccatcaccgaagtggttttagggatactcaacgaaggccaaagcatggaatagattaataatgctattatcacactgattccaaagaccaactcacctgctgctatgacaaattattgcccaataagcttgtgtaatgtcatctacaaactcgtatctaaaatgatagtgttgcgcttgaaggaagctttaccgcttgttatctcggagactcaaagcgcttttctctcaaatataacggataacattttggttgcttttgaacttgtgcaccatatccaacacagaacaagaggtggtaaaagttattcggcactcaagttagacatgagtaaagcgtttgatcgggtagagtggacttttctttgggcagttatggagaaaatgggctttgctagtaattggattgcattgatacagaattgcttgacctcttcaagtttatcgttctcccttaatggagaagttacaggctatgtgaaaccatcaagaggtctacgccaaggcgatcccctttcaccatatcattttctgatcggctcagaaggactctcgagactgctgcaacatgaagaagctattggtaacctccaaggattacgccttactaggagagcaccctctgtttcccatctccttttcgcggatgatagcttgcttttttgtgagacaacgaataattcagcattggcaattgagagggcactaaacttatatcatcgtgcttcgggtcagatgcttaacaataaaaaaatcggttatgtccttctctccaaacactccagttgcatcgcaaagttatttccatcaaacactgaacatgccaattagcgagtgtcatgagcgttatcttggattgccttcttactctggccgtgacaaaaagagctctttagcataataagaacgagtttggaagttgatgcatgcttggaatgataagttgtcttcgggttgggggaaaagtggttctgctcaaagcagctgttcattcaattccaacctatgcaatgagttgctttcgcttaatgaaaactttttgcaacaattggaaagcatgatggctaatttttgg

SEQ ID NO: 313631 - DNA, 1051 bp, Cannabis indica
gtatctaaacgttatccactaatgggataaataacatattgacttcgggtccatttgttgaaactcagcccatgaggcaatgatcttttgctgacgtggaggccatgtcatattgatagttgtcaaaatgtgtcctatctttgtgaataataaagacacataaatgcttaattgataattaccttatttccatattcgaaatacctattcttggatataatcttagaaataaaatcttgatattgtgagatgtaataataaatgagcgagatactaagcttaacatttgggggctcataattacctttccaagaacactgcttggtgctgtccagaaactttcttctttaggtctttatctcgccaaaatgaggtgtctgtctagcatccaaatggcttgacttcaatataggctcaatcaataatatacttgagcctatatttgggcatgtattagctggagtaaagtcttggaattactaatgcaattccaaatgcctatatatgacaataggacttattttctatgcacatataataataaatgctaatttaatcactaataatatactaattttcatgtctaagtgcggttattacacgtcgagccctcgacaatccccgcctctccaatacacttacttcactcgattttctttaattcgtcactgttaagtaaaatacccataactctcttatgcgaattccaaataagacaattcaagatgctatgaaaagctcagaagagctacaaacttcattcacaaagtttttcaagaatataaatagaaaatgatcaaattaaggcttgaatttttagtattctgtaaactaaacccgagttatgccaacttgtacaagaatcattaaatctaccttaactttgtatctttcctgagtttttttcaacacaaatgctaaattaaatattaacaataaatattaaagaaaataaatttaaaacacactaatattaatcaaaatcctaaaaaaaaaactagaaaaaaaactctatttcatagagttaacagaccccgaccccgaccctaac

SEQ ID NO: 313632 - DNA, 882 bp, Cannabis indica
aaaatagctttgaaaagattataatgtgtcatgtcaccgctctattccttttctttatatatatagatatatagattaataccgttaaaaaaattaaaaaaatatgatataatttatgttttttttataatatatatgagcatttaaaaaaaaattgttgaatttatatttaaatctgaattaatccgtatatattaaaaaaaaagataaaataaaactaaatttactttttattattataatgtaccttaataatttttatcacctcatagaaagaaataacatgtaatatttgttatactagctgttataaatttatttatatgacaagataaaacatatgaatgtgtatataaaatacagaattaaacgaacatatacacgatataactaaaagatcgaagcacctccagacattaattttttgagcttcaatcccatacgagctttggatctggagaagaaaaaggaaaatgattagtgtgggttatcacgcttccaagctctctttacactctttagatggatttactgtgtttaacagaatgagtattgagcttgtggaccaaaatcttacatttatataagtgagaccttttatcaaagtctctgccacaattaattgttagattaactgtttattattataatgtaacttaataaattttatcacctcgtatatacaaaagataaagaaataacatgtattatctattatacccaatgacgaagctgttagaaatttatttatatgacaagatgaaatatatgaatatgtatttgaaatgcctaattcaaggaacatatacaccacataactaaatgatcaaaatacctccagctattgattttttgagcttcaatcccatacgagctttggat

SEQ ID NO: 313633 - DNA, 2665 bp, Cannabis indica
attgcagcttggttgtcgtgtagagtttaacaggttggaggtgtttgatgccaaagtcaaaaaggatgttgagtaatcatatgatttcacaatttgtgtttgctaaggatcggtactcagcttttgcagagaattttgaaacaattgtttgcttttttgatttccatgatatgagagacttgccaaggaagatgcagaaactaatgatcgatcgtttagtgtttggacaagtgccccaatcggcatcacagaatgcttgaagatgaaaaatgtgatatacgggatgctgagtaaagttatttgagtgaaagaatagaccttacccaggagtgcccttgagatattgaagaatgcgatatgcaaccttcatgtgtggttgtcgagggtcactaaggtattggctaagtcgattgactgcataagagatgtcaggtcgtgtgatagtaaaaaaaaagaagtttgccaataaggcttctgtaggaagttgggtctgaaacaggtggtctaacatttttattgaggtatagatttgctttcataggtgtggagacaaccttagagccgaggagtctaatttcagtgagcacttgtaatgtaaatggtctttgagatacaaatatatctgccttagatcgaccaatctctaatctaaggaataaccgtaggggaccaaggtcctttagttgaaattttaaattgagaaatattttgaatgcaacaacatttaagtcatttgtgcttgcaatgactatgtcatcgacatagaccaagagtgcaaggaaactagtaggagataatcttatgaacagagaatgatcataagcaaattgagaaaaatcatgctcaagtaaggtgtttctcaattttacaaaccgttgttgagatgcatgttttagtccataaaggcttttatgtagtttgcaaacagggttcgaaggaagctccccctcatgtactagaactagaaattgttttaggatattgaattttacaactggtgcaaaggtctcaaacatagtcaatactatgttgttgtctgtatcctttagctaccaaacgtgccttgtatatgtcaactttacctttagaattgtattttattttatacacacatctgtttctaattgaatggaaaccacgtggtaaggatacaacagtctaaattttgttcttttaagagcaaagaactcattattcatgacattcaaccattgagtcaatttagaagcttgtttaaataaagtaggctcaaatttagtatatgcattgagaataacattctgaacagaggtattaatcctatcataactgtgatattgtgcaagagagtgagcagtaaaggtgtgacaaacatagtccttgaggtgactaggtttggaaatttgtctacatgctttagttgtttgaggaggaactgttggtgattgtgttgcaagatttaaagccattttattgggattagttactgtaggagaacttgttctcagatcctgctgaccaatcttgatatctgcaatggtatttgagggaacaaatgatggagcttggggaaaaaggtgtctaactattgtattttttaaagaacctttgagaggaaaaatattttcataaaagatgacatccatagagtgaaatatattgttactagcaagatctagtagagtatttgctttcatgccattaggatatccaatagaaatgcaagcatggactctaggtgaaaatttgtgtcttttgtttactaaagaagatgcataaacaagacaaccaaagttctttaaatggtcatatgcagggggtttttagtgcaacagttcaaagggatatttgtgttgcatcataggtgtgggggttttattgatgaggtatacaacaatgttaattaaataaggctagcataccaaggctacaaaaggttgaaaagccaaggctcgagccatattcaaaatatgtcgatgttttctctcaatacagaattttgttgaggtcttttataacacatgaattgcagatttagatacctttctgagtataaaaggaagttatgaattaagttcctttgcattgtcacacctaactgcctttatattgacagaaaattgagtatgcacaaggctatatataaaattgtggaatgagatggtgcacatcagatttggattttaacatgtaaacccaagtcaacctactgtgatcatcaataatagtgagaaaatatcgaaaaccttcaatcctcctaatgtggaaggtgttggttttatggtactaaatcaggtacgcaacgaaagagttttatattatctgattatcattgtactatattgatacataatttttactgcaagcgtacaatattgttatagcaaagtttttaattctaaaaagattgtcgaatccacaagaattgattattaaattttactaattattatactttttgattttatgctttaattagagaatttaaagtaaataataattaagaatgaaaaaataaaatagctgaaaagtaaatagacaaacaaataagaaattaaagacctagaggattggttatgaatctcagtttaccgattattccaatttattctataatttgtagtttcaagaatcctaatataatctattaacctctctcaagtgatgatagaattaacttaattaa

SEQ ID NO: 313634 - DNA, 965 bp, Cannabis indica
atctaaggttttatggttctcatttatattttaatgagagaccatatgattaacttgttgtgtagttagaactttgtgagcggtgttgcaaatacatgtgtaacatcctacctgacccatattttgaaaagctagcttgcaaaaagatggatcgagtcgtgtcgtgttgtgttggaccataaaaaaatatagtacgtattgtgtcgtgccaataattttataaggtaagcttgacatattctatagacctagtattttcatgtcatgcttaaatttgtaatgtgcttcactcggatctaccaatttttcttaaataaattgcccatttttcatacgtgctcaaactcgtactccacattttaatatttttgttataattaattgttaatgagcaacagtttacagatacttttagttagttagagttagttttaatgttcagcccaatcaactaacttgttgcaactaactctaactaattttgtaactaatttccactataaatacactattataatagctcactctaaactaatgaagtcaatttaattcattcccatttcatttgtttaacatggtatcagagtttctctttctttctgaccattcttgctttaattgaagtatttttcatctcgatcttgctgatttaccgttctgttctgttttgattagtcgatctttgtttattcaatggtagctccatttcaggggactgtaattgctccatcagcttagatcatcttctcacacaagctcttggccaaattggataattaaaactttttgttatggcaccatgatctttctgccttcatctctgctactctagttctgccaagaaagcatctcattgaagaagatgaatgtattggtaatctaaatctatcctattctttttgcattaaacatggtcaactgttgtatgcttggttttttcttttatgtctgatatgattcttact

SEQ ID NO: 313635 - DNA, 1287 bp, Cannabis indica
ttctattgttttagagaattcgtatttagtatgttaatcaacatacttgttagtaaatctagatcctggtgaaatattcccaacaagaagtatgacactatgtgctttaatctgaatctcctttatcttctttttatcttcacccaattctttcaattcttctttgtctatggcccgcatgaatgccttgatgaaccagtagagccttcattttaattccccatgtgcctaaaaacttgtctacctcaaaacatgttgaagtcattgcgatccagaaatcttgatcttgttaagatcttgagttgttcttggtgaactcgaacctggagctttgataccaattgttgaggatgactcgaccaagaacacaatgataaaagacaaaacagagttgatcaataagcataatgtagaactcaatctacatcaaataatacgaactaaaactatcaaagataaagcagtaaatggagatagattttatgtggttcgaacacgaataacagaatgttatcctacctactccacggccagaaatagccctttgggctttcatctttattgattgagaattttcaccagagatttcactaagaactgtcaagaagaattcatatatattcaaatgaagctttgcttcaattacaatgagacactcatctctgtctcactcaactctgggttttctctcaatttctctctattctctctcaatgacttgatctgaatctctattgttgaagctcgaaatgtgaggatcccttttgataggtcttggacattgttgatgacataattgtcataacagaatgttagttaattctgttacgatatattcgagctggtaagtggttttgatccaaaagtgtgggaaattcaaatgtgtagccaaacacaatagaggacttaaccattttaagctactcaaaatttaatttattaacaaaccattaaatcattttcccacaatttattttagattgttatttatgttttttttttttatattcttaacacattaacaaattctttaaaggaatgaataagatttttataattgagaaagaattgttgtaaaaatataaataaataataacgaggtaaaactttgtagggttatacttcttcaaaaggataattctttattttaatttttttaataaaagaaacccaagagatcttttattaatacaattgtacttaatattttgggaaaaaaacagaaaaattacaaaaaagagaaaaaaaaattcaaaaaatactttgggccgacccattaaacattta

SEQ ID NO: 313636 - DNA, 1046 bp, Cannabis indica
aaaatattattacaaaaaaaaaagaaaaccaatagtttatgaagatgccttgaaccaccattggatcccattgtgcctcgtcgaaaacccatgcaccaccaaattggaaatgccttgaacattgatccaccactgtaagattgtctcatcgtacatccactgccactgagcgtttcttgtcaaattgtactccatgctccacaaccacagggaaattacagcgaagatgggtgatgtcttcacagtagccgttatatatatatatataaagaagtgagtgtataaaaattatatgaaatcaaagagagatgagttgaacccgaagaaaaagaaaaaaaaaatgagaagaaggtatggtggaggcggctatgattttctttgagagttagaagagttagaagaaaagaaaatgatacatctatatttatatttgtaaatattataagaaataaaaaatatactaaaggtttcatgagaaagaaaattgggagtcgcgcgtgcgtactggtcccaataaaaatttatataatatataatttattattttaataataataataaatataaaaagtaaagagagaaaaaatttaagagaattgagacttatatataagtgtgtagattattaggaaattcggcacgacccattgtggtgcccaattgtgtcgtgccaataagttattattcttgtagtgacatacacaacaacataatgttaataaaatagaaaaaagagggtgcataaggcaagtgattgtaggaaaaaagaagggcagaaaaaagagtgggctgtgaagaatgataataaacagaaagaggtggtagtggataaagatccagaggcttttcatccggttgtcaagggatggagagtcaaaccgacagctgaaggagcagggacatcaacttctaattctttttgtgcattggtagagccagagggtgtcatggaacaagttgcaagggctaaacaaatagaagacaagcagaatacactacaagaaaaccagcttttgccggcgcattgttgtgccggcaaaagtacc

SEQ ID NO: 313637 - DNA, 1295 bp, Cannabis indica
actcttccttctccacctgaaatagatcccctccacaaccattggactcgctgcaatcagatggtcatgtcgtggatcctccattccgtgacctctgtgattaaaagcagcataatgttcctcgacaccgctgctgaaatgtggactgagctccattcaagattcgatcaaggaaatggacctcgaattttcgaactctgagaaacgttgatcactttgcgccaaggcgaacattctgtaagtttttactttactaaactcaagtgtatgtgggatgagattcaagaactcagaccaagaattccttgtacttgtgctgtatttgtagataacttggcttttcttaaccaagaacaagtcttgatattccttactggtttgaatgaatcctttttccctgtccgtgctcaaattctgttaattgagccttttccctctctgtccaaagtgttttccatgattattcatgaagaaagacagaggaagcttaaaaaccctcacattcctctttttgcatctgtccaagaacctaatccatatgttgctcttgcccaaactccttcggcatcagcatctaacaacaacaataataataaatgcaataagaaaatgagaccctatgttcaaattgccataaaccagggcatttaaaggataaatgttacttcctattgggtccccctagctatggcaacagaaaccatcaaataggaacctgctgctcctaatgccactgcttccactgataaattgctggccaatctgactaaaaatgaagatattcaagcactcatttctctcctcactcaaaagctgcaacaaacaccaactgatgcaccagcttttgcctcaaacatctctggtaatgcctctaactctcgtttttgggtaatagacagcggtgcaacacaccacatttgttgcaacttatctctattcacaagcttacatcacaatgccatagctctctttgtttcccttcctaatggcaccagaatacatgttcaaaaatcaggcaccattaacatttctgctactctaactttgcataatgtcctttatgtgcctagttttcagttcaatctctttagggcccgtttggtacgcagtattggattggattagacatgttaattgtccaattcaatatttgggcatgttagaagtttggataactaattcagctaacctcatctgtctgtgattatttatcacatccagcaaggtgggataaataatcccatgcatgtgagaatttttttatcattttttttaattttaattttattaatata

SEQ ID NO: 313638 - DNA, 1916 bp, Cannabis indica
tctctctctctctctctaaaaccctaagaattagcagaaaccaaatttattcacaaatcgaccttttcctagccgaattaaccaattctaagggttgtgcaagctttgaggtaagttctttagctattcttgattgatttctagggttttaggttgagttttgttagggattttgtatgaattcggatctgtaggtttgattgagtttagagcatgattttaagtttgtttcaaggttgtataagtgtgaatttgatgtttctaaggctgttacgtttgattggagtgagttgagttcaagaactcaaaaactcactcaactatggtgaatttgcaattttagtgtaattctaagttttgagtgttttcttatgttgattttatgttgttaaactgttctgaaagatttcaataggtttggaggagttttgggttggttttggtgcaaaaaccaggttacttgtttctgtagtagaaactgtttaaccggttctaccgggcactgtggaaccggtaaaccggttgacccaatggggaaccctattttttgaaactggttagccgttttgggtgtttttctagaacttagttttatgtgttttatcgatgtttaggctatttctaagctagtattgattaaggcttgttaaattttgagtttagggcctattttgggtttgattaagttatttatcaagtatcgttgtcgtgacatagggcccgagatcgttgagcaccattccacttaggtcgacccacacacctgactttggacttgaggtaagaaaagtcaattgcactgcttagcatgttgaaataagatacgataattaccgttattaagaaagagctattactttcttttgaaactactgttaaatttcttacttattggttgtttaattaagcaacgatagtgacattagaaatttgttggtaacgagggttaatgatgctttataaagtatcaggtttggtttgtcttataaggcaaatagttgtttattatcatttgataacacattgattaactgcttagactatatgctgcaatgtatgttctgtgatactaaaatgttgtgctaaatgcgatgtttgtgttttacatacttttctggctaagtctttgtgactcacgggtgctctgtggtgtaggtagggaaaagggaaaagttgaccagccatgagtcagaggtctcccggcaatgtacatgtcagcccgccatgttttggttctctatggactgcatctttcctttgttatgatttgaatatgtaataacattttgtaataattagcaaaagtttgtaactaaggggatccccgaatccagtggtgttttgtaacaaagtttaagttatgatttaaataaattttttttctaaaaaagttttaattaaaccacacttttcttaacccgttagtttattattataaactaattaataaaagcacacacgtgatgccctcgtggatcagggcattacatagagtatgaattgttgcctattaagtgtaagaatttcataagttttggacatggtatgatggattgtaggaaagatgaaaatggtcattggatgaagaagaatctacatgggaatgtgaaggataaggaagataatagggtgtagactctgaaggaattggttatgcaaaaactattgctgctgatattgttatagtcaaaggtgtcagttttgttattaataatggtgttgagaataataataagaggctttcaaaggaaagtaaaattgtaacgccctaaataattaggcacgctacccaaaatgcttatgaaactctaatcccctaattgggattactaattaaaatagcgcataatttaaacttttatattaaacagactgaaaataaagtcgtaatatatttaaacttttcaaaatagttg

SEQ ID NO: 313639 - DNA, 2116 bp, Cannabis indica
ttaaagagttcatcaaccatctttgaattgatcctttccaattggttccaatttcctattaaatccttgcaagtctaaaggttctatataagattttaggatgggagtgtcccactccccaggaaattgtttatctttattttgttaaggcagttcctgtgaggaagcgttgtgcagggctttttttactatcttgcgactcatacaaatgatcataggatcaatgtaggattaccaaacaaaatcgattttaaggaagatttcttctggacaagtagcctttccccaatcaacacaaccgcatttcgcataatacgtaagtaaatttttatctcaaacttggttttgaattactccatgtttataatcttagcctcgctaattatcttatttattctgttgacagcggtctcaaaaagaccaattctaattcctgagatggtcgagcagtgtaaaactttgttaggtcttctagttggactgcgatcggccgagttttttctaaatgaagccaatttgaggtctattggccttctcgcttcaaacgtgtatacttgtgattactagtttctcaagtatacattgtggaaaaggttctagttccaactgacgaggagagtcaagattatgtggcttgggtggactatctcaaaaaagtaacccctcggaaagctgaagaagatgcatcccgaggtaatcaatgtggatggtcacccactgtgcttagggctgaacgtacctcgcttgtgaccttccaagatagcttttataatttttatatttggagtcctttcttaatagattgcataacccataggtatgatagttggtacccacaattccatgttcagcttagttgcactagttcatactatgggattgccgagtagtatgggataaacgtggatagggagagccacccaaattcagattgggacttagatccaatcaacccctatgatatatttatgatcacatgatctagagagtttagtaaatactatagtcctccttcaccatttgatgattatggtaacttcccttaaatggggatttatttcccattttcctttttatgtatatatgactaagtactaatgtatctctctatctcacagatatggatctagagaatcttctccactccttgagaaaaaagggcaagaagaggattaccgcttcagagacttctttagaggttaatgtggaaccttttaagagatccagaaaaaccactacaaataagaagcgtgcctcgcaatccataaatcttgaatcttctgaggatgaagtccaggttcacactcctgccgttacacatgtcgaggagccggttccaaaacctcaccaggccaccacttcttcaagcaaggcgcctgaaaaatttacacctcgaagttgggggcactggttcagagtactgcttgcagtttgctgcgtcctactggcgcaatttccaatatttccagtctagcgactgggatttggttaacaatggaaacccaacagagatgctcaagaggagtcttaccttcaatctctcggttagtttccttcttcttttcttttttttttaacatttctttcaagaatccataagaattcatataagcatttttttaggccacttgcttatctcatgtagccaagagtccggttctccataagataaagcaatcagaatttgagcttcgtaaaaccattgagcaatgcgaggccgttgccaaagaatggaatgatgctcaaaaggagatttctcgtctaaataaggaggttgaggagatgaagaggactcacaagacgaaactcgaggcaacccagaaggaagccaagaacaaatacgaggcatgccaaaaactctaagaagagcttaatccagccactgcaaagctcgagggcactgaggtcaatgccaaagagcggtgcaatgctgttgccaagtgttccatttactgagcttggatggcaaatcctgagatggacttaagtttcttgggggagggcaccgaggaagtctttgcttattacgagaaggccaagaaagaagaagaagaagaagaagaagtcgagtccgaggaagatgaagaacaatccaagtctcctaccatgtaggctt

SEQ ID NO: 313640 - DNA, 455 bp, Cannabis indica
ttgttttttttttcttttatatataatataataataatatatctatatttggaataattataataaaataaaaatattagaaagtggtttacgttactctgacaaaaaagaaaaaagaggtttacgttatagagtggttgtgatgaaatatggtcggtttatacggcgccgcgtaagattctgccacgttgttgtttatttaccccttgtcatttcccatttgagtcggcaaggaattacaaacggtatattaacgacatgtcgtttttgtctcacaaacaatttcatgcggcttaacgacatgtggtttctatctcccaaacaatttcatacgaaacttgtctatatttcatcttgctccaattcttttaccaagaaattagattctatactcttttttatattgttctcttttatttttatcctcttttttaaaatctattatttttacctct

SEQ ID NO: 313641 - DNA, 906 bp, Cannabis indica
tattcagatctttgtagaagactgtaaaaaataaatattcgtgatttgaaggaagtaatctaggcttactttacaactgaaaggaacaacggttataatgctgaacgaaatgattcatattattccactttaatttatgtaagagatctttatcttttatgtacttattaattattatttttataattttactctataatagaaaggaacaacagttatagtactgaacgaaatggttcatattattccactgtaatttatgtaagagatctttatcttttatgtgcttaattattattttatagttttaataataaagatgtttgattataatatttatattaatatacatgcttagtatattaagattttagtaaaataaatttcaataactggcctcaaagccatgataattatttactttcatgaaatatgatattaaaataatatgttatttttgttttgtgtttttgatttccagaattcattaatggtgtgtattttttgatgttttacgaataataattttatttcgtgattaaattttttttagaatgataaattgttgaaaaatgtgtaagtcagaattgaaatttggtcaaaattgactcgaaaattgaattttttggattggaggcatggctgcatgtgcatgcatgctcctcacccccgcacgcatggacacagggcccacaaaaacctcctttttggcagctagcatgcacactactcgtgcatggtcagggtttgtcggctagatgcaccagcgagtcgccgaggctctctctacctcgtgcttgcaccacatggctgcctagcagccttgtttctcaaaaatcacattttttttgatttagtttcccttttccttatacaattttagttttattataaaataatattaaa

SEQ ID NO: 313642 - DNA, 785 bp, Cannabis indica
atattaaataatttattattaaaaaaataaccgatccaaaataaccgatccaatccgcactattgcggattggattggattggatttaaactcttatgcggatcggattggatccaaaatatgaaatccgcacttagtgcggattgaatgttgtttgaccaaaaaagtgtggattggatcggatgaacacccctaataccactgtaaaaactaactttcaaggggtattattaacaagtaaaaaattatagggggcataatatagtagtataaaaaattaatagggtaaaattaccaattatttattatagtttaccacgcgtattaaaaaagtttcaatcttattttcgacaatgtataaattatttgaactttttaaaaatttatagagatgatgttgtatatataacaaaggttaatatgaaaaaaaattagaaaaaaaatattttaacatgtattattagacataaaaatttaaattaaaagattgtagtaagagattgagtttgaatgtagatatatttactcaaaacattaattagtaaatggtcccccacttgaaaattttattttatttcctttctttttttctttttttaattttatttcctttcaataaatagttgttggtcctttgagatgaagcataagtatgattagggcgtgaaccttttgggctctacttttgggccctgcattttcatgtataacatgaagatgctttctctcttttttataatttcatttaataaatgtttttttttttgaaaaaaaaaagaaaatat

SEQ ID NO: 313643 - DNA, 1839 bp, Cannabis indica
aatatactataataaaataggaccgttgaaatattgatacccaaatcaaataaaatgctttacaaatataaattaaatatatatatatttttattttagaaaatttcctgatatataacaatcaaagtcactccatacaacattaaataaagcttccgaagaaagagaatctatttgtggttgcggatcacattagtttgataaattaaaaggtctccaattttataaaaatttaagaggttgttaaagatatttttgcaaagagacctaaaacttattttgagcattaatttgtattattttatatctcacaatatttgagaataaaatggtgaaagttttggtctatttcggtcaaaagtgtgtattgacttcttcaatagcttaaaagagaattagttggaattggtaactctattttttgaaaagagtagtgagatttaaaattacctcctaaagtcaagaatttagtttagaggactacttttaattatcttcctactcgtgttcaattaagcatgaaacatgttcttcttctctcattgttgtgtccaaattgcttgcgagtttgagagtctatttctcattatcttgtagaatattcgtttgcttttgcttgctggtagatggcaggtatttcagtgatagagattagtgataactcttttaggagtaacttcataatagatttcaatgttagaattttggaataaaacatagagttgttatgctttgttgggtgttgttgtctgtgcacaatgacaacttgacaaggtgtgaaatgataagaatatgactgttaaagaggtaatttcattggctaagggtagttttaatcaatgaagttgtgctcaagataaaaattttggctcctttttattttccttacaagacggtgaaaagcatgagcactggattgccctagttggtaatacaattaaaatcaatatcgatgcagttatctttagcaatctgaataagtatgggcatagttgggtagtacgaaactcttctggtcagattattatggctcggacagtaagccggatgggggtgattgatcctattcttgctgaagctatcaaggttaaggaggtgttgagttggttgaaagaaacatggcagcatgatgtggtgctggagtcaaacagtttggtcacgatccaagctatccgaagttcgttagatatgacttctatttttaaaattcgcatttcagagtgtaaatagattctttttagtttgaataaccatttgactaaaactagcttcatgggtagatattggttgtacttattcaaattctacgaatttgagtagtttacatgaaattcttttgaatgaattcaagtaataaaattgtatttctattaaaaaaaatagaggaagggagtatttttcaaccaaatataatctatgtctaccgaaaaatatattttgctaatttatgattattttggctaataaggatgaaattgtataatgtattaattaaataagatatttactattttaaatattaacataataatatttaaatattttataaatatatgtaactgattatatttattttgaatttaaatatttagtttaaataagattattcattaaaccacatcccatatttttagactcattcagtccaatctaattatacattagatgttagatttctccaaccgatccaatgcaataccatatgctcaactgaacgaactgatccaataaattattagattggatctattctatctaatggatgaatccctatattgaatcggatccattcaatatttttgatccaatatttattggatcagattggatccatccaat

SEQ ID NO: 313644 - DNA, 1115 bp, Cannabis indica
cacccctcaaacgaaggggtgacgatttcatcccaagtttgtcaattaaaaatctgaatcgatgattagttagcccttttgtaagacaatcggctatctgatctgatgatggaatatatctaatctcaagctccttcttcaagactttatctctgatgaagtgaatgtccaattcaatgtgcttcgttctgccatgataaacgggattcgaagcaagtgcacttgcactttgattgtcacaccaagtcactgaggtacaggggagtttgaactttaattcatttaatagagattcaatccatgctatttcggaggcaacatttgcaagggctctatactctgattctgtgcttgatcttcacaccacagcttgtttctttgaagaccaagcaaccaatgtatcaccaaaataaacacagtaaccagcaatggatctcctatcatctggcaaacatgccccaatccgcatccgagtaaccaaccaatagacaatctgtcacaaggaacaatgtgaagaccatgatcaatagtgccttttaagtacctcaaaacccgtttggcactgctccagtggctggtggttggtgtttgaagaaactggctgagcttgttgacggcaaaggcaatatcgggtctagtatggcacaggtattgcagtgccccaattatacttctgtaggctgtgggattctgcagaagttcaccatcagtttttgagagaggctttccagagatcattggtgtaggacacggtttcaggttcagcatatcatacttgtgaagaagatcagtaatatatttcctctgtgttagatacatcccagtatcgtctcgaaagacttctattcccaagaaaaaatgaagtgttcccatatccttgagagcaaaatgtgtgtttaaatcactgataaactgtcttaatttggtggcatcattccctgttataatgatgtcgtccacgtaaattaagacaaagattatggcttgtctgtcatgcgaaagaacaaggaagtgtcagccactgagtttgcaaaattccatccgagaagggtctttttgagcttctcaaaccaggctctggtgcctgtttcagtccgtagagagtactgtttgag

SEQ ID NO: 313645 - DNA, 905 bp, Cannabis indica
aaaatcctcagagagggagcttaaggtgtgctataattttgttttaagctaaaaacaattagttttaaggtacctcattattcatagagaggatgatactaccactattcaaaacgaagttatttctcattctactattctttccctaatcctcaataaaaagaatgttatcatactgatgttatagacaaagtcattgagaaaattattttcacttagtcatttgcaatattttctctatgacttagacaatgatcattttctttatcctgaaaatgtaactaatatttttatttttgaaatacaggataaaagaaaattcatttgtgatactggatagtcaataatattgagttggtaagtccacctaaggagacttgactccaatttgccaagactaatcacgttctatctttccttcctctcttttattttagtatgttaatttttattttgttagtttatttctttctttattttacttttctaagaattaatatcatgttattttgtatttcctcactctctaagtctaagtctagctttatcagagtcagtatcacagtatggagtttatataaatctcaattagcatctttagcctttataggcaagcgcagatataattagcatcatctttagcatctttcgcatgttatttattaattagcatcatctttattttatttttcatttcatgcatttcatatatataattttaaacaatgagtacattgttttattttggttgggagtggtaagcatattcaagcatgcttattaatttttatcatattaatattttcatggttaattttttgaaaaattactcatttattcttgtaaaatattattttcaagtcaatttttgttatctttgtcacttagaatttttctagagttat

SEQ ID NO: 313646 - DNA, 1857 bp, Cannabis indica
aaaaaaaatcctaattaccctttggaaaaatacataatttttactgcaagcatacagtgttgttatagtaaaaatttaataataaaggttgtcaaattacagggattaattattaaatttgactaattattatactttttaattttaaactttaattagatagcacaaagtaaattatagttaagaatcaaataataagataaatagaaaaataaatagacaaacagtgatttttaattagaaagtagaaatctagagcattgattttcttatttcaaactatgaatttcaatttaccgattatcccaatttatccttttgtagtttaaaaaatcctaatataatctattaacctctctcgagtgacgatagatttgaattaaattagctaacaagatatctctattcaatgttaatcaataaagctctcataaagcaatatgattctctttaaatgaaactcatagaattagtggaatctcttaatctcacacttttcctatgtcatgcaattctaagtccgattttagattacctctgtcaagtgtaaaacctaaaatctctatactaattaatggtgatcaagtattaataagataataattatcacaaaatcgcataaacaaatagcaagaacaaatatgggaataatctaaaaacttaaattcataacctgaaatagttccatcaacactctagaatgagtgtttagtttataatcacaaatataataaccacaataatcatgtttataattaaataactaaataaaagaataaagaagaagaagaagaagagaactctaatgatgaaagttgatgatgatcgcttcaaatctcttctctcttgctcttcaatatgttttctaatctcaaagttgattgtttctatctctccagtcgtccctaaattcgattgatctcattctttatataggccaaaaaagatagatgaatcccattagaattaggattttttttataaaaaagataagtgttgcgctatagcgttgattcttaaaaaaaataatttttgcgctaaaatgaagtctcgaggagtaccacatggcgctatagcactgggtataagtccttaaaatttttaatttaatgcagaaaagtcttcaatttaaaaaattggtagtaataatcctcaaactcactattttcgtaagtctattagtcctcttttctaacagatctatttactaattaaaaatgccacgtgtcgataaattattggtctaaattataattttaatttaaaataaaaagactaaataaattatttttaattttttcttttttcttttttcttcttcttcttcttgtcgatgcccagaaaccaccccaaaaagccaacccaaaaatccagcaccacctctgaccctcgccgagctcgaaacccaagtgcttcgtccacccccttggtccatcttctccattcacgatacaagctctgatcgttcacattctttgtactttgtccaaagcggtcgtcctcgagccaaacacccactgtatcactcacgtgcttgctccgatcgagaccccaaacctatcgccacccttcgattgaaacctaggagctatttgagaaccttctatgcccagtcagcccatagcttagcgccattgccgcctaaagatttgcgttcagatctactcattgttgttagccccaccgctcatcgccgacgaggtctaaataaatctgccacttttctctctccttgtgtgatttgtgttgggttttatgccctaaataaaacctcaattcaaagtaatccagattattcaatatcaataaagtatcagaagtatttttcattaatttgtgtatgttttggttcacctt

SEQ ID NO: 313647 - DNA, 1468 bp, Cannabis indica
tttaaaatcatgtctctctcaaataagtattacattaatgtcaccttatgttttggatcatatatagttgtgtgtgatttgtagagtttttaagctgattttcatatatatatctttcaggatatctttactgcaggaggtgagacatcagctacaactatagattgggcaatggcagaactggtaaggaatccaggaataatgaaaaaagcacaagatgagattaggaaagtgtttagcaaaaaaggtagagttgatgaagcagaagttactaacatgagatacttgaaatcaattgtcaaagagactttgagactgcactctcctgttccattgttactaccaagagaatctacagagaagtgtgaaattaatggttatgagatacctgtgaaaaccaggattgttgttaatgcatgggcaatgggaagagatcctaaatattggactgaaccagatagttttataccagaaagattccttgatagctctattgacttcaaggggaacaattttgagtacatcccatttggtgcaggaaggagaatatgtccaggcatatcatttgggcttataaatgttgagctaccccttgcatatttgttgtaccattttgattggaaacttcccaatggaatgaaacatgaagatttggacatgaccgagttgttaggtataacagttcgaagaaaggaacatcttcacttgattcctattgcttatgatatttcatgtgttgaaaaatcacaaggaggatgatcatctgttgataaagatgatttttctattgaagcttaatatagatttttgggcactgttaaatcctattttagcatatttgttttaagcattcataatgatgagtatataaatgtatatatagactagtggagattgcaggtgctgccattgtgcatttaaaaaaaaattaaaaattataataaaaatttgaaattatacttatgtgtttgtagtgttaagactgctattagttgttacaaattcattagtcttaactatggctaaaagagtcaactataacttgtttattgctataatatattcatttcgattaaaaaaagcgtagaagtaagagtatcaaaaaatataaagtattcttttctctctgaacaaaattatcaggcctatagaaataaattctaaaattacattacaaagagaagcatttattaatacaaactaaattatatattctttctaaatgatacaggagacagcaaaagattacataagtgaaataactgaaaatttaagttatgaaagaagcattatatagtagttgtgagtgtttctctttaaactattagaatatttataattaaggtataaaataaagaattgattttgggataaatgaatattttatatttattgaatttggacaaaattaattacgtaatattttatatatggtcagatttcaatatttattacttgatttgatttc

SEQ ID NO: 313648 - DNA, 600 bp, Cannabis indica
taacttttacaaaatacagggtcgaaaatagtatttaccctataataaatgcactacttttttatttatacttatgtcatttgtattattttattagaatatttaataatagcattaaattataaattatttatattattttaatattgtctaacatattaaaataataataaaattgataataaagttaacaatttttatttttttaataaaaaatattgattagatattgaattttaaattaaagttttgtaattgtggattggagcacaatgttaaaacttaatgtaaatttactacaaagttatttttttatgtcaaatatagcacaatttttatacctcctattagagatggtctttactctggtgggaccaatgcttattccatacttaaaagtcaaaagtcatcacatatatactaactatacccaaatccgccatgcaacttatgtagacatatacgcataaataaagctgcactgatatgtgtcacgtgctggctatttggacagtaagtaaacgggacatgtgacaactgcttttagtgacaactttttaatcacaacataaatttttgtgattttagtcacaacaaaaa

SEQ ID NO: 313649 - DNA, 1850 bp, Cannabis indica
ggcataaaacccaacaggtcctatggccagcataggttggccagcctctggccaccctatggccggccaacatacatcctgcaggtgcatggctggccagcctttggcctgacaagattttggtgcacaacttcatacgtggacagcaagccagaccacgaattgggccttaacaatccatgaaaatataaggaaaatatctatatttaaggggcattttagtcatttatattttattaatttaatatgtaacgaatagcttattttacccatttctatggaatttgaaaggtgtgagctctcctatataaagagccttaattaaacctaaaaccctaggctctaagttttaagtctgaggtgattaattctgaaaccttagctctaagtctgataactcatctctctctctctctctctcacacgcccactgctatactcatacttgagatttgtcaactctaattcttacattgtaacattaagagagctactttagatcccatcactatagtcatctaagtagtattatctctctgtatcaatacaactaaaaggggagtaggtcattattacctgctatataacaaagggggtcaaacccctataaatcatgtgatcatttactttattattctaattgtgtaacacgtggtaagcatcagtattacattcgactccgctgtcgattggccaaatctgaggtctacaattatcattgtccctttaccagttttgtactcgtatccctcatcatctaaagtacctaatgagatcaaatttctcttcaaatctataatgtttcccaccttagaaagattcctgattatgccatcatagcttctaatggcaatcgtaccaatgccaacaactggtatttgttgtcatttctcatcatgacacttccaccatcaatccttgagtaatcaatgaaccagtccatagttcgactcatgtggtaagtacaaccattgtcaagaatctatttatcttcatccttatgatctgaactagtgcgggcatctccagggcttgaagttgcatcttgaaccttaattactatgaacacatttcatcacaactgtagttgtcattcaccacaagattggaatcattgcccttgtcttcttcttccttattcttctttttcttgtctcttaattctcaacaatttctaattagatgacctactttgctataatggtgacactttctggtctcccttgaccttgatttggatcttgaattgtatcttgatcttgaaatacctttgctatgttgtcttcctcgatccattaaagcttcatcaaatcatgattcttgcataggtgccttttgccaattcaattcagcatactttgatctcagagtactcattacatcttccaaagtgagagtgtccctgctatacattataacagttcttatttctttaaatttgttaggcaaaccattaagaacaatcacaacttgatcttcttctttaatggtttcccctatatttgtaagggccaataattctatgctaatcatctaaattctattttaaagaaacagtaacattcatcttaaaaccataaaacttttcttttaagaagatctttgtagcaaaggacttggccatgtagaattgatcgagcttgctctaaattcccagatcagtcttctctccaatcacttgtctcaacacattatttgcaagattcattatgattgcaaatcttgcttgtttctgttgggttttatgccctaaataaaattctatttcaatgtaatccaaattatccatatcaataaagtaacagaagtatctttcattcatttgtgtatgttttggttcacttaatcaa

SEQ ID NO: 313650 - DNA, 1242 bp, Cannabis indica
ttaagcatgaattgtcaaatttctcgttttaaaaaaaattcttaaaaaactgtcatatttagtacaattaaactgaagtgttttttaaaattcttacagttttataaaaacactttagttactacataaatactatcttagtgttatacgtaattaataagtagtcctttttgtgtgcattggtttgtttatgtggttgttgttacttgttttgtaccatatttggtgttttgactagtttttgtgcttggtgtatgcttgttcgtaccgtatatagtgatttctcttgtatggtggtttgtttaaggttttcttagattcttcctaagaagggtgtaagatagcaatgacatcctcaacgtcagctccagaaatatcaaaaataagttttaagtgtattttctcactcacttggtttttcaaggatcatggattttaaggaaaaaagttttattacaactcattttcttaaattagtataatgtgtggtagaagtgactgtgagacttctaagataagttattttgcttaataacaattataatttggagtgcttttctagcacaggaatttaaattccttttttaatgaatattatcattaagtagagtgttacattaattaaattttatatatttttatagatgtgattgttgcttttctcacttgattattaaagtattcaaggagcttgaaccgttgatctcaaaagataagttataattatcacattagataattttagttttattattcttcttattttgatactaatattttctttatttgtagattttttagtaggatagacacacatttagagatttcttttctgatattaaaatttcattgtctagcttctgggggacatctatttctcatgtcagttgcaacgttaatgttgcaatccatagattgatttagcatgcccttagaatagacagtagacttttttggatagaaagaatttctttactttgtctctcgacgttcttttctctaacctacaacggttacccttagaaaaagaaaatgcatgccatatatattaagatttttattttttcccaatatttttataaatagcccatatatatttatatatatatagaaatttcacaatggttacattaaatatataaccgtcattgaattactattgaatgacaatattagccaatatatattgttgttataaaataatataaagtagatgagaagaaagaagaagaagatgaagag

SEQ ID NO: 313651 - DNA, 1120 bp, Cannabis indica
ctggtaaaataattatccaacaggaactctgggccacagcacgaatcagagtggatctacccgcttgggataacagtttgcacctccacccttcaatctttgaacaaatcttatccttgatatacctcagatctttagtcttactattcgatcaaataatcgggttccccaggaatctatcctccttgccaagcttccgaaaacccaaaaactgcgacaactcagcctgagtatcttcgttaacatttttcgaacaaatataagcagacttctgaacattcaggcattgaccaaaccatgatccgaagagttggacacactccaacacggcccccacttcttcaaggttagctttgcagaatataaagatatcatcggcatacattaaatgagaaatagagggactctgagggctaaccttaaaacccgagaccaatcctgcctcttcctttcgcaaaagcatccttgatagcacctcactacacaaaataaatagatagggcgatataggatcgccttgacgaaggcctctaccaggacagaactgttccaacggtccaccatttagtaagatcgaaaaagacacagagctaatacatttcataaccatctggatgaatctgggctgaaacccaaaagcctccatggtcttcctcaagaagctccactcaatccggtcataggctttggacatatccaacttaaggccaacaaacccatacctcccctttaacttgttgaaggaatccaggacttcatgagccattatactattctcagcgatccatctccccgggacaaaggccgactgaaaaggcaaaattagctcaagcaaaaggggtcgtagccgattcgccaaaatctttgaaataatcttataagtaaagttgcagaggcttatgggacggaactcatcaaagcaattggccctagacttcttaggaatcaacccaataaaaagtctggttaatctccttcacaaactccccggtctcaaagaattggaccaccgtggccaccacatcgctacccactgtcgcccaatggtctttaaaaaatttccaaggcattgttgggttttatgccctaaataaaactctttacaatctgattagttatc

SEQ ID NO: 313652 - DNA, 2464 bp, Cannabis indica
tgtggtgagagtgaggaagaagtagagggtgtattggaattttggtggagagattgagatagacattaaatgtaattttgaattgataagtaaatatatctctctttgtgtgtagtagttttaagtgacggagtaaaattactttgcttcatttctttattatattattgcacttgaagtttatcaattttctcaacaagtggtatatcagagccaaggttcaaatctacactgaaaatatcgaagatggtatcttccaaaatatttgagatcgagtttatttttaatgggaataacaatttcagtttatgacagagcatagtaaaagatgtgttggtacaacaagaaccccaaaaggcattgtagggaaaaaagcatgagtgtatgactgatgaagattgtgaggagttacaggcaaaaagcgataagtactattcatttaagtttgaattttgaataaaagtatagtgtattaaatgaaacatttctatttgagtaatggaaaaagttagaaaaaatttatatgtcaaaattcttaattaacaatagattatatttaaagaagcagttatatgagttgaaaatgattgaaggagatgattgtagggatcatataaatagatttaataagttcataactcaattgttaagtgtagaggtcaaatttgatgaagaagataaaattattatttttttggcttcattagcaaaatcatatgagacactaatgactacacttttagttggaaagactgctttactcttttggagacagataatatgatcaagtaaccaagtggtatgtctcatatttatcaatctcttgtgacagtgtcaaaatcaagtcatggtaggagtacattgagataaagatatgataacagaagagataatcagcctcattcacgctcttggaggcaagtggagttcaactattgttccaaaaaagcacgtgttaggcgaaattgtgaagagttgaccaaacaccttgaagcaatgagctaggaatcaagaatatgtgaagacacatcagattcaacaaatgttgttggtgaatgttttgaacgtgactgatgttctctctgtcatagttgatgaaaatttttctctcttagattttggattctcgttgttcattcctcatgtgcccatataaggagtgatttgacacttataaggcatatgatggttatcctattttaaactatgattctagctctaaagatgttctagtaggaattattaaggttaagatgtttgatggtattgtgagaatattaattgatgtgatacatgttctaatattaaggaggagcttaatctctttgggagctttggatactcgtggttgtggctattttgcaaaagatggtgaaataactatcaagaaagattgcttggtaattgtaaaaataaagagcaaaatttttattaattagtcgggaagactattttaggtggagttgtgaaggtggattcaaatcacaaaagacattcagttagagtaaaggaatctaacaaggtggaggaaactccaatttcagttataagttatttgaagaaaaaagacatcagtgaaaattgaagaatgtgaagacaagttctcaagtaaagttcaatgagagtatgaactcaatgcatatataactcttattgatggtttgagttgtgagtagagaatttgagttaaggtggagattgttagatatttgactcaaattaattttattttattaattttggataatatgtgaaaagtattcttgtggttgttttgaagaggcttctggaggaagcattggaatgtcttagtgtccaagtttatatatttttctctagatatatgtataatgtattgtgtatgagagaagaagtgtggtgtgtgtagagagaaattgtgagtgtgagtttgttatatggtgagactgaaaaagaagcaaagagtatattggatttaagagtttaagagtaaatagtaaatagtagaaatacataaaaaaaaattatgaaatggtaaattttaaaaatatattttttggatatgatatttgtgtatatttagagctagcaaatttgatttcaataacttcaacaattattgatgtttacatataaattacacacaaacataatatattcttatgtggtaggtcacttttaataagtgagactcatcctaaataagaataattaattgaaattacttgtcacataagtgtttgtcaagtttaggtgtaaattatgtgtgcacatatcattactcattaattaaatacgactgtatgcatatgtgcccatgagagaagtcacatacagggccagccctgagctaagacgaaggagacagccgccttaggccccatttcgaaaaaaaaagtaaatatagttagtaataaaataaataataataattttaagaaatttttacattaaaaatacaaaatattaattttattactaaaaa

SEQ ID NO: 313653 - DNA, 1014 bp, Cannabis indica
ttattgatgttgaataaaatggattatattgaaatggagttttatttagggcataaagcccaacaatttccaccaagaacaataagaaaaccagatgtagagtgcctgtcatcgagatcagaagcccagtcagcattacaaaatgcaacaaggtctgtcgattttgttgtgtggagatgcaagccgtgatcagcagtgccacttagatatcgaagaattcattttacagcttgccaatgtgattgaagggtgttcttcataaattgacagactttgttaatgctgaaagccaactcaggtcgagtgattggaaggtattgcaatgtgccaacgatagacctatagagttgtggatcatcgaatggttcatggccataagctgagagttttaaacctgtcaccataggtgtaggaagaggttttgcttcaatcattttggcttttaacagtaggtctttaatgtattttgcttgagataagtgaagccctgctggtgtactttgaacttcaataccaagaaagtagcttagatttccaagatccttaagagagaacttggaatttagcaatttgataatgttggcaatgacctgagagttgctgcctgtgatgacaatgtcatcaaaataaaccaatatcatggttgttgaggaggttgtgcactgaatgaataatgacctatctgatttgtatgatgaaaaacaaagatcagtgagggtgttgttcaatttctcaaaccaagcccgaggggattgtttgaggccatataaggctttgttgagtttacacactagatggggagcatcgggcaagacaaaaccagggggttgtgtcatatacacctcctcttgtaagtaaccattgagaaatgcattgtttacatcgagttgtttgatatcccaaccattttgagagagccatagaaagaacaacatgaattgaaccggttttgacaactgggctgaaagtttcagtgaagccaaacccaggttgttgatgaaaaccttttgcaac

SEQ ID NO: 313654 - DNA, 1576 bp, Cannabis indica
ttaacgccccaaccacgtaaaaaagtgtctatctctttctatcgttctcttttaattatttgtttctttagttcttatcgtttatcttctgtttctgaaaatttcagtaaatattctagtgctttaattgagagcagaaggaagcagtgagaccacttgtagattatgttcaagtaatcatatcccccacccaaacaaagtttggtattcgtttcactagtcctggtggcaaagctggagactctagtgacccccacgaggtgactaatcgttaaaaaggtcgccgagtgaagatcagaatcgagatgatcctatcattgaagatgcaaaatctggagaaagtagctctgaagacaccaaagttaacgctcaagacataccaaatatgcaagaagacgaccctcatgacaaggctactgatgatgatgttggagagaagaaccaaccggacgagtcagatctcgtagtcatcatggaaagacaacttcaactggctgaaaatagattaattcggcaagatcaattcaatgagatactactcacaaagataaccagattggtggccgtgatgactaccctgactaagatagctcctggcgtacaagtttctccaacaactgacgccctttagaaagcagatctaaaagatcttggaacttcaggcgttcgcaaagacaaagacaaaggaattgctgttgaagaacgaaagaagactccttccactaagcagcctaaaaagtctaaactgctgaccaacctcaacagaagaggaaaggaaaccacgccacagggcatagtgaccagactaattcgagaggcaaagtcacgtacaaaaataagattgttgtcgtagtccaaaagccagtgtcctggagggaaaagcctcatcccaatgatttcagtaaccacgatgaggatgttgatgaagtacatccagtgttagatgacagtggcgaagcctttccattaatgatctccaaagaagattgaatgctaagaaggaaaaagttaaagcagaacaagcaagaccccacaggaacgattagagaaacgaaatcaatgatcgtcttcacagaacagaatcttcaagtgataagactcaatgcctagaacataagattgaggagttgatgaaaatcacagaaacaatttctagaaaataaagtggtgccatatctgactctgaggaagaagatatggagccttgtgtgaagtgaatcatttatgcacctgtaacaccctactagtttaggcgtgttaacgtgatttttaacttaactgtgcagctcgttgctaatcaacgagtttattgaaaatcatgaataattaaaactttaattaactaattataaataccaaaataatatacttgtattaaaccgggatcctgttttacaaaataattacaaacgtttcatagtacatgttcaaaaagtttgtcgcctagcgactatacaaaataggctccgctgtcccaaagatcgtacgctccaggcctaaccgccccgccatgtacaatctccatctgctcgctctcacggctgttcaacctaagccttgcccttacatacacatg

SEQ ID NO: 313655 - DNA, 497 bp, Cannabis indica
acttctgtttctttattgatgttgaataaaataaattacattgaaatggagttttatttagggcataaaatccaacaaacttttggctaacgataccacatactaaacaaagtggttcttatttttcccaacactacatggtagctaacttaaactactcatcatgccactgtaaagtagtactgataaaagaagtaactatagctactgaaaaagaaaaaccagcaagtttctagcatgaataagaaaaaaggacaattaccaagcaatggaaaatggtttcaacagcttgatttctccttgaaaaagaagatgacacatccacatgccaatcacccagctgaatacgcaaaggaagacaattagagatagctctccacatcgtgttcgtaaccttgggcaggattttcaaattccacatcttctgccataacctagaattatcatcccttaataaaccctccttaatttcttgaataagttgttgggttttatgc

SEQ ID NO: 313656 - DNA, 1724 bp, Cannabis indica
actatgtcgaattggttgttgtctgctttttctgtttctatttcttattcttccccggttggttgttctagtgtgtttgattttgttgttggtgcgttgcactgaagcatttcgatattttcttgtttttgtgttgttttttatgtgatcataggtattacagcggttgttgtgttgttattctgagtgttgacacataatgaatatgtggtgaaatcaattttttgatcttcagttgcaagtaaacaaataggctcaaatcgttcaatatttttatcggaagtattccttcttttacttggtactggatttgcatggttgttgttgttgggtcacattccaatgaagagagtagaatctgtacgagttgttcatatttgcaatcctttggtatgaattctccactagcctaataattgacataatttttccttcttcccattgcctattgctcttcaagagaacaggtatagattccataacttgaaattttttgaccgtatttcaacaattcaacattttcacaaacagacgacaatcgtaaaacaacaccaaaacaactattaacaatgtatttattgtttcaatgttccaactatcatttgagtgtccaaattatatgtatttctatatttctcaataaattacatgtaattaaataagaacgacactagaacaactttagattgtttaaaatttaatttaattcgtaatcgttattttttaaaaaaaaattatgtatattaaaatacatttacttcaatcacgcatttatacaaaaaaaaaaaaaattcacaaacaacagtctattttaattattgatatctagatctatgtttcagcatttttgttttaattttgtatttaaaataatttagttgggtttaagtttttaatctttcttattcgttgttttctgttgttgatgaagctattagttgttgttttgttgtcgatttaactttttttcctccatatcttcggaataaatgatttttttctgggttgatcatctggttctatttcgtcgttttgaaaggtggaggcgtatatacactttttgttcgtacaatataaaagtaataaaaattggccatggcagtatttctgtaaattctacgttctagtataattataatatttccctcaaatacagtatatatgtaaaaaccccatttaaatatcatattctgatgggataagttgaggaatacctcttttttatattcattaatcaaaagtaccatcatattatatttcattaaaaagtacccatttttgtgagtgggtttcccaatataccctcaccttctttttaagtctaccacataatttacataaatttaagggttataataggaacattatctataaaagttggtatatacattaaagaatatgaaaataaatgtaaaaattaaaataagtaaagtatagtgggtatacaaggtaattttttctatcatgatacgctatgagtgctacaaatggtctgatgagaggagtggatgtgattgagacatgagctcctttaagtgtttcagtcggcggagcgacactaggacagattttcaacgtacttagggagcctattgataatgggaatttttgattttatatacttaaaaaattaaaaaaatttattattaaaccaaaaacctaaaccctaaaaaaactatacgccttttttctacaaaccccaaaaataactacccctcaccaat

SEQ ID NO: 313657 - DNA, 2137 bp, Cannabis indica
acatatctacatatatagcaaaagaaggactttagtgttatgtgaatcaaaactctcaccaccccgaactcacacctcatcatcatctccaatataaattatttcaccacactttgtaaaattgtatcctcacttccctatcccaaataatatttgatttgtccttgataaattttagctattaggttcgggttgtgaaggatgaaatttatgtgtgtgtgtgggtctattaactttgatgggtgttaagaaaaattaggctattagatcaaatagagtgactatttttttaggttagcttgaaaggttcaatcgtccaaagatggcctaaatcatttcgaagttgtaaaactagctaggatttcatctcaaggggtacactaaccaattctagaagcttaaactctctcaaggtgttaatcattctaaaatgggatagcacaagtacacctacttgaaagaattcctcctaaactagcatttagacaaactagcatttaaacttggcattcaacacacaacatcaaggcacaaatggttggaaatggatgataagtttttttcttcatcgagcggtacacttaaccaaactaaagcaaatgaaaaatacttctcagttacaagctacacaaaactaaacaaaaattactaagtaacatgactaacacacaactgaccacacaatatttactacacaaacaactaaggacaacaacaaaaaaaaataaactaataaaacgagtatacacatataacaacaacacatataactaaattcatttcagctaaacaaacagaactagcacatacatttacgctaaattaaattgattaaggaaataagaaaactccctcaagagtcagactcttcaccatcaatcggatgccaaggcacaaaaatatgatttggaaaatttggatatcccgggacaactttgtgcaagttgctctgcagcgcacaccttactcacatatctctctccctttcatactcccagtattttttttagaacccactacttccaattgttacagcattgcttcagcaattcattctcttatgcatccctgttttaaaatgctgagccaatgctataactcctgggacctgctgcttcagacgataaatcctgcttttcaccatattaaaacagctcctattttctgccttgcacctgacaatgagaaatcaccacaccattgcaaaaccattagtaattgtagaaaattgaaaattatatatatgcgattatataagtatatatattatttatttattcttttttttctttttttttttctctaacaaggggtggcacaccccaaacttaatacataacatatatataactagatataatcttgttcctccactctcaggttgcccaaatgtgattcactaaagccatggcaacccgaagtcattcttcctcaagcctctttcaatgtgatggaggtctttgctcgatcaacctccccttcgattgcccattcaccttaaatacccttccagactgttcgtccttgacatccacagctctgaaaggatacactttggcaatggtgaatggtctcaaccaatgagactttaactttccaagaaacaacttcagacttgaattgaataacagaacttgttgaccttctttaaataccctgtgttgaatcctcttgtcatgccatctctcgcttttctccttgtacaacttggcattttcataggaggaaaacctcatctcttcaagctcatttaattgcaacattcgggcctctctagtagcttggagatttaaattcagcttctttatagcccaaaaggctttgtgttccaactctaccggcaagtgacatgccttcccatataccaatcgatatggggacatacccaaaggtgttttatatgatgcccagtaagcccaaagagagtcatctagcctttgagaccaatccttgcgattaggattaacaacttttcaagtacatccttgatctctcagttagaaagttcagctggcccattggtttgaggatgataggcagtagcaatcttctgtttgacattgtatttagctaacaaggtagcaagaattttattcacaaaatgagtaccttcatcgcttattaatgcccgtggtgt

SEQ ID NO: 313658 - DNA, 830 bp, Cannabis indica
aaggttttgatgagcatttggtaaaggtaaattttttgggtttgttgttggtatagctgggtattgcttggtaagtgttgatgccattagagccggttatggctctcacacttatgttagagaaaaattgtaaaaattgtacattatattccgtgaattataatgtcaacatatatgagatatatattaccaaaaggaaaacgaacaacacaaatccaaagcaaaagagaaagaactcaatcgaataaatgggaaaagtaatacaaatataatttgtaaattattatggcttaagtaccgtaccttttcaaaaaaaaaaaaaataataatatggcttaacaattgagttttttttcttctaaaatgctaaatagttaattaattatatggtgataatcatcattcagtcatgtgttcaaaatctgtttcttattggtctggtcatcccatttgttcaacctcttgagcgattcttctacctgatgaccaaaatcaataatatttcagattaattaattatctcattttatttcatttcttttaataattagtcaatttatatttatatgaataatgacaataattgttctcaaaaaaaaaaaagaaaaaaagaaaaagaagagagaataatgacaataatttcaaaccacaaatactagcgctatatagttattacctctttggtccagtccgtccgaaacgttatccacaaaagtatcaatgtttgaagaacagttcctccaatcattcctagccatattccctagaaatatacatcagatagactaaataaattatatttaaataaaaaaaaaatcaaaacattaaaa

SEQ ID NO: 313659 - DNA, 1664 bp, Cannabis indica
tttttaataaactctttgattagtaaaggtgtgaatagtaattaagaaaacacgatagcgcgcctaatctagtaaggtgttataatttggtatttgagctgctaggttgtgttcggaagatgatcatgatatgtacaattatcatcagggataagctcaactcacgatttagtaagcctctttatgctttagtagtttgatttattagtatgtgattaagaaaagcttgatgggaagtatgctagtagcgttacagttgaataggcatatgtttaaattcccatgtaagcggtaacccgatttaatcttgattgcaatctaaccaggctaacccatgattgtgcagactagtttaatagaatggacgccagcgaaacacgagaagcaaaggaaattcagtcaaatccagtggttgttagcgtggttagaatccccctaatgcatgtggtcgaggtagaggtcgaaggggtagggcttacagtcagggtaatgctaacccacctcgagcttcccaagattgggaatagaggtttacaaaaatgtaagccaaaattaatgaacaagatgaagaaattggacgcttaaggcaacagggtgctcttgtggtgcctgctccgtagtaccgatagctcctactcttgggttgccagtagagcaagtttctgttggtaattgtatgaactgttatatgaaagattttataagtaagaacttccagtttctctgggaggtctgaatgttatgaaagccaaaaaatgactagcagtcatcaatagaatattgaacttcataggtgttactagcaatgatagagtgtttgtgccacctttcagtttcaggaggattccctagcctggtgggatatgatgcccctcacttgggatgttactagaattacctgggaggagttccaagatctgttcaatgctaagtactacaatgagacagtttgtagcaaaaacaggaaagaattcacccagttgacataaggagagaatatgtcagttacaaaatatttgacttagtttggcaggttaaccaggttagcctcaggaatagtgctaaccaattttagtaagaaggaaaagtatttagcggggttgaaccctaaaatcaaacgtgatttgataattactatggatgacaggactaccgatgctcttacggtagagaaagcattgcaagctaatggcgtagtagagtgtattcaagagtcctgagggactcaaattgttggtggggccactgctcctcctatcttttgttttggtaggggtggtagtgactcaacctctgataaaaaaataaaggttccatttgtgttcgatggctcaagtgagaacaagaggtttcaagggaactgaggttgaggtggtcgttagggtggttcagagagtcattacacttacctagaatgccactattttaagaagcatcattcgggatagtgtaaaggctgagaatgtttccagtgcggtgtgactagccattacaaaagatattgcccgtagttgaagaaagaaaagcagaaaatagaggtaaagcccgctagctttagctaggtgtttgtgttgggttttgtgccctaaataaaatctatttcaatataatcagatttactaattaataaaaatcagaaattgcattttatattgcatggttca

SEQ ID NO: 313660 - DNA, 1512 bp, Cannabis indica
actatcactactacaatttaaccttttagtgacactatatagtgactctcacttttgtgagcgtcactaaatagttcagaataacttttagtgacgcgcataagtagactctaaattttcggtattagtctctcatattgcgtgtcactaaaaatatgaagtgtcaccaaaaagtattccctataattttctaatttttttatttattaaaaaaacttacttatagagtcacaccaagagtgactagaaaaatgtatccccacatgctttgcatgtcactataggtattttaataaaaaaaaaataaaaaattaaaaattggaaaggcacgttggaaattgtttccctatcttttctagatagatctttttttttatattttattctttttatattttttaaatgaaaaattatttagggtaattatttcaaaaccctaatagtttatccctctctctcctttctcaaccgcctctctcagattattttttatttttcttttatctcatctctctctaaaaccagccatctccaaccctcctcctttcatttctctaacactacaaccttacacagctcaacaactctcaagattcgcccattaaaccatctcacctatctctcttcttcttcttccactcgctgcagattagcttctgtggtggaacaaggctcttcatctccttcctcagatgattccgccatggacgacgacaaccaccaaaggtctaggcgagctccaaccgccatggaacctctcgtctccctctactccattgacgacttctccgcctccaaatgcccatggtctcctctcgcctccctcgatatatattttcttggggttaaaatatctccccctactctgatttttttaggtgtattgtgtttgaaggtctttgtggatctagttgttgaaacttcgtccgtggtctatggtggttgggtttgtttttttcatcgttcgaaggctctagttgctggtttacggtggcaagtttcatgggtctcgacgtttgaatgtcgacgagtctgggctcgtggtctatggtggccgcgtttgtaattttttttttgttcatatttttaattttttttctagatgtgttagatttatatttagctgatctgtaatttttgtgcatgtatatgttgaactttgttataaaatattgtattttagatgtttcagtattgaactttgttaaatctttaactgggtttcaatttttttttttcagatacattttctaatccttttggtaaaaaggaatataataaaaaatttatataattttaatatacatattttaattagaattgatttaatctgtcaaaattatataaaaagaaaaaatatatattaaaaagaaaaaataaataaataaagcttttagtgtgactataagtaaaataaattgaatattatttataatataaattttgaattaaatcaaattaaatattattttttttaaaaaaaaatatttaatgtagtggcactttttgtgt

SEQ ID NO: 313661 - DNA, 1784 bp, Cannabis indica
gataattgtttgtgcaactgtgtctattttttttttagcttgttatttacttctaccaacgctttgtacgggtatagttgcccccaagttatcgagtagacttttgactattggtcacttgcatttcacaagtattgtttttgtttcttcggttccttggatttgagcagacctttgtatgcatttaatggtaaatttataacttgctaatagaattgacacaatatgaatttaaatagacatctttattcattcattggtcggaacctttttgataccatagtaacttacataatagctattatattcatctaatccgatcattagctaaatttaaataaaacaaattgcatttaaaagaaattgtacttttagaggtggtcatccgacctgagtactttgttatttcacccgaaccttagggcagggtacgccaagaaggccatttacttaaagagtaaatgttcttagattttgtacttacagtggtcatccaacctgatacttttactagtagtattttattaaatgttccccgttccaataccttggtactagaacgagtttcatattttcgtaatgtctaaaacttcaacaacctgatatggtccttccgagtctggtccgagaacaccagccgtaccatcttttgtgttcagaaacactcccctgaggaccatatgtcccacaaaaaaattttgtgcctttacttgcttattgaagtacaaagctagcttttgttgacgggccaccaattttaggtttgctgcagctagtttttcttcaatttcgtcaagtgattctgctaggagggcatgattactctcttgatcataggtcaatcttctatgggtactactacaaaaagggatttttactttagtttttaagagacacataaagtatttgcttcgattggtgtaaccgatgctattaccgtagatgcaaatacttatttttttgcttcggttatgaatcgacgctaattttttttttgctttacttatgaaccggagcaaaaaaaaaaagtttttgcttcagttcataactaaagcaaaaaatcagtgcaacgacactaattgtttttttgcttcggtttataactgaagcaaaacatattttaaaaaaaaaaatctaaaaccaaacaatccaaaccaaaaataaatacaatatcagatcaatcttttaataaaaaaataaatacagtattagacaaacattatgaagacttgtttaaacaccgaaaaataaaaattcaaatctcaaataataaaaatatatctcaaattatacttgatcttacagtataaatttttgctttttgaggttggaagcaagcaaaaatcttaatgtttacattatcccaatttttgcactctgacgtggcacacacgatggtgacacgcggaatcaacttcacatatttcttcgcaagagatatgcggaacagagcaccacatatattcgcaaggacgaagccttcttaacagagcagtgagcagtccgaacagcacaccaacacttagcagtttctgttggaattattttaccaggatcttagatttactaacaagtatgttgtttaacatcctaaatatgaacttctaaaactataagaaataaacacatataaagtataagaaaccttacagtggttgcagcggaatataatgtctccttccactcagatccctaacccttgtatcctttttgtcgcagagtatcaccaagatctgagcctgaatgtccttctcttgattctggattcttcacaatcttccaca

SEQ ID NO: 313662 - DNA, 1920 bp, Cannabis indica
atttttttttcattaattaattaatttaataaattatagaatatatacctgtcaaatacattaaatatttgctctatatatatattcgtttgatgttaagaaaataagaattaataattaagattagtacattatggaatgtcttttaaaatagtgtattttatattgtttttgtgatatttaattaaggtatttattctgccaaacttaatagttaaagatattcttttattattaatgttccttattatatataataattatatatataggtagcagattttgtgcccagaaatgtaaaacacggaatatattccgttgtacggcaggtaagtcccagggtacgtgataatgagtctcagagtacgtaataatatgtgtgcatttatttataggtcccagggtacgtgataatgagtctcagggtacgctaccattttttaattctaattacccctagatcaaccccagccctcagatcaaataactacccaacggctgccgtatatcagagaatacatcccctaaagtacactcaaaatcgtgtccctatatatattatgttatgtatacccttcaatattatttgagatatttaggcgaaattcttttaatatttataattattatacatataatttcaattaaaaaaaagtaatagcaaaaatactttattttacgattttgttatcgttgtacttttcttggccactaaatgtcaacctagagatacgtggcgatatattattaattagattatgtattaaataagctaaaaaaatatatcgccacatatttttgagctgacacttaacgagcttaattgacgcttaacaatcaaaaaaaagagtacgattgcaataaagtcacttttttttattaaagttatatgtgtaacaatttcaaatattaaaaaaatttcgctacaaatatttcatattattataatgtttgtactttctgaaacttaattcaatattactatatatattatatataaggaaagaaaaacaaaatataaaaaaaaaaaatattattatatatattttgtataatttgtgtagttgaaactttaattctcaatctatttaatttaatttaattattcaaccacaattcttaaattatatataaggaaatgaaaatcaattaaaataggtcattatttgggtaatgtttagttaagtgtaatgaaatagtaagaatggaggataatatttgtgatgtttggctcattatttttggaatggtaattagggacgactctaagaatatgtcgaacccacactattatttaatatgccatacacattatttaattaaattataaatatttattatttacaatacatttaattttaattaaataaaaatttaataagacatttcattttttattttaggtcccaaaaaatatagatcttaagcacgggtttaacttgcttatgcctaaagtcggtcttgataataaaaatgagtaatgtatcaaaaaaatattttgtttttttggtaatataagagcataatggtaattttgttttatataaataatgtaacattggtatagaacaataatccttattcatgtaaatagtataatggggattacattaattgtaaaccctaaaaaaaaaaagaagattacattaattgtaacaatattataaagtttttaaaccaaatcaaataataaaattgtaatggtgattctattacgattacaccaaactaaaattttgtttatgtctaacaaatattgtgaatctttttaataattgatgaaatttaatatattttacttattataagttaaatatttaaaataattaaatttatattaatatttaatatagatatgatcaattaaattaatcacatatataaatatgaaatttaaaaataacatataaatatatataa

SEQ ID NO: 313663 - DNA, 1899 bp, Cannabis indica
ggtgctctactgtgcaggaaagggtaaatctctctgtaatcagccatgtgttcgagagcatggcggtggattgtacatgtttgtgccattctagaccaagcatgttggttctaccagtgaatgtattttgcaatcttggattttgccgcttaggtcggcacgtgaattgacttgtaatattttctaaaaaattttgtgggatcccgagacatgttatctttttggtttgtttataaagttaaaaattagtacaagctatattttcattgcattgcatataaagtttaaattttcctgctcttatctatctagtaatcccgatttagcgggattagggttttaatattggttgtcgtagcatgcctaattgttagggcattacatgactcgtctttattttttacaaataacactagagcaccctagggagaataactcagtcttataaatcctaatttaagtaacttttggagttagatcttcaactctttcaatttcgttggagccattggatgaggtgcctttactactggttctgctcccgaaactaactctattatgaactcaattctcgggaaggttgtaatctaggtaagtcctctagaaatacatctagaaatttgcacacgagtctcgtatttttaggtctagatgacacaggttgtctagtatccactgtagttactaggaatcctagaaaacctctgcacatcagatctttagcttttatgagtgttattctaggtatgaacgatccttgtactttaaccacaaacaccgctggattggcactgtcaggttcaaacacaattatcttccgcttgcagtcaattgttgccccatatttagataagaaatccattcacatgattatatcaaaatcacactattgtaactcaattagattggcggttaattcataaccatgaatccaaaaagaaaaagacctaattcactgagtagatacaattaggtctcccgagggtaacagggtaccaaaccccgaagcatacacatctcatagtttatgaaaactctcaatttctctacttgataaataacaacgagtagctccaaaatcaaataatacagaacaagaacaactgttaatggacaacttacctgtcaccattgacagactagtattagcgtcaacctgagtcataatgaatagatgccccagattatggttgttgttcttctttggtttgtctttcttagcctgtggataatctcagataaagtggcccactaccgcactggaaacatgttttatcccggcactcaccctgatggtgctttttacatttgggacactctcgatatgatctaaatgtagacttgtaggcttgacggccacctctatttcccaaaaactttctattacttcccagtgttctagaagcttcagccttctgtttgtgatccaagttaccactatcggtccccttactcatactaccaccacactaggattcgatggcatgaagaaatccttggcagcttgctctttaattacatgttgtcccatttcttgagtaatcaaggctaactcaaccattttcttgtataacgtgtcttgatcagtggtaattttcaagtcccgacagatagtggcattcagtccccttacataactttgtttccgggtgaagtctgttggtacaaggtcatcagtgaacttagatagacgatcaaatacaagggtatactcaggcactgtcgtcttcccttgggtcaacttcacaaaatcttccatatgtgaagttcttacaacaatgtaataaaatttttctttaaacacggtcttaaactcttctcaagatatggtgctgacatctcgagtctgctccacaatatctgtaacaccctaactaccttaggcgtattacgtgattt

SEQ ID NO: 313664 - DNA, 526 bp, Cannabis indica
tcctacataatttaatataatagtttttagggagtatcgctagccaatcgcaatgctacatgtcgagaaagtgctaggcaccactggtgcctaatagaaatgttctattaaattcaatatcttttaatttaattattataattggaaaaatgttatctcatattaatatatttagtagtaatttgggcattatttttaacccaaaagtcaaaaacttctcctacctaaatggacctagagaaataaataaagtggcctttctatttttaatgcttgtcattatcaatacaccataaaatattatcttcataccactctctttcattgtatcattatcttcttttcaaccatctctatcgaagcaatttaattattattattattattattattattattattaggctaattagtaatttttctctctgaacttcgacacgtggtaaatcgtgtcacctaacttttttggccgttaaaaactccccccgaactattgagattgttaaatttaaggacttttgtctaa

SEQ ID NO: 313665 - DNA, 1132 bp, Cannabis indica
aaaaaaaaaattgaatctcaagagttttatactaattatcaattaatcttgagataacaatcatatttctcaccaggatttgttgattatcttataaaagagaaaaatgattacttgtcaaaattatagtggcaattacaaaatcacaaataaaagacatatataaatatctcttatatatagatccttaattatatttctaaatataaatatgcatatatagttattaacaatttatcttctcaaataattttttccacaattatttatcccccattatatattttctcctattttggaaaaattatttatgtatttatttgcatttttggcctaagttttttacattatatgtataatatgatgatgctttatgttacatattaattgatatattatgatgattatatatataggtgacatgtcttcaaacacaactgattcaagccaaagctcaattagctcaaacttataatacttctaatcatcatcagcactatggatcatcatcagcagcaactaatcatactcataatcataatcatgataatgtatatcataataataataataattacgtgaataataactatccgatttcgccccagagctcattggactctgttgaccaaaccggtagtagtactcatgatcatcatcaaatttcgatgatcaacggtggtagcggtggtggtggtggtggcggtcatcaggagatacaaagtggaagagtggtttcatctgaggattataataattttttagttcaagctaataattataattataataataataataataattgttcaaggaagaggccaaataataatggcactgaattgggtgagcttcatgccctagcccttagaatgatgagaaattaattaattatatattagatcattttaaattattataattattagttttgtattaatggtgatatatattgatgatcatggttttgatcaacggtggatattgattcatgatgatgatgaatgaattattactaatattcatgtatatataattaaccagagagagagaaactattatgatattaagaaaattactatttaatattattattattatcatgagtaaaaatttaatttttttagccgtt

SEQ ID NO: 313666 - DNA, 1518 bp, Cannabis indica
aaagtagcagttttttgtagtggcaccctagctctacttgtttcgacattcagaaaaaaaaaatttagtatattttttttttcatatttatgtaggttatagctatgtaagatatcctacaaaattttgagaaattcggaataatttacaatataaaaaataatgttcaaacagtttactttacacgcgtataaaataaaatagtcacacgtgcaacacactgtttgaacgtaatttttggcgtgctaaacttttttgaatttcttttaattttacaggatatcttaaataactataatttacatgaccataagaaaaaatttgactaaaatatcatttcggatactataaaacagatagaaatgtatcagatgcacccattttaagggattccattataaaattttctataatattttttaggacatcatcataaatattaaattgtatccttaccaaacaaaaagtaagagagtgatgtcactaagcatattttgaactacgtcactaaattatcttcaacattttttctaatcactaagattttaggccaaaaataacaaaatattaaaagaaaccatacccccaattcacctatacaaaaaagctataatgaatcaactcaatttctatccacatgactaagatattttggccaacaataaataattatatttttttttgacactttctttacttcttttgtacagtaatttcaattcttgcaagcttttgcaaccaaaaagtttcattccgagagtgccaaagttggtacactagagctaccatagcaccaaagtgttaaaatattaaacttaatttaatatagttaatttctagaattttcttattgctaccaaagtttctagactattcttataattactaaagtgtctagagttttcttgtttgtttgagtacccttgaattttctagaattatctttcacttgtgttagtagagagaactatgtagaacaatgtagaagctagccaattaataatgtttcttagattagtccatagagtcctataaatagagatgtaatcctatcattttgtaccaagtcacaaatcacacaagttgagatataaaatatagattcttccattcaaatattttctctaaagttcttcttattttccaacaaagtggtactagagccaagtttgtgaagaaaaatggcaagtggaagaatgatccccttccaagttccaatgcccaccaagagcaactatgacaaatagagtattaagatgaaggcgctactaggagctcaagatgaatgggatattgttgagaaatgtcataaggagcaagacgatgttgctctttcccaagctcaacgagatgcgttaagggattcaagaaagagggacaagaaagctctctacctcatctatcaagcagtggatgaagatgcgttcgagaagatctcaaatgcaacgacggccaaggaagcgtgggagaagcttcaagcttgcaacaaggagcggagcaagtgaaaaagatttgtct

SEQ ID NO: 313667 - DNA, 672 bp, Cannabis indica
tatttttataaaataaccgtaaaacaacaaaacagacaattaaaacaatagtggaacaactaaaaaataactatggaacaacagtaaaaacttaacacataacacaatatttcaagaaaaaaatttcaccccatagtaaaaaaattaaaaaagttaaaaatttgtagtgtaaaaaaataaatatattcatattaaatatattgatcaaaatagattctcataagaaaaaataaatatatatagcctaaaatggtaattggtcaaaatacatattattgcataaatataaattcaattatttataatttaattgttttataaaactattgtaaaaaaacatgaatgaaagaaaaattgcataatgtataaatcattcatcaagattatatagtattattaattaaataaatataaatctaaatatatattcataatttttttattattataagacagcacaaagtaaaattatctatatatttatatataaacttatttaatttatgtacattgcattatatataatatatatctattctatataaagtgtgcctatataactaaaattcttggtttatgagaaatttatgagtgactttttattttatttaataaaataataaaatattatttatatataataaaataataataaaaccaatctcattaata

SEQ ID NO: 313668 - DNA, 2483 bp, Cannabis indica
ttaaacaacatacttgtgcgtagatctaagatcctggtaaaataaattccaacatggatataatagtatgtaataccatttacctcaataattggagtatcatattgtgaagatgagaaccattgacttctagtttcttttgtaagtgcggtactaacctttgtgtcctgcaaatatacaataaattagcaaattcagtatatagttgatctgttatagtaaattaaaaattaatataataataataataagaagaagaacttaaccagatgtgaagatgtagctttgtcactatgatgtatagcatggacctataaataaataaattttaatacatcttacgggttaatatttaaaattattgaagaaaaaattagtcatttaactttgacctgaagtgaaggtacgacattgccattgttttggttgtccaaaatagttcttagattttgaacttcagattctaaatcatctacttttgcctccagagcatctacatatttattttggtttcttttccaagttgatttatctttccacacatctgatggacagactccaaatccatacatttgtattgacccatgtttttctctgcccatgacttcagagaaagtattattcatagtcttttatattgacgcattttcattcagtttttctttttcttgtaattgtagctatcatgaatttaacaagacatgtcaattaagaataaattaaagtagccaacaagacataatacattactttaaaataattgcatcataccatagcctcttttgtcttctcacttctaatgccatttttttctttgcataataaatttttaacatagttacacgtgttggcgtacttgcacaaaaaaaaaaattattttaattcaaagggaacaaaatacacctaaatttctttttttgtaaaaaaaaaacaagctgaggagaatgtaactttttccattctcctaaaaattttatcatcaaaatcactgtaaaaatacacctaatttttaaacaagttaaggctcctgctccacctttggtattgtgcatggagaccaagagaggcaaagatatgctaaaccactatatgagctggttgatcccagaggtgaacaaacagctaactggggcggacaatgacttgtccttagagttggtcttaggaggagttctaaaggagctttcgcgagtaagtcctttccaacatttccctttcattcctctttaactagttcgggttttaatgcctttttctgcacagactggtttgaagatggcctacgcctattcttgagctaagtcgcctgctgctaagaaccttgccatttccaacacaatgcgaatggaagtggacttggccaaaaaggatgccaaggatgcgcgggttcaacttggggttgtgcggatagagctgagagagatcaataagaaactccttgtcgtcgagaatagagttaccgaactgaccaaggaactgtaggacatgccctcgaccgagcagcttgaggcagacaatgcttctttgtctttagatgttaccagtctccaagacgaaagagagggtctccggactcttcttagaaggttgggagaagagcttaaggataaaaagaccagggaggatgaactttgggctaaggttaaggaacttggggagaaggtggatgccttagagacagttggtctcgagattttttatgacttttggaaggctaatcccaaggccaatttcgaataccttgaggcttctaaagacatgtttctcgactactgcacggcttaggcggctaatgagatcttaaggcgaccacttcctcctctccgctgagtagaatgtcgaggctccttctgcccagactgaagatccttcagcctcatcaggcgtagctgatcctctggccccttcatacccaatcgatccatacaaagagcctgagactcctgctgttaaattgctttcttttttttaatatatgtctgttcggccagtaggccttcttttgagacaaggtgactggccaagcggtctttaaacttggaatatttttcattttttgaacaactggctgaccgggcagcctttaatcttgggtttgaatgctttgttattcttaatgaatttcatccctcgtttatgatcattgtgcaattgtgtttgttctttatcgaatgttttgtacaggtataggtgcccccaagtgaccgagcagacttttgactcttggtcacttgctttcacaagtatgctttttgtctgtttggggttttgggtacgaccaaaactcttaatacacattaaatgataaatttatgacatgctaatgaattttactcaatttgaattgaaataaacatctttattcatttattggtcggaaatatgtttgttaccgtagtaacttacacttaaagctattgtactgatctggtttgatctttagcttagcataaacaaaaaaaaaaattgtactttcataagtg

SEQ ID NO: 313669 - DNA, 1072 bp, Cannabis indica
catacaattgattcctattctcctttagtaaacatgtggtattatccatttaacacagttaagtactgaattgcttatgtgtatatttttgtacacgtgtcacatttatattgattcacctaatattattatttaaacattataaagattatttcaaaattcattttaaattaaaccaaaaatcataattaaactcataacccaaaacaccccctcatcttcctcaaacccaccaccatcgaaaccaccatcacgaccatgaccaacacccaccacctcaaatcacacaaaaaaaaaacaaaaatacaacaaatttaaacaacaatatcataattgaaacaagaacatagatctaaaatcttccaaatatttcaggaaagaatacccaaaataattttaattatagttgtttattgttaaaatctttcacattaatcgttcgtctctcactaggaccccgtcgcgaaacccctatcgagaagttttccttgccattgaagctcaccacctcttgcgaagaggacatgaacagagaagaagatggcacccgcaagccacccttcatcagatctgaccgccgctaatgagcgtctcctctacgacgacaagtttggagtattggtcctttctccgatgatgatgctcaaagggcgcatcctctctctctctctaacgacgatgagctcaaatttttggttctctctccgtcctagattcatgccaatcctagcccaaatcagagagatctcaatccagatttgatagaactcatcctagatctgtctaatgcatttccaaatccaactgcctttgcccgaaatttcaacacccctgttacaaatagaagaagaagaagagaagaagaagaagaagaagaagaagaagaagaagaagaattaaatatgataaattttctttgtaagagaagaagaagagaagtaggagaagaattttgggttggtctctgttcttagtttttttttagtatgtctgttatgttcttaaatttagggtttcgtttattttgggttttatgccctaaataaaactctttacaatctgattagttatc

SEQ ID NO: 313670 - DNA, 1001 bp, Cannabis indica
ctcagttggctcctcttgtggcacgttcaaatccttcaataactttcttagccaaataacatgacaaacaaatgaagttgcaacgacatattcgactttacatgtcgatagcaaaacgattagttgcttttttgtcatccaagtaaatgctatgttttccatgaagaaacacaaatccaataatgctctttctatcgtccaagtctccactctaatcgctatcactatatccaactatctcataatttttagaagatgaataaaatagcccataattggtcgtacttttgatgtaccgaagtattctctttgcagttttcaaatgagttattattggagcttccataaagcggctaacaattccaataacattaaaaatgtccggccttgtacaagttaggtagcgtaaacttccaacaaggctttcgaaaagagttaaatcaacttttcctcctttgtcatgctttaacaattttgttccatatctttctttaactcctcaaacatacttgagtgtcttctagcgaagatcaagtcatccacatataagcatacaatcaagatatctttcattcttaattttgatgtagagtgcatgcttatatggacacttggtgagatttttatcttgaaagtgcttgtcaatatgagtaatataagctcttggcacttgttttaggccatataaagcgttttaaacttcaaaacttttccttcatgtcctcttacttcatagcctaatggttgctcgatgtagacttcttcctcgaggaaactatttaagaaagaagaatttacatccatttggtggatcttccatctattttggactgctaaagaaattattagcctaacagttttaagacgagcaactgggaaaaatacctcatcatagtcgatgccttccctttgactatagaatttttccaccaatcttcctttatatctctccacctcacctttagcattcttcttttccttgtacacccactttactccaa

SEQ ID NO: 313671 - DNA, 1700 bp, Cannabis indica
tggtagctaggggcattttagtaattatggctcaagaagggtaaaatgataaaattaatttaattacgtgcttaatagaactatattattatatagtatgcctgtgttgtctttttaagtgtgttctgacaggttgacacgatatagtcacaaccgggtgtttcaggacgaaccgagttcgggcccgaaatgcaatttgaattgaaataattggcattttttttaatggtgataatctacaattatattggatttctgtgtgcatgaaatgactaaactacccttgtatgtgtgaatatgtgagaattggccctagggcattttggtattttgacctttattgatatactttaataaaaattgaatttcaaggaaaagcaaagaaatttctggcttttgtatccctctcacccgacccttctctctctatctctctaacctaatcccaactttgattttcagaaagaaatttgcttgtgttaagcttgcttttgaggaattaagcttagttgtggcttgaatttgaggtagttcttctcctcactctttaatttttaattttttgctgagtttgggaattgaaagcatgctcttctaagctttgagtgttcttgattatatgatgagtgaatcgatgtttgatttgatgaaattgggtctttattggatgaagttgttgtacattttattgtagagttgaggctgtaatttcggattttctaggttgaaatttaggtatcaaaatgggtgtttgctgctggaaattatatgagttgggtgtgcttgaagctcaagttcatgagcttgagtattgctagtatgaagcatgatttatgtgtatctgtaaacttaattttcagggtatataatgagttctgatgcatgtaatatgtattttaatactctatctttaaattttatagtttgttgatgtgttttgagagttgggatgtgattttggaggatttgcatgtgtttggttgctgaaattcgtgtttcaggcggctagtttttgggtttggatcccaggtgccgcggaatggtctgagcatgccgcgacctgcccctgttggtggaacatgggatgttgtcccaggtgccgcgacatggcttgggcatgccgtggcccgcccttgaattttttgggcagtttggagttccaactttgaaaattcataactttctattccgaactccgatttgggagtctttatatttttggaaagctcgtttcgagcttggtataattatctgaattattaatgccatgaatatattttatgagtatggaatcaggggttaaccctatgtgtgaaaatatcagattttgtgactaggattactgggacctggtcaggagcactgggggattcagattctctaccattgcggaacaacacgtaagacagtagttagcacgtagagtatgtgtggtggcgcttatgttgaatatgatatatgtgagcaattgtaaccgggattggggttattaccttaataggaactattaatagcctagggttattaccctagtgatataagtgagtaaatgctatggcatgttaagtgtatgattatattgagatttaagggttatgcgttcaaggcataatcaagttgcactcggtaatcataaccgagatgaaccattctaaggccttattgtatttagacgtgtgagagcaacacgtaggtctacg

SEQ ID NO: 313672 - DNA, 532 bp, Cannabis indica
tttttatttttattggtttgttaccttatggttggtgtacctaccctctctttttgttttgtttgaatctttgtaagtctttcaaggatgttgttgtgacctatgttcctcggtttgagaaccgtgttgctgatgctttagtcagttgggctagaactgcaaaaattaagaacattgatttgttaagggaagtggccatttctgtggctactataatttaacttagttttcaataaaaagtttctttttatatatatataaaaaaaaaagattaagatccataatttgctaaatatgtccttagcttaaataatggcaaatttatatggtataccaacttttatcatttttttacaaaaatactgtcaggcggtattttttactgtgtttttttataagtttcatactgcagtatactgtgttaagttttcactggtgttctactggtgttttttagttgttctactgttgttttgagttgttctgttttgtgttctactggtgttttataaaaacaaagtatttttgaaaa

SEQ ID NO: 313673 - DNA, 742 bp, Cannabis indica
ttccaaagtttgtatggtcctctcagattgtccatcgatctatggatgatgggaagtactcaagtgaagtttagttcctaaagcttgttgcaaggccttccaaaaccttgatgtaaatttgaggatctccatcaaaaacaatgctcgaaggctctccatgtagtcgaaatatattgtctacttaaatttgagatagcctagtaagcatgtaatcctttctaatttgaataaaatgagcagactaagttaaacgatccacaatcacccaaacagtgtcatgcttctaaggtgtcaatggcaatccagtaacaaattccattgtaatcttgtctcacttccattcttttatagggaaatgttgaagtaaacatgaaggtctttgacgctcagccttaactttatgacaaactatacacttagttaacaaagatagccacatctcttttcatgccttcccacaaatattctctcttcaaatcttggtacatctttctacttctcggatgtagagcaaacttggatctatggacctcaataaaaatggactccttaagatcagggatatttgcaacaactagtcttcatatatgatataggtacccttcattattaactgtccacccatctagttgctcatcatcctagattcgactccagataagtcttaacttttcgtcttcccactgacgcttcttaacttgttgaagtaccactagtgtagccactatgttagagatacaag

SEQ ID NO: 313674 - DNA, 1299 bp, Cannabis indica
aaaacagatggtccaaaatagtatttaccctacagaaagattatttctttttctattctatttattttattaccactaaccaaacgccacctaagagtatactatataaataatataatttttatttgttacgacacttatgaatatttttttgttttttttattattattttttaaatggattttttttattttatattttaagatcgttttttttttaaattttttcacagaatttcacacagaaactcatatagcaactaatggagcaacctaaattgtaactaaaattcgtagcaacatataaaaaccattagagcaactctaactataaatttttttaaaaaaattataaaataatataaagtaattatattttcttttatcatcatgagctaacatttatttcacttgaatatgcatcacaattgttcggtcttatggggaaagagtatgtatatttataagataagttagataattagaaacaccgtctttgtatgtataaagacgaactactattattaattttcaacaacaacaacaataaaatacgtagtgacaccgtttataaatataacttaatataaattaataataataataaaaaaaaataataataataataataataataataaagaatgtgcaaaggaaaaataaaaaactaagtggaagcatcaagaatatgcccccagtcgccccataaatatccatctttgcatgtaatgctaatgtcacactattttatattgatcaagttgaaacatactgtctacgactatgaccctaataatatataatttttgtgttgttttcaaaaacattcaaaatcaaatcttagaagaaacggtgtgagagagtgagagaggcacatggagtggcgttccaactaccacccactcttcctcaattagataaaacaaaataaagctattattcactaaaataatattatacacataatttttcaaagtcttctatatccaataaataaataaaatcaaagtccaagtaataagtctatagtgtggcaccctaaatattagggattttttcaaaaatatatttaaaatataaattatttacaaaaataccttaataaatctcaattacaataataccttgccacgtcattaaaaaataccttaattctaaaataatatgcctgaaacaaaattaatctcaaattccattttttttattattttcccgtgttttcaaaagtaaccttttggttacttatgacgctgataataaactaattgttacttttacgtaaaaaaaattatttttaaa

SEQ ID NO: 313675 - DNA, 440 bp, Cannabis indica
aaaaatttaaggggcatgatttagtacatgtcaaagttcgaggaaaaatttgctaataaatgtatcgacatataaaaaataaaacattaaaacggtgacatgagacatattctcaaatttctctattcttatttatttattttaactctaaccaataattattattttttttcgtaaaaataaaattattatttctaactactaatagtaatattaatatatctcaaaaaaaaaaaaatagtaatattaatattgatattcaaataaaacacattttattgaactcaagatggtaccaaatctccattaacgtagcaattaattataataatactctcaaaatataaaaataaaaataataaaaaaaagacctttcaattctaagtagattgaagttatatataaaagaagaaaaacaactctattatgttacttaaaaa

SEQ ID NO: 313676 - DNA, 938 bp, Cannabis indica
gaataattatatgttccggatttaactgattttgtgcatatatcaaatatatatattaaaccataaacatgtaacatacatataaacataaatcacttcaaaagtctaaattgataactaatcagattgtaatgggttttatttagggcacaaaacccaacgcacaagatgtcactcttagttcgttgatgattgctaatggagattggaaaatcaatgaagtgagcagttggtttcacaacgatgacattccttgggttctaggcatcatcccatctatacacaaaccaaaattggattacttggggattaactaacaatgggaattactcggtggctagtggctataaggtaagatttagtaatccggattgggcggcttgttcaaacaactccaaattatggaagttcatttgggggtcaaggctaactccgaaaatgaaaaagtttatttggaaagtgtttaaccattggatcccgactaaggtggaattgaggaagcgaggaatgtccttatatgctaactgtgatgggtgtatgcagcaagaggaggatatttgtcacgcgttgtggtgttgtccaagagttcaaaaaatttggaagcagctgggctactccaaattcaaggaccaaagtgttcataatgcatcggcctttttgtggtggcagtgggaacatctctcaaaggaggagttcatccgatttgtcggtttttcttggttgatttggcaaagacaaaacaaatatatctttcaacacaaggccccggacaacaaatattggattccttgggcgatggagacaatagaacaacacctgggactgcaacaacaactaccagccgctccttcatccaagcccttaacctcctggcagcctcctcccaaggacatgtttctcatcaacacagatgcatcccttgtccacggtcaggaggg

SEQ ID NO: 313677 - DNA, 2095 bp, Cannabis indica
tttatagaaaattaaatttgagttaaaaattaattatttaattttggaccaacttaaattaagtaattttcataatatttattgggaatttttattttttgatgaatcagctttagtttcattactccaataatccaatttacaatcaaagagcatctgttgggacctcacatattaattttttgctttttacagtttacatctattatcaaaaaattatctttacaattataaatttctgaaccaagccaagtcatttatcccaacctttctcggccaaacattataaattctatacttaaccatttctttgactgtacaacttactctatctatatcttcatttttccattccatactttgtcattcctagtctaccatatgtgatagactaagcttgccattgcaaccgagagagtattttttgaatttgctgcacttgcacctttcaatccacctcataagccttgttaaagattgagtagaagctttccatcccaaccaatctttaatcttctgaaagcattgctgagaaaaaggacatgagaagaatagatgatcacaagtttcttcctgagcattacacaacacacatcctggatcattgatgatcccaaatctatacaatcgttctcttgtccttaatctgccctgtatagcaatccacaaaataaagttgcatttggggtgttaaacttgccccaaacttccttactccaatgcattttaggttgtggagtaactaatattttttatccaagagaaagatgatacctggattgtgtgaactgttgaacgttcaccaaagttttaatctgattcttggcctctaccactttcttccagtaccaactcccttggatgggggcattgtagccccaccaatcttcaccccgaatgtatacactatgtatccatcgaacccacatgttgtcttccttattagcaatggcccacacatatcttaacattgctgctctattccattcaactacctttttgaacccgattcctccttcagatttagcttgacaaacaaactcccaagctattaaagtggattcagtcattgaatgttggcccttccatagaaacgctctacaaataacttctatctcattcaatatcttcttaggcaaaatcattatctggcctctaatataagtggatggtcatgagaattgagttcacaagaaccgcccttcctgcaaaagagaggttcctggtactgtaggtcttaattcgggatgtcattttctcagctagttctttacaatctttgcttgaaattcttttgcacatatggacactcccagatatctaaatggggtattgtgtctatataagccaggcatatctaatattcattgtatttccctgtcatgcattccactaaagtagacagtagttttggtaggattaggatgcaaacctgaggaaagtgagaatagcttgagtccttccagcatgagaaacacacttttgaagtcacccttactgaataagagcacatcgtctgcgaagtttaagtgatttagtttgatcccctcacatctttcatgaaaccgaaagtcctccttagatccaatcctttgcataattctagacaggtattccattcccagcacaaagaggaagggagacaaggggtccccctggcataatcctctttttgactcaaagaatccatgtaaagtaccattaaacatcaacaagaactttggagtttttacacagatcatcaccagctttacaaactgactagggaactgtaaggcttccatcatttcttctataaagtcccactccactgtatcgtatgccttctaaagatctagctttatcatgcaattttccttggcattcttccttccatactgtatgatgagatcctgacagatcattgcattgtgagcaataagtcttcctttaacaaagccactttggttttgagcaataaggattggtaagatgttcttcaatctagagcaaagcattttggtagctattttgtaaacaacattgcagcaagcaatgagcctgaagtctttctgtaatgaccgctctagtaataaggattagtaaaggcaattag

SEQ ID NO: 313678 - DNA, 1468 bp, Cannabis indica
cgttagcggttttttcggttttcagtttcgtcggtttcggttccaacggtgttcggtaggtcggtttgaacggtttttttagttttccggattataaatattttgtacttatgccactaaagaaaatcattaagtttatgtcgcttataatattaaaatttgaagtacatgtgctgttatttaccttagtatttgcgtagaaagaaaaaaaacttactgaaagaagaacaattatgaaaaagtactttcatcattaataagaaacttttagattttctataatgaatgaaacaagtaacgagagaaggcaacactttattagaggattatttatttattttttaaagaaatatttgcgtcatgacaatttaaaattttaccttcataattggttatatccaatgatatatttttagtgccaaattactcaagttactaaaactataattcagtcactttgactagtttacttccactaaatggttattagaataaaaaatgtgtcatgaccgaaatttaaattttgacaaatatgtaatatccataccataatataacttaggtgtggtcaaaggtcatactttaatcattattggaaaataatatttccaaataatcatttattttaacttgtaaaatcatattaaatacataattgaaataatgaaacaactctaataaatatattttaaatattaataataaaataattttatttctcattatatatagaatagtaataaatccacaattatgtaatcgcataatagttagattttgtttacacaaaaatttgacgtgatgacatgagcattgttattcgtatttctggaagagagatatgtgtacttccacgactcaaatacaactaacaaaggcacagattgcaggcccaatcaagataatagaccaaattcactaatttaggccattaggggttctagaaagacatctcgtttgaaagaagtgtccagtgaagagagcatctggataccttcaagcgatgcttctagaaagataattaataggcctccaaatgtcaaggttgatttactgctcattttgtaccgaatcccaccacattaggactttgtttccaaagttaaatctagaaatcaatcattccatgaaatacagtgattttcaagcagttattaatgatagccctagtgtccaggttcaaaggcctaccatttggggaaagaaaaagtgtaacgtccccgcttcaagcctccattgggcccttacacccacagaatgaatggctcttatacacgagtgcgtcactctggctgcttcatggaatcacgactgatcctacaaaccaacacgagtgtttccagcgtgctttgtcctcgctcgcacgcttcctgagaaaacttcccaggaggtcacccatcctaaaattgctccaggccaagcacgcttaactgttgagttctttcgtgatgggctaccgaaaaacaag

SEQ ID NO: 313679 - DNA, 597 bp, Cannabis indica
ctctctctctctctctataaatataaatatatatatatatatctcattctttgggtctctcttttccttggcagggacgacggattaagattcaaatacggaggatttcagttcgcaggggattgatagtgtttgggtacttaggggggtcgataagtgtgtgttagcaagggatcgacggtggctatgccacttggcttccaggtttttttatttaataaaaaaaaattagattgattttagatctgttcttctatttggttatttagttttctttgatttttatatatataaaaaatatatttggcaacccaaaaatctagtgcaatagttttggtcttgactggtccagatttattttgcatttttctattttttttttgctgaactgttttgcattttgcctgatttttaagtaatattatttgagattgtgtgaaaagtttgaactttcctcattaagtttgatttgttaatgagtttgaagagtacacctagattgagatattgaggaacaaaggagggttgattatcaatggtaaaagtgtgaatttgtatattattgttgtgtgtgaatgtgtgttggaaattatttta

SEQ ID NO: 313680 - DNA, 526 bp, Cannabis indica
agagagagagagagagagagaactagaacgaggatggatgaagagagcgagagagggaggaagctagaggaatatttagttctgtggcataggagtggagagagagtgagtgaggtacttataaaaggctcgacatggaagaatatagggacccggctcaccagactgttttattaattaattaatttcttttttattgcttttggtttgttgtggatgacatgactgtatttatttattactcactggtttatgttttcatctatatcctttattttttttaatgatatatgctttatcattttagtttttataatattatccttttcctttcttcttcttctttttgttaaataatttgtgttatgatgtgctttatcattggtagactgattgaaattgttagatttggctttttgtttggacatttgtgtgggctgggctgcattattaataagaagaaattacattctatatcctttttatattgttcttttttatttttaccttcttttttaaaatctat

SEQ ID NO: 313681 - DNA, 611 bp, Cannabis indica
aataaagggaaacatcagaactaacgggtcataattattcataatgaaactcatcaaccttccaaatttaattatgactcaacacaaaactttggaacttatctcttcatataatgattacttaattgcttactgttttattaattaattaatttattttattattattagattttaaaattattaataagagtcctggcctgggcttcaagttaagttatatatgaactcaataataataataataataattcacctaaattcttttattaagtctaatgtggattaactctaataatttaaagttgatgatagaatgacacgtgacaattgttctacccataaaaaagatgtcttaagccttcaattgtactctatttcaatttcaaattctagactactatatgcattctttgattataatttttgttattatgttgtttttttaaattattttataatttagttgtagttaatttataattgtcgtgatgttgatttcttattttttgttgaaaaaaaatatatttttataattttaaaattttaaaaaaatatttttgtaaataaaacttttaagttataaaagtataaataaaacataaaaaatg

SEQ ID NO: 313682 - DNA, 1468 bp, Cannabis indica
cagtttaaaggcaaaacaggtaaaatctcagcttcctttctcactcccagatcgtctttctctcctccaaagccaaaaatggcaactgtcttctctgcaacgaaaggacgcctcttagggaaccacacagcacggtgggtcttcccaagaccctcagccgcatgagcagtccttttcacgggttggctctgacgtcgagacaggttggacggacctccattcgatccattttctccgtcgcccgtagtcgccggcaataacattacagcaccactattctttttcctagccgaggacgaggacctacgggacacaccaggtaaagggccagaaaaaacattctggtatgctgacagaacagagagccaagggccatacatggggaacggaatatcatcaaggttcgccaccgtcaccgacgtcgatagtgagcagcccctgcgttgatgccccagacatccacagaaataacaaaatattccaattttttcatatttcatttgaacccatttcttcacacccgatgctaagtcgaaaaagcaacctgaaaacagaggtttatcaacctcaatatccacttgaactctgagaaatttgctccatgaagcaggctttccttcatctatctccacttgcacaacttttccagccaacccccccagcatactgccattagtctttgaaaaatactcatggggaaggtgatggatttgaatccaaacacgcagaagcttgaaggctgtcggaccgtcgaaggtcggggaccaggcttgaaggaccagggtgtacccacgaatacaccatggaccattaagaagagcccagtccctatgatcggcacactcgaaaccaaacttgaacacattgtttgcttctcttcatcctccaatgccacaacagaaactggtatcttccagtttttggccacaaaatcagtcacaatcatatcatccaccaccataggcgctatgactttcccaaacaagcagcaagaggccagagccttaagagaagtgtcacaaggagttagtttgacagaggtttcaaggcatgaaaagcatttgcctttaagagtggagttggaagcaatgattgactccataaatacccgacaaagaagaccaaacaaagcttttaagagacaaaccaaactcaccaaacgaatcttaccaacccctcctaaaactgacaaaaccacctcagaaaaaaaaggtggtgaatatgatccacgagccaccaaacagaaaaaaaaacaaaagaaacaaactgaaagacaagaagaaacacactaacaaccagcaatgcacaccactacaagactaacctaactcacagtgagaggaggagtcgaaaataatatagaacaaacaaagagacagacactagacacacacgaaatgaagggcaggctcacactagagagatagttgaagaccatctctctcgatagttacttaaattgattcta

SEQ ID NO: 313683 - DNA, 2707 bp, Cannabis indica
tgatgaataaaagaggcatttttcaacttaccccttattataaagttactatattagtatatttttactaatccccaaatggtatttgcacatcatattatatgcattgtttggtttattctttttttgatgttttattctttttattattttattgttcaaatttatttatttatttattttttattttttttgaataggttcaaatttatttttagtttttgtttatatttagtttttaggaaaaatttgagagatctccatttttggtaattttagtaattcagcaagtttttttgagacaaaattagataacttgaaggaaaaatgaaacttctataagcttgaatagatttccattaccttaaatgggtcaaagattattttttcagcaatttcgtggtcaaaggtcaagaatggacactttccaagatttaagtaaaaaatcaagaaataaggaattcttgccatgaaggtcgcgacattcccttgttcgttggaagaaaactgaaacaggaaaccaccaaagatcaatgaagattcaaaagttgtaattcgcttgcatggctgcgacttagtaagcaatgccacaaccttggaggaaaaagagaaactcaaaattttcactatttaacgaaggctcgtggcaatctttgaagacaattttcgaaaatttagaaaattttgaacatagaaggaagctaggagcagaaggcaccattgaaggactccaacaatgttctatctctttcatctctatcttttatatttttaattaaatttctattatattagaatgactattagtagataattttcttttaaggattattatgtgaatcacttgagtttattttatggattaatgtaattgctcaattttttcatcttctcctaattcagtttcatacaatctattttaattttacaattatttactggctatctataattgttatctataaattcgaatcaaaattctagaaagtgagatttgaatatactctgattgttatggatgcaaattaatttaggatgaaagtatctagattatttgtattagattatttgtatgattttataagtttatttgcttaatgctatctttgtgattaaactttatcataggaatataaggagttttcacatagattgggtataatatctcagaaacataattgtgaataattaaaatttattatatattatgggttaatcatgtaacaataagtagaattatgatcctactaaccttttaagcgtaaattatgaattttgtcataagtggacaaatgagtgtaagtattaatcacggagatttatttagaatatgtgagtacaatgtaaattgtttgtgaaataaaaatatttccagatttggcgaccttgaaaatctgatcggaggccaataatataataacatgtttagttaatggttttaatagggttattatggtaagttggctttagacatatcagggtattttggggtctcggggttgaccaaataccttagggttaaagatttcttaatgcgtaaaaaataacaaaataacatttattaactaaatttttgttattattattgttactactattatcattattgttattattattattattaatctaatatatatgttaagttttgtttttatactgaaacccttagactctttctctctctttttctcgtacgtaccagaccactaacaccaccattaaaaaacttttgtttcttctagcccgtaaacccactctcttccatcagttagtagcatctacaggtgaagcaagaggagtgatagcttgaggtaagatgtttgagtttagttttaatgaaatgcagcaaaatggatttctcagctcaaatgagactgaggtgaacttttcattaaatagaaaaatctaatacaacaatgccaagtggcatttatagaaaataaggaaaaacaaaaaaagagagaatattctctcaacaattattacacaataacagttttaccaactgtagaagtttaactctctagctctaaggtgcgccaaaatagagtggacactcatcatgcacacacacactcattcatgctttctaacaccaccccttaaatgaaggggtgactcttttatctcgagtttgtaatgagaaaccaaaaatgagtgtatgtgagactttttgttaggcaatctgctactttatctgaagagggtatatagtgaatttcaagttcctttttcattactttgtcgaacacaaagtgtatgccaatctggatgtgctttgttctggtgtgatagacagggttggaattatttatagtagaaattgttaacataattatagtagaaatttatataaaaaattatttataattattaattgctaaaagaggtcttgttaaatattcaattaattattttaagaaaataattaagtataattaattgattctaaaaaaaaagttttacttattgttaacctgctattatcggtaaaaaaaaaaatataaccatgatagttacaataaaaatataaccattgagtagtcactcatatttatatatggatgcactcttaatgggtattacccataaataggtaaaattataaaattttaagtttttatgcttaatttttctatctaattaaaaaaaaatctctcatttttatatcatatggactgagattattctatcggtaaaaaaa

SEQ ID NO: 313684 - DNA, 1671 bp, Cannabis indica
cttacctcgtttctaaattcaggtgagtcggccaacctgagtggaacaactgcttgacgaattacaggctcctaaatcacattattcgtaaaattggtgagtgacatataaatcactttttggggacttaaacttgaaactaaaagtttctctatcgataaataacatggaaataccctaaatattgaaaaacggggaaaattagggttcccaaaattgctcgaaccggtagacctgttctccaactagaattctagttctatggggtttcttggggaccaaccggtcgaccggttcctacaggtccccctgaactggtcgaccggttcagtgcaggaaaggatcaaaaagtcactactctctcaaatcaaccccaaactcaaccgaaccttccagacctgttcaatataccctaaagagcataaacaatgcaataaaacaccacaacaaactcagaatcaaaaaacaccattaaagaccaaagtttgaattctgacctcaaaccttgtctaacaaccaaaccaagccacaatctatcataatttagctcaattaacataattataacctcaaaataccaaacaaacaactcaaaatccctacagaaccctaatctcaaaatcatgcaagatccactacactttcctacttaaaattcaagaaggaagaagaaggaccttaccttagaaaaatactacaatcaagattgtttatccctcaagaaatgatctaacttgaagagaaaatttgatttcctccttgggtttcttggtggccgactcaaagaaaagagagagagggggataaattcttaattttatctaatctctaaatttctaaacaatacaataacataattaaattaatattagcaccaaataataaaaggaagctctagatttcccactcaaccactaaggacaaaaagggaagtcaaattacaaaaattcccttcacccctaccaataaattatcttacacctaggggtattttggtcacttctaaaatctcaactattcctcatattcccaatgtctaactatattgccccggtatactaaaaatactaaaaatgtgattttaatggccaaaagccgcgttccaatgttgtcgggcacaaaacatgcaaaaacataaaatttcatatatgacatatataatgcattctgaattcaaataaatctccgtaaaataataaatcataaatatcatgtaagtttcataattaaaccctaattatctgctaattttcaaattaaagttaagctgtctttacaattatcccctcgttaaaaagatttcgtcctcgaaatctaacctaaacaactctggatattgagccctcatgtcagactctaactcccaggtggcttcctccaccttgctgtttctccagagcaccttgaccaaagctatggttgtgtttcgaagaaccttatcttttctgttttcgtatgataagtcttgttgaagctcaagattctcataactcaatacatgagtagggtctgaaatgtactttcgtaacatggaaacatgaaagacattgtgaactgctgagagagctggatgcaaagctagaagatatgccactagtccaactctcttgagaatctcaaaaggtcttgtaaacctagggcataacttgcctcttttcccaaaatgcttga

SEQ ID NO: 313685 - DNA, 1093 bp, Cannabis indica
gctattatcgaaacttgagttgtagagaaaatgataaatttaggttccattaaaaaacttacatacatttatttatgtatatatatatatttttttatatatataataaaaattaatttttttaaaaaatttttaatttttttttaaagaaaattaaattttaaaagttttttaacttttaacatttgaatcactaaatatatattttttatataattatattattattaataattttttattttattttatttaaaaactaatgtcaaacatttcaaatttgtgtttaagctgagcgtatttgactttatttttatttcatgtcaaatcgtaccgatttattttcgacctgcgtctaattttttcgacccctaatcccgtaaaattcgtgtgttcatattcgtgtgccatgtcgaaatctttgacacccttacctatactctttttgtgtaagaggatgggtcatttcctttgtggttaaagaatattgtatttagctgatattgggaattataatactatcttttattcttttcaaaaggaaaataaaacaaacaaaacagaaacaaataagacaaaaggaacttggtagaaaaaaaataagacaagaactattttctttttttgatccaaaaagacaaatgaagtattgggtatgggcgaaaataattagttattaggcccccaaacgtgtaagtaattgagtgagtgagtggtataatttcaaaattcgaacaaaggcaatgagtgagtgctttattaacgttcaaggaatttcttccacttttgccccacacacatccccatgattttattttttcatacaaatattcattttatcaatcttaatgatatgtgtaataaagtcttcttattcatcttttaaaaaaaagaacaaccttgatgatattgtagattctcaaccttcatgtttttgtgcaaataagaggtagaggaaccaaccactacaaacccaatgacaaagatcatttcaaataaggacaaatctatatatattcaagggtaaatattattttggaccctgtgttttgtaaaagttacaaattgagtcatgtgttttgttaaatgacaa

SEQ ID NO: 313686 - DNA, 1677 bp, Cannabis indica
tttcttgattgtgtgaacaatttcttgagttagaatggatgcttcagcaatccatctcctagggataaaggcagattggtatggagaaattaacctctccatcaagggtctcagtctattagacaagatctttgctatgatcttatagacgaagttacataggctaatcggtctaaattgctctatttttgtagaattttcaactttggggatgaggaaagtaaacgaataattcaattttggattcagtctccctgattgaaaaaactcacgaactgccgaacatacatcgtttcccactatatcccaatatctcctataaaagcagcctgatagtccatcagggccaggggcttttaggggatggagttcaaacacaacttctcgtatttcttgaaaggtagggcattccgctaagcttatattatcaccttcgttaagcttgttgacaaacatatcatcaaaggagtcgggaatgcagggaatgtcgaacttaaaaaggttaccaaagtagttattgataatacctgtcaagtgcttcttatcctcccatttcttcccttcagtatcaaagagttccacgatttgatttctccttctccgaatcatggctgatgcgtgaaagaaccttgaattcctatccccaagtttcaaccaaatctcccttgactttttgtcgccacatattttccttaaacttccacatttcttcgagcttttcttggatcagtccctcttccacacaagttgtattggatataggcaaattctgaatatgcgctaatttatcctcaagcaaacgtatagtgttgtcgcagtcctcagaattagtcttcctccacttcatcaaggcccgacgcgtgctgtcaatgttactaataattctacaagctgcatccgcagtgctattgttccaggccagggtcactgtttcaccacacttagcatccccagaccaggcttcatagaattggaaaggaatatggccagagggcctgatcataagagtatctaagatgattggtgcatggtcagagaccgtgatagggaggttgaggacccccgctttaggaaaatcagcgatccaatcatgggaaccaatgactctgtccaaccgttctcgggtaagtgctccattaaatctcttattgtgccatgtctagttaatttagtgacaattattatctatttaacaagatttaattttatttaataactaattataatattgtacttttattataactatgttattttcactaatttattcaaataatttctaatttattaaaaattaaatattttaaagaaaataaattataataaaaataaataaataaatatgcacaatatacatataagtttttattgttacataattttgttaattcatcttaattaaaaaaataaagctttttaaaaaatttaaaacacctcacataagtatactatatatataaaaatatgtatgtaaaattagattgctgattatttttagtgcaagttgaatatataatatgtacatatttacatataagttataacttattttttatttttatttttttagtaaaatatatttatatcatctataatagcagtacatgagaaaagaaatattattatctataatattcttaaattggtgacatgtataggtattaatttataatttaa

SEQ ID NO: 313687 - DNA, 972 bp, Cannabis indica
gtccctattaacactcattgtgtcatcgttatctcgtttgacacttccttgcttagattgtttatgtcaagagggaaaagaatatctgcatgagtgttggaggccaggggtgcggacacgggcgggcgcagatgggcgcgtgagcgtagatgggcgcacggggtgcgaacgagtgtgcaaggagcaggcgagtgcgcgggcacaagcagacatgtgagcacaggcagacacacgagtacggatgggtacacgagcgcagatgggcacgcaagcgcagacgggcacataggcgcgaatgggcgcgcggggtgggggcaggctgtgcacaagcaacttgcgtgcatgggctgcgcgcgagcgcgtggagctccatttggcaaacttttgggcataacactaatgactccaaatattacacttagtaatttttgggggtcaacacttgccccctagtctataaaaattctttcaagtgttcttgaaaaccaagtttggtgagcttcttctttattattttatttttcttctcttctcctctttgttacgcttcatgaggagcgtaggctttatgatttatctcaacctttttgaggtttgtgtctactgcaatgagtgagtgtttgctcgctaagcttcctcaacctcttatgggttactctctgggtataagggagcttatggctccttaggtcacactcaaccttttcataaatttaagaccatattgggggaacctgtggccttttaggaagcgctcaaccccttacattgtattagttgtacttagagtgcattttgggtgctagaaaatcagtactcctttcagagaggcgtccctcttagagtcgtattcattactcttttccttttaatattttaagggagatgatggttctgtgaacggactcaaactttttctttcgatttactatgaacacatccaaatcaacacacaaacaatattcatcgttt

SEQ ID NO: 313688 - DNA, 783 bp, Cannabis indica
agatgaagagtttgttatcgaatatgactttcaatatcataatgagaatggtggccggaaaaaggtattacggtgatgacgtggcaaacaaagaagaagcaaatatgtttatgaggatttttgatgaggcggtgtctagtagcggagtagccaatccggccgatttcttgccggttgggttgaaatggttggcaatgagttatgagttgaagatgaaaagggcttctaagaaaatggatgcttacttgcaaaagcttgtggatgagcgtcggagtatgaaatcggacattaccatgattgatcatttgcttgctttgcaggaatctcatcctgaatactattctgatgaaatcatcaaaggattcatattggtaagttatatttatatgaccaatatatatagaatttttctctctttatttattttattgatttttttttaattattttatataaatatgtattaaaaataatgatatttaaataatatagagataaaaataaaaatatataatttttgatgtaattaatgtaaaacttttaggtgaaataaaatgggtaaaattttagtgaggtattataaaggataggggataagttgaaaaatactttttttattcattaatcaaaaatatctctatattatattttttaaaaatatactaacttttttgagtggtttgtctaatatactcttactctctacttaagtctagcatataatttgtattaacctaatgggtttaataaatatatcatctataaaagtgagtatatattaaa

SEQ ID NO: 313689 - DNA, 2001 bp, Cannabis indica
aaaaaaataataaaaatttaaatgttttttaattggatggcatgcttttgcaatttattaattgtgttttcttttgttctccatacattaacaacagatttattacagatagaattattggctaataatcattcaacaaatacgtgtacgtatgtaatgactacttcaccataaaaattaactatgtaccatatatgatatatacataataaaaatattatattgatttcaaatatttatgaatgtccttttcaaaaaatatataggaatgtattctaatgggtattacttggtattattagaaaaattgagtttttatgcttaattttttatataagtaaaaaaatatcttatttttacattatgtgagttgatgtaataaacaaaaaaaattatgaaaataaaaaaaaattgagtttgacttatatattttcaaataaatatatttttgatataatgtaaaataagagatattttttgatattatcaacgcaaattttcattaactaaatatatattattttacgtaataaatttactacagaatttaataataataaatgaacaccatatattttacgtagttttgtagttaaaatctacatactccacgtgtccttcttattatggattattatttgaatatagagtacatttctcagtaaaatataaatagtagttttttctctcaatttgtcgtctcttttttcttggattctgtccatatttataggtgtaaaggatgacaattagttttattgggatctatccatttacaactattcatgaaatgtggacattcctcaatttttacttttatgcacatgggacaatatctaataaccacccaactgttctttgtctttatccttaaacggttatgctgattaagaaggttatttctcgctaaatgtgaggtgtcactcatatctatctttataagaaaaaacgctaagtatagatatacttctcctcacagtgttcttaatattgtaaagttattttcgaggtggctactccgttacgtaaagggtgagatggatgaatgtagttatcttctagctacaaatatttgagtcaatgagttgtaagcccttactccaaagtatgtggatcaatgtgctacaagctccttcatgtctcgtcatgtatgttcttattatgtactttgtttatctcgaggtggacatattatctcgtcaactatatctattaatagttattattcttgtctcgcatatgcttacgtggcagcaagtttgaatatttctattaactttaattaattgtaatgagttatttaaatcgcatttaataatacaatttaattattataatctttgagctgattcatattctttttattgtacccaggtcatcttctggtgaatagctaaattttgagtataacaattgccctctaaacattattttttaattcaaaagtactttttaaatgtctgtaggggtacaaccgtttttatcccatttaaaaattgcatgcttagaatttttgcggttcaaaacttcgaggcacattcatttctcatttaatgctctgattgttccattcttgtaaagttttcatctgttagattagatcttccttgatcgaacggtaggcactttttgggtataaatttgaaactttgcatctttttttccattttcaactttcaaaccttcgaggtttcactaaaatctaaaccacctacttctcaaatttgcatccccttattatctcttacattcttcttgcgtatttcgtctgatcatttttcctgtcctagaaatcatcaatacccagttttcaacctttacagtttttaattgcaaagttttcctctgcctagaaattctcatcaagacagtaagtgactcactctctttttctattgatttttccttctattctcataatttctttttcttagttagtgttttccttgtctgcattgcttctattatttgggtattttgattttgtttgtctgaataact

SEQ ID NO: 313690 - DNA, 2344 bp, Cannabis indica
ttttttttttttttttcttaatcgtgatttcttaatcatatatatttatatatagtagagaatcccaaaggtctccctcttctctccaaacacataaaccctaaaaattatatcatctcatctctctctctctcttctctcctacatagccgagcttttcatcctctctctttctcttttgcgtttttccattttaactaaagaaaaagctcacaactccacactaaatacttccctttgatcttcatctacaaagaaccaaagctaagcggaagattagtaactaaaggtctttcaagtaagtaaaacaaactcttctcttttctttttcttctaaacccgaaatgcgtgttcatgtctatgcgttgatgagctctaactcatgcatgtccttttgaatgattagatcttgtgtgggatcgtttcaaaggaatcttcaatcttggagaagcttttggagttttgagaaacaaataggtaaaaagctatgctgcttgattaatctaccatttttaaagctgtataatctttaccctaaccttgtaattctgttcttgggtgttaaaggtcggttttgatgtgatatagaaatcttggttaggatctcagagagttctagaaaagtatacctgaaatctcaagcttaaaaggtaaatttctttaatagttttacatagatttctcatatgcatgctttgatctggtttttcaatgagttattttatggtttgtaacattattcaagtagctattagaaagatttgatgtgtaatctttccttgcatgcatgcatgaagtttttgataacttattaggatagtcaaaaagattggtaacacatttacagaatcaaagtaatcaatagaagaaacgaatctctataaaataatcgaaaaatatatattttattaaattttgttgcgactaaaccctctcatctattattccactacacccttcaagttaaaatttttgtggtaaaaccctctaagctacagaattgctaacaaatttaaggtgtcatctatttttcacagttaaataccaatatagacggcttatgtgtatactcttgtacacgtaacacatttatattgacacatctaatattattatttaaaacttataaaaaattattttaaaattcataataattttttatttttttaaacattttatttttataattttgtttgattctaaaatgaattttgaaataataatattagttgtaccaatataaaggtgttaacggagattttcgttaaccaaatttgagcctcacggtaataattccacaaaaaaaaaaaaaaaataaaagctatagaaaaaataatatctgaacacaggattttttacgtggttttgcagttaaaattctgcatagtccacgagtcaatcttattcagatttctgattgtgttcttttttttagggtctctcttgtataagttttttcgtcccttttttgagcttatctgccactatttataattacatagtggatagttaattacaaagttgatcgaaataattttttagcaatcatccctaaaatcatgggatttaattacatattatgtagtgtaattgcggtttatgatttgaaaatcatataactgtgattttcccgcttttactggttcaaaaatatcgtgtattaaacacgtctttaatttttgtatctagagatgtctcgacagaaacttgattataatgatcccgatagcgagctggggccattcttccttccgaggtcgatgatgtatgtcttgtgtcggtcgcggttatttatagagaattcttttgactcgccagggttgtaagcctcgctcccgttagctggatgaagctataggaagtcttctcatagcgagatggttacctcacttatttgttctttgagccgatttgtctttttcacttagtttgcttattgcaagctaaggatttttatagttgatatgtttcactttctccggtgcctcgctatttacatttagcgatgtatggtttctcgttaatacactaagtgccaatttgtacattgatttctcgcctaaggttttacagtcagcaggttacaatatatttaaactcttatgtaattaatgagttattccataaaaagctattggacggattcacattccttttatcttgacacgtgtcctccagccgaatttcgggtataacaattacttctttaaaagttcttttttagtaaaaagagctttttaataattacagagggcattttcgtcatgatcttttctgggaaaaatgcatcctttaatttggcagttgtacggtttcgagagtcattatgattcgtctcttcata

SEQ ID NO: 313691 - DNA, 1214 bp, Cannabis indica
cttattcttgttcgcggctgggagtaccattttgctcactagcggctgtggatcgaaagcccggtagggatatggctctgataccacgttgagaatcatggtgttccattttgctgagtattgatagttgttcactccttagaattatttcattaagatccttcttttactaaaaaaaattgtatccgcgtatacattttaatatttctagagcttacgttaactatattctagattaatctaaactataaattactaaagttcttagagaattttttctacaaatgcctaaaacattctagagtaattactattgtagaaatttgtagtaatttgtaatactagttctcagtacacatttcaataatttcgatcattctcatagtacagcttaaattttcctcttggtagcctctttgtgaaaaaatttacaaattgcttttcggtcttgcaatgattgagttctatttcattgttttctgctacttccctcataaagtggtacttgatggttaacccaaaaatttccctggtgacatgcacattaatattaaacatgtgtcaataaggatgacgtcaaggagttgaataggccaaagcatagcattcgacgtaggaggggaccccaaccctatgccctggtaagtctaagctccgagagttaaaattatacgaacctccaccctggaaaccaccttgggcacctagggtttcatctagtgcgcaagttgatattcttatatagggttttagtttcaaagacattatagtgtaaatgggtcaaattttacattggaacatcagctagacataccacatacatatttgaagcaacagacttagattcagaacaagttcatttttaagcacttggagcaacctgtaaagaccacttagctttaatttagaaattaacaaataactagggcttcattatgaaaattatttattaatactgaattaattatttatgatagtttatttggattcagaatgcatttttatatcatatataaaaatttcataattttgcatgttttgtgatcgacaacattagaacgcggtgtttggctattagaatcacatcttagtattttggatataacgggataatagtttagacattgggaatgtcgggaatagtcgtgattttagaatttcccaaaataaccctaagtcccttttatgttgttttgtgtgggaagggcaaaatg

SEQ ID NO: 313692 - DNA, 929 bp, Cannabis indica
aaaaaatattacaaacgccacaataatatcaaaaaaaaatgtgaaactcaaataaaggttcagtgtactactacgacaaaccaaccgtgaaaacatgggtctctaacatattaaggggttgtttggtatgtgatattgagagaagtgggaatgaaaatctgaaagtttactgtgtttggttaggttttttatattttaatgttaggctaagtgaaagtggtgggctttagtttggctaacaaggaaaacctaatgaaaaggtgattttcacttaacttgtaattaattttccaatactattggcagtctgacatagggatgtacaaaaaaatttgtaaaccgcctaaaccgaataacccgcccaaaccgaaccgaaaaaaccgataaaaattacaaaccgaaataacccgaaaaaattacaaaccgcccaatctgttaattgggcgggttgaaaataggtccaacccgcccaattaaaccgaccaacccgaccaacccgattttgcacctttaatttttttttaaactttttagtttttattatatataatataaatgattaaatatataataatataaagttatatacttaattattagttttaaagtcatatatatggtattgtactttggtggaatgtgatatttttaatttatttttttaatttttattgattttgactttaaaactaaaaaaaagtttggccggtttgggcgggttaacccgaccaaaccgcccaaaccgttggtcggtttatagatttttttttttaaattgggcgggttgcacttaaattttagcaacccgaactttagattgggttagaaaatatataggataaaccgcccaaaccgaacgatatacaaccctaatttgacacaaatttttgtactttaaaattatttttttatatatgaatactaatgta

SEQ ID NO: 313693 - DNA, 2377 bp, Cannabis indica
ttgttgatgctaaaaagtggccaatatcagctctctagattggtgagaatgaataagatgtttaagtaattaataagagatacacagaaaatttatagtagttaacccctatgtcgccatagtaatgatgctacgtctacttcgagtttttatttctcacgagatagtgattatagctagtgttttaagtatcagaagttttgaattctagagagaaataccttatagttttctaaatgtgaaaaatgatctaagtgagctctctttttataggtgaaggaggcccacattaataggagaaaaatacaaataagttgttttccaccgttaatgatgatttaacggtgaaaattagcctttggtggtgatggccaatttttggtgtctggcgggttctgctgcagttactcggagcttatttttgtaactctcttggggtgaattttaatgatgatatctttagaatttcgactggggtgtgagacatgacttgatatagcgcttaaatagatttcaaatgcaagatgaatcgtgtcaatcggataaaattgagtgagttatggtcgttttactgaagacagttaggtcctagcacccaggttggcattccagtgcccaggttggcattcaagagcccaagttgacgttgtaaaagtgtagaattttccaaaggaagtcctttcatatgcctaagtgatggtttgacaccacttagcccttttacatgctttggtgaagctggtaatgtgttctctgagatgttgttatttatgcgaaaacgaaagactcgaaacttccaatttttgagtgagtcaatttgttgaaaattaaagttgtaaatttgattgatttgacttcatggatcatttcacttgtgaaaaactagatgaacattcaaaacaacatcagattcagataagcagaacctagcgaaccaggccatttattgacctgggcgctaggccctttaaactgagcacgcaggagtctgtttttttatacttctaaggcttctgaacttgaggatggggtctcctcccccatttttaaccatgcaagattcaatgatcactttggatttggcatttgagcaattgaaggcaacgtcccaggttgattgtcaacctcggtgctgggccctatttccagggactcgagtttgtagttttctccccaagtttacttgaatctttgttatttttatgaagataaagatgcctagagcacttttttttttaattgaattggaaatagcccaggttaaaaaaatgtcagcctgtgcacagagatcaatcccaggtgttaacctgggcgctaggtccctcttctggcctttcaaaagtttcgtttggtccctgtaaatagttaattctcaatattttctaaagacggagatgattcttgaaataattctgggaaaaatctatttcttgtggcccaggttgacaaattatcaacctgggcgcagggccagccccaggtcgtcaatgttggcattgggccctgtttttaatgcccaagaactgttgtttttcctctggaatgacctatttctccatttttgatgaagacggatcaatgcaaaagtcaaatcttcgatcaaacacttgaaaggcacccagattgacaaattatcaacctaggcgctaggtgctcgggcctcggatgctcaaaaattaacttgcttcaaatcttattctaatgccttaaacatgtctatggtatgtctatttgatgtcccaatgcaagttttggccactttgcactaagacagtcccgaaaattgaaaccctagttgaggatgtcaacctgggtgttgggtggaaaccctaggtgcccaaattggcttctaggttgcaggtttgtgtaatttcagctcccagaccttgtattaggttgctccatgtcttcatggtatagaatatgaaaagatagtgagttggattcaagttattaaaatacgaacttccattctggagttcttgaagtcaacatgggtgcagggctagggactcttcctaggtcgacctgctatgactcaagactactcaactccaagatgtcatctttctttccacatgtcaaacattaatgtccacatcatcagggctagtttctgagttaacatttgccccaagtcaactgtacacttgtgtggagttgacttaatgacgtgaactaagcctgttactctcgaaactaccaagtaggcatcaattttgacaatcttggataattgtctctattcttcaagcattcctactgagaataggattttgaatttccattccttgttgaatagtggaatttgaaattttaagttgatgactccttgagtgatttcctttaatttgagatactttgaaatcatgccgac

SEQ ID NO: 313694 - DNA, 1206 bp, Cannabis indica
aattaataataatttatatttaattactttaattacaaataaattttttgtcaggagtaaaaatcacatttactaataaaaaaaatgtatgttatgattgaaaaattggcatattgaatgtaatttattggaccgacagagagaaagaaaaaagataatagagacaagaaatgtctaatactgactgtaactcacatggttcgattagaacaatattgacttaattattcaactacacaatcgtttgtattattattattattattatttggaaacaatatatgccagaactgtaacagaccaataaatatatatattgaactatttagtgtgtgtgtatatatgtaagcataaatatatattgatattaatataacatgtccccttgacttggggcaaaacaatacatatatttaaatacgtataacaaattttccacataatcaacaaaagtaacgtacgtgccatttattttacagatatagataataatagagaaataccatacatattttttgaatcacacacacatagtacaagtacaaagctaataattatatattaaagtcataataatatataatgaataagacaattcttcatatatgatgacgatgaagatgattttatggtgattttaaagattcaacttgtgattttccagagatacctttagtcctaatgaagagtctatactcatcaaatgtcataggagagtaaagtggaggtcgagtttcatcatcaacaagttgtttgattggttctattattatgtcactctttgggttgtaaaagaatgccaatgacactctgtctttctccgaattcactatcactctgtgctccacactcttgtaaattccattgcttaacacctatatatatattatgtcaaacataaacacaaattaacctaatatgtaataataatacaaaccattgtgttagaccaataaattttacttcacactctttgtaataataaaaacatcggatattatctaatgaacacccctaatggtaaaatttttgaaaaatgagctttctcatatttttcaaaaattgacgccttcaaatatttatatttaatttgaaaaatatttctgcccccgctgcagactaagcattttttttaagctaaacatctttaatatcatttttactatgaaaaaatatcataaaaatttttaggggtttttttatttt

SEQ ID NO: 313695 - DNA, 1231 bp, Cannabis indica
tatcgatgtaatctaacaagcttaataaacatgtacgttaaacatgtaaacacatatgcatattattatactaatcttaccttgtttccaaatttaagtgtgtcggcgaacctgagtggaacaactgctcgacgaattataggcccctaaatcacataatttgtaaaactgataaagtgacacgctaaatcacttttcggggacttaaacttgaaaccaaaagtttccctatcgatggataacatggcaataccctaaatattgcaaaaataggaaaaactaaagttccctaaaatgccccaaccggtagaccggttccccaatcggaatttcgatttagtggggttctctagggaccaaccggtcgatcggttcctacaggtccccctgaaccggtcaactggttcagtgcaggaaacaccaaaaactgcactataaccacaaatcgattccaaaccacaccaaaccttctagacttgcttaatatactacaatgaacataaaccaagcaacaaaacatcacaacatactcagaatcaaaaatcaccattaaagactacaaaccaaatcaaaccacaaactaacctcaattcagctttactaacataatttaaagctcagaatataaactaacctcataatctatttcccaaatacaattgttgagtataagaaaggatggagatgtggcatgtagtcgcgagcttgtagtagttcaaaatcccacaggttgctcaacgatctggtcacatcctgctccaacagagaactcaccgtttgggtggattttaagcattgggagaggcgacagtaaggtcaagaaaaggagatgaggtttttggcttagataagtgtgtgaaggcgaaggctttttctaggccaaaggtttcttctaaagaaattccctgggttaaggatcgttgcttaaggtgagaaagaaaaagtgagcattcaccaagtctcccatttatatgagtggcaacgtttcagagcattttgcaatggatggtcctgattttatcgataaaataaattgctccatccgaaagttggggactcgaagggttttgcatttaatttcattgaggagagaaaatggagcattcattactcatcatttcatggcagcctccccaacatgccatcaatttgtcgtctttttaagtccagctgtcattcacttcccacaagaaatgcgcttgagcataatgtgtatgttggaaattatttt

SEQ ID NO: 313696 - DNA, 867 bp, Cannabis indica
taattcttaatggaaggttttgaatttttcatacacgtaatttctaaaatatacttaaatgcataatatatacgcaaagtaccaattttgtttataaagattactcttattaggcaaaaattcttaattgctactgcttttaaaatcaatcaaagatctggttgtcaacatttttgttcttcagaatcagataatgaatagtgcaaaacatgaactagttcccttccgaaaaagaaaacataagaactatttatgctgaaatatcccattgattgtggctacttgtacaggataacccatatgttttaacaatacaccttaggttaatgaaccaacatgttagctccctttttcatgtacatagccgctcttgggattatgaccttgtacgagatatgttcaataatcgagattctgatattattttgggcatcccactaagctcaaatgtctccattgatacatggtcttgggacggggaaagaacgggcgagttctcggtcaaaagtgcttataacatgctccaacaacaaaagcgtaccgaagagatggttgaaaactcagacttctggcggcaactatggcaattgaaggttcccccaaaagtcaaaaactttttgtggagagccgttacaggtacattaccaacttgtgtccaactagtgattaagcatgtcgatctttcagtcacttgccctgtttgtaatctacaacctgaaaccatcagccatgtcctcatctcttgcccgtttgcatttgattgctggagccaatgtgcaactccagtagtttttgatcctggcggatctttcggcaattggttggagaccatctttaagcaagctgaagctgatatgatttgtctta

SEQ ID NO: 313697 - DNA, 733 bp, Cannabis indica
acctggagtgttcggtctcgggacatctgggattttattttgtagtcgctatgcgacctaactaaataaattttgaatattttgtaaaagtttaaatatgggatcccgacttttgtaaataatgtataaaagtttataaattttagtaatttaaatctaaagttttaatttgacatgatttttaagaaattttatttgactggcaaagatgaaactataattaaaaaatcactatatcgtgcttaagtattagagcgttacaggacatctctttcatggcctactccaagaagactcttcttgtggggacctgtttagcgaggttcacgatgttatctttccgggacagaaagtgaggcattaatgattcctttgccctcttttattagtatccatgtgtcgccctggcagaaatgcggataacattgaccctcccaactttcgggacataccataatctgggagcttgcagcgtcttttcttaaaatgtttttgcacacgttgcatttatgacgagtcctttaatatattacatcatcagctgtcaaaccgaagtttcattatgtgggaggcatgatttctcccgttttcttgtcagtgttaaatgttgacttttggattttcgcgcatgtgtcgggcgcgtgtccctggatagcttaaaacagcagcaattggacttaggcatttttctcatttgctgagtgttctttacgatgcatgcaatgatgggagc

SEQ ID NO: 313698 - DNA, 874 bp, Cannabis indica
aacaacttgaagatcataaataacacaactatgcttaacttaaccatatcagaattaagatccatagacctaagatcaaccaatgatattgacttcgaaagacataacagtaagtttatgatatcttatccaagttcaatatcagtctaatccaatgtatacttcatacatctgatactagcactctgctggctcaggcgtctgatttcatcatctttctcgttaattttggcttgcattgctgcaaacctgttttcccactcatgggcagcctgcggcgcgttaacatctccccgactgcgtgctctacctctacggcctctgccactgccttgtatattcaagggactttgaactccttgaccatcattggattcgatcgagttatcctggctccttgtgtttcgcctggcgtcaattccattagaacaaccacgatgacaagtgtcacaaaaacctgaagcacctgcccaaccgctcaactggaccaccgaggctcggccaacataaggccacttgtcaaccaagcatggccatcaaaggccaagctttcgccaacttcatggctaaatagaaagagcatatatcctcaaatctttcaaggttcatgataaaagcaagagccatagaagaagcgagagcaagagcaagacaactcaacctagaatgtgcattgaccacctgctcaatgcaggcatgaccctcaaaacacctaggggctatggctacacgagggaacaaaggtcagactcaaagattttaacaacgaagctaaatttgaagcttcaattgctagtctcacgctagcactagaagcacggactgaacacctagacatacaccacgactcttaactagtcgtaggtcatgtcct

SEQ ID NO: 313699 - DNA, 1594 bp, Cannabis indica
ttattcttaattatctaattacggttttgctaatccatttcttaattctaaggtattacaataatagtgcgcacacctcatccacctttttcccaaatgggtatatcatacctctacttttaaaggtgaaacctttgagcaccttcatttttaaaggttaaagttttggctgacacgtgtccacaacatacagatggtccccaattgtccagttgcagcacgaatgggcacaattatttctaagggacccaatggttagctctcatttcgcatgtaatttactctattagtgggctctgagcaaaaaccctaggtgggtcatgggcatgtccatacctaccccttgcctacaaatacccttctatttccatacgaagtggggatcacaaccttaatagtcgaagctctgccaatattgctctaagtcttctttttaaaaaacaaaacaagagcacaaagttagggtttacagctaaatattgtaaacacatcaaatacgctattaaaggctaatagactattaacacctaaaccacataaaaatctctatctctttattttctgcaatttattagttttttagttctcaaatatgtagtttttaaaaatcttggtaaacaagagtcatctcaacaactagatgtcaatcaatggttaagatcatcccataatgaatatttcatattttttttataaaatttattaatattttaaaagaactccttgcctataaaagaaaagtttcactagcttacttttcacattctgctaagtctccataaggtcagagcatctccctctaatttttctctctaaaaatctgagatctctccttagataattctcgtgagcaataaaaacttaaagtagatgtagctccataaccgtcacttgattgaactactataaagttcttgtgcctcttttatacttacttaaactcattacttatctcgccaatctaacgagatgttgttgaccagatttctgcgtcaaaaaattatatcttttgatttgatacacaatataacactataattataataaagattgtattcacaaaagagtttttttttttaagtaaacaattggataaaaaacaaaactaaatcaaattagtgaccacaaagggggccactttccttaaacaaccaacagtcttagacgatctagcccaaccagcaagatgaacaacaaactagctcacggaatgagaaatacatacaacagaaacaaactcaaaatccttaaataaattaagaaaactagaaatacaggataggtgcaccaaccaaatgggagggaaccaatactgaatgaccttgcctccatttccaaatcagtctcaatcaccaaatttttaatccttttgttcaaatccacttgcaaggcaagaaagatagctcgaaactcaccttccgacactctagagaccttagttgaaccaacaactaccaccacatcctccaagactcgacattccttttgaaatatagcaaaactagcttccgaatgagaatcaagagatggccaccgagtcatttgttggatttatgccctaaataaaatccatttcaatataatcagattttct

SEQ ID NO: 313700 - DNA, 1169 bp, Cannabis indica
aacataagattctccgtattaaccaagtccccctcttcgagagacttggggtttatgctctgataaagctttaccctctcatttaagaagatcgtcaagttagggcaaggagggtcatttgaaggattaaagagaaatgtctgggttagatattatcaaagcaggaagggtgtttaaagaaaagatagacgagaaaaatacattgcatacccgcaacttaaaagtccaataaaagagttggatgtcacttcaaagggaacctagtcgtgaaaaaccagtagcctcagacgtcataagcatgcatggatgagctggttgggttgtccaccttggaccgcttcttcaaggagtagaagtcgatctctatcttgttcttcctcattggattaggatccagcttatagaagtataggatttcatcaggagatggaacctaaaaatataccaacctgccagcagcctatatacctacgggatgagttagaatggagctatccccactaccgcaatcaagcgtgctaaataactataaagtggaagatgagctttggattcaacatggccccaactctagacgctaaagccatccaacgcaagaataaggtgatgcatccttcagtgctagccaattctaaaacaagtcgggaatgctctgaagacctcatttctcttcataagactacaaaattagataattatagaatttatttttgtattggtccatctaccactgagatggattggctgctactttcatctctatgccacttgcttctctagccagctccattttgtggtccatgatcatttcttcaacaaacttatttacttaagccatcactaaaattgaaaggaaaagaaatgcaaaaccaagcagtaaataccctacaccaacaaatatagtaagggtacaggagagtcctcccccagtattgcttggagagatccctgttggatccaacatttggaagcaacttcttcaaggaacattactccaggatagaatgattgggcacacaagaatatgaagcaaaagattatagaatggtccgcactggaagagacccagacaaaagaacatgtagtgtttatggaatctactcttgggaatattttaccacgatctagatttactaacaagtatgttgaattaacatcctaaatatgaa

SEQ ID NO: 313701 - DNA, 1148 bp, Cannabis indica
aatagttgccgaaaatctcagtcaacaaaaggcattgtccaaaagtgttggaaagatagaattgtccccaactaagttaattgttgagattgaagctttaaggaatttactatttgagacgtaatactagctaaacttaactaactttaactaatcaccacaaatccacctttagttgaagttagtgcagctaaattagaaaagattagagagttcaaagagcccctaaagaaattagcttttggtgtcaatacttagtagccttaggcgatgcctaagctttctaataggaacccctttgtttacttgttgtcagtgttcactttgctctcatgtacttcacttatgctaatgatgtctcagatgaaatgcatccttatgtcaatgtgttttaacctctcatgaatcatgagatttttcatcaaaatgtaaggcacattgattgtcatagtacattgtgatgctttctaaatcgaggccaagctccttagtcaaacccctcacccttatggcttctttaattgcttcagatgctgccatatactttgcttcagtagaagacagagcaactaccttttcagggttgatttccaacttatgcatccatcttaagcaatagaaacataacttgtaagttttctcctagtgtctatgcattcagcttagtcattgtccacataccctgcaacttcttattttgaattgcagctagcattgtaagctaaaccagtgtaaagggttcgtttaacatacttcattatccagtttagagcttcctagtgttgttctccagggttagaaatgaacctgcttgtgatgctcatggcatgtgccagatctgtcctttgtacacaccatggcatacatcaagcttcctactagactttcataagacacattattgatgacatttctttcattttctgtttgaggtgactgatcttttgagagtttgaagtgagaatccaaggaatggtgactagtttggcactgctcatattgaatttgcttaaaccttttccaaataggtcttctatgatagacagatcttctcaggcctctttcttgtgatttctattgcaactatctgctggaaatattttaccaggatctagatttactaccatgtatgtttcattaacatccta

SEQ ID NO: 313702 - DNA, 1813 bp, Cannabis indica
tattacatccagttatttacttttaattgtacaaaatttataaattacattaattagatatacataataataatttcactaataagtaataataatttttctttaattgttaattatattttttaaataaagtaaaaaatacctaacataaaattagtatacgtgcctcgcacgtaactttttactagtatatatatatagatatatttgttttttgatatttttttttcatattttttatattattttttatatgaaatatgtttatttctttatattaggtagaaaaacaaaagatattaaatttacaaatactaaatgtattgaggattgactatcagtgcattttgtgctaaaatattcgagtaattctctctctttttaaaattgaatgcataaatttaacaatcattttattttttcagtattgtttgaattcttcactaatgtatttattttaacattatttttgcctctaacaaaataccattttctttatttacgttcatcctgcgagctatcgagtaaaattatctaattcatttatataattttctgtttctcactcttttcactttcaatttttactcacacatgtatttaattatttttataaaatttttagctccaacaaattaccatctttgtttctactcctccttcctaccattgcctttaaagcaactgactaaagataaaagttggtcatctaacttggatagaacttttgttaatctatatctgtttatttatttatctatatttataaagtaatttataaaaaagagtgaggccgcagtatataagaactttttttttttttattattattattttttcatttacataatttctaatattcaatattatattttatttatccaaaactaatataattaccaaaggcttcttttttgatgtttcatttcaccttttaataattcattgaaacaaaaatatgcaactgttattattgtacccatacattagtattaattaggctagctagagaatttttttttttttattttatagaaaccaaagctatggaacataatatagtcaatgattcaaaaagtctgattttcagttatttcacattatttttattttcagtagaacgttctgttaacaattacattaaatattcaatttatatatgcttagcatattaaaattcacatcaaatgacttgaaatatatatacatgtgagtgttttggacatggatagtacacaaagctcaattttgcaagtttaatttaaagtatcgtataattgagcatcgtatgagtgtaacttatttcatagaataattctagttgatttgatattttaatttattacaatgagaaaaataaatataactaaactctatatttatctgaaaaatacttgcaaactgctaacaaaattaagagaaataaatataacccccttttcaaaaaaatgcttgtatgtagatagaaatctattaaaataattaagaaaattaatcaaatgaaatttatttttgtagcacggtaatttttcttttttttgatgaatctaaatgagaaattttaagaaaagaaaaggaaataaagaataaaattcctataggtatatacatataaaatatgtttataaataaatagatagatttaaataagtaaaagatatacaggataaaggtatatttcttattattaagattatgttaattatcgttaataattgggattatttcacaaaaacacaaaaacaataaaaaaaaattacaaaaatataagtttcaacggaattttaaacatttttacgattttcttaatttt

SEQ ID NO: 313703 - DNA, 1111 bp, Cannabis indica
aataaatataaaattagaggtaaatttaattaattgatgaataaaagaggtatttttcaacttaccccctataattatgtacaaataataatccaaactcagaacaaatagtaaaaagaattaacatctatgttttgattaatcaagcctaatctctatgttcaggtcatgataacataacagaatccatgttaattattatacatgaggaaattaatattatttgaaagatataaatatatatacacacactatgtctatgtatgatattataacatttttacatggatatgctaattcagaggaattaataacaaaagcccatttgtcattggttataagaatcttaatttgaccagcatatgttgttttataggaacttgtctctaagtttattaatttccttaacaatgaagcttgttatctctagtgggttgttgatcccaaccaccaaagctttcaaatatcaaattaagtcatttttgtcacaacagtacaataattaaagtgttacttacatacacacatagggtcgagcttgagataagacggattaggcccaagtctaaggcctacccaataatgttattgttttctattgtgattaaggcttgtagagttgtgttggaaataactgtgtggactagtataaacatatctatcagtgttaaacaaccacatttgtttcatgtattactaaagatcataattggaatggtgttatttttctaaatgaatagatggtctccagcccaatgagcccattgggtcacacactcaatcagagctaaagtcaaggcccaaatgacatgcatacattagattttttttttttaatgattcaagcttcattaaacagatcagaagaatagataacaattcagagaaggcctaaacttctcttgggatactttaaagaggaaattacacttagtatgggattttaaaagttcttatgataaatatggcacatttaagtttggccaatttatatggtatttttttatttttaggtttttgtatggtatttgatatgccatatatatgtaattaggtttctaaatcccatatttactgtttttatttgtttaggaagttttatttgtcattg

SEQ ID NO: 313704 - DNA, 1593 bp, Cannabis indica
gttccttcatctgccatttctttaagggttgtctctgacaatgaaaaactctgcgggatacaaagctggttgaaaacaacattaaggagctaacatgcaaaactttaaaaaattagctgaaaatatgacctcaaagttctcgctgaagaagcaacgacaaactaccatctttccctccaagtatctagccacgtgtaggcagaagtatctatattgttacgtgcaatgcacgtattctaatttttattttaggtattatatttaaaaaagaaataacataaattaaagcaatcaacaattcattaaaataaaaaatgtattaccatctgcctagagaaaaaaaatagtcttaccaaattaggaggttaaaataaatttttaaaaaatttggcatccaaatctatagattgttgccatgttctatgtgtatggcaaatgcatcggatgaatggcaatgtatactcatatgctagtagtggtaattcaaatttctcaagatgagaccattctcatatggtattttatactcatatgctagtgcaatttatacgcatatggtagtttaagattacgtttgttctaaacaacaatgctttctaaaagtactcgagttatgagaacctacatattgtccattcaaaaattgtgccatacttcacattattgttcaagttatgagaatcatgagactgttctctactgctaatacttacagctatgtcaggaagatcattatcacttcttctgctgaaatcttttcagccgttcaagaacttgtacccactgaatctttggagcagaaaatattatgttggcacctgagaccatatgaatagttctcttgtcaagaaaataactaagattctttaatttccagtggttccatgtgacaaaaccacccagctgctccacaatcctgaacccttgtaggaagaaaataactaatttaggtcataaagtttaaatccttaacacatgcaaaatgtgactatcaaataacactcatcaataaaccttcaattagtaatactgaaacgattgaaaaacacacaattcaaagaaggtttgattagatttcatcatgcctttccaaaacagtagaaactggtcttaattcataactcacatcttacaatattaaaatactaaacatatactgcattgcaagctcaaacacccacttacacgggagcattgttctacttcattagtttattgaactattaaccttgagttttcctgccttagtaaccaaacagaagtttggagaggtaattaaatcttcatcacaaaacattctattcttaacagtggaaaatgaggtatcttgagcttcagattgttcggatatacacttcaccgaccatgctctgctcctgagagctcatcaagatccatttcaataattgtcgtcagaaaagctctaagatgttaatctcttaatggtaaatcatggatgaactgttctactaaaaaccataaaaatcataatgccatagtaagatactgacgataaatgagtaacaccctgtgttatctttttttttacccatataaagcaaaacaattgcataaactttcaagtaatctaat

SEQ ID NO: 313705 - DNA, 668 bp, Cannabis indica
aaaaaatggagagttgtcaaccacaaacatgatcagtatagaaggttccacctttagcctctgcatgtccatctgtgaggaagagtgcaagctttcgcaactcctagagttccaaaagcttaggggtaaatgttatctgtgtttctagattggggacatgtggtattccaacagcaaatacatgcccaaataagatattaaaccaggtctagaagcaaagttagtcctttcggatgatgagtagaagactcttctaggcgaaatatccatccagcatggtatgcgtccagaagacattagatggagcgtccaagagaagtaatcaacaagcattcagacgtccagtactattcccatttattaattaccaaatcccacaatatcaggaattaactctcgaggatctcgttcgaagatcatatcttcctaaatatggaaagatagtaatgagaaatcaagcatttaacgtgtctttattctccacgaagataggacacgagttttggaaactgtcaatgtgaggtggcatccacatcaacatacattgtgcaccccttgggccaagcttcaccagataagctcatgtcaatatgttacttataatcactccatcagggtgcaatactttaatttttttagtttccaaataattatagcaaatttaaaaa

SEQ ID NO: 313706 - DNA, 1135 bp, Cannabis indica
aaaaaaatcgtttttaggaccgtcgcgaattctgatatttgtagtagtgaaaataatttaaacatcactaaaataccctaatctaagttctgaaaaacactccgatcaaaatcaatttcaaagccaaaaactagggtttcccctgctagcaaaccggttgaccgattttacacctataaaactggttaatcggtttctctgctggcaaaacgagaaccctagtttgtcacaccaaaaactaatcaaatctcctctaaacctgctctaacttcccagaacagttcaataccataaaaataacatatctaaacattcaaaactcaaaaatatactaagattacaatttcaccattaaatagtgaaaattgagttcttaaactcaattctcccaaaacaattctgaacagccaagtaattcatctagaactctcttgaacaaccctaaattaaacttagaatcaaactatgaactccactaacaccacaaacccaaattcaaagaaaactcaataaaacctaagttaaaactcaagaaatcactaagaactcttgaagaaaacttacctcaactagaacattctctaaaccttagttgattctgctagaaaattgtagagttgctgaaggaattccccttggcttagctggcttcctagggcacgaaggagggagagggagaaaagcttggataaatcctttttcttagttttttttaggttttctacttaattgtttaattaacaaagtatgcatcaaatataaaccattcttttttagcctagatactcatataagacaaaataatatacaacctaaggaaaagactatcttacccctcttaaaacactatagcctaaaataaaacctaagggtaatttgatcacttttaactaatcatgccaaactaacttctcaacattttaacctaatctgatataacacaactccattgccataacatttctgaccattctgttgagtgtccaaggccatcgagtccataaatattttattttaaaaatggtatctactatacccacataattcgataaaatctccgtaattaataaattacgctttatttgttcatttactcgtattttactaattaactcgtaattagcttaagtaagat

SEQ ID NO: 313707 - DNA, 2062 bp, Cannabis indica
aaataatataataataaaaaatactttttagtgtaatttttggtgttatggttggagagaagataatttttaacactaaatttggtgatagtgtaacatcaaatttgatgtactccttggagatactctaagcgattaataatttgactacccttaattaatgttcgtccccactatattttgttatttgctcaactcaactcaactcaagtacacaagttaatcaatcaaattacgaacgaaataaagaagaaaagcacaaggcatctatttataaatataaatatatatttaatttatatatccccaaccaacccttttgaattttatctgaaattcttcaattaaatgtggtttgatccaagaatatcttaaacttaattgattggggtttgagcataatctaccaagaaatgatgtatgatacttataatatttaaagaagatattcattattatctcacggaaagtaagactactagttgctcaatttaatttcataatactaaattgtcacttcataaattggaacacacataagaaaatagtataactaaataatacagaatttaaacgcatccactaagttgagatatgaaaagtgccatttattctttccattttaataaataataaaaatcattttatttaaaggacgttgggtaacattttttaattgagaatcaaaattttgaaaataaaaataaaaaatcactttcaaaattttttcaaacagtcttttttttcttaatatatagtttggactccgaccccaacctagctagaccttgaaaactggacccggaccccgaccaggacacaaaccaggactccaacccctaacccaaacctcgacccagacccgaacatcgaatcgcgaaccgaaccttgatcctagaccctggacctgaacccaaactaggactcagacctaacccggagcctagacccgggactcggaccttgatcgatcccgacccgaacctggacctagaccttgggcctcaaacccgacctcaacccaaaactcagactcgaaccccaaacctagacctagccacagaccttggacctgaacctggcctcggcgccggacgaggaccccgaactcgaacccctgacccagatccaactcgaccccagtctcggcctctgatagtaagactcgaccccaatctcgacctcggacttggcctcagtcttagcctcgaactcggtttcggcctgggcttatgactcaacctcagacccagaccttaatctcgtacccgacttaaataaaatcaacaaatagaacatgtttttatttttcaaaaagaaatttttacttacttttgtgattaaaaaatttaaaatatatatcatcaaacgtcatcctaatgaaaattagtataattttttttaagttatttctattaattttttaattaattaacaagaaaacaatacaactttgatcaagcacatgcatgctagataatatctcaactatatgttacttgggaaaaaataataataaatcatcagtttcgtagtgtgattattgtgagaggggtattcgaacttagaatctcaaatagatgtgaaacctccatacactataactatgaccaccaaaattaatttttcacattttaatttccttagttttaatcatttataaataacaccaaaactaatgtaagatttttctgtaaactagttttataaagaatatataatatatatactgtatatgacaaaaatacgcacatgtaatcatttagatgttgattaattaagttatgtttttcacattataatattaatatatatacaatgaacaaatgatatcagcataagtgaaaaatataataataataataaatatttagaataaatcatcacatagaaataaaaaattttcactaagctatgttttttgtacccttaaattattttgcggtaaacgtctccaacagaattacagtgatcattttgaaatgtgccttttttttagtaatgaataattttattgaaaaaaaaatataacatcatataaacattaagttttatgaaatat

SEQ ID NO: 313708 - DNA, 1067 bp, Cannabis indica
aaaatatactaacttttttgagtcggttacccaatataccttcactctctacttaagtttaacatataatttacattaacctaagaggtccaatggagatatcatctataaaagtgggtaaagaatatgaaaacagaaggtaaaaattaaacaagtaaaataaaatggatataccatgtaatttcctctattttatttattattattgtaagtccatcatctaggttgactatgtaagctatttttttttgggctaatttacaccacatactgtaattttttaacttttttcttttttattgtggggtagaatttttttttaaataagttttatattgtgtactgtgttaagtttttactgttgctctacggttattttttagttgttctactgttgtttttaattattctggtttgttgttttacaattatttttaagtttttttttctttaaagaaactattgttttaggttgttttataaaaaagatggtatttttgtaaaaaaaatgatatgtaacaataaaattgtaaacttttacctaaaatccagtatttttgtaaaatcccatttttttttggacatttgatcaaaaaggaaatttaatttggaaattttacacaaagtacctaaaattatatatattattttaacaatttttcttaaaagtttctttaagttacatttttacaaaaactaacattattttcatgttagggcaatacagtataatgtaacagtaacataaaaacagcacaaaaaatcattcgtctttttgtagaaaatgtttaaattcgttaaaatattgaaaaactataaatctgtatttttgtaaacttattttgttatttttaattatttataaaaatattccttatattgtttagtagtagaaaacgtatcatttgactatgaccacttaggttgagtttaatcacttgtatcattatgataaagtttctcatgatgacccagccaattacgaatacatttttgggccatgtaaaacttctagctgcccgaatagtaaagatatcatttcacaaatacacaaaaacaatataaaa

SEQ ID NO: 313709 - DNA, 534 bp, Cannabis indica
gattcacagggggcaatccctcccctttaacaacttgccaaacaccctttaattgaaatttactactattttaatttaaaagattgggattcactcatgtgtttaatggaattaatattactactattttaatttaaaaagtgaatcttatttggaaacaaaaactccttgtcattcaaatttaatttaaatttacattctcattagtcattcctatcaagtctaaatctcataccaaatgcttcattagagaaaaagggaaacacactaagataagtgggcacaagagcatctttaactatgttttctaaacactctttaattaaaataaagaaaattataaatttaattggtttttgtttattttttcaaaaaaaatattttatggaaaaattgaaaaaaaaattaaaaaatatatataaaaagaagtcggtaagtctaaccacatacttttatggtaaccaatgggtaactaattacgggttaaccaagtatcttatgttgttttttttatatatttttttttaacttttt

SEQ ID NO: 313710 - DNA, 974 bp, Cannabis indica
ctatatatatatatatatatatatatatatatatatattttaatgaatcaagtgaattttcattgctcaaatttttttttttacaaataaatagcattctccaataaaaaaatctaaaataaaaatacactttacaaggtgtctaaccattctttatcactaatggatgctttctttggccatgtacaagttattccttttttgatctatcttttactttgcacactattctatctatacttggaatggagttttgccacaaaatgtcatttctagcccgccataaggtatacacaagagttgtcaaggcagcagctaaaatcatctttttaaccttgctaatcttaacttttcggatccacctgacaattcgatgaagagtgttggaagccatcctccaagaaagccactctttgattctccttaaataatccaatgagaaaggacaatcaaagaacaagtgttgcattgactcctcttcggtttggtaaaatagacacttagtgtcttcaaccgtgttatacacttgtattctgtctgtcctttgtcttgagccgattgagcatcatgagccaaaaaataaaacgatgcttgggcaagttcattcggctccaaacaatagagctccacttaactttacaattaggaggccttagtgattggaagcccattgccaccttatacctgtcatttagaacattaatctcatcaaacacttcttttgctctctccattatattatatttgttataatataagatagataaaatattaaaatgtaatatattatgcattaatataagattaatgtatataaggtaatttaaagttacatacatgtaatattcacataaattataatataagagatgtagttatttatattttataacctctacaattatcaccaatattaagtaagtaaaaatgtgttacatatcttaatttgaaattcttaatgctataggagttat

SEQ ID NO: 313711 - DNA, 1916 bp, Cannabis indica
aaaaggaagtaacaactttgtataaatcatctccaaaagatatttataaaataaaaaccaaccaaaagatattttaattttaaaaattacaattattaaaaaaaactacagagtatatgataattaactaaagggtatccctttagttataatgtttggccttatttttttgaaacagttttcagaaaataaagttccaaaaaacaagaattttgaaaacaacaaaatgttgttttctgttttgaaaactaattcacttttggtcaatattatttttaaaaaacactaaccaaacataacttgtgttttaaaaacttcaaaaactattttttgttctcatttctaaaaacaattttttgaaaacaaaaaacaaaaacaataccaaatatgctctaagtttttttttaaaatgtccaacaactaaaaattaaaatatatgattagaaaataagtgacataactcaaaactcattccgtatatattagagttattcaacgttaaaattagcgatagagaattagaacaaatagctttaacatgcaaatcaatagcacaagtccaataaaattattcaaaaaaaccaaagtatccacttgagatgcttaaaaactataaattcagcaagtgagaggcccaaaaaagtgtttctctttgaaatgtcaagaaaacacatataacaaaataaaatcaaaaataaatataagtaacttcttaacatatatattagaaagaaaatatttttaaaaataaaaaccaaccaaaagatattttgatttcaaaaattacaataggatttatctactgtacacctatgtgtttctacctcatcacatattatagtagtataaaatgattgaatggtacatattatagtagtatatctatatacatgtgattatttttagttcttttttttttttggagcgaagtgattttttttagtttaaataaaaaaaattacatttattttactgggtcccagacgtgaattagggggctggctattatatggggtttgattgttgttgttgtggtttgttatttaaaaaaataatatattttttaataagaagatgtgatttacaatattgttacgattaactatttatgtaaataaattggtgaggaaggtacttaaatgatcaattttgttgtagtttcctactagtataagaaaattaaaaaaaagttcctaagtaaatatttttttagagcgttttcatttttacacctcaaaatagtttttttcttatatttttacgaaattctacatagaaatctttattgcaactagcggagcaacctaaatcgtaacaaaaaaatcgtataacaacccacatagaaactaccggagaaattactttaaaaactcaaaccgtaaattagaaaaaaaaaataaaaaaatagtatatggagtaattccccatattttttttacaattaaatacctatatatataaaaataatttaaattaattttgaaaaagaataaaattaattttaattaaaaattaataaatgcctaatactatgactatttttaaatttataaaatatttttatataaaccactaattacaacaaaatttactattttttggtttgccatcaaagtgtttacataagtagttaacttcaactaataaaactacatgaagagttattctttagttttatttgaatttaattgtgtaggtgattatttatttatgtttaaattatatttaaaagtgaagtgaatacattataaatttgtattctttggaaagaaaaaaatatactatatatatctaatgtaaaaactcatcaaaataaatctttaaaaattattttgaacttttagtattttaaattaattttatgaaaatattattaggaagtaaacttttttttttttgaaacaaataacaatttt

SEQ ID NO: 313712 - DNA, 1598 bp, Cannabis indica
tgattatcaattattaatcaattaattctttatttcttttttatatataaaaattattggatagaaagtaaataaaacaacaaagattaaaattttaaaagatatatcaataataaacacaaagattattatgatcaacaactatcctttattttacttcctaattcaattatctaatttctcttcttcctattcgattaataacctgagttaagaagtttataatttgttaagacttataaacctaatctatatgaaaacttcctatattcctatggtaagtttgatcacaaagatagcattaagcaaagaaacttattaaatcatacaaacaacctaagtactttaatcctaaatcaatttacatccataacaatcataacatattcaaatctcacctttcaaaattttgattcgaattcgtagataacaaatatagatggtcaacaaataattgcagaattgaaacagattgtatggaattaaaaaaagagaagaggaagaaattaaacaactacattaatccataaagtaaattcaagtggttcacataataatccacaaaagaaaattagctactagaatttaaaacaatagaaatttaaactaaaaacataaaagacagagatagagaagatagaacacttttggagtcttccaatggtactttctgctccttgcccttcttctacagttagtgtttctctcaatttttgaattatgttagatctaagctctcagtccctttaaatacacaaataggaaggtttcccaaaatcctccaatgcccaaaattggtctccaagtttgaatgataaaggaaacctagctccaactcgttttatagacaaaatttgggatgtttccgtttttatcccaagagttgtagctctctcattttctgatttcctactgcgatgatcgataatattttagtcgtaactctcttgatataactcagaactagaatatttaagatgttttgaaaatatgaaaatgagatctagaactttcattcagaaagtttttcctagaaacaaatgtatcatggtcaaaaattggtttgaaactttagactttattttcaatcacaaacggagcgtgttcaacatccaaaacttagaattttttaaatttatttttagaaagtgatcactcttgactctagaccacgaattttagagctaaaaatacaaacattgaccaaattgaggcaacaagaaatctaactaagcattattgtagtttcctttctcccttataatttctcatttttttctcaaaaaggcttgaagaacaccaaaattatcaaaaagagagatctccaaacatttctccagaaaaatgaacaacaacaaaaactaagcataaatctccacaataaagtaacaaaaatactaaaacacacactaaaataaactctaaaactgcataaaaataaacctaacatagctcatcgaggaactaatgctataaaaattcaaatttatttcacacaatatgaaaattttaagatgctacaacatgagaccattgctaacatgtatactcgtttcaaaactattaataatagtttgaactctcttggcaaggtactt

SEQ ID NO: 313713 - DNA, 1285 bp, Cannabis indica
taaaattaaaaataatttttaagttatgaaactaaacaattctcaagattttggaaacaagtttgctttgcttctttggcagctatgctatatcatgtttggagcaataggaatgaaactttttggaatttgaaaatttatacaattgactctattgtaaagaaaattaaagttgatgtaatgtttagaattaaaggcataatgtccaaaaaaaaaaaaaaataaaagtcacaaaatgatggagtttaacttgaagagctgtaatagaacatgtcactatatagagagagctcttaattaggttgtattgttgttctgtgttaatatatgatcaatatatatataccttccaattgtgagtaagaacgttttggatgaagggttgattctcgtaggagatcttggaagccatgatagagagagctgcattatagcgtggatctccatgtttgatggaagggtcaagcctcactcgccactcaagatttgcgatcaccgacttgaaacttgctgatcctctctctggaataactacctttcctgtacgtgtaaattaaattataataatacacctactactacctatacaaaagatgatggtcaatatttttaactttgactttgtctagctatacatgtataataaaaaatgttaaagaaactaatggtgtctagcaccttcttatgtgttaatattgttattagtccaattaagtatcgggtctcatataatttaatattataattttaaggagtattgctagccaatcacaatacgacatgtcaagaaggcgctaggcatccctggtgcctaatagcaatactcatgtataattattgaaaaatgttaaagggcattagtgctgcatagttctttcctacgtatgcgtcaatattattattggtccaactaaatattgttaattaatcgtaaagtgacatgtctaaaaaatgctaagcaccactaataattaacagccatgctcataattattcatttgactacaatgaaattattgattaactattattataccgggaatgctttcttgcatttttctatccgtaaacatgtattgtatacgtaactactacaagtaaatgcactgtgtgacctatcaaaatataggaaaggacaagaagagtttatgtgtcattttataaaattttcttcctatttttcttaatttctaacacattctcttattttatttgaaaactaaaccacacaaacaaacaaaaagtcccacatagtttaaaaaccctttaggttttatctatgtag

SEQ ID NO: 313714 - DNA, 1312 bp, Cannabis indica
ttaggttctgcttatctgaatctaatgttgtttggaccgtccatctagtttttcacaattacaatgatctatgaagtcagagtaatcaaatttacaattttgcatttctcttttctagcacacacaaaaatgaagagtttccagtctctcatttctgcaaactagtaacatctctgagaactagatactagcttcactaaaatatataaatactaagtagtatcaaaatatcacttaggcatcgtaaaatacatcgcttggaagttcttacacacttacccaacatctaggttgagagttcagtaaaattaccataactcactcaattttgatctgattgatgcaattcaacttgcattttgaagataattcaatgctatatcaagttatgtatcccacttccaatgtaattctaaagttattgttgtcaaaattcaacccaagggagttacaaaataagctcctggttacccgcagcaggacccgtcgagtaccaaaattggccttcaccaccataagctaattttcactattaaatcatcatcaacagtaaaaaaaaatcttatttatatatttttccctgttttttgtgggcctacttcacttatgaaaggagagctcctttagctcatttttcacattcagaaactacccacaaggtcagagcttctctctctacaatttagagcttctaacacctagtctattgctataattaccatctcgcgagaaatacaactggaagtagaggtagccccattactatcacaatatagagggtgagctactataaataggttgtgtctcttttgtttactttactacttttttcattctctccaatctaacgagcaagagtggcttagaagtctagtccatatttttgagtcaatatttttgtgtgctttcattgagagccaaagctcaagaaagttactaaacatgatggttgcaacacattctacaagtattgacaagaagactctaggaactggctaagtaacttatggcacaccacttgatggagttggagtcgggaccacttgtgcactctagatgctaggagtaggccttggaaccagctcctcaacttattgtccaaggccaacataaacatctcttgggactggcaccaatgaccagatcccacctagggagccataggtggagataaaagaccctgaagagatcgatcctcaggtaactccgcagccaaattgtggctcgcttgtcacaatagctataaagactctctcaacggttaaaacattagttcctggaaaactggaagaacatgttggaaatattttac

SEQ ID NO: 313715 - DNA, 603 bp, Cannabis indica
tttcttctttcgtgactcaactacaaagtctaccaaggcctaccctttaactgttgtacgaggttggaaaaattatctcatactatcctaactatatcgcccacttgagtaatcgcctacaggaatctggcttttgcaacacttggcatagaggttggtcgatgtatactcgaaccccagaccaagacccgggacccgaacccgagagccagacctgaactcgcccaggacgcggacccggaccttgccccggacccagactaggacccggacccagacccaaacctaggacccggacccgggacccaaacccagacctgtacccaaacccgagacttggacccggacttggaccaagacccaaacctgggatccggaccgggacctggattcggactcgggacccagacccagacctagacccaaactcgagacccggacacggaccccgatctggacctgtacccggacccgggactcgaactcgagacccagactcggaccccgatctggacccaaagccagacccggaccggaccccgatctggacccaaagccagacccagacccaaacccgcacctggacccggacccaaacccgga

SEQ ID NO: 313716 - DNA, 885 bp, Cannabis indica
aatactatattttcataaatatatattttttaataaattaatattattaatggtgtggtccgccgctaatgctccactgctaataaaaattgaaatcaaatgagcgggaatttttgtgaataaactattagcagcaagtaatagtggcagattccgctactaatagtaatagtaaagaagatttttttttgttttctaaacactaatgaccctaacattagcaacagatttcccccgtttattccgccactagtcatttttgttgtagtgtatatattcgtgtaggtttacaacaaaatatatatacacatatataaatatatacatgggtccaaaattgaaaacaggccaaaacataatataataatattgtcaaatttttattaagtgttccgtttgatctatttttatttcgtgttaggtcatgtcgatctgtttttgaatcgcgcctaataataaccctaatctataaaattcatattgtattcgtgttcgtgtactatgtcgaaacccattttactacttctacttcctatgtaacatattgtttgatctattttattgcttaagctttaagttttttattttatttttcatttaattaaatatatatacgaggttgtaatcaataacatcagcttctaaattaaagagtctgtcgatttatgaatagagtaatttgcggcaaaaatacttaagttttctcccgagtagcagataaatacctaagtcgtatttttggcggtaaaaataccttccgtcacacttctggaacttccgtaggtacctctccgttatgtgccaagttagtatccacgtgtcactcattcattggtccatgtcattaacttttttattttttatttaaaaaatctaaaaattcat

SEQ ID NO: 313717 - DNA, 768 bp, Cannabis indica
aatctgattatattgaaatgggtgttatttagggcacaaaacccaacaattacacccttcatcatcatcctcacttccctttgtctcagccgttcaccactcactaagcaaacacaagccctagccttcataaccagcacacatcactcatacaagccatcactaagtagacacttctctcattcgactcaactaagttcaccaccgtgaccaccaacctagcaacccgtaacctccattcgaccaccacgacttgaaaccgcaccatctcgagccatcccacctgaaccagcagcaacaattgcaactgtcctccatcttcacgcaccagcaccagaacccatctcaacaaccttcgccccactcgactgagcctcacccaaccacgaaccgagctcaaaccagtaacctccgtgcgaaccattgcccaacaaccacacctcccagctgctaactcgaacccagcgagttagaacacacttcagagcatcacttcacccctgcacaacaatgaaccagccattcgacccatcaccaacaacaatctattcgacctagcagcaggctcacgagcactcagtttgcccaaatcgagcaccctcagcgatctccaaaagccagctgactacattcatcactccgcactccctggtttgtcaaggttgatgcttttaagttttaattttatatttgaacaatttcttggcttccgcatagtgagtgattattagtggatgtttgttttggataaaattgaatttggatttg

SEQ ID NO: 313718 - DNA, 572 bp, Cannabis indica
tttcccaccccttacgcttaatctaactcaaattgtgtcatattgttattaagtatcggtttatataatttacaaaaaagttttaaaaaaaataacattaaccaattataagacaaaagtgttgagtgccactaatgtccaataataatattttaataagatcaagaatttactatactaaccaggataatttattgtttaattaaaaggcatattttgctaaacacaaaagtagggggtttagcatttctaaaattaaatatatttatttctttaggatcatcactttctttaaaccgaacaaataaaagcagaatcaaatagaattcttaaatatttttttttggatattcctcaatgcttatattaaagaattttttagaaatcttacaagattcatttgtttctttttctcttatggatgatcaaaacttcatgtagattcgaatcttatttaaagatctactagaaattaaaaattgtgcaagaaaaaataagatatttcttttatcgtttttatgttatatgaattaacaattaacccaagatctatttgtatataacatagaaca

SEQ ID NO: 313719 - DNA, 519 bp, Cannabis indica
tcaaggggcatttttaacgacataaaaagtttaggaggtatgatttagtacatatcaaagttcaaaagaaaaaaaatcttaattaaccaaaaaagaattgtacaaattagtttgatttgaaccataaatgagaattttaaaacagtaacaaaactaggaaatcgtaaacaattcaaattacctaaatcattgacaacagattatttagtctagtcttaaaataatttgatctagatttgttaagatttaaaaccaccaattacaaattttgtgaacacccaaggaaaaaaaaaccttaaaatttctcaaaataagacaatttagttgtgacttcagaaagtgtgaacatattatagtgatcaaatatattattggtcttgttcaaagtatatataaatatattattagaaaaaataaatgagtattacgaagatgaaattagactctatactttttttatattgtcttattttatttttaccctctttttaaaatttattatttgtacctcttttttta

SEQ ID NO: 313720 - DNA, 3430 bp, Cannabis indica
tcatagtcttaaaaccaccaattttgcttacccatagtgtatagcctttacctcttcaagatgccttagttaaacacattttaaagccttaggttctagttttcctatactttgatgtgtataagctccacatctaaaaacctttaactgagataggtttggcggtttatctgaccatatttcttctggggtattgttgtcagttgctcttgatgtgcttctattgattaaaggcaatgattttagggcaacttattctcagaatccttgacttaagcatgacttgagtagtatacatgttcaatatggttctattcattctctcagccaccctattatgttgaggtgtaatcctcattgtcctatgtctctgcaacctttttctttacaatagaggtcaattaatctatcattacgaaattccaaatcattatctgtccttagtatctttacgaatactgttcctattttcttgtccttaacaaaataccaattcttaagaaattccaagaagacatcattattatttgttagcgagaaacactaacaaaatttttaatcatagctagaacttgtgagatagaattcatatgtaaaagataagaatgtaaataatatggtatagtagatccaatatgagagattaataagagtttcttactatccccaatagttagagtttcatgaccttgatagggaatagaggtttcaagattggagctgtgaaaagtaatgtgattggttgcaccagtatcaatataccaagaatgatcattaccaaaatcttgaatagtagttgaggagtaagcttggggatcatactcaaggtctatttctgtaagataggcacgattttaagaagcaccaagttagtctagtttttgtcaaacctgtaatgacacacaagagcagtatgacccgtgcgcatacaaacttggcacataactctagggtggaaatatcaaccatagcctctgctatgagtagtagtctattgggcattatcataagtgaaagttggtaaagggtctggaaccactagatcaaccattgccaaaggcaggattttcctgcatcttgatcaagagatctgccatggaatggtgatgtccaagacgactttcatgagataacagtaatgtcctttacttccctaatggatacagcatcactccttgaggttatccttgatacaatagaatcaaattatggacctaagccattcggaagctgcaatatgatatcttgattacttataagggaatgagcaatagccagagcatcaatgatggcctgaactttgtcaacatactccgagattgttaaaccactttttgggacgtggaagaattgaccttttagttgaagacatcgagttttggtctgagacgcaaacttttgtccaagagccctccacatagtagatgaagagacgaaattaatcattgatgcaagaatactatcagacattgatgatcgtaaccaagaaagaagcgggtgatcttttcgatgccattgagtatactaggattaggagctccattaactagaactcgaggaggaggaacaccattaaatataatgtcatcaagatcgtgaccaatcagaattggcacgacttgagatttttaggaaagataattgagacaattaagcttggtcgcgagagaagaattaagcgagttggagaaagaattctagggagtagcagcgatgattgtggcaggcgccattggagcggaagagacaatcgccattgaagcaggatcggaggtcgaagaagaaattgactcaggtcaagaaaattctgataccatgtagaataagaaaagtgcatagcacacaaaaacagagcaaggctcgagagaaacaagaagatagaaaagagagagtaaaagtatttctgctctagtagatggatcaataattatacacattgattacacaaaaattaagcacgaaactgttacaacaaactaacagtaactacttaactaacaactgacataactagctgataactaacatcaaatccttttgagctatactaactaagtcttctccctctaaatctactctctctaattcaaactcatataataagcactctattaagttatatttgattgaaatgaatgaaaatatagttagaataagaatgacattccaaatactttaaaattaaaccaaacaaataaatgtaataaaagttgtttcacttgtattttatttaatttcattacccctaaccaaaagtcacctaaatgattatggaatggttggaacattgctttatcctgaggatgcatgatttggctttctttagatttagaagtattgataaaattaattggtagcaagccgggaaaatatatcagcagcatttttcatattttatttctatataccttaatagccaatactatcagtactattacccacatagttattcttatatataggcaataaagaagaaaatcgaaatacaaaaaattacaaatgataaaacaacaattattttcgtacacttgacgtatacgtaattatatacgaataattacacgatgaatatatgttctgaaaaagttatatatggaacacattattcataataatttattaaaaaagttgtaagcaaaagttctacactgttaaatataaaaatttcagtgcccagtcaaattttctggctccctaatactattaacacatgatcaaattaattatataaccattaattgcactttttttttcccccttatagcttctaaaaagcaagggtgccagactgtcgttccctattgagttcagaaatgaacaataatgtctgtgtaattatctgtggtaaatgattgaggcaggtcttaactactattctcaagtctcttatatgttacttatatatatggttcatcatgtcatgtgcctatctaccaatcagcaaaggcaatatattaattgttctctctccttttccaatgtaatttagcattctttctttttattatcattattggttgaaaaaaaaactttgttgttgagatcaaaggtatgtggatcttacttttcaaatatttacttcaaaataaaggaaagcctgagtataacaacaagtccgctcatatatatatatgggataagattggcccttgcgcagattgagttagttgataggcacatgtcgtcaccattctctaaagcaactactgaatcattttacttaaagcttttgcataatgttcggaatatcactcttttatttattttttatttttctggaatttttaatattcaataacatatccgaatgctattattaaatctttttgttatatattataacatggtgatgatgctgaacattatttatttgggtagtaattacactgtatagtaattatattgtattttaaaatacaaggtgagtttg

SEQ ID NO: 313721 - DNA, 1332 bp, Cannabis indica
aattaaaaaacaaaaaactaattaaaaaaaatactactaaacacatccaatataaaaaaaaaaatcatattatagcatatcaaaatttctggttaatagtatttattgcagctatgtatatgatttaggatgccttgataattgtgtaaatcctaaactcatgctaatcttttagtttattttctttcttatgtaatttatataaattttatttttgatattataaattattttaaatatttaaaaaaaattatataaaatattaaattataattttcctatatacatataaaataaaacaccttattaataaagaaaaaagtgatattgttatcataaattttgtccatagatataaatatttgagaagttggcaataataagtaaattaataaaagtgaaatagtagttgaatttgcttgacttaattaggaaaacattatgatcaagtgtgcatatataattagcaagttggcaaatggtaattaataaaagaaattattattattattagtcaagaaataaattaaactaaactaaactagtgagtagttatgattaacttcacatgcatataactatttattgtaactcacgtaaacaactttaacacgtatcactcctaatattctttcttttttggttgacttataatattctaattagagtttttttcaatggaaatttagttttatttaactattaatttctctaccaaatacggtaacaaattagttaaaacaaattttaacatgaacatacaatagggtataataaaattatgagttattatatttactaatagtttaataaaataaattaaaactttgcttaattaatatatatatatagttttagctaaaatagttggtgctattttggtttataagggtcgaacttaaactaaagcagactaacttgtgcttagggctcaagcaagccaagggctcaaaaaaatatttttctttaaaaatatagatatttttcaataattcttaaaaatattacattttttaaataaaaggccaaataatttttattttcctaatgtctatctaatctcaagatcggccttattattatatatttggaagaaaattacattatatactcattttttttactaaatttaagtggagagtgagaatatattgaaaaatccacttacataggtacattttaatgaaatataatatgagagtatttttgattaatagataaaagaaagtatttttcaatttatttctatatttggtgatactctaattaaaatatgtattaaattaatgtgacagtcagtagtcccgtgatccgtaaggggaaacaccgggt

SEQ ID NO: 313722 - DNA, 1237 bp, Cannabis indica
aaaaaaaaatagattttttctgggctttgactcttaataaaactttaccccttaaatttctttttccccaaagtccctcctaaaatatacaaatcgttacaaatattattcttgagttacattatgttcattttcttaaaataatttgcttatttgatcatgagttacatttatagactatagttgtagtacaaaagtctatacaaatattagttttgagaatacacatacatattctcataattcatattctcataattcatcattagactgtaatttatgtatttattttttatctaacttttgaattaagttagattaacgtcacattaatgctacatcaacaaattatttaactcgacgagaatattcacatcaatttttatagtttgcaaaaaaatttaagaaatgagctgaatgtaactcaatgagaatatttacaacaatttttatagttcagtaaaaaattttgcaacaaaaaaaaaacagtttaaacaaatgagcactatatatctcgagaaagatatttgcaacgatgtttacagtttaggaagaatttttacaataaaaaaatttaaagaaaacagtagatgtaacttgatgaaggtatttgcaataatttttatactacatgaggaatttttgtaaccgattttttaaaagaaagaagtagaatgtaacttggtggggatatttgtaccgatttttataatttgtaaaaatatttcgtaacaaaaaaaataaagaaatgaataaactataactcaatgtttacaataaaaaaaaaaaattaaagaaataatctgaatgtgtcaaagacaaggtcgggtttgggctaagacggactaggctcgcgtctagagcccacccatccagaggctcgaaaagaaatatttttgctttaaaaatacatattttttttaataaatttaaaaatactatatattttttaaataaaaagttgaataattttatttttctaaagtccacccaataggtcgaccttacttaaaaagaatatttgtaacaatttttataggggtaagttgaaaaatgcctcttttattaattaattaattaaatttacctttaattttatatttatttgaaacatacctctttttatatgtattgtacccaaaataccctgacataagagagtcacatggagagtatcttaaagtgacaggggcaaaattggtacaatatttaaaaaaaaaggtaaaaatgatagact

SEQ ID NO: 313723 - DNA, 1430 bp, Cannabis indica
atttagtacatgtcaaaattagaaagaaaaaattactaattaatttattattattgataaaattaaatattcggctactataaatatgaaaaaagtatatggtgacgaggaaactaaagtgggcagcaaagtctgaaaattttattcaatattctttatcttgtaatatatagagtacaattttatgccaatttggaattttttttaaaattatttttttgagagattaaagaaataaatggcactgaattgggtaggttggaatttattatgattcatcataaatattgtacgtagcgtatacctatacgatacctatctcattatatctcttactaagaaatgaaaatattttctttcttttccaaaacaaaaaaaaagataatgtggtggtgcacattattttttggagatttcgtgccaattatagaagttttatgttttattttatcttaataaagtcatcagtatgtagtttgagagttattatcttgttaaaaataacactgtcataagctaactttttaaaaagttaagtataatctctcacaataaaaaattatagtagaattcaaattattgaaataaagaaggatgccgataaaaacttccttactacactacacaacacataatagaaaagaaaagttagagagccaatttcatatgaaaaaaaatgtcaaataacactactggtgttattataaagttataaaatatcacatattattattaattagtggaatttaatatatcacattacatcataatatcttagatcttaggtactattagtgtctaataacaatactagaaaataaaataaaaattactataatagtgtttaatactattattaaagtgaagctttgtcaataattattaaattaaaatatgtaagaatcacattaataatacaatatataatatataatatgtgctattgaacactaaagtctcaatgaaaatatactgtatataaagactaaattaagattaaattcttaatgcataatttgacaaaagtcaaggtacataattatttatgattgaaaatgtatgtttccttattttaaaaatataataatatttgttggttggaaattaaagtctttagtcaattgtattacaccacaccaagtaaagaataatgcaaacaaaaatatcacattcattgtatcaattgttcatttcaaggggttagaaaagaaaatgcttcattgtttgaattttatgtaatatcatatatatatatatatatatagggcaagattatagtaggacctagctaaaagtttcctaccgatagggtaactttttttattcattgattttagatcatgtggttattatgatgtaaggtgtatactcttacgataggactgcttgtatacgattaaaactttatatatattataataatattaatg

SEQ ID NO: 313724 - DNA, 918 bp, Cannabis indica
ttttttgcaagagcaagaaaaaagattggaatttagatgtatcaaattattattattttaattttttgttaatttggcaattattatatacctatctatgatgggtattgtaatcattttatttatttttaattaatcatgtttatctatatatagaaaaaaaaatacctctcctaactattagtatctagctctttagcctctatttaaataagaactttcacttatactacatttatatataaagttcatgtatatagatttttgtatttaatagtagtaaatatacatttaatgaagagtgtctatattctctcatatttttattttttttgattgtaaatgaattaataatgtttttgcccattttttttttaactaagttgtctcttttttagatgattttcttctcgagtttggttgttgagtcttccgctcaatttactataattgtttagtattgtaatgatccctaaatctttttggtttttttttaaaaagaaataaagtgtatgtatatactatagatatagaaaaattaataatataattgttaacttaatcatccataacttttgcttaattacatgttgggatgtttttaggatagggcggtagggctttgcccaatacccctcaacccaagaggtctttactttattttatttttttaaaaaaatcttttttaacattagcctataaattttgctttattttttttccttctaaaacggtttataaaataggataattacataaaatattaatttttataaattttttacatttttacatataaattttttatatatatattcattttagagtattatataaaaacacaagaaaacaacaaaaaaaccatataaaggtaacaaaaaaactacatcagaaaatatcaaaataacataaaaaaaa

SEQ ID NO: 313725 - DNA, 871 bp, Cannabis indica
tttcaggccttgatgaagttgagtttagcacatgatggctccctaggatcctcagatgctctttgggatcaagtgaagaccttggaggcttcctttgtggtaaaggacaaagccatatctaagctggaggctctcctagcagagagacagagaatggtttatggcttagagacaatgcttggcgctagaaacacagacaacaccacacaagctaccttcatctccgggctaaagtttgaccttgatgagcacaaggagaaactaaggaaggctcttgatggccagcaagccataagggaggagtaggctgacttgtcctcactcacttatgagttcaagttgtgaaacccccaagctagtttgtcatacattggcagtgaggcttttgtgaagagaatgttggcccgtggaaaggcacttttcgagagccagattgaggcagaccaggtccttacctatcctgaggggtcatcatcagagaaccatgacgaggggctggcaaaacaacctatggagaggtgcctagttaggacactgaccaccaggccaaccaacatgttcatgttggggccgtttggacttttgcgatcctaatctcccagcattagattcagctcctcttggccctgcacacatttagacaggattttcattagtagaacatagcattatgtttgcataacatagacaatattttcatgttccatatagcctatggctttttatggtcagtggcctttagctttagaacactacttactttaatattctatgtggcctatgcctttttagaagactactttattttcagtcccatggctttcatgttcgtatctttggcctataggccctctatttttgaacactacta

SEQ ID NO: 313726 - DNA, 1418 bp, Cannabis indica
ttatttttaaaattaaaataataatttagaccaataatatttcgacatatgacaatttctaaaaattaaatggctcagttaaaattaggactaacggacaaataaaaagcatgacttgaggactattaccgctatttttcgaggttggggacttatttgtgccaaactgaaatttttgaagacttttgccgtaaatttcccttatatgtaaatcattatgatttatgacatgttaagaccccattggtcagccaggcgcattttagtaattttgacctgagaagggtaaaattatcaatttaatttaattacgtgtttatgcactatattattatatagtatgcctattttgttctttttcagatgtgttctgacaagttggtacggtatagtcataactgggtatttcggggcgaactgggtttcagggctgaaatacgattttgggatacttgattgcattttattttaacatgagaaatcggaaatttattatttatgtacagaatgtgagaattatatttttcccttatatgcttgaaaatgggaatttgaccctaagggcaatgtggtaattgtgcatttcgtttacaattcattaaaagggaaattttaaaaaaaagaggactttattttctgcattgtttcagccctagcagccgaaccctctctccctctctttctccatattttcaatttgctaggtgttgaaaaattatcttgaaagcttagattcttggtgagtgttgtgcttaacttggctttgagtttgaggtagttcttaatcccctttattgttgaatttgttgctgaattttctgggtttcctcctctcttagccgaacccccttttctctttttaactatctctttctttgttgaatgtgtgagttgttgcttggttcaaagcttggttttgtaatctttgtgcttgtgtaaagatagccattttaaattatttattttgaatattcagctgctgtaaaatgattgagatatatgttctacatgtgaatttgttcatctttgcatgtgagatgaaattaggggggaatcttattgttcttggcaagtatgtgttgcaatgttaaggaattgttcttagtgattttaagacatgtgtttgagttatattgagagtaaatttgtgtaaattaagatgctgattttttatggttgagcaagctcttgaattgggatttttgttctagtttaagcttgctgaaattgatgatcttgatgcatattttggtgttgttggagagtgaattaggtgtaattcttctctatttatttaatttatgctaggtgaaagtttattataattatgggctggttaaacatgaaaattggtatttttggatgctttttcgtggatggaaactgggtttcctaggtttttaaacccagtagccgcg

SEQ ID NO: 313727 - DNA, 1082 bp, Cannabis indica
cgcctaagatagttagggcgttacaccgaccgaatataaaggggttacctaggtgtttctccgaatccggtaccacgctcatatccaacttgctttcaatggccgccctgaacgagttagaacaattacccgaaaagagaatccccaatttctgtttgctacacttctgtcccgaccactcttcaatcagaatttcagccaagctgctgaaattctgattgaaaatgaaatattaggtagatattaaaattcatagggtagagctcttcacataaaggagtggtagatgtagctttactaacaagatgccatgtgtacaaccaattataactacctaactaatagtttaactaaccttcttaacatcaaatagtcctctcaaggtagagtataaagatctttgacacctatcttggagatcatagtgagaaagtttcaaatttctcagaattaatacgacattttttagaaaaaatatctatgtctgagtctgattatgaaaactcaacatttttggaacaagaaattcactatttacctgcatcatgattttcaaaacaaaaattgaggaaaataatgaaagaattagagaatgtattgatagactgaaaccgagctaatgtatccactcgttctaagcgctttatagatgagattagtaaatgctgtttcttgtggatgcggcttaggctgagccacaacacttaattaaataccatttggccaaacttttgtttttatctccagttaatgttgttttttcaccaggtaccctagattttcaaatcacggccccttctaaagcttgtaaaactagattaccccacgacccatcagagaaatttgaggctgaatttttttcagcctaaagtaacttctattgctccgtatcttgggtcattcttctttatgtgtggcataaaacaggtagatagttttgtatatgtcgatctgtcgaacgtgatgagaagagttgtttctcccctagccaattcaatgttggattttatgccctaaataaaactcattttaatataatcagatttatatattaataaagatcagaaataacatttaatgtt

SEQ ID NO: 313728 - DNA, 748 bp, Cannabis indica
tttagtacatgtcaaagtttagggccgaaaatcataattagccatatatatatatatatagaatagatatataaacaaatgaaatatataataatgaatatgtttttttctctaaattattacattgtagaattttgtccctaaattttaatttttttaaagtccccgccaaattatcaaaactattacaaattcgctctttattatttaatttcattgctaatcaactaattaaatatacaatcttacctttgattttccaataaaaacatgtcactgccattgctgataggtatcacgtactttctgaaaattgtaatacagaaatagcagtcaaaatttatttgatctaaccatgcatacatattgattcaattagtagatgttatttttccaatcactataaccttatagcaatcagcaagtttttttttctaaagcttatataaaccacacattatttttcattgaaaaaataatataattttgattatcataaaataatgaaataaatactttaaaagttttttaatggtgcaataattttaaatatataaaaatatttgaatttaaaagtaaatttttttttaatatatagtttaattattcatataacataatagtcatgtctttttaattttttttttttcggttagtcaaaaaagaaaaaaatacttacttctcttaaatttataatgaatgaataataaataataagttagagataagtattgtactaagtttttgt

SEQ ID NO: 313729 - DNA, 1625 bp, Cannabis indica
tccctattgtactctggtagctgttgttgtaggagaattcaattaaaggcaagtacttactccatgaaccctcaaagtccatgacacaggctcgcagtaagtcttctaaaatctgaatagttctttctgactgaccatcagtctgagggtgaaaggctgtgctaaaccttaacttggtacccatagccttctgaagactcacccaaaacttcgatgtaaactttggatccttatctgacacaatagatttaggaactccatgaagacgaactatcaccttcacacacaatcactactacaaaattggctttttccatcggtttataagtgtcttttatatgatttcccaacggttcctaaaaccgttggctatgtgggtgtcataaaaatacgaaactttaaaagacggtttataactgttgggaaaagtcattttaaattacggtttataactgttggaaaaaatcactttaaatgactatttataattgttggcaaaagtattatgtggattaaaaaaaatcactatttaatattacaataataatatgatataaataaatttatccgagtacaataattttatttatattagattaataaattaatttatgaagaataaatgtaattatttattcatatcagattttattatttaaaaaaatacattaacaaagaataatatgaataaaatttataacaattatttttaaatcctaaaactccaccaccattaaaaaaaccctagaaattctgcaattttcgttgaagaaaacctagaacggcgctgcacattctagccaccaccgttgccatttttgttgaagaaaacgccagaaaataggctctcagccctcgaaaatcccaaacctgaaagctccatcttctttccctttgctctctttctctttcgtctctctccgtcgcgggtcttcctcgcaccaccacaacaggccacctccgatcgtcgtccactggagtcaaggccaccactgcgtttctcggctcgggccacctttgctcgttgagccaaatagttttcaaagaatatgagtccgagcttttgggggttcttggcttgagggttcatcgggggtcacggaggtgagaacaaagaaggagagaggttgtcgctggccataggtggctggccctggcttagtttctgacgccgcaccatgagaacaaagaaagagagaggttgggaaagagagaggtcgggaaagagagagaaaatttagggttttgaatttggtttttatcattagggttacaccattttctatatgtaccgtatttaatcttatcccaatttattattttattatttacttatttaaaataaaacaaaatctgatataaaataacgtgttaaaaaaaatatttcccaacagttataaattgttgggaatattatgtattcccaacacttataaaccgttgggaatacatagtattcccaacagttataagtcgttgggagtttacttttttttctttttagttcatttagtattgctcacagttcttcaccgttggcattggcttttcctaacgggttctttacttcggttctaaaccgttggaaaaacctttgcttactttttccaacggttttcataatt

SEQ ID NO: 313730 - DNA, 2743 bp, Cannabis indica
aaagcaaaattttaattaatcgcgattttcataaacctcgttgattagcaacgagctgcacagtacatttaaaaatcacgtaacatgcctaggctagttagggtgctacactaaacctaggtggtttcctataaatagatagtgatggctcacacttaaaagatgataaaatttcttgccttcaggaaaaattgagcatctattctataccctacattcgaaccacattctctctttcttcttctttcttcttcatattttcataccttgagtgatagagtgagtctcacacacatcaagtggtatcttaatcatagtgtgtaaggttgtgaagaatccagaatcaagagaaggacattcgggcttaaatcttggtgatactctgctacaaacaggatacaagggttagagatctgagtggaatgagccattaatattccgctgcacccactataaggttttctgaaactttgtatgtgtttatttacagtgttttagaaattcatatttaggatgttaaataacatacatggtagtaaatgtagatcctgataaaacatattctaacaattatctcttcctttttatcacacgtgtcacctgttcagaaacacggattaaatttaccccctgagcttttgggactcttcgagttgtgggagcttgcagtcttctttcagatattagagacaaatttacaacttgtggtgattgttgggatcgcaaatgtactccttgagctatcatcaattaaaggacaaaaaccaaaggtaccacgaccgtggcatgcatgttgcacctttaatgcacccgttgataacacgtgcgtgcaaatggtgcgtctcttggaagaagttgtaatgacgataagtcgattgaaataacctttctttaatgcatacgatactcgaggcagacaatgatgaaaaatgaatactctgagcaaattttaaatgccatcttttcaatttcccatctgacggactaaatcgtgcttttcaaagagaggatttggaccattcatttcaaattgcaaggattcagtcgaagtataaataaacttataaaacccattttctctcttttttcactatctcaaactttttaaatcctttgtaaaggtgtacgtgggtcggtttggtcaatttatgcttcattttatttaacccaacgtacaagtcgggttataaaaatctaagtgcaacccacccaattgagaaaaaataaaacttcaacccacctaatgaattggtcagtttatcgagttaacccgtctaaatcaagcactaatgtttatttttttcacattcagttgttatattttaattaattgtgataatgagacaaatatatgttcaaattaaccaccataaaagaaatatagtagtttgattttttttttttttattaaatatgtatatgaattatattatatatagatcatgtataataaatatatatatataaaagcctcttaatcgggttgatcgggttagttcgggttgattgggtaggttggtaatatttttaatccgtccaatataaagattgggcgagttatatttttgtcaaactttttgttttgtattttttgttgggttatttggtttgatttgggcgatttataaaaatttatgtatagccctaatcctttgccttcaacctggagcccgttattccaaaaaaaaaccttaaatctatcgactgtttcgagtggtgagtgcaagaagtttttgattgtctgattcagtatttcgtgaacctttgtttagcccaatttccaaacgcagagccaataaaccccaaactactccacccccacacgacgaggactttaatgcacaagtcggcttcgatcgcgtgattggctgggtacacagctcctagaaagattttcacaacaacctatcattttctgctcatataccaagtaagtattcaacgctttgttgaatcttgctattttatatctagtaaagaaatgctcagttcaagttaggtctaggatatctgatatgtgtgaatggtaaaatggtgtacgtagaatttacatttctaggacatatcatgttgaaattgttttagccagggaagtgctgatattgtctggatagttagggtatggccatctaaactgtacggacttttacaagcacttagggttcctaaattagggtttgaaccaggcaaaatgaacttttaggcctagctgtcttctatacgcctatttggagttgttagtactccgaatgaacttgattttcgcttaaatcttgtttaggtaattttctattaggttctcgaactgttactttgagtcgcctgatgtaacgtgcatgccaagatggcacgttacaagctacgtgatacccacatgttggccaagtggtggtcaagtggtggcgcatgttgttgtgcatgttggtggcatgctaatgcttagtttgtacgatagtgacattttcgtaaatatcttcaatattgtccaaattgggaagggacatggcattcgccatttatttgggtctacgaatataatggtgcaattggattttagagaattggtgatttggtatatggttatgaccatatgtcttcagagtaaaaattatatatgttcttgggggagttcatggtgtcagctctccaccaccctttggcatcttggtgctgagtgagctactactagtcaatgggactagtagggcgggcatatgaggaccacgagaggactcatatgtct

SEQ ID NO: 313731 - DNA, 932 bp, Cannabis indica
ccatcttgagggggggatattaaagactaagtgttagtctaagttactcgttttgtatcttactgcaagtcttatcctgaaggttcttactgtatgttcgattatcattttttactcaattccttgtttgtaatctgttactaacagataggaaagttagttggtattattaagttagttagtattgttgagtcctgtaagtcggttggtccctaggctatatatacttgtctcctgtctttctttgtaattaattcattcaatcaataaagctcaattcatttttcttcattccgcaataagtaacaagtcactcagcctcaagagtgacaaaagtcactcagcctcaaaagtgacaaaagtcactcagcaaagagagtgacaaagtcactcagccatgagagtgataaagtcactcaaccaggcctcctacaaagtcactcaaccaggcctcctacaaagtcactcggccatgacattgcaaaacttggtgaaattttccctggcgagaggagagtgaagggataaggatacgaacacaaggacaaaataagcatgcgaggagagtaagaccacaccttttgcaagttctgaaagtaaggaggtacaagaaatggaggcaccacaccagcaagatctgaaaaacccaacaaagggtatgctgcagccactacccctacaacccgaaaccaccttacaccagacaagagtatgaggtgcaatagcaacttgcagcctgaaagcgacacattgtccccttgggaccaccatgtacctcaggcaattaaaccctataaatacctctttctgagatgtagaagggggttgaaaaattattcttgaaatactacaattagatcaataaacagttctttattttttctagagtaatttgcggcaaaaccccctcaactatcattttacttgcaaaa

SEQ ID NO: 313732 - DNA, 867 bp, Cannabis indica
ttttacaatttttaaaattttaattcttaattaaaaaattgaaaagtaaaaacagttttataaaacatatttttgaaatatatttttacttatccaattaaaaaaaataaaataacaattaaaaaactgttaccaaacacacccataatttatataattttgcaaaagtacattgttatggagtcttttttttttaagagagttaaatatatttttatatttcaatccctttatttaaaaaaaacaaatctatgtttgcttcttttttcttgtcattgtgaccccttttgacataggtggctggctcctcactccttgatttttatactaaatcatataaaacaacattacattgaaaaaaaattattacacttatgcttctaattatttttttatattatttatgtatttttaagttgtaggagtttcgcttttgaattttaacatgtttcaaatagtatttttagatttgtttaagattactaaaatttgtttcccaaactatattgacatttttaaatttaaagactttcgttcaattttattaacattttattaacatacacttgacatagataatagtttaatggacacgatttggtatatgtcaaaattttgaaatataatttggtacatatatatcgaagtttaaaggggtaagttaaaaaataccacttttttaatcaattaatcaaatttatgtctaattttatatttaattgaaacatatctctttttatatgtattgttcccaaaataccctgacataagagagtcaaatagagagtatcttaaagtgacaaagacaaaattgatacaatatttaaaaaaaatgttttaaaaaaaggtaaaaataatagactttaa

SEQ ID NO: 313733 - DNA, 791 bp, Cannabis indica
accttgcagtcccatacctacacagtctcagaatcatcacatacaacccttcaccaggcaatgtgggattgtatagttcccagtctttcacttttagaagccctgactatgatagtttgactcatgccccctttgatctcattttccccatagtagtgaatagattaatacatatgattgttgccttcaattcacctagaattccgaatcatactcataaattgtcccaaccttacgaacacaagatcaattttaaataaaaagattatgttctccaaatcaattagatggatgcctccattggctactcatgtcctatattccatttaggaatgcaagcaaatttaactcatattgtcgtttctctaatttatctaccctgtaagatgagctaccactaaataacatacatgcacagtccattcagattttttatgtctctaattgaacgtacaatgtttaacatcaatatcaatcgaaatagcaaatagcaaatataatattgtcaataaaattctcacctcagtcggttgaaggaccgatacctgagtccttttgagtcataatcgacacttgggaaggaaccatacactcatctcttttaacatcagtctttctttattgggggtaggctctattcagatgacccactactcttttcaccacattcagtggcacaacaagaagtgttagtggtataagaataaacacaagatgagcctattgttctcatagatctctcatctgttgcccttgttgtcttatcctatcctgttggaaatttattttac

SEQ ID NO: 313734 - DNA, 1285 bp, Cannabis indica
tttgggcgagtttttgactttcttaatgttcatttttttgggtgtaatgattattatatgtaaattaggttgttttgtattgattttagaaatttatattttattaaaaatttgtaatagttatgtatatgattttttatgtgttgcaccaaaactcaatcactcattttaatgataaataaatatttgattattatgtgctactaattatttgttgaccagacaattcacaaagtattaatattaagtaaagtcacataatcaaaaaaaatagattcaacaagtatatcaactacttcataattcataagagcaaaagtttcatcaagaaatcaagaattcaagaccctattaaaaagagaacttcgaaagatcaaagtcaaaagtcaactctaaaaaaaaatcaactttggatcaaaacatgctaaatagaggtaggaagctcatctacatcaagactaaacacaatcaaatgatataagtttactttagtcttgttaaagtgatttgcatagtacattagagtttataagtttaaagtttagctccttaacttgtgcaaaaagtagtttttcgaaaatgacttataatttttctaaattggattttaagattgttcatcatttaactaagagaacgcaactataatttttgaaattggatgaatgagcaaggaattatgtacgttttaagtgggaaaaatagccaaaagctctatgctccttatttggatgggtgcaaaaatgcctaggtttttttaacaacaactaagaatggttagttttatcttattctctacctaaactcaattttctctcaaaaactaaggttggttgagttagtattgatcatattacatttctaaaagtgttctaagcttactttgcatcgttttttcataaacacaccaactacacacacttaagctaaactttttcttatcttctctagtgtgctagccattctctctaggattttaatttgtatttcatcttattagagagagtttactttgttggaatatattttacttggatttagatttactaacaagtatatttttaacatcctaaatatgaatttctaaaataatgaaacttaaacacatataaagtatgagaaaccttacattggttgcagctaaattaaatgactcatttcactcaaatctctaactcttgactcctttttgtcactgagtattatcaagatctgggcctgattctccttcaattgtttggattcttcacagtcttacacatcatgattgaggactaacttgcta

SEQ ID NO: 313735 - DNA, 1099 bp, Cannabis indica
ttaaaatgattacattttttttttttgaaaacataaaaatgattacagtttattgtatagagatgtcaacattgtacatcaacggcttggtcttcgacgatcgacggcttcaacggagcaggaagctgagatcttcacctcgaaaatattcaagtacccacttcctccaacttcttcttcttcatcttctttttctgatttcttttttcaattagtatttttattttttctcttctcaaatttcctttttatttttcttgtttatagatctgctatgtgcgttctctctctcttgttgaatctgctatctactatgtgcgttctttctccacagacgatggaggatttgtatcaattcgggctcaaaaatggccggttccagggttgcagctagttggacgaagatcgacactatcaatggaactaagttatttcttgtattttctttaaaacaattatatattctttttgaagtatgttacagtaatttgttttaggttttatatttgtgtttgttcatttagtttcttactgtaattttctcagtatttttttcttttggtataaaatcttttgtgtttgattagttatccatattgcattattcagacaaattaaaaaatcttagtatcatttttttaaaaaaagaaatctagtatcatttaatgtagccggtgtacactttttttaccctaatattgaattaaataagaacaataaatgtgaattaaaaaagaaaagtaatatatcacaaaactataatatcttaactaaaaaaaattgaatattatttttttaaaaaaataacttaatatagtgacattttttgtgtgtcactatatctgtaaaataataaaaaatgtataaaaaaaaagatacagtgacgcgttttgaaagttgctattactttttcactctgacaaaatctgactctaaatgcttatagtgacgcgcaatgagtgattgtaaaaagatttagtgacacgcgctgaagtgtcactaaaaataggctttccagtcaccctcattagtgacgcgcagtgaagtgtcactaaatagttttagagtcactcaatatgggtcactgaaacccattttt

SEQ ID NO: 313736 - DNA, 804 bp, Cannabis indica
tacatggttctttgacttgtttattaaagctaaccaattagattgaccaaatatttatatcttaaaaacataatagtggacttgagtgcgagcactaattatagatatggaatctataacttctataaacacatagaaaaacagtagtttccgtagagcttggctaaatgagtttaaatggtggagtactcattttagtaattatattagtttactagaatatcatttacaagtagctaagtgttttaaggataaaatacattgaagggtaaaatagtaaattttactacaacataatccttaattagcggcggaccactccgccgctaataaaccaatattcgaccgcaataggctattagcggtggaattcccctgctaatagtctgccactattaaatagccgctaataatggtattagcgacggaattagtatacgccgctaataccattattagcagcgggaccagaccggtcccaccgctaatgcccgcacccctaataagatttaaaaataaaaaaattaataattatttcaagctaatattatttatattatataatatataatataaaaattaataatataaataattatttataaatatataaataataatttaaatataattaatctcattacaaatattataatttgagtctaataatatttactaataatttgaaaacgtttcaaaataaactacgcaacaacatttaacgttaattcaattacaatgtctcaaaattaaactaaattatttaaaaacataaactgattattccataaaatcttcattaag

SEQ ID NO: 313737 - DNA, 3996 bp, Cannabis indica
tgtttcaatatccagggtcaatccctgacatatcttggggttctaggtgaagtcatcctggttttagtttctgtcttcgactgccactagttgacgtctagttattgcaaccatagcaagccagtatctactcaggtcgcaattcttttacaagtttgttttaccagagcaacttccccttgtattcttgtgaatcagtcccttttgagataactgaggtgtccttttctcttacagaggagggttataaccccaggtcgctcaagttactgggcagatcgagctgatcatggacatcgtcctgcccctttatatattgttgaaagcgtccttgtgatatgagaccttctatctcatctttcagctgatgacattcttctgtggtatgaccgatatctccatgatattcacaccgtgtagttggatcccttttacgcctcgcatgttttataggtcttggctagtcaaaaacgacttcctgtacatgtgtgaggtagatttttttctgagttttagtgagctcggtacattcggcataaagaggaatatatctgttgggcttcttattcttgagtagccttttgggattgtcttttttctttaatcctgaggcctccaaattaggttttccaacagtatcatgctccggttgtctcctagatttcgtgacgatgcactctgaacttattctccaactcgctcatccgtaaagggaatgaatcctgttgcgttaaactgagtcgttgacggaggtcaggcttcttcaggttcagatgttctcttaaatcacccttatcatgattgtgaccggaccttgcccttcctctcaaggtttgactcacctttttcttcctacaagggtttgcacgagtttcattctcatgagcccaaattgtgagttggcgatttatgtccgatgttccacgtatcttagtctgtgtctcaaggttttcctaagttccctcaggttgcatttcctgagggtcctgagcatatctctgggttatcctctatcctttggtctgcaagccgtgaggtttgccctatgcatctttcttcccaaggtcaggttaattttgggtatcatctcccagcgctacctttacggcagccatttcacgctccaactcagtattacgccggtttgcttcctccaatcgatacctaagatggaaattttctaattctacaattggtatgtatctgggtcggtggtaagcgccatcctcatcaacctagttagagagtgacctattgttgctcttccaaggtccgtcaagacaggggccccaatactggctgggtcttcctggggcttgcattctgttcatgcgataatttgacaaatccctgaggactcaatggttctcatctgggacgatgattgattccttcttgaggactattacctgtggtgtcatccatcacttttatgtcaggaggctttttttgggctttttcacagaagctctcaatgaaaacaccaaactgttaacgcagatttttgttaaccaaatttgagtctcacaatgataattgacacagaaataataaaagctaaaaatatgaacactaggtttttttacgtggttttgtagttaaaattctacatagtccacgagtcaatcttattcagatttctaagtattttttcagggcctcttgcataagagtttttttgtcccctcccccccccccctttttgatcttacttgccactatttataattacatagcggcagttaattacaaagctgaccaaaatatgtttacaaccattatccctaaaattgtgggatctgattacaaatcaagccaaataaatgagatttttacacagctgtgaatatcccgcttttattgggctgagatgaatgcataatcataaaaatacggtaagccttatctcatagggatgcctcgctgagaatggagccaagatgactttggtagcgagcagttgcttgtcatttagcttatcgagactaatattgttttaactttgagaactatgctttttggcgtcgagatgatcttcctcgcatgcatagcaccttctaacgagataagcacctcgatgtctgtcatcttgactcgtcacactatttatactaagtttgtatattgtataatatacgctaagtatttttagtgtttttgttttctctttcacgcaacaaggttgaggcctcgccacgaacgtgtacatccacatggtttctcgtcaatacataagttagccgttcatgcgtttctatctcgtagaaggctattcagccagccgagttatgaacataacatgttaattatatctccaacgagttgttccatgctaagtatacttttcgttcgcgtgtgtgagttcttcgttattcccagctcgacacatgtcttcctctgatgtgcttactgaattttgagtataacatagggtttggaaccctactgtctagcggagaattagtcatctagtctatgccgatcagaattgaggatagggagttgagtgctgacttaataagaaatgggtttagtggattttgatattatacttggaatggatttcttatccaagtactcatccagtattgattgtaatcggaagatggtaatcttccaaccagagggtgaggaaccgtttgttattgttggatcagttcagggatctcggatcctagtgatttcagtactaacaatcagggaatcgttacgggatggatatctagggtttctggtcgtggtattggataccaaacgtcctgagtcaattcgaccagaagacatcaaggtggttaaggaatatttttagatgtttttcctgatgaactttcgggtttaacaccacaaagagaaattgatttatattgatatggcacctagagaagaacggtttcaaaggccccttatataatggctccagcagagcttaaagaattaaaaactcaacttcaggggttgcttgacctaggtttttcacggcctagtgtgtcaccctggggagctcttgtgttattggtcaataagaaagataggtctttgcgtatgtgcattgactaccgtgaattgaacaaattgacagtgaagaataagtatcctttacctaggatcaatgatcttttgatcaacttcaggggaagatggtcttttcgaagattgatctccgatcgagctatcgtcagttgagaattcaagtaaaggacattccaaagatggctttccacaataggtatgggcactatgaatttttttttgttatgtcttttggactaaccaatgctttcgaagcttttatggatctgatgaataaggtattcatggatttcctcgatatctgtgtaattgttttatcgatgacatccttgtttactctcaattggaagtggagcatgaacaacacctccggattgttttacagcggcttagagaacataagttgtatgccaaattcaaagagtgtgagttttggcaatctcaagtgtcttttcttggacacattgtcagtaaagatgcgatcaaagtggatccggggaagattgaatccattaggaattggtcgacaccgagtacagttacagagtttagaagtttctcgggtctggctggttattaccgtcggtttgtagagggattttctaaaatttcaacgcccttaatcgagctcactaagaaggatcaagtgtctgtgtggatggaaaagtgtgaagcaagcttaagagctgaaacaaaaattaatcacagctccagtgttagccctaccttctgataaagagaagtttgtagtttattgtgatgcatccagacaggatctgtggtgtgtactgatgcaagccgatcaggtcatcgcttatgactctcgtcagttgaacgaatatgagcagcgatacccgactcatgacttagaacttgccgcggtagtgtttgctttgaagatttggcggcattatctctacggagagaaatgtgaaatttatattaaccataagagcctcaaatatt

SEQ ID NO: 313738 - DNA, 1001 bp, Cannabis indica
acactaccaaacgcccaatctacaatttcaagtattttcttatttagttttaataatagtaattctttgttccattttaataatctatgtttaaatatttaagttttaaggatttaataattcttcttatttttatgtttaattatttatttttatcattctcaaaaaacgacaaataataagagggtgaatggtcagcgactgattcatacaaaaacgacataatgatgctttctgttttggaagggcagaaagatgtttccactactactttccagttctgatttcttcgttgaatgtagtctgtattttagcaaaataataataataataataataataataataataataataataataataataataataataataataataataataaaatttagaaatagacaagcttaaaaacgacatcatcatcttcagcagaggaaaacgatatttcaaaaaaaaaaatctaatatataaggaaaagaaaaaaacacaataagagtctactttaacgcatttcacaaaaattccacgatgacaaaacgacaaaatgtttataaaaccaaaatcaaattggaatcgttggagagttgaagaaaaacaacaaatataagtatcaacataaattgtctaaatattatcaacaaatattatcaaaaattatttattcataacttaaattattagcacaaaattaaaatgtcattaatattaacgactatagaaaattaacaaaaaatttaatatacaccacaaaatcaaaatgtatatatctaaatatcacacaataaataatattaattatcatatgttgaagcctagtattaaaaaggaaaataattaagtgcattttttcatcaaacataccatgcttgattgattatttgtgttttttaatagatccaataataaattgttagaatcctattttgtttctaatggtatatcagattaattaaattagatttttatttttatttttaaaaggaaataatata

SEQ ID NO: 313739 - DNA, 1014 bp, Cannabis indica
ataactaatcagattgtaaagggttttatttagggcacaaaacccaacacggataacacttacccccaagctcccgggacttacgagtgttaggagcttgcaacctccttttagatgcttgacttactatcctaactcgttaaccatgtgttgaaatgtggaagaagtcttccgtgtttcctcaggtaactaagggtttgatatgttctgcagtacgactgtcaatttgctaaaacatggtgttgtttaatggatctgtggggctcatgctttgagcttaagcacgtttctcgtgggaagcaaatgacggctggacttgaaaagatgctaggtttctagcacgttggtgatgctaccacaaaatgagtaatgaatgccttattcttattctttaggcgcattaaatgtaaacccttcaaatccccaatcgtttgatggagaaacttttgattgatttaatatgaatcgtatatttcaaaaatactttgaacggtcaccacccatataaataaaagccttggagactgaattcactttttgttcctcaccttaagcaacgatcctttgcccagaaaactccctcagacaaaactttcgagccctacttacctttctgaaccagaaacttcgtctcctcttcttgaccttgctgtcgtatttcccaaagttcgacacctacccaaatggtgagtccactattagagcagggtgtgaccagatcacaaagcggcttatgggatttcaggcgacaacgagcgaccaacatttttttccttctaatccatctacaagtaagtatttcttccacgcaaactgtcataacctattttgattgtgaaatgtggtcttgagctcacagaaatttattgttttgcatgcataggatttaggttcgaaaataagggttgctatatgtgaactttttctgaactttggggtaattattgaaacttattttagcaagatctagatttactaacatgtatgttgttggaatttattttaccaggatct

SEQ ID NO: 313740 - DNA, 721 bp, Cannabis indica
atatatatacacaaggttattccatatcatatttaatggttgagaagagattaataaaacgaacttttttttttatgattatgcatagtccagtagagatctccaaataagtcagcccctccatatatagtactacgtacgaactactaaattagttcaatagaacttctaatcaaaatattaatttgtaattttagtatttcaatttattaccaaaagaaaaattaatatatcattcaatatgtgaatttcaattgccagttgcttttaaatttaagttgtgggcgcacattaattaatacttgaataaagttgaattatataattaaatgtccccaagcctatctattcacacatatatatatgctacggtcgttttccatgactatattgaacttgaccagagaaaaggggagaagtattattaattcacgatcacgtacgccttaattggtgtgtgttactccaaccaattaaaaccctgttcacgattcttacccgtcatatatattatttaaatatacatcaggtaatttagtggcctggaattttagctctatcttcccatctccaaatttcaggcccatgtgaagcccaaaggcatcaggcctagtaattactattctctgattgcattgatctttctttctttttctattttttttttaagattagaattgctatatattggtgtaattaagtattaggtcttatataattt

SEQ ID NO: 313741 - DNA, 1250 bp, Cannabis indica
aagatgtgtttggatgtcaagtggtaattacatgtgaattcctaatatcatgtttggcatgatagttagtaattacacagtaaattaatattataatatttaaaaataaatttcatcaattaataatatataaataaataataatctcttcataaaataaagtcaaaactataacaatttagtagcaaatatttaaaataatttttttaagactatctaattactcttgcgttccatatattttgagctattatatcacaatattttttatatatatatacgtagtatttgttataatcacaatattataactataaattttttaaaaaaattgaattgtttaaaatttacaaatatattactgtaactaaaaaaaataccattataaaaagattaaaacaaaaaaaaatctggaatgtatttttttgactcaaaatttgaaaaagaaattgcaatataatactttaattagcacttctctttatgaaattaagaaccttaaattcttccttatgagaaaagagagagattagaaagtagaggatagtaaaatgcacttaaaacagagagaaaaccagagtatttaaactaaggggcactttcgtcttaagaaagaacttacaaggagagttctatttacaccccacaaaatgataagtacaccctattattaaaaaaacatataaacttaaataatttttaaaaattactcttaatatttttttaaaaaaaatttctcacattattttatgttaattttaatacttattttaattttattttcataattttttctaactcatgtatattttttttttaattttttctaagaaaatttcatataattttttattttaattttttcctcataatatttaaaatataatttatttttgtttgataagtatattttttaagaatatgaattggaaaaaaaaaagttaaaaaaaaattagttaattaaaaatataaattttatataaaataaaaattattaaaatgaggtgcctttagaaaattttagggtgtaaataaaatttctcattcattaaattataacacttcatacgtaaatattattattaattttttaataaatatttaagaacaataatacgacttctccaaaataataataataataaaataaaacttacaataagtatccaattgaatagtagaggatcgtcttttagggtaggtgagagttttgtgcaaaaatttaaaaattgagctttttaaggaaaaaa

SEQ ID NO: 313742 - DNA, 914 bp, Cannabis indica
attaaaaaaaaataaaaattaaaataaaattaacatgacttgtcacgtaacatctatctagtatatataaattaatgcgataacgatgatctgtcttatactatatactattgtaggaatatttaggatttaatgtaataataataggtgcatctaaatattatatattgtggcataatgatattattttagacacaatgatgatttttaataaagataattaattatgattggtttagaaaaaaaaaaaaactcacattgtaatttgtataatgagtgcatgtacgattactctattgctactatatattattatctaatttagtaattaataataaatgtactgttataattattaaaaactttttatttttatattttaaaatagtatttttatatttttacacaaatttacttaataacttacataacaattaacgaaataatctaaatcacaatcaaaattcacttaacaatctacataaaaattagaaatttttacatgaaaaatcctttttactcactttattacataattaccctcacacgcctattactacatttatacttacaaacttatttttattacacatttaccacttactcatcataccatgcatacacgtgttctatccccatgcatcatcaatcaaatcatactctcttccctctcttttttcattttgttttcatttcattttctattcttcatttctgttctctaagttcattttgaattcaagtaacctccattaaccacccataatttatcacgtttttccctcttatttttggttcatccacgaattttcaacttcctcttagcccacgatttagcaactgtttttccctctctgtttcattttttttcaatcttatttataccatggcaatcactcggtcatcttcatccc

SEQ ID NO: 313743 - DNA, 766 bp, Cannabis indica
ttttttttattcaatatactatttattattcaaaacacaacttaaaaaatagtaaaaatgatactaatatactaaaaaatataaacataaattataaaatataaaatattattaaaagatacacaaaatattaaatgggtctctattgggatggtaagtgtccttctcatccccaccctgtttaactttcagaacaaaattaatctccatccccacctcgttccttatttaaacaaggaattctcgtcccattaagagcgggtccccacgaggccattcccgtgagaaaaatgtgcatacctagacagaagatagcaaacttgaaagcacaatactaaaacattgttgaggagattatttctctcttagctgctgttagtggtggttcttgttgtgccatttcgcgtgttgcgaatggtgtggcccatgcactagcaaagtctgttactagttctgtaggggttgatttgtggacagatgcttgtcctagatctattagtgctcctgtaacagctgatttaatttaatgtgatacatcatttccttcaaaaaaaaaaaaaaacattttccgataggtttttcacttgttggaaaaaaacatttttttcaaagatgaatacactgtaattttttgtaaaaataaatagttaaaattcgtaaaaatatttaaaaaattgtatattctttaaaatataagaaaaaatttatttgcactttatagcacccaatataagagaataattaacttaaattatttttttaaaat

SEQ ID NO: 313744 - DNA, 1233 bp, Cannabis indica
ttttattttttattttttaaaggtacttatacatttaatttgaaaaaaaaaaaggtacacacatttgatatttgaaacacaaatacaaattacagatttatattgataacttgcattgcataatatatttttaattttattttttgtcaccctttttcttaaaatagttatgcaaatttaattctttatatttttttttaattgaaaaagtaaagagcttaagtttattgatgtttaaaatgaaactacttttgctctaaaatattcagcttgaaaaaatagaaaaaaaatatgtcagaagtgggatttgaacccacgccctctttcgaagaccagaacttgagtctggcgccttagaccactcggccatcctgactttgttgacagttttacactatagtagtataataccatgatatcatgttgtccaaaaagtttaataaacattattattcattgtttggccttttattttatttttctatttattttttaacgtatccactgctaaataattcaaaattaataaagtggatgtctacaaataaataaaaagttactaataataactaactagtaaacaaaataaaaacatacgaacatgaataaaaaaataaaagagttattagttaacatatacaatatttaatatacaaaataatatactttaaaattaaaacatccgacaactaatctttacctctctcatcccaaaccaccacactaaatactacccgtttttacccatttatatgttcttatatacatatatctattctatataaagtatacctatataactgaaattcttagtttttgagaattttatgggtgacttttaatttttatttaataaaataataaaatattatttatctataataaaataataataaatatcctaaattaaaatatgctaattaaaaactcacgttaattttaaaaagtgaaccaatatgccactagcaagctctaatcaagtcgaaatttgtatactgttttgctggtgatttcttgacgtatgtgaaatttacaatttatttagtccatctacaatgattggtaatccaatccactagcaagctctgctacatacactgaagctcttcctgtaaattgttattccttcattaactttttcatataagtgttcgggttgagcgacaaccagctgaaaccattgttgaagatattgaaaatatggttccctcttatgttgagaaggtgcgtata

SEQ ID NO: 313745 - DNA, 600 bp, Cannabis indica
agtttacctatctaagttaggactaaatggctttcatgttaattcttgagatatacccataatttagaaaaaaattgacatggcttatagagttttgggagatcattaacactctattttgccatagctgttggctcttgtcctagtacaaaagatcttaattgctcgttttttttaatcttaccgttgaggtcacatatcttaaacctttagattagatgtggctgtgcattttatttatatgcttatttatataggtattcaaatttattgtcctttcccatccaatttctatggatgaccagtgcagaagaggataaaaacttaagtaagtagttatattaaaataagagaaaagaaatatccaaaaagttaattcaatcaccctcttgtccttttagggaattgagaagtttaaaaatgctactcaggatgttaaagggaagatattatgtggacaggctagtaatatccaaaaatttcttattttctttttgttacaaatcatttcttacaaggagaatataatgtattcatgtgagtcctaatcaattactggaaaaagaattctctcatattttcttttgttgtaaatttttt

SEQ ID NO: 313746 - DNA, 1426 bp, Cannabis indica
aaatgttattttttatctatattaataagtaaatctgattatattgaaatgagttttatttagggcataaaacccaacaaaccattatgttcgtgatttagttctgcacaacaaagtggatgtctcctacattcctacagaagaacaaccagcagacatttttaccaaagctttaacttttcctaaatttaactttctatgtaacaagctttcattggatttcttcccgtgtagcttgagggggcatgttgaggaaacacatgacactaacgactaatagttagttatgaattctgttattacagttagtttgtttcttgttcagttagtattggttgttatctgtcagttgccttggttctactggtatatataatagatatacctctctttgtaaattgatatcagagaataaagattcagcttcactttgttcttttctttctctgttttctctgttttcatttcattctctaagttcaactttgagatttctattttaataaaacaaacgattaaagaaaatatcaaaagtcttggtatctatttagttattaattaaactattacatctagcaaactcaacacacttctatctacaagtagctcgcatatattaatctaaaagacctttctttcttttctttcttttttatcgaacaaagttcttgctatgtagatatggttctatgtatgagtacatttttcttctctctcaattattatcttaaaattttcttaattagttttttatatatataaatatgctttatcatatagattcatttccagtaatatatataaatatgtatttttataaaagattctatcatataattataatatttttagaatttattctttgtaataataaatttgtagaaagattgaaattaagtgattttttaattaagttagtataaaattctatatttttctgtttacaaagatgtccatcaacttttgtgtttcaaattccacacgtggacttcaagtacttaaagttgtagagttttattaattttatagaaaattatttgcattgagtactagagttataggaacatttgagaaacaaaacgaaaaaatcatcaaaaaataaaatgtgaatatactataaagttttagaatatttatttttaattatcttatattagttaaaatatatagtaatacataaatatataagtaggctacaaaattttttaattcacgattcattttaatatattttaaattcaaaaacaaaatatctatttatatattcatcttctaacaatttttaaaattatatacattattttatactagcaaaaaactacgtgcgaggcacgtgtaataaattttatgccaggttttttctatgttatttgaaagtgagattattattgaatactgaatgcaatatattagtgtttaagaaagc

SEQ ID NO: 313747 - DNA, 2537 bp, Cannabis indica
taaaaaaaaaaaatgcttcttcttgccatgccaaaacgacaaagtcgttagtaattgtttttatcacgactttgaatttcgtcaataataatacctattaccgacgaggtattacgaacgattttttactgacgatgtgtcgccattgatattaattactgacgaaatactcaccttcaattgacgaaatttatcctcattaaaaggcatttttcttgtagtcagtggtggtagcggaggaggtagttcttgttcgcaccatggattcaagatttgaagatggtgaagtgagattcacatgttaacatctgataccatattaataatgcagattggagtgaattctttcttttattcaatgtgtaaaaaatgaagcagaatgttcaataaagagtaaatgaacaaacggaaataacaaaggttgcaactaattattaactaataaataactcactaattgtataactaattctgatatatccaatttactcttatgaatatgttaaagctattgataaaaaattaataaaaatgacaaatatcacataaataagtcttacgtagtagcgagaatcttaaaaaacaattaacttgacttatttggtaataatacattcattacaaccaatgccatccggcctattagctcagctggttagagcgtcgtgctaataacgcgaaggtcgcaggttcgagacctgcatgggccagttttattgtttctatttttattattttgatttgagatatttttattattttttatatgcactaacttggttagaagataagctttgatataatttatatatttgggcagataacctctgttttaaaacttacatagttcaaagaggcgtatcattcaggtacttatatagtaatataataagtgattaccttttttttcctttttggaaggggataagtcataagtgattactactcactacaactaaattatatgggttgaattgttttggaaatttttgtcttgtactagatagtcaatgcccactgatattaaattctttaaaaataacatcacatggtacaagtttacacacacttaccctcaagctgatttgctatattaattcctttactaaattcatgaaattgtgcacatcaccaattgatcttattgctcagccgaccatgttgcttgctagctacttacgttcaactcccgtaatcagctcacatactcttcaaaacaccctcaaagttatactcctatgcgcgcatgcctttataattagaatcgccaaaagaaaagattaaacaccaatgacaagccttagtggtgaattatttagtcacgcatattggaataactacacacaaatggaaattgcatacttatagatatattatattactggttgaaatattttcttgcagcttttctttccttacgtgatagttgtacttccactggtaatgtataaaattttatgtatgagattgtaatttaagaaatatatagtgatagtgccttatctctctacaaaaaaattctgttaggagccaaacctaatcactagtagtatattatttggatttctttacaaatatcatcacgtgtacgtatttgaatctcaaatattttatatataaaacttctctagtgcacgcactacctatgaagactattaatttatatcatttttcaaatgctcagtaatgcaaatttacacatatacatatatgtaataacaaaaggtgttgattagacttgtacatagaatactgaatgtacttccttaaaacaaaaacaatctttagcgataacattttagtcacaatattaattttttgtgattaaatatgacttttagttacaaaaaaaagttatttgtgactaaaacataatattaagatataaattgtcactaatttagttttagtcacaataaatattgtaactaaaaacacattcagtcaaaacaaattgtaatttttgtgacttatatttttaaccgcaaactttatagtcataacataggaataataatttatattaatcacaactctttcacctttagtcacaagttttattaagactaaaaataaaaaaatttattgtgactagagacccaaaatatatttatatataacctatttgaatttgagtagaattgtaataagtttgggtgggaaaattataactaatgtgaaaaattaaattatttaagacttaatcaacaaacaattagtacaattagtaatgacatgattaatcaatttacaaataataattagagataaaacagggatgaatagtgtactcaaaccaataacgattaaaacaataaaattgttggaaaaaataataaattttaagcacaccaaaataataaagaaacgaagcaaagcaatttattcggtctggtaaaactatcaaacccacaaagagagatatattttacttcaaaattacacactatcttaatctctccacccgaatcccaaaacacattttttttcttcctcactctcactactcaacaaactcatgctcacttctcatttca

SEQ ID NO: 313748 - DNA, 1789 bp, Cannabis indica
ctccccctcctctagttaatatcgcttcatgcacttcttcagtcacccgatcctcttccttctgcaattcattttcttcctcattctgtaaagcagtatactggttcgaggtagatgcttcagcaggagcttgctgatttttaagcttccaacccttcaccacttgctgaaacccatctgcatcttccccaggcagttcagtcacttgtttcttcacccctttcaccacccattcttgcttttttgcctccttcttcctacaatcatccgaactatgtcccattcctttgcaatgtttgcacagaataggcttccactcataattgacaaccacagaaacatcattaccaaactcattctcaaaatagatcaggccaggaaactcttgctccattgaaacttcaataaggattctaggaaaaagtagcttatccctttccctagtaacctcatcaaccataataggttttcctagctgcccaactattttaaacaatgatttctgtccccaatacttcaactctaagtcctctagctgaatccaaataggaatggttctaatatcctctttcttaacattacaattagggtcccaagccttcataatgacaggcctcttgttaaagaagatataacccccagcaagaatatcatctctatctttaatactagtaaatctaatgagaaaaacaccataagagaccatacctatcttatccactttgtccttccagatccgtcgtgcaaagccttccagaactgcaagaggtggattggcaccgagaacgtaacaaacaatagccgatttccagtatgcaacctcctcctctatgtcatccattgttatcttcactttcccctctctgtttgaactcataaaagctgaatctaggttgcgcatcactggctctgctcgaagaaccggaggtgtaggctgaattcctttcgagatagagttttgacattccttattagcagctaagaaatagccaaaatctgcaactacctcatttagcataacattttaattcattgcatgttgttcctccattatgaggctcgctcgagatcatggctaatctttaaattagactaggcagctatccaagcactgactggttttggggaaaagctctcagaggagcctgtgcaactgggacttgcactctaggtggcagtggtgctcgagcttgtcgcccaaatcatgtgtggtaatgtattttttatccattcgtacaggtggcccagccatattaggctttcgatctcacctttcgaattttgcattcattggtagtatgtcaaatgttgttgagatactcacatctcttgtttggatccctccataaattctcccagtatagaggaggcagcctctggtagtgagtgttctacctcgtggccaagtacacaatttcttaggtgtccaccaaatcagtatactaagttgatgtcgcccaattagttacactgcggtcgtggtagtaaacgggctaatttcgtatccacagggaggtaaattaccactaaagattagtatagatagaaaaagatagaatttggaatgaattaaaaataatgaaatgatgaggtgagaaagttgatcagataaagagtttggtaaggtagaaatgtagttatacaaatcctattctaataccgatattaattcgaacgcagttgccattctacaccattaattacaactggaagatatatatgttaaaagcacaaattaattaatcttgcataaattgaatcttacctctaacttaacagcatatcatat

SEQ ID NO: 313749 - DNA, 602 bp, Cannabis indica
ttcaggcaatggatacaataaagaaattgcaatcaagttaccccaaagatgatttaaaaagattggagaaagaggtgagccataaacagattgcttactaaaaattgtatggaagttaggctatcctcccttgtcttttctgatttttgacttttttcccaggttgaagagttgaccaaaaagttcattaagactgcagaggacctatctaaggcaaaggaaaaggagatcacaagctaaggtggcagtggtgtggtgtcatttgttttcttgttgcagaaatagccctaccacatcattgttaaaaagaatcaaccctttttactgactggattctttgatctgtcacatgttgtttacccaagttttccgttgaaatgtttcccatattggaaattagcttactgattccataaatgagcttaaggtgaataagagttttaaagttctacaattttgagtgttttacaatgacataatggtacttttcttgtattgtaatgccacccattattatacagagcacttggcgtttgtgtattcttctttgtgacaatccaatatataattttccctatggctcatgagtttttttttttttt

SEQ ID NO: 313750 - DNA, 605 bp, Cannabis indica
caataccacacacgcaccccctatggccacttgagctagcctcaagtggttaaaaagatgtaatgtttaggttcacaaaaatatgtacatagcaaattaaaaagtaataaagtggtcctaacaataatatatgcattcaaataaaaaaatactcaaaacacatagaagcaaaattatataccccacatagtaaataatcatacacattattattagaccaaaatataagtaaattagttaaaaaaaaaattactaaccaggatatatcctttgataatctgatcagtgtaatagtgaggatcagaagtttgcaaagcaagcatatgatcaatcatggtagtgtctccttttatactcctacgctcatcaataagcccttgcaagaaaccatccattctcttagcaaccctattcatcttccaaacatatccaattccaaaccaactcaaacatcctggtaaaaattccaaaggattaatcaccccgtttttcgggatcacctcctccttaagttttctaaacttttttgcctcttcctcgtcgctgacatcgtcgccccagtaccgctttcccgccaccattctcattatgatgttgaatgtcaa

SEQ ID NO: 313751 - DNA, 2244 bp, Cannabis indica
agtaaggatggaattatggttgattcggaaaagattgaatctgttagagattagccgagacaaaagacagttactgaagttaggagttttctgggtttagctggttattattggcattttgttgagggattctctaagatctcaatgtccttaacagaattaactaaaaatagttaacgatttatatggacagaaaagtgtgaagcaagtttccaagagctgaagcatcaattgatcatagctccggtattagcattaccattagattaggagaagtttgtaatttactgtgatgcatctagacaaggtctgaggtgtgttctgatgcaagcgaataaggttattgcttatgcttctcgaaagttgaaggagtatgaacaacgatatccaactcatgacctagaatttgttgcactagtttctgcgttgaaaattcggcaacactatctctatggagagaagtgtaagatttataccgatcacaagagcctcaaatatttctttactcaaaaagatttgaatatgagatagaggcagtggttggaactagttaaagattatgattgtgaaattctttaccatcctgagaaagtcaatatagtggcagatgccctaagcaagaagggtcctgggcaggtatccagcatgattatgatttcagctcaattggcagatgatatgatcacatcagatattgagtttgtggttggtatattcagtaaattaacgttacaattagacttgttagaaagaattagattagctagttagtggatccagagttgataaagacccgagaaaaaattatggctggccaagctaaggattttgcagtgtcaagtaatggaatgctactttacaaaacaaaagtttgtgtctcgagtaatgtggagcttagaaaaaaaaattctagatgaagctcatactacaccctattcattatatcctggtaccaccaagaagtatcaagatttaaaaccctactactagtggcgcgatatgaaaaaagatgtggtagagtatgtatctcggtgtctgacttgtcagcatatcaagattgaacatcaaagacctgtagggttgttgcagcctttaactcttcctgagtagaaatgggaggatgtcactatggatttcatggttgtattgcctagaacttcgggtatgtttgattccatatgggtagttgtggatcaatttaccaagttagcacactttttacctgtgaaaataacatatacagtggaccaatatgcagaactctatgtgaaggatagtaagactacatgggctccgaagtccattatttcagatagagatctgaagtttacttccaagttttgagaaagtctccaatgagccatgggaacaaagctaaaattcagtccaagaggacaattcagatactaaaagatatgttgtgagcctgtgtcattaattttgatgactcatggagtaagtatttgccactgatagagttttcatacaacaatagctatcatagtaccatagggatgactccctatgaaatattgtatggtaggaaatacagatctccaattcattgggatgaaactggagaaagaaaatacttaggtctagaatcagttcagcggaccaatgagggaatagagaagatcaaggccagaatgcttgcctctcagagtaggcacaaaagttatgctgatccaaaacgaagaactatagagtttcaggtaggagatcatgtcttcctacgtgtatctccaatgaaggggattaaacgttttgggaaaaagagcaagttatgccctagatttacagggccttttgagattctcaagaaagttggattggtagtttaacgccctaatgctaaggcacgctacaatgctttttcaattacagtgcaatctttgctaatcaaagaattttcttgaaaaacatgtcaaattaaaacttttatattaaatattaaactttatattatatcaaaatatttacaagtgtcgggatctcgttttcaaacttctaaaacataatatactgtaacgtccccgcttcaagcctccattgggcccttacacccacggactaatggctcttatacacgagttcatcactctggctgcttcatggactaatgactgaccctacagaccaacacgagtgttttcagtgtgctttgtcctcactcacacacatcctgggaaaacttcccaggaggtcacccatccttgaaattactccaggctaagcacgctt

SEQ ID NO: 313752 - DNA, 1790 bp, Cannabis indica
tatttatttatttccttaaatagaaatatatttctcaaaataaaatattcttataatgaattggcaaaaaaaataagacaacaagctttttttgcaatattcccatgaaatttagtgtttctttcatgccagatgcaccagcaaagaacaatgaattgttcaaagtgtgaagtagaaagggtggctgaaagttgagcagaaaatccttacatgtgcttcaactagccaagttaaagtcaattggcaacttcacaagaccctacacaacttttgctctttggcaaaaaaacaaagcatgattaattgtttcaccatgtgaattacagagagagtaacgaggagaggaagctatgtgtctttaatggagttcaacagcaactggtggcgctgtgtgaaaagctttccaaataaaaagttaaatctttgatggaagattcaacttttaaaagttgtccaccaatgctctatcgaggagctacaatttgtgtcttcttgttcagcaaggttaacagcaaagtgataactcgacttaaccgtgtagctacctgtgaaagaattatgccaaatcattgtttggtttaacgttatttatttttattctgtcaaattttaacagaatattcaaaatttaacttttaaataaattacttttaatcaataacccctaaccttaattctctaccaaaaaggacttcctttaaattgccttattcatctttgatttcgtcaatttcccaatcgagattttatttatatcactggctattttccaattaaattttcaatcatataaaactatacattttcaactcaaaaccaggttgcccattgataattgatatgcaaggtgggatgttcgaggctatttctattcaatttcaagctcttggataagtattggctatttttattcaattttaagctctaatttcaagctttgaatcctgatgacgaacacaagggatacaactgtcaaacatcctaatgcccaaatatctttgacaaaatcttttcaagtgtactaaagaaactattttggaatttttgatctcctcaatctaacccaacaacgacaaaacgacactgtcaggagctccctatcgtgaaggttgaccgcttcagcgtgtggcacagtcgtgggatcgatgtctttcccaataattgttgaagtatttgacttgatagcatcaaaatgggtatggaattaaagatttttgtatatgttatctgattgtaaatttgaggttttatgtaattcttattaagtcaaatactgctattaaatatttaaaattttggtattctgaaatatttatttatgtgcattcttactctaattatacttatgaaatatacatttactaggtaattgttgtcctaaattttgtccacctgatgtggcatgtgtaaatactcaagactggggacacatggaatacaacttgtcaataacatgacaaagtcaccttacacaacatgttaactggcaagggttctataacaatcaagcaaaactgtcaaagcaagaataaggaaaaggagttaagcatgccatcaagaccttggccaacaatgtttggctggccaaggaaagcttgtaggctggccaagccttgaaagcaagttggccagccaagaaaggatgccagaccaaaaaggcccgttcagccacggaggtctgtgttggaatatgttttactagaatctagatttactaacaagtatgtttattaacattctaaatatgaatttctaaaaaaatagaatttatacacatataaagttaagaa

SEQ ID NO: 313753 - DNA, 1468 bp, Cannabis indica
gaaataattaatgaaataaaaaagtaaagggccaataatatcaagctgtagagtttcaatagtcttatcactaaagtttacttttttttaagtcaacgtcaaaaaatatcttccatatctagacaggagtaataagtgattgcctggtcactatgtcctttctcttctattaatttccaaaaaatatcataaataattaactacataatactattatataaacacacaagttacaactgcaatatacatgaacacataagaaaaattatattttttttctgtaaaaatacctcataaagatggtattgattaacagcgatatctccagtagttccatcaatgatagtacctttaaaaaaaaccccattcatatatttttagtactagaaaacaacactaataatcacagccaaaaagaaaacactaaccattcttatgtgtgaaaacatcccagttactaaggcctttaccatcactcagataagctccttcgtactacaattaaattattaataaactacaaatatattaaaaaaaaattgtttagtttggaaaaagacaggggaaagctaacctgatatgaagaagaagcagttccaaagaggaaggtattattagggaatgaggaaagtgagcttgtggaattgcaggaggccatgagtatggtggaaaagcatacaaaaagtctaagtaacaccaaaacctccatgtatatatatattattgtttgtatgaagagagaagattttaagagagagccaaatggcaatgcataatggttagatattaaaatgttcataaatagcgaaacaggatgagcagtagtcagatttgttgtcatctttatgggttgttttcaggtcacactcactccatctagattgctctctcattggctaacattttttttttttttttggtaaatattattttatactttgtgttttgtgttttgtgttttgtaaaaattattaataggactctatcttttgttaaatgaaaaaatagatctttattttttaaaattatacaaatataaccttaagttgattttttttccataataaaacttaataataatctgatataaagatgttatggcaaaataaattatatttttttatatatctattcgtgttagaaattatcttaagttagttaaaaattgagttcaggtcttatttttaccattttggaaaatataagatcaattttatcgtttaacaaaatagagggtccaattgataacttttacaaaacacagagttcaaaataatatttacccttctttttctttcttttcttctgtttttcctattttatttacattatattaaattatgtcatcatttcatttttttaaaaaaaactttaactctatatatattttttaaaaaaaaatttacagttattcatttaggttctatataaattgttaagtagatttttgttgcgctttaaattattt

SEQ ID NO: 313754 - DNA, 576 bp, Cannabis indica
aaagcactcttaggctcatcaaccttaagggtaatcaaggtggaattaatactaacaatacttccattctcattcaacaaactgagacaaaaatacatcacccacgcccacagtttcccaatacttctggtagaaaccatctagctgacataccatctttcccaagatttttagaaggatgtatctgaaagaaggccacttgggtttagtcaacaagttttaatgaggccaattttttataagaaaaaaaaagaaaagaaaaggctagcacataagaccatgtcctaaatgtaatatttatgctatatttagaaaaaaaatagatattttcaaatatatttacattaaaatttagtaacagggaaaaaataggtgtctcaatttccctatccaaccgcatccttcccatcaataattgccgctcatcgtcatttattaatatttttaaacctacagctctgttaatgaccctttaattcctgtatcctcataacaacttttattaccatcttccttaattattttaagatcacttctttatataatattatacatcatatttttatataatattat

SEQ ID NO: 313755 - DNA, 1854 bp, Cannabis indica
caacaccaagatatatagtagatcaagtccgatcaatcgatgtgatctatggttctactcaagttttggaacaccaccgcaatctttcttaattgattgtgcaagaataggtacaatacagtcgagacgagattctctgttaagttctcacaaagtgttttaactctcacactttccactcaagaatcttcttttatctaccgaagattcttcttacaaagcccaaacccatgtctctctctcttttctctgcacctctctctctacctgtcaatctttctctttctcaaactcttaatctcatctgatctgagtactaaaatcttgtcctctcgtcctctcgtcctcaagttcgtctaaaatgataagtggaggtggtatttataggcttaggatcaagatcctaaagtcggtagctgcaagaaatgaggttgttaagttagttaggaataactaacttaaccaactcctctttgagcgaagtctccatgtcagcgtaagtaccagggcctccgagaacataaatgagcttctagactcgagggccacgaatccttgctgaagacgcttccaaataggataaagcctatagaagtcaactatctggatctgccattctagaagggataactagttagctggaactcctttctagggaagagctagctatcctaagaactggacctggagaggacgtgatagtcatccgggaactcccttttggacctgactatcattccacatagctgatcctttcgggattgataatagtgagtgaacagcttcccaaaaataaaatttgcggagacatatttatttggcgaaacaatagcacaaatttcacctatttacttcaaattaaaagaatgacgatgatgaagaaagaatgcagccattattggtttgtgttctaggaatctcagtatgctaacttctgagattgatcaagttcaagcaaggcttgaacttgtttaaggttaagaccttagtcccaacatctgcatgattatcttcagtactaaccttctccaaatcaaccaggccttcttctatcttctctctaatcaagtagaatgctatatctgtatgtttgctcttttcatgagaaaccggatttttacaaacactactacaaaaaacccctttagaggcagtttttaagcctttcagcgtcagttttggtgaaattcgctaccgacactggatccgggtaacactaaaggggtatgaaagaatcgtcgccatatggatcctatggcgtcggtcattatgaaataaccgacgccatggggaccctacggagtcggttttaataaaataaccgattccataggggtaaaaatctaaatttatttttgtattattaattaaattaaattaaagcataaataaaattaaattaaaaagttaaataaatacaaatttacattgctctaagtgtttgtatattaggtatttttttattaatattttatattttataatatgtgtttgtatttttctagtattttagtatcatttttataattttttaagttatgttttatataataattagtatattgaataataaaataatgtgtaatattttaatttttatgtaatttaatatttttatacatttaaattttataatatgggtttgtatttttctagtatattattattatttttataattttttaagttatgttttgtataataattagtttattgaataataaaataatgtgtaatattttaatttttatgtaatttaatatttttatacatttaaattttataatatgggtttgtatttttctagtatattattattatttttataattttttaagttatgttttgtataat

SEQ ID NO: 313756 - DNA, 998 bp, Cannabis indica
acctaagtgattgagtaatgctcaagctacgagcatatatgaacctgttgtaacagaaattagcgttgtttttttaagcgttacatgaaacttaatataggtcttattaaaattatttgtgatgctgcaatttttttatctcattttatttttaatttttttgtgacacgatctcgaaattaaatagttgattatttgatttgtttttctaattttaatcatgtcccgattgaattgcagactatattattactttaaaaaatatataaaatataaaacacacgttaaattaatgtcaggttaatattacgtacaatgcacgtatatttagttatattcttagtttttatttagattatgtatctatattttactaaaagagaaaaatttattaatcaaatcagagcaaatgctacacaaatcaacatccataaaaataacaaatgacaaacttacttatatgttagaaataaaatcaaaaatttgttggtcggtagagattatttatatttttagttgtataattgatttttattaatgttatttaataaataatattattgttttttcaaaaaaaaaatgtataatttaagtgatatatgtataaaaaaaatataataatattcattttttttgtttattataatttaagttcaaccataatattcttcatttttttaaaaaatatattatacacttttctttattttaaaataatgatagaaagatatttttttcggatatgtggattgattaaaaaataattatataaacagattttttttttttagatttttgtagtgggtttaaatttgaattataatgttttaaaaaagaatattttatgttatataatcacatttaatataacataggtatcattttcaataaaaaaaataatataacataggtatatcatatgagtagtgcactcttaatgggtattacccaaattggtggtattaagaaaatttgagtttttagacttaattttttct

SEQ ID NO: 313757 - DNA, 546 bp, Cannabis indica
tttgtaactctcatggtcgagtgactttgaactttcatgaccgagtgactttttcatgatggggccgagtgacattatcacttacgtggccgagtgactttttacactcttgtggtcaagagagatttgtaactgatgttggtcgagtgactctaagggttactctttggccgagtgactttcgaaagctaaagtgaaatcagttttattcaacatacactctacaaaaagtctgggtcttgatggatttggatatggttttttcaacagtctttgggcagagattggtgatgatttatctactgttgtgatggatttttttcaaataggtgtgcttccgagttctctaaatgaaactatcattttactaattcctaagattaataatccatcttctacagctgattatagaccaatcgcttgttgtaataccctttacaagtgtatctcaaaaatattgtgtgtcaggctttcagaagtgcttctaggcttaatttgttgggttttatgccctaaataaaactctttacaatctgattagttatc

SEQ ID NO: 313758 - DNA, 977 bp, Cannabis indica
tgttatttttatgttgttttttaattagttttaactttcactaactcaaaaagaaaaagaaaaaaaagttgaaagaataaaattgtaacaacaaattgtatgaaaaaaaataatgtaataatacaaaaagataaattaagttgtcaaaactaagtaaaaaaaaatttgcaatacaaaaatatattgaggaatttatattattttgctgattgtaattaagtcactgttttgttattttaattgttattttgtaatgatagttttattgttttcatgtttttaggattgtctttttagttatttttttttttattttactaaaacacagttttttttgtaattttaaaactttaaaaactatttttataaagttgttacaataaaaatgtaaaaaattctgtattctagtatttttataaattttctcccattttatagtatttttgtaagttctctttttataaatgctagtcccaaaaggccaagagaaaccctcttcatagcaggggagcaagatgaatttgaaactagtagagaaaatggtatgcgaatccaaaattggaactatgcttttatgcttagctagctcccttgtctagtttttgtgtttgtatttaacattgaatgataacaaatgtataatgctttcttttatatcatgcttatatagttccgttgtcttgctctttttcttttctttgagaaagcctaaactctttcttacgagtttatagcaagaactaaatgattcttcattttcaagttatgaactatagagttaactaagaggatagtgggagttataacaaattttaatacatgcttctaatttcttcacatgttaataaattctactataaactgtgaaattccgtattttaatattcccagtttgattatttaattaaatgattaattaaatgcggaataataaaactggtactgaaaacagtttctgtagttacagaatgcaactc

SEQ ID NO: 313759 - DNA, 1332 bp, Cannabis indica
catgggatagaaacacttcattttttttttgaaatggaaaggttattttattcaacttaaactttcatccattacaatagaaatcaattcagaaggagcattaagctcattaaaagtacaatctgacataaaataggattgtctagcaacccaatgggcagccctatttgcagatcgcttaacataagaaattaagacattgtttaaagaagagaccatcatatgacaatcatgcaccaaggggttcccagttttgtgtgcatgggtgaggactcacacactggaccaccacacacacgcgcaccgccgccgtccgtccgaccgggtctggccgcgcttaattttttaaagaaaaattatttaattaaataaaggtttattaaataaaggtttatttttttatttatttattaattaattttaacacgtgatcagaagtagtaataaaacgcgatcagtcaatgatccgctttttactcccatgatccaactcctccacgaacgataacattaccgttttcttaccatttttttttggatcgacctctatataagttgtatcagaataacgaaagaatacatcttttccaacattaaaaaaaaaaatcttttcatcttccttacgatttttttagcaaattttagggtataacagagcgatatagttcggtgtagaacatatcgtaagtatacagaggctgttttatcctggggacgccgtggttgttagactgctatgcacacttcgggcagagccgcgaaacatcttaaagagagcgacattgtccgcgactcagccagattattctatcgataattcgttccaatttcattgtttttaaatttcagtttaacagtctgtgtatggaatatatcttccaaataacttgttttaatcgggaagtacactcctagataatttactatcagtcttaaaggttcattccgaactgaagtcttgtatctggaaggcttgttgccaaacataacaagtgagtatgccttaaaatattgtcctttgtgccatattgtataaagtcagtgataatgctttatgtacttgagatgccctctaaattgcaaatttccaacacattaaatgttgctgatttgttcacttatcactctcctaattaaaacccctcaactacatatgataagcttggagtcaagtttcgtgacagcgggggaaggctaatgcagtgcactagccctggacctctgttctcctatactaattttagcaacttaggtgccgtttggtaatatttttgtttttaatttttaatccacaaaatgaaagtaaaaattttgtttttaaaaaatttattt

SEQ ID NO: 313760 - DNA, 2480 bp, Cannabis indica
actaagttggtgactgctcaagcaaagcaagctcaaattatctgtgagctatgtggaagacctcatacttatgatacttgctcggtagatgtagacagtttgccaatgaagcaagcccaaactatcagaacaataattatggtttcaaccaagaggtcgccgacagaactttcaaaagcagtttccaaatcagcaacaacaagggttctacccacagagaaatcagtctcaacaaagtcaacagaatcaacaaacaaggctctagtggagggtctaattcttagatagatatgttaatgcaattcatggcagagattaaatctttcattaaggtcttggaaactccgatggggcaatgggctacacaaaatactaacatgactcaaggtaacttgcctagcactaatgaagtcaatctaaaagagaaatgtaaggcaatcaccttcagaagtggtaagaactatgtcgggccaagccaagacaagtcaaaggatgaagataatgatcaataagaaccagctccaacacaagagaagaagaagaccattgatgatcttcaacaaaaaggaacttcacctcctattagtattgatcatcacataaaaattccctatcctcggaggttggacaagaataacatgataagcggttttgcgaatttcttgaagtatttaaaaagctgcatgtcaacattccttttgtggaggccctagaaaaaatgccaagctacgtcaaattcatgaaggagattctatccaagaaaataaagatggaagaatttgagacagtagctctaacaaaggagtatagtgcaattattcataagaagctccttcctaaattgaaagatctttggagttttaccgtaccttgatctattgggaggcttgagaatatccatgcattgtgtgatctgggggctagcatcacccttatgcccttgtcagtattttagaggctacaactcggagaggcacaaccaacaattgtaacactatagctagttgatcgttccttagcccatccaagaggagtaatcaaagatgtccttgttaaggtgggaaaatttatatttcctactgattttatagtccttgacatggaaaaagatagcaatgttcgtatcatctagagaagacccttcttggcaacagataaagcactaattgatgttcaaaagggagagttaaagcttagagttcaaggagatgatatagtatttaacgtactcaaggcgatgacttatcttgaagctagtgataatttttttttcaattgatgaggtggacaagttggtacagtcgaaggaacacattaaagaccctcttaatctagctttggtgcaagaggagatggttgaaaaagatggtaaataagtgatggagtatgctatgtggcttgacttttatgggctattacatagaaaatattatgaagagttaggagtcattccaacgaatttagttctatctatcgagaagccaccgaaaatggaattaaaagttttgctagatcacttaaggtatgagtatttgggagaaaataagacacttcctgtcattgtgtcggattccctttctactatggagacagaaaagttgttgagagttctaaggaaacacatgagagccattgggtggacattggcagatatcaaggggatcagcccctcaactgtgatgcatagaatcttgatggaggaaggagcaaagccaaccattgatgctcaaggaagattgaatccactggtgaaggagattttcagaaaagaagttctaaagtgttagatgttggcgtggcctattctattttagatagtaaatgggtgagtactttcaaagtggtgccgaagaaaggaggaatgacgagggagaagaatgagaaaaatgagttaattccaagcagaactgtcacggggtggagaatttgtatagactatcgaaaactcagcaaagtgaccaaaaaagatcactttccttttccattcattgaccagatgcttgacaagttggcagaccaagagtactattgttttcgtgatgggtactcaggttatcaacaaatagccattgcactacaagaccaagagaagacgacattcagatgtccatatggcacttttacttttcggagaatgccatttgggttgtataatgctctagcaacattccaaaggtgtatgatggtgatattttaagatcaaattaagaagtgcattgaggtgttcatggatgactttttgatattttggttcatcttttgatcaatgtctaagcaacttagaattgctattaatgagatgtgaagattataatttggtgctcaactaggaaactgtcacttcatggtaaaagaggggatagtgttgagactcaaaatttccaaaagcagtattgaggtggataaagccaaggtattgacgattgacaacttacccctttcggtgtcaattaagggagttcgaagcttcttggggcatg

SEQ ID NO: 313761 - DNA, 736 bp, Cannabis indica
tcttttctttaatttttaatttttttctttatttttattaaaatattaaaatgagaaagagttatatatataaattcttttagagtaatagttagacaacttagttggtattaggtagtaattaagcaatcggcttcaacaatattttctaaagaggaaaataaatttgttcataatcaatattttgagcaatttaaccttaatttgtaattttttttatttaatttctttgatcaatctttaattatgtataagtcattgtaatcaaatttaatgattgtaaattaatattaaatatcatatatttagatttaatttaaaattataatacaaataatactccataaagtctgcaataataatatttataaaaaatttgttataaaaatggttataattttttgaaaaataatgttaagaaatagagaatctgatttgttattaacaaagaaaaatctccgattagtaatttttataaaatttaaagttcaaaatagtatttatttctaaaaaataattttctcattaaaatgttaaatgattttatccataaatacgtgacctaatttatcatttagttactttcacataaaaaaattaatcaactattattaaaatatgaaacttacacaaaatatctaaaattacactttatatatgtatatagggacatgattttgtcccgtgattgtactttcacggaatgtattccgtgatgtacgacaaccgttagatg

SEQ ID NO: 313762 - DNA, 2029 bp, Cannabis indica
tagaggagagggagcgagagagagcagagagatggtggtggcggctcgtggtcgaggagagagagccggggaggacaatgatggtgggttgtgttcgtggagagagaatggaggagagggaggtggtggcggcttgtggttgaggagagaatagatcgagagagtgaatttgaaaaatgagatatgattgttttgagagggtttatcttaagaggcgtgaaatgaaatactataaaaattgggttttttaaaattggtgtgaggagggattttaattaatactgtcggccaaggtatacctaatggttttaaaccgtcggttaaagtatacccgacgattttaaacgatcaagataccccgttttaaaaattcgagcttatttttttgtgactacattaaacagtctaggatttttcatgactatttaaaattgtcgggaataattcactattatagcctgtggttttacacagtcacgtaactttgttagcgacgattctcgaaaaaaatcgatttaaaaactgacataaataagtctttttgtagttgtgagtgcatgcataaggattttatatagtagaattttattgtgtaaatgggcctgaaatgtggccttttttatatacaaaaatgagtatgtttgtgtcagttggacactgacacaacttagcgtcagttcacaatcaacgaaaaatgtctttacaaccgacacaaaattgtgtcagtctataattgatacaaaattaaaccacaaattaatcacgtcagttatgaaattttagcaacatcataacgacataaaatgtcatatttgtagtagtaaatctctttctagtttcaatatattttattttgcatatgcatatgagattgttatgcctcttagagtttttcaaagctaatttaaagctactgaatcaatactaacttatattacctagaagattagttattaaatcgatgaaagaaacttatgttgattaattaattagttattaatttatagggtgtactggtgccaaattagtttgttaaaaataataattaataagtcatcctacacatgatcactactcttagtaaactatagtattatatataaatatcatttaccaacatttggttaatcatataatttggccatttttcttatctttcatatattttctcaatcattataatgtcctctcaaatcttagcaacctcatccaaaaatgacaatatacataaaattgttcggccaacaacaaattatcatccttctatttggggagaccgatttttgcattacgatattccaaaagaagaattggtacgtaagtattaattatttggtgaacgttatttttcaacactgtaaagtattcagatttttcaaaaacgaacagaaaatatattattaactatacatcctcatataaaaaaattggaatatctcatttcttaaaatttaacaaataagaggagacttgttatagtaaaaacaaaaatgatactctcacttaacaaccttcctatatataatattatagctagatattattattattatattacaattatatttataaatatcattaattacttgcatgcatatctcagaattataaacaaggccaagttgaagaattgaaagaagtggtaagaaaggagatatttggagaattattatgtgatgattggaataatcgattgaagttaattgatgtggtagaacgtttgggattgtcctatcattttgagagtgaaatacaaaatgagcttcaacacatttacaacattaatgataataatttcaaacatgaaactttgcatgatgcttctattcggtttagacttctacgacaacatggatatagggtttctttaggtaagtgtatatacaaaatttatttatttatttatattaagcaataatattttcacattttaaatattaaaacttttcaatataatttgactaattgctatgtatgatatagaatttattaatttaggtatcttttggtaacactttgttttttaatt

SEQ ID NO: 313763 - DNA, 2002 bp, Cannabis indica
aattatattgaaatatgtttatctatagaattgaattttgttgttgcatattttatgagtgatatagaaactaacagtatatccgatccgcacctatacagatagtgaccatgtccactctgatacggttcaagattgatgagcaaaaaatagccatcatcttgagggggaatattgtggacaatgtcccacatggaataaatggtagagaattgagccatatataagaacatgggctactccactcattgccaattggttttgagatggaaccccatgattctcaacatcttcgcgtctctcatttctttttgtaaaaaatatatatgtatataagtaatctattaataatagttacaatcttgaagaagattctaagttcaaatctatctcttctcgtataaaaaagaaaagattatacttatatagtgtagattttttaaaaaaaatatatgaaacacattgagttgtcaaaatatatttaaatgtcttgatttaattttatatggctgattttaatttattgtattgttctcaaaggaaacattcattttatgaaataatggatataaattatagtttaaatgtcattaacctctccttgctacttgatttaagttttagctatatacatagctcttttttatggcaggtatcatagctgatttcatgagtatttactttaaatggaaacaatgtaagattctaattgacttgccacatcagattgtgaatctgcatcgtagactaatcatcatttaagtctaagaatattttctttttggaaagtttttatgctgctgtaaaaatgtatacaagcttttttcaggatttttataatgtaaaaatagaattagagagcaaattttttctttagctcgtctattatctattttcatatcttagttttgtaacaatagtgattcttatgttaaagcctagagagttttgctaggtttttgtgtctttgttattgttctcttgttgttcataaaataggtttaagagaagctttgaacaagcgtgggtctttgagataatacctttctaagtctcatttcgagaagaagtgagcacatatatctttaggagaagaataatcaaagtctcatttcagaaggaaagcgagcacacgtcaagggctgaagggatgtgtttcagaaatcacattagcaaggatggattacaaaaggttgtgacaaaaggtatagagggattcaaactttgtataagtcaattgcatttgtaatctttgatactttactaattgattttatttttgggcatgactccatgaactaatagtatttgaaagaatactgataccacgtataattctcttgtgtgaatttttactttctataatcgtttgttgctgcaagtactatttctatgtgagcaagtaaccaacttactacaagtttttaaagtaaggttttaataatcgttattgtatagaaaaatttatttttgtaaaacactgaatttcactttaattctacactctcctaaatacaaaactgtatcacaaacacaaatgtgtattgtatattttttaattttttcattaaattgatcatggcctctaagcagtgtcacatactcaagatttaataagttgagggggcactactacaaaaaaccactattcatgtcgatcctcaaaacatattttttttaagacaatcgctaataaaattaagtgaatgtttaaaaacgtctgctatattagactattctcaatggtttcaaacactcatgtacttttcctgacagtttaaaagggttacaagccaaaaaaaacgggattttaaagggcaccctgacaatttaaaatcgtcaaggattcccccattaatataaaaccccaatctttgtgtgcttagatttcatttatatatttttcttcaaggtattgacacatttagattgaatatgatcatacccttcacactctctgcattgaataccttttttattgttagtgacaaaaggtttagaa

SEQ ID NO: 313764 - DNA, 1100 bp, Cannabis indica
gcacggttctcggtcctcgcaattagaattcgagtcgtccccttttcgcctccgggagaccctggcaatgtctttgcgtagtattgctaactcaaccagaattccttcatttagcatgcccgcggaagccgctagtgcatgtttctttttgtctggatggtctcgtaagtcaccatgtttttcgttgattttttgtcttaggtcaactggagggtacctccaatttttcctccctctcttcccgggttcctggtgcatgggtacgcttttttaatcatctcggtcctgagggccaagtctcactcgagggagcttgcccctctacagacctttcccttttgggaaatccaagcggacttttctcggatcttgtacctttttctctttcttggggattgaagtttgatttttcctagggttttcctcggaagggtactgtataaggcttggtgccctggtcttggtttctaagtactcggtgaggaatctttcggtgtttcctcaggtcctgttgggatggccttgggatgtatgtgtatccctgcagtttccatggctttttgcatggcaaccatcacctcttgcattcttctattttgttctttttgagctaccagctcagcttcatgatcagctgccttttgcctcgagaccagtagttccgtatagctaccttcatcgtaagtgttgtacctttcgaagttttctttgaattcttcatcgtctgcctcatctcgctcctcagaccctacattcactcttgaggttacttcttcgccttctgggttttgagcatcctgaggaggacagggctgacgtttatgttacgagtttccaccattgttaatctgacttttcctttgactattgtctatctgacgacgcttccttcagttctcaatgaaagcaccaaaatattgaccgaggttttcagcaactaattaagtagtagaatgagaagagccgtcgaaagtttaacgcaggtgatttttacgtggttaggatattaatgagccttactccacgagtctttgtattgatgagagtatttttacagtagaatgttcttggtgaatttctctctctcttctttactcccc

SEQ ID NO: 313765 - DNA, 1564 bp, Cannabis indica
acttggcatctcaactaggctattaaaaccactgatattaagatgtctcaaattaatgagatgatgcatatctttgggcaaagctttaagacggtgacgattttctaattttagtgtttttaaattgtataatacaattaaacattcaggcaacgtcacaatttcagtctcagaaagatctaaataacaaagatgttttaggtcaccaattgagttagaaaactcagtgatttgaagaccacgaaaagataaaactctcaaacatttcaacatagataatagattctgcactacttcattagaattactagttttagaatattttgaacctgataatgttaaaaaagttcgcaaacgcgtagcttcaaaatcatagttagataccttgttattagtagaatgttcaattacacatccgatgtgacgtgtcttcttctcaaacttaacaatgtcctcattgtgcactaataaagagttatactttccagaaacaattttagccaaatccacaagaagatcatgcatcacaaaacaagatatacctctccaatccatagattttatgaaaaatgacattgacactaaatcatcaaaatactcaccgccaacttcttccattcttctactcccctcggagtgcatgacaagattttctgccatccataataagaccaactcttgtctttgaaattgatagcctttggggaatattgaacaaaaagcgaaacaccctttcaagtgtacaggaagattgtagtagctcatttctaaagcagctggaacagtcttgctcctttcatgtgtcaactcccaaatattattccttgctatttgttcccatctccatacatctaatgttgatctcaagatgcctcctagaactttagtagctaaaggcatgccattacattttttagtgatttctctgccgatagtttctaattttggattctcaataaacattctagagtcgccactagaagcatgcttcataaatatagcccaacagtcgtcgtttgataatggtttaagatggtttatatcaacagttcgaatgttatctacaactttttgatttcttgttgttaatactattttgctgcctcttgccccaccattgaaaggcttcatcaattctgtccactgaacataatcatcttcccaaacatcatctaaaacaattaaaaaccttctttcccattaacttatttgacaaattaacttgaagtaaattcaaattcatgtcattgcaagcatcacacggggctaattcttgaaggagagttttggtcacagttgtggaatcaaatttatctgaaacatacacccaggctctagattcaaacttcttcttcactctttcatcattgaaaatgttgagaatcatggggttccaactcaaaaccaattggcaatgagtggagtagcgtagcccatgttcttatatatgactcaattctctaccatttattccatgtgggacattgtccacaatattcccctcaagatgatgctatttttgctcatcaatcttgaaccgtatcatatggctctgataccatgt

SEQ ID NO: 313766 - DNA, 2753 bp, Cannabis indica
ctaacatccatatattacattgcctaataaggcaactcgatgccctaacctggtatcgatctatttctgtgatcgtctaataagacaatcaacaagtaggaaacctaaaaaaaatttcacttgacgtcgtgatttcaatcactgaacggaaatcactgttccattgccttgatcataattgagtcataacgataataatcgtaacttgacatgctatgtggtacaaatatatttttcttacctttaatccaaattcatgcatgtcagccaacccaagtggagaaacacccaacaatcctgaccctatgtcacaacaacaataaattagttagtgtttattctattacactccataatactcgcataaaataatctagggtattctaccaaacctcgtggtaagaaaaccctaaaataaaatacatatttcagctctaatttatgcttcacactgtagagctcttcacaagcttcaaaacggtacatagaacgctaaaatagacacctgagtgaaaagttatgaccaaaatacaaaaatcgatatttcttgattactgccaaacgaaattttggttggtacagggctgtaccatctggaattctagtttataaccgcagggactcaaaaatttcaagttttcaaagtctcaaaacttaaccaattttttctaaacttcacagaacagttctatgacatcaatataacattttctacatgatagaaatcaaaatcatccttaaacacaaaagttgccatgagagctcaagctttgagcttaaaaactaaaacttggctatcacctctctacaacattaaaaccttcaaaggagcctcgaaaccagtcccaaaacttcccagaaacaaaaccaaatgctaatccatatcccagtaataatagaaccgaaattcaaccttagaacctaagctttccaagaaagaaaatgaactaaactcttacctcaagctttctcttcaagtggcttatctctagttgctactaatgggttgagggatagatttggatagaggagaatcaaagaaattggtcccttcttgcttggttttggctagctcgagagaagagtgagaaaaagagtgatcagggtttatttttctttctcttgattaatacttatcttatatatatcatcaacttttaaaaaaattaataataataataataataataataataataataataataataataataataaaagaatttaacaaaagatattttaccatttttagctactaagaaatttctgtccctagggtatttggtcaaccccgagtaccctgaaataccccgttaatccaaaaccaacttacctcaataacaattaaaactgccaacaaaacctgttgtgacattattggcctccaatcgggtctccaaagtcgccaaacttgaaaaatattttaattacacaaataactcacattatacccacatattctaaataaatctctataattaataaattacacttatttatccacttatgacaaaattcataattcacgctgaattagactagtagcatcataatcccattcatactctctaattatccataatatataataaaccctaattttttataattaagtttttgagatattacatatttactcctatttatttatcttgatagatttatttttacctttcaaagaaaaaaaatagttttcgagtgatttaattttacagtatatcattagtcacgagtagaattgtaaatacagattgagctttttgacacaacataaattggcataaatttggaaggtatgaatgcgatgcaacatgaaaaaatatatattttgacatgatattaagaattgacaggatacgacacgaaaatatgaatttaagtacaacacggcacgataagcccgaaagcataacaagtaagcatgaatacactaacccgaaagcatggcccatgaaaaaatctgataattataaatattttttattaattataaatcaattaaattgatagtaaatatatagattaataagtataattatttttttatacgattataattatggttgaaaatttgtataaaataattaaaattatttatgaaataaagatacatatagtttagtaattcgcttattaaatataataaaaatatagaatacgaattctagcccgtataaaaaatgaatcggtgtgtttaagaaaaatgataaaactgtgtcgggccagccaactataaattgttgcgacatatatttttttattatctgatacaacatgatacatatttttatgaatttttcaaaatgcaagttggatcagaccgacatgcacttagagtagctccaaggagattgcaattaggtggtttgaagttggatttgtctccaaggagatttcaattacctcatcaaatatgttgtgtgactacagtgcacagcacgacatacatgccgtggcactgtagcaacgacattcatttttctaatatgtttaaatgtaaaacatgttgttttaatataccacccaattagaaatagtatatatatatatacttttaataattttttcctcctagaaatatccttccatttcaaaaaaaacttctctctctaactatcttactctatagcactaaccccgacccagaacccctaccgtcgaacacacagacccagaacccccgtcgtaaggcctcgccgtcatcttctctcacggcctctctcattttttgcgtttctttcttctagttt

SEQ ID NO: 313767 - DNA, 3483 bp, Cannabis indica
ggaacacaaacctgagctttataaactagcattccattattcaagatcaagaagtccttaggctgaccaaccaatacatcatcccaaattttaactagcacagcgtctttcaattgtgtctttctgatcatttccaacaaatcttactgaagtgtcaggttatgtaacttcccaaccacaaatttaatttcagctttaaccatttctgaggctaactggggaactaacattatagtattaaagacctacctgggatattttctactcaaagcgtctgccactacagtagctttcctgggatggtacaagatctcataatcataatccttgactattttcaaccaccatccctgcctcatatttaaatccttctgagtgaagaaatacttaaggctattgtggtctgtgtagatctcacattcctctccatacaggtagtgttgccatatcttttgagcaaatacaacagcatcaagctctaaatcatgtgttggataacgttgttcatattccttcaactgttgagaagcatatgctataaccatgtcagcttgcattagaacacattctagaccctatctgtatgcatcatagtagacgataaacttttcttggtctgatggcaaagctaataccggtgttgtgattagccgctacttcaactcttaaaaacttgtttcacacttgtcggaccatacaaaccgttagtttttcttagttaactttgttaatggcattaaaatcttagaaaaaaattcgaaaaaatgccaataataccttgtcaacctgagaaaacttcgtacttcaataaccgtttttggcatcggctaacttttaactgactcgatttttcccagatcgaccataattccatcttttatgacaatattccctagaaaggacacttctgacaatcagaattcacatttttcaaacttttcatatagcttgtgatccctaagtcgttgaaaaaccattcagagatgttgttcatgatcctcttctgtctgagagtacagaaggatgtcgtcgatgaacactatgatatagttatcgaggaagtccttgaacactctgttcataagatccataaaggtcactagagcatttttcaacctgaatgatatcaccaaaaactcataatgaccatatctggtccaaaatgcagtttttgaaatatcttcctctcgaattctcagctgatgataacaagaatgtaagtcaatctttgagattacagtcttgccctggagctaatcaaataaatcaccaattgtgggtaatggatacttgttcttgattgtaagtttgtttaattcttggtaatcaatgcatattcggagggatatatccttctttttcacaaacaaaattagagctccctagggcgatacactgggtcgagtaaaccctaaatctggcatcccctaaagttgtatttttggctctttaagttctcctagagccattctgtatggtgccttcgaaataggttttaccccaagtttcagatcaattacaaaatctatctcccgctgtggtagcaatcctggtaactctttaggaaatacattaagaaattcttttataactctaacctcctcaagcccaaatgtttcaggtttgctaaaatcaattacaaccgctaaaagtcctacacatccactgtgcaataaatctttggcctttaaaactggaataatcgggatttgagaaccttggacaaatcctacataaataaatggatcttcaccctcaggttaaaaagttaccattttctgcttggagtcaatactggctgaatacttcgacagaaaatccatcccaagtatgatataaaactctgttagttccagctctactaagtcaacactcaactccttattttccaccctaactggcataggcctaattcgccttttggagataaccaattccccgctaggcagtaggcttctaaaccctatttcaatgaaatcacaaagcctacccaattgattagttactcttgacgccacaaatgagtgtgtagccccagagtcaaatagtacagtaaattaggagttgttgacaagaagctgacctgtcaccacagaagggctggctacaacatcaacttgagtgatagcaaacacccgagcagatgtgggttttgcctctatgttctactcttctttctttgtttgagggcggtactttttaaaatacccaaccatgccacactgaaatcatatcttctaattgcaatctctgagatggtgtttcttacaatatgggcactcagggtaagaataaccctggcgtccacctctgccttggttccctcagaatcttttgttctgtcctgaaccactagatgttggggtagtctttcttttttaatcagcagtggaatcaccaccatccctaccatatcaagaagtaggaaaagtggtagtcccacctacacttggagtcattcagggctccaaaaggaatttcactgctccctcagctcaaagagctttttccaccatcttatcataagtcattgtatcattcgtaataattaccagatcatgtttaatttttgcatttaaactcgctagatacttttctttcttattgaagtccgtaggtactatacccaaagccaacttggttgaacagtcaaacttcattgtatatttttttactgacatgccttctccctaaaccaaattagtgaattctttctgcttagcactacggactgtctcgttataatacttagcattgaacaattcccaaaactcttcctaggtcatggtaatgacgtcttgggtgagggacactaactcccaccacacgagcgcatcttcctggaactggaaagtggtgcaagtcacttaatcattttcgatgactcccatgaaatttaagattctttctataacagtgagccactgctctgctttcataacatctgggcctcccaaaaaggctggatctacttgtttgcaaaatctctcatatagtggttccatacggttgctagcaataggttgttctgctggcaccactggaaccatagcggtcagcgcttgttgcggaggcactgtaggaggatcttgctgtctcagcgtctaaatttcttcgtcttgttggaagattcaggcttgaatttctgcaaacttttgttcctaatccggaggagctttaggtggattttcatgtctaccaccctcaaaccttctatggcctttgtcgcgtccacgtggatttaggggattttgacctccccgaccgccttcgttatcaaccatgttaccctaactccttgtattttgtggggcatccatttaataggacttagcctacgaacttataagtaaggtaggtcagacaacgatcacatatactctatgtactgcactttatggattttaaggcaatggatttaaataattataaactattatgctccctaacatactttttttaatcacataaattactaaacaa

SEQ ID NO: 313768 - DNA, 920 bp, Cannabis indica
tatacattaaacataatcatgaaataaatattctgaaccatgcaacataaaatgcagtttctaatctttattaattagtaaatctgaatatattgaaatgtgttttatttagggcacaaaacccaatgggaagacccaccattggcccttcccaatgaaggaatgattcatgggcgatagcccccaagaacaacaatcacatctcgtctctaatattatgctggatagacatgaccaggagttggcaagcctgcaatcggcgaaccccatgtggacttgggagaagatttcgagttagccagactcagagaagctataggcaaagccagcctaagtgaagaacgatgtattgctgattggaatgtattcgttcagtacggacaaaaattcttgagatggatggatgaccaggagtacatccttcaatctcatcaagcagagttggatcgccacaatagagaggccacactgatggaagaggccagaatctcatcagagatttacttcaaggaagactcgtggatagatcaaggagggtctatcgagaagatgaccaacctagttcctcagggactaggacagatcttcccttgctagagggaggacagaccttgcctcaaaggtctaatagtgacaacagctagatttcggtaatcagcaacatgggggctcggctaaggatctctggctcaacagcatccccaaccatgtagcctttagctgaccagccatctgtaggagactccttggccgacttgaggacagcactccctcgtcgagggaagcaaggcaccttaaaggtcattcttcaaccgacaaggaccaggagttggtggaaacacccaaaatggtgatatgagaagtgaaatttatcactttagacacctagatccaccaaactccagcaactggtgtgatct

SEQ ID NO: 313769 - DNA, 750 bp, Cannabis indica
aaaaattacccataaataaatactaataatagaatgtacttatttgatactttatattttactaaaatatactattcactatgattttaaaaaaacttttttttaaaaaaaaaagtggagaacaaaaagataaattaatttttcatgtttgatatgtaaaattctgttaaataatatttattttaattaattatactgtatacataggcaaaaccaataaatattatctagaattgtctccaaaaccaaatgttacttcttactatttttctttaaatttatatacataaattatagtaattatcaagtacttttataatttaaaaattagtataaaatatatttttttcttgcaaaaaatagtataaaataaaattttattaaaaatataagctgcaaaactatttgaattatacaatttgtgacacttaacactgttttaatatttactattttgttattctttttttttttttgttacatggatggatggctgatagcctaataagtatacgtgtgtacccatatcaaattttcgttggtccacatcagtttaataatttaaaattgtgacagtcagtagtctgtgatctttaaggaaaaacaccgggtaagctgtgcaataccacatcgcctggagaaagtcaagtgtgatgattctgagactgtgtaggtatgaaactacatagttgaagatagcttaaattgattgattggtactacctatatcaacaaggtgcatcttgtttt

SEQ ID NO: 313770 - DNA, 654 bp, Cannabis indica
aaaaggttatgtcaaagtgggaatgctcttagtctattcatcaattatttgggaattggaatatggatgacaatcccaccaccttgtatggaattacgatttccattcttaatatgtgtatgtacttaaattataaacattacacactcataatctcttatcaaaaatatttgagtgcatattcaacatgttattttatatataattagagctcacaatttgtgtatttgtgtcttgtgaattttattatgcttatatgaacacaacacgattatataatacttcataaaaggtaaacaaaacatgatacataggactatgtttatttagttattcacaatttagtaacaagaattaaaaagatgggtttttttggatgattagaataaaatagcaataataaaaagtaaaagaaaacaggtttaaagatagactacgatatgagaatttagttaaaggttattttcctcccttaataattattcctaatttttattaaagattgtaattttcagtttccaattaaactattaatctcgcaaataacgctaaagcagtcaattattctaatctccctattgtatgtaatcaaggcgaagcgctcaataatttgttagtttctttcttgaatgttaatttctagtttccataata

SEQ ID NO: 313771 - DNA, 908 bp, Cannabis indica
aatatgcttataattaaagacttgtcataatcgaaattgagggaagctaaaagatgaaaaaaatgaatatatagtgcccacagtttttatttgcttcagcgttattcaatataagtttgattcttattacactcgtaataagtgtccaatgaaaattttgttccatcttccaaaaatatattaatcctatatatgctaagtatatatatgtgtattgtaaagtatatatatatttaaaatcatactttattatttaacttttaaattcagccatcaaagaaaaggaagaaatttagttgaaacattctcaaactaaacttacaatcaaatataaaatagaaactttagcaaattcatgagcactcacattaatttattgtttaataaaacaaagcgagacatttctcaaaaccccaagcatagtctttcatttgaattataatagcaaacaaagatatcatactcacagaatttctaataacttgcagtcttgcactaccattaaacaatcggtctctactattgttggtctttatagttgacttttcaactaactcaacacttctcggaccccccacgacttcaggtaagtataggttccacaccatacaatagtaaaaagcttagtacactattctgctaataggcctttaaaatctcgggaaacaattccccaaaccatattaccttccttacttcaaacaatattgtatttgttagggtttatgccctcaaaagagtataaagacatttttgattatttatatggagttgaatatttttgatatatgcataaatgctaaattattaatgattaatattgaataatttatatataaatatcaaaaaaaatttaatacatatatgaggttgtgacctgtaagctgtacaaagaattaagatcactt

SEQ ID NO: 313772 - DNA, 2048 bp, Cannabis indica
aatcagtgtaagttattcttaacttttatgtgtttagttcatcgttttagaagttcaatattaggttgttaaatcaacatacttgtgagtagatctaagatcctggataaatataataccaacagaaagacctcaaggttcgagaactaggagcaggagacaactcaggaaaatccccaaaacactcaagaggaacaacctagagaaactggggatgttctagaagatgaacaagaaaagaatctggcaccttgacaagaggtacctcggagaccccagggattcacaaccaggggaatgaaaacaatgaactgccagaatcttctcaaaggaatgagaactaatgcagcccaaaattagggaataggagatcccttgtaataatgagagaaatcctaggacacaacctaggacaagtgggttactctcgaggcacccctagcgtccttctcgaattggaagggaggaggcatacacataccctagcggaggatgtatatctaacccttcccaaaaggagaaggcctatgtaggacgaggaaagttctagcttgggatgctcaagatcacgagatcacaatcgatctacgcaaggaggggataaacgtcgacgtagtgatgatccagaaagtatgagtaatacgtggagcagtcaatccgagagttactcagatacgaggtcgatgagcaaccctgaacgaagatagcgaggtcttcgtgaatgtttaaatcggaaagaacctgatttgcgcgagcgcttaaatcataatgcacttgatttacgccaataactcaatgccaatcgaaagcaagaggatcgaaaccaattactaatcagtgagttggaaaataaattcaagagatagcaagatgcgcaatatgggaaactgcctggttatgaatcagatgaagagctcgagcctttccatccattcattatgaattcaaaattttcccaaggattaaaaacctcaagtcccactgtacgatgggacttcagacccggtcgctcacctcaataattcaatactataatgcgagacaacaatgtatcgaataatttatgttgtattttatttcgcacctcattgacttgagctgcgagtagctggttcaatatattcacccatcactcaattacttcttgggaatagctgtctaaggatttcaagaaactatttcgggtagcaagagacatgtgacctgaagcgtcttcccttactaatgtaaatcaacagctaggcaagtcacttcaggcctacttaagtcatttcagtacaactgctgctagagttaaaaacttgaataatagtattcagcttactgctcttcaagtagggattacaactgacctctcaacacttggggtgagatgtgggatgacttacagggtcgccctgtgaaaaacattagtgagttcaatgaaagaggtcaagtgtttgtacggaaagaggaagtgaggaacgagatgaaatcatcaaatactagcttgggaaataaaccagcactgtctcagcaagcaccatctcgacaaaggatgacaatccaagtggctctaacactaagagaaaagatgactctagagaatcaactaaagataagaaaaaataaaagaagcacaataagtatgtgccaatttatactatttataacgagcttaatgaaaattgggaaagcattttccttgcaaatgagcacattgttgcattttgcaagcctgagcccatgagatatgcgagacactagaggaacgcaacgaaattcggtagatttcacaaggacatagggcatacaacgaaagaatgtagtcagttgaaagatgagatagagagccttatctcacgggataatttttaacagtatgtaaggcgacaaggtaatggacaaaacaagccaaatatgcccaataacccacaacctcctcctgtagaagaagaggaaattttggtcatctcgggagggtcgcatcttgctggacaaagcagtaatgcccaaaaaagatatgtcaaggaaataaaaaatgagcagtcagtttttgctccagaatc

SEQ ID NO: 313773 - DNA, 564 bp, Cannabis indica
aaataatttccaacagatgatcctccaagacattctgaaaaattataaaaggaaaaatgtctcatcaagatgcactatcaaaattgacataagcaaagcttatgcactgtcagttgtgattttttggaggattttcttgctgcttataattttcctcagaagtttattcagtgaattatggtgtgtctatgagcaactttttactcgatagttatgaatggaagagtgcagattgttgcccttgtggtgctagcatcatctaaaaagtctgcggcttctgtgacatttgttgcgtcggcatcacttgtggcatttgagaccgtgagacttgagacgtttgaggtgactgtgtcatcatctgcgtcattagtggtgggctatttggcgatgatgactgtgatatcatttgcatgaatgtttgaaacatatgaaattgttgaaattgatgagccatttgttcagggagttgttgaggctgctgtaacggcagctataatggttgttgtaacaactgctgaaatgaaagtggagcccgctgcgactgttgatgctgaaaacccattg

SEQ ID NO: 313774 - DNA, 1084 bp, Cannabis indica
tttgaggttccttggttcagatggtagtaaggcttggggaagtgggtgtttagtggccaagtaagactttggtttgaaaatgccactttgggatcgggtttgcattggatgtgttctggtagagagaatctgaggaaaatcttctaaaaccggtggggcaatctgtgatggatcaacaagtggagaactgggtacaacaatagatggaggtgtagttgtgtttgtgggttgtaagagggtaggatatattgttggtgggatattaatgggggaattatgtgatggtgctgcagtggtagttgctggtgtgggaagtggagatgatgaatgatgaataggctcaagtggagatgcagaaagtggtggggcatggtcaggtataaggctcgggtgagatgtagttgtctcagtatcattgtggacaaaaccagtaggacatgtagtagtagtattaggattagggaagtcattataagtggtaaatgtggcagtaggagcagtaatgggatagttaagtacctgttgggaagatgtagatgataaagcacctgggtaatgagcctcattaaatacaacatttcttgctatataaatcattccttgagcattttcacataaatagcctttatggtaggaagagtagccaaggaataaacattgctcagacctgaattgcatcttgtgagagtgataaggcctaagatgtggaaagcaagcgcacccaaatggtctcattattgtgtaatcaggtggggaggcaaatagacattcaaaagggctgatgttgcctaaaatagcagtagggagcctgttgatagtgaaagttgcatattggaatgcatgccaccagtaagagaaatcaagattgctttgtgctagtagagtgaggctgatttccacaatgtgtctatgttttcgttcagccctaccatgttgctcatgtgtatgtgtgttgcgatattttgcacacgcaagtgtacgtatcgtttcaagtagtaaaactcacgaggagtgaggtcgatcccacagggagtgtagttaagtacgttaaaattaaacttttacttctatttgattaaataaa

SEQ ID NO: 313775 - DNA, 1556 bp, Cannabis indica
attttgaattcttactggtagtcatgatataatcatatcataaattagctattttggactattaatttaattaatataaaatgcgagattttttaagtaaaatatatttattttcgttagacatgtgatgtttgattggtaataaaacaaaatggaaaggaaatgaaacaatatttattcttattcttttatttggttacattttaaagtattggaatgtcattctaatagaacagtaatgactattatatttaataaaatgaaaagaatgatcattaaaataaaggaatgatcattccaatgtaagatgataaaaaatttaataattttttatcaaaagaaaatttaaatttggtttcattccatattcttatttctataatttcaattactattcttatattttcatttctttcaaccaaaccaaacgtaatatgaattattacagttattgtactaaaagtaaaagattatacactaaattatagtgcataaaaaatttgtgtgttattaaagataaaaacattataaaagtatataattaaccatcatgacgagcttaattaatatattatcatgattataataataagttattaataacactaattaatctttctaaaaggctatcataatcaatatacaaaagagcaaattaaaaatatatatatataattaatcagaaacaatggcatgccatacttattatttttattaaaaaattaaaaatatatatgattaatatattattattattaggtacgtaccttgggaagctgcagtgacgacatcttctttagagtctctaatattgagaatcaatcttgttttaaaattgggatgagagccataaaaatctgagagacccaattcaatacaacttaaccaaaccttaccaagccaagtttccaggtcaaaaacgacaccaacttccactggaatagtgtcgttttgggccaagcatgatgtacttgaacaattcaccattaataatattaacaaaaatatagcacagctattattattattcttcttcatctccataatctttcatttttgaatctttttacatatatatatagagagagagagagagagagagagagagagaaaagtggtcctggatatagtatgtattttctatatgtttcgatatagaattgacaccttcttgattttaaaataatatttaaaaaatctataattgagaattttcttcaaattttatgacaataatttgtcaaacatgtttctcttacactctcttaatatttattatttttgtcacagccgattactttgactaaactcaaactatatatttatacgcgtttaaaaaaaatacataatatttataaattatatatagtgcatttataaaattacaattggtgtaattacatgtttacattgtataattacacataattgagatattttaatctttctaacccttacatttttgttaataaatggtcagtttattcagttagcatgatagtggaagttagttagtttcggttaactttttcctatttttggacaagctatatata

SEQ ID NO: 313776 - DNA, 2025 bp, Cannabis indica
ttatacatataaattttctaacacaagtttcccacaaaaatagccaaattcaggaagcctttcatatttgaaatctaaccatttgataatctctctacccatgcatcttaataaacctaacatccatccctctcctaatgggcatgttcacatccaattccattcttatcctcatataaggcctagtaccctctctaacagtagttttatccacttcaattagatcaccaacctcaatagcaatgaacttagcaagttcataagatttacacataaagggaatcccataaacctagacccaaaagggtacataatgaagatgctcaagggttataggaacagaactgtcaggagctgcaaaaatggtaatactttgagcaaaatgccaaggctggccctctgaaattctacccttatctctctcacattcaaaaataaccaaaaaataccatcagcatgctcagaaacaataacaggaaaatgacactgcaatgaccagatttcaaacagagttttcataagagaagggtgattaaagtgtcaaacagtatgcaactgaagaagaagactaatataagtatgggattcagtgggattaacatcataggtataaacaatattttcttcaggtgttaaagctagagcatttgagacattggcaaaaaagtcatccatggcgccaaatagagaaaacaaaggtaaaagcaataaaaggaaaacagagaagaactggggattgagggttgatacctgagacgtgccttatatagaaagaaccagaaagctttttcgtattcttctggaggatttcccagtcccatcccagatcgtaggaggagtagcccagatgatgaaaaagatctgattagcctcaatttttcaagcatttgcctccattttaccaagatcaaagcgtcaaacagaggtaattattgagtttttgcaagaggaaaagaaaagaaagagataacgaggctatgtggagcaatttcgtatgggaagtgagaaggatttgcaattaatgcactgcgaagagtaattaagatgggaaagaggaacaatgtctttcccagatcaattaatgtgataagtaaagcaaaaagaagaagagtactgagagagaaaaaaacaaaatagaagatgggaaccaccacaacactattttgagtggaccaaaagaaccatactcggtactggagaagtggaacataaaccaccaaaacgctctagaactagaaaaattgacgatggtatatagtaattgaaattaatctttcaagactacttttttaaaaaataagtgaatgttacatttggtttaaatttataattatgtttcaatatattaagagtaaaataaattttattttaataaaaagtgataaaaaaaaagtcaacaaaaaaagtattaaatatataaataaaagtataaaaagatattacttatattaataagtgatatttattgtaaatgtataatctcatcccaactattttttgtgctaaatttgatataatttttagcatattaaaattttgaccacattataatttactattggagtttaattttataaatatagactaaaatataaatatatataccacatactctattgaaaattatgttagtgtatcaatatatctttctattttaaaaggttgaataatttatggtataactctataatagtatatttgtaaaatcacattttatcaatattatataaaaataaattttttaattataattaatattaaatagttagatagtattaataattaattgatagatatttacactaaaaaaatatttatcaaattacgaatttttttataacattaaaatttatttaaggtgcgtttggaagtaattgtgtaattactaggtagggtaatttactaaggtggtaattacacaatgtagtaattacactatattttaaaatgcaagatgtgtttggatatgaggtggtaattacatatgagttcctaatagcttgtttggcaaaatagttagtaatt

SEQ ID NO: 313777 - DNA, 917 bp, Cannabis indica
aaaaaaatcgatatattccattaagcctaaaaagtctcaagatacaatgaggagctcaaaagattaaacaactaaatccaaaaggagccccggctacccgacccgagactcatataaaactagctctctttgcaagaaagtgagcaatggtattgacagacctattacaatgagaacaagataaactataatggtcaatgtcaatgttgacttagttgtttttatttatacatataaattttctacatagtgctttttttttcacataatggtcaattttaaataattttgttaaatggtttattattattattacatcaagtgaggtggagtgacaacatcgattctagatatagagatataacacattacaaaggaggactcatttcatcgacgagagaagaatcacaacaagataaaagtaatgtctaaatgaataagagagactatttaaccttttttagtgatgtgtattttgactccacttattaatttaacatattaattaatttttttagtttattattttgtaaatataagtcgcgttgacccgtttgtatacctaattacttctcatattattaaaagaaattatgtgaaaaattaataagttaaaatttaatacaattttactatttaattaatatttttagttgattattttgtaattataaattgggttgacctatttgtatacctaattacttcttatattattcaaaaaaaattatataaaaaattaatacgttaaaatttaatacaatttttatttaattatgattaaataaaaaataataatttattttatatatataaaggtaaatagcggcgtaagtacccaaagttttatgtttgtaagcagcataaactcaatgtttatttttaggaataatcacataaggcaccattttttgtaa

SEQ ID NO: 313778 - DNA, 664 bp, Cannabis indica
aaaataaaatttatatattttatagaagtagtaagtaattagttaaattttattttcggcaaattttttttaaaatttacatcacttaaataattacaatgtatgtaattatgaaaaaaatcaactaaaaaggttttaaaaaaaaaacccaagcagataatgagtataccaaaccaccctttaagaaatctagtacataaattttctacataattttgagaagtaaatgtatgtagagttgagttatatgatgtgccattaaaattaggaattttttgtactattttacatacatgtatatatattatgagtatgacccatccacatccacacatcattatcatttttatataactaagattttgtatttcattataataatgtgaatgagtcaacattcaaataataataatctttttgtaaatacatataatagaaatattttataattaattataaggttaattatattaattaattacaaaaccctaccctctttcctatttaattggtataagctaatagttgttgtaagttgtaattcttcataatctaacaacaacaacaataatgataatatcaattttggattaaagactagacccattctttttggatattatttatacaaataatttaattatattatatacatatatataac

SEQ ID NO: 313779 - DNA, 1198 bp, Cannabis indica
aaaaaagttcaggggcatgatttagtacatgtcaaagttcggggggaaaaattgctaattagcctttcatttataaccggtttgaattatttatttttatttattatgttatagaatcggttctatttttgttgtttatatctgaggcatttacttctggtaacttttctagtgattttttcagcgacggtaacttttctggcgacactacctttttcggcaacttttccgccgatttttctggcgtcggtgactttcccaacgacttttccgttaaaccttattattacaagttttatcaaatttgtttatgttttttttccatatttaaaacttcacttattttttaatcccatattttattgcattatttatttataccataaaaaagtaaactctactatatttttccatatttatgaaaaaactccaaataaatttttctgtcccaaaatgaatcacgttgctaacccaataataattgggaaatttacatggtatactaacttttgtcatttttttacaaaaattctgtcagacgttattttttacttttttactgtgtttttttataagtttcatactgcagtatactgtgttaagttttcactattgttctactagtgttttttaattgttctactgttgtttgttttactagtgttttataaaaatacagtatttttaaaaaaatttccgtgtgataatatttttgtaacaattaatctaaattttagtattttcataagtttccctaataattaagcaagtataaataaggccttaggatttcaaaacaacttgggctataaactcaaaagtgtgagctaggcattttaacaatgttttggtatttatgaaagcactacttaaattgtttgacaaatattcatataaagctaattggattggatttttttttttttaaatagtattcttgaaaacttagattaattttctgtgttaaatcctaatttcccatatgtgaaagaaagatgacactacatcagtatgttgtaataaattaaaacaaatttcatatgtcccaacaattataatgtaacattccagcaaaacgaagaaaaaaaaaacaattacaatgtaacatattgtctactctctatttcgtgaactgtctagttatagggaaaaaaagggaaatttaaaaaactatccttaaaaatctctaaaattattt

SEQ ID NO: 313780 - DNA, 2336 bp, Cannabis indica
attttgtgattaaaaaattagaaaatgaaagtgttactaaacggcaccaaagagtattcaaagattttctctttgcttgaaacctgacttcgagtattatcaattacttacagcattcatttgactttcaatatcattaccactaaatcagttctgcttgagacgatgctttgcacagtggtgactgaattatcaacttgcttgaagcaaaagagtcttcttgtatttggacatccagctgttcaccagccaaggtatcaactccacttttgctcacatcattaattttttcattcaccaagatatccccatcagttacaagtaaaatactctctttattatcagtttttttatgagagatatccacatcagctgtttaccaagatatccacttgttcttttttttattactttaaataaacttcatagataactaaagtttggggcttaagtaagagtgagctccccatggtggtgaaccagtctctatctcaaactctacaacaaaatcaagttaagaaggttcctctattcctcttggtttctattatctgctttgtctctatctaactcctactctcttccataagaaacactacttcaattccttcacattctcatcatcaatcaattcaattccccaaaactaacggcttatctaacctgggagcttcacttgaatcgtgcaattactcccccaagtacgaccatacgtgtaaggagaatttcaaggactgaaattgcatctccggcaataaatctaatggtcgggatctcatcaactggcgctgaaaacccacccgttgggaactcccgccattcgatcccactacctttctctacgtgtacagggacaccaccattggtacttggctttagtcaatcatttgatttaacaaatgggatatatacatttatttaaaaaatatggcaaaaaaattgtaaaaaaaaattataaagtccatatcccaaaatattatttatttatgccctaaaaaattaattcttataatttttttatattgcttttcataaaaatggacgtattggccatttagcttgagtcaatcatttgatttatataaaaaaaaaataaaagaaaaactttacatatgagatttatacatttctttacaaaaatataatataaaaaagcttatactaatgtagaaaaactataaagcccataaccccgaaagtatttacttatatcataaaaaaattaactcttacaatttttatttacatgaattatccgttgctttcaataaaaatggacatattgtattcgaatagctaagctttgctcctgatctactcactctcgccattcgaccccactgtctttctccacgtgtacaaagatgccgccattagtacttagcttgaatcaataatttgatttaatataatataaacgaaagtaaaaaaaaaaaaaaacttaacaaatagatttatacatttttttacaaaaatatagcacaaaaaagtcatactaaaaaaaaaaaaaaaattaataaagcccataacctcaaaacattatttatttatgctataaaaaattaactctcataatttttttatatattgtgtaatttctacattaattattcattgctttcaataaaaatggacatattgaccattggtacttagcttgagtcaatcattatttgatttaaaataatataaaagaaagtaaaagaagaacttaatatatgggatttacatatatgggatttacatatttctttacaaaagtatggcataaaaaagttcatacaaatgtaaaaaattatataacccataaccttaaccttaaagcattatttacttaataccataaaaaaaattctctttacaatttcccataatgtaattttacatgaattattcattgctttcaataaaaattcacatattgaattcgaatagctgggctttgctgatctaattactacaaatttaatgggccagacaagtagatccgatcaggccttcgcagcaatatttaaaaattgaaaaattaattggcccatgcaggtctcgaacctgcgaccttcgcgttattagcacgacgctctaaccagctgagctaataggccattttgttatcttcatacactatagaggtaataagtttattttgtgtcagctatgtaaatttgaagggaacgtatattaatgttctttcttctgaaaaatcttttagtacttacttatgtaatgcactcttaatatgtattatctatgaatagataatattggaaatatttaagtttttatgattaatttttctatttagttagaaaatttttttatttttacattatatg

SEQ ID NO: 313781 - DNA, 882 bp, Cannabis indica
gggaatcagtaggttgcatctgtgaaaattctgaagtttgattgattctgttggttgtgctaatgctctaggagcagcagaatgtgacctgttgcatgaacctgctgcacatctaaatacttaaaaaagaagttgagactccaatcatacacttccttgggggaagggtgaattaattatgaaaagattatccttgattccaaagagccacaaaaacaatacaaaataccaatactatctttatctaaacctcattttcaaaaaatatatatatatatatatttatctaaaccttgaacaagactaaaaaaaaactcataataagtagcaaacttggaggatcgccaagcttttttggatatggagcaacctagcaaggcatgcttggtagtctcaggtgcaagtttacaaagaggacacaaaggagaatcaatcacacatcgtttaaagagagaggacgctacaggaagggcattagatagcattctccagacaaagagtttaactttaggagggtaacagatgactaaattttagaccaaaactttttagaagcagagaaagaggaagaggaggggagatcctgatgagaaaaatccaaatggtaagcagatttaacagtgaagagaccagaactttccctttcccagattaaatcatcatggccataacatccagaaacaaccttaagaatatcattaatcattgcttcatcaaagcatgatcgcaatttaccaacatcccaagttcctgaatcagtaataaaatgggacaataaacaagaagaaggataatcattattaataaaaaaaattatgcttattgttatattatttgatataatataatatagattaaaatatttaaatgtgacaaattata

SEQ ID NO: 313782 - DNA, 859 bp, Cannabis indica
agcaaatgataccttaatcatagtaaggaagatcgcaaagaaagacattcaacaagaaggagtttcaacactaaagaaggagagaaagaggtccaggttcagatatttttaatgctctgctacagaaaggaatcaagggctagatatctgaacggaaggagtcattatattccgctgcacccaatgtaaggtttctcataatttatatgtgtttatttcataatcgttttagaagttcatatttaaggtgttaatcaacatacttgtgagtagatctaagatcctggtaaaataatttccaacaaaccaaccatggggtccctacaactattgaagtggttcctcccaagaggcaagggaaaaccaccgcccataagaagaggtcactggctaagcccatcaatctcgaggtctctgacaacaacatccaagaacaagttccttctcaaatcgactacgacgttaatgctcctcctcctgaggcaacccacgctaatgcctcctcaagcaaggccattgagaccttgttgaccgcagtgggagaggctgggtctaaatttgcccatgcgtatgaagttttctgctggcgcaaacttcaaactcttcttcgccctgattgggattttctcaatcttaggagtccaaaagagatgcattcaaggagcttggactataacttcatggtaagttggccttatgattatagttatattttttttttatacactctttcatatccatctattttcaattctctaggcttctttcgcttctttttcttttgattgacgactctctgagcggctcgaatacttggagggcgaggtccacaaattactatcccaatgcaaggttgtaa

SEQ ID NO: 313783 - DNA, 2148 bp, Cannabis indica
aaaagaccaaaatgccattgaatatagatattattcaactatgctattgggcttttagggcccaatttgtagcctaagagttgttgtccacttgtagaagtgcacaggaaactctgcagaatacctccttgccagccaggaccttatgggggacagtctagctgaccgtggtgcagtcccaaggctagttggccatagggccggccaggggtggccgaccatctcctatgagggagctagtctgtcacttgatgcccgtttaagtgacggcattttcttaggtgcttttggccttcttattagtgagttgtattgccatgtggcgttgattttgtccacgtcaggaggacaaaaattaggataacaccaagaatgagaaacaacaatcatacccttaatggctccacgtctagctgggtcaaaaacttcatcaattgtcatagaatatgcttctcccgcaacattttctttttttctaccttttccttatctagagcgactgctactagccctagaatccatgtttgtgaagttacgagaacattgaatcccaaaaacttgcaggacttgaaaagattggttaaaactttgattataacctactgataggggatgatactgatgttggcactgtggagtaaactacgatgggaaaggagtaaaaactggtgatgaaccataagatagattcagactaggtgaaggtgctgaggcaattgaaccagagtgactcccaaatgtccctgctcgagacaaaggtgacttcttagggtaagggaaaactttcttcatatgaccaattttcccacaattttaacatttcccataagtagtgtaatgccccttgctagacgatccactgctgctactactcccactctcttgagaactttgacaacgccatgccaatttccttgattctttcttgtcaactttctacatcctttatctcgattctgatttctattaccaaaactttcttccaatttagcctcaggtagtttttcagcagccaaataatcatataaattctcattcttttcagtcataatcatgctcttgatagatggtttcaagcggctcacaaatttttccctgagcaaggcctaatcagcaccccctgcatactaggatagctccataaacctcatgtagtactcattcacccacatctattcttgttggatattctcaaataaattttctaaggccctatgatgactagcgttaaaataattggccttgaaaaaatcctcaaatttcacccaatctattgctctttcccctcgatagatacatacagttttgcacaaattcatagcatcctccatgaattattttacatcgaatcaaccttatactcatttggagttccaattgcattaagggctctcttaacacctttaaccacctctcagtgaaaataagatcaagtctaccatcaaacttattctggaacacccgcgtgaagttctttaggttttcattttttctaacaactgcattaatatgatcaaccatgggttgtttttgaggaagagcttcacgcataacattttaattttctttgatttttctttccaagaggcatttttaatctatacaccaatatgtcaaaatgttagaatgacaatgatgcatgttaatcaaagaaatctataagtactataaacctagcctaagtacatggtcacattctcaagtataaacttcggctttgatacttttttttgtcatgactcgggctctaagtagtgactaaatgatagtctgaatcatttataagggttcttggggaatttttaaactcctttggctaaagattcaaaataaaataaatattcaaaacaagtaattaatcatttctataaataataaaattatcaaaattttaaagtagaactaaaatatatctatacatactgttgctccaaaattcgcccaaaatacgtggaccagtcatgaggggacacgtggatcagataacttggaaagatttgctaagtctttttatgccacaaggaagcgctattaacatgggtcccggaggagactcccggagtataagttactcctggaagccaatatagcgtaaaggctctccgggatgtgtcagatctctcccgagaaatcaagtcgcatttaatg

SEQ ID NO: 313784 - DNA, 673 bp, Cannabis indica
aacttacttcactacggatgaatatttaagatattcaaagtccactaagcataaataattaatagcaaaaagttagtgaatgtaaacctgtagcaagctaaaatcttatcaactcgatccaaattaactattcagaaccttgaaaattaactcacaacctacaatataatgaaatacaacgaaattaaaaatttacttatttaagtactacttactagttactaattagtaaattatatacataatttttaaaaaaatttacatatacatacatatataataaattatagcttacactaacaaaaatttaaaaatttcattcctaaactaactaaatctctcctatcttattctcattaaccatacatatatataaagaggtcttatgtaattcctcattatggctcgagggatttgacacctcaaataagacaaaattcataaattatattaataagttatacaattcaattttactttcaatgatcattatatgaccgtgtgattaaatatataaaaatattattttataaatgccactttaatatttataatattattttagaaattttttacatcaaaaatataaaatacaatttttattacaccaataccactacacggctatatcaactttttaactcttcttctttattttattactattttacca

SEQ ID NO: 313785 - DNA, 615 bp, Cannabis indica
ttataactggcccaaattgggactttatttttttttataacaaattagaggttatttttgaatagagtattcttaaaaagaggttctactgtaaaactaatttcaaaagctacagatcgtttttattattgaattttaaatttatgtttgagcaatagtttttatttcgtatttaaaagaatttaggtgggtttaagtgtctaaattttttgattcgttgaatttggttttgatgaagttgtttgtcgtttttttgttgcattatacttttttttttactaaatattgccataatttatggttggtctttgggttttttttagttctgttcagtgtcctagttcattttctgtcagtaaaaaaaatgaatcaggacaatatttttgtaaattctaacatgtgataatatttttgtaatatttattcccaaatttagtatttatgtaaaacctcatcgataaacgaaacgacgattgtattaatgttgtatcgtcgtttctttagggaaacttacaaaaatactgttttttccccaaattttataataatactgccacacggcaataatttcttttttactgtccaagccctttttttttctttcatactgtccag

SEQ ID NO: 313786 - DNA, 1820 bp, Cannabis indica
atgacttttgtctaatttagtaaaaaaattctaacatggatgaaagttcaggagacatgatttagtacatatcaaagttcgaggggcataatttgatagatatgaaagtttggagagcatattttagtacataaacaatcactgaaacagtaaaattaaatgaaattagataaaagtccttaaatctaacaatctcaatagttgaggagaatttttaacgccaaaaaagttcaaggggtatgatttgatacatatcaaaattcgggaggaaaaaaatcctaattagccaaatcaaagtatatacaaattatttattaattttccaaaaaaaaaagtagctattacttatatatgattttgtgctttaataattctagtatatgcctacaatcattggtgttgttgccgtgatcattgtgaaattatcaaaattgatcgtgttcttcttagtttttcctcgatctcttgcggagagtcttaaagtggaacttgtacaatggtagcaagaaatatcgatccaagaatttcaaacggtcagtgtgttggcagtgaagctattcgagcacaaacaatattaatcaataattaaacaataacaatgttcatttatcatccaaatttcatcttagcatcaaaatattagtgagtaaagcatattaccttgtaattaatggctatgaatcttcatacatcacttgcactcatttaatcatcaaatctacactcgaaagaaaacagtgaaaaatgcaaaggtttgtatggacattactcttttcatccttcaacacacacatacccatatttatctataagactatttcacttaaaataaggcatgaccccttttatgagaattaatgggtttaccgggcctacggctacaagcccatatggtgagaattgattatcttagtccaatgggctgacaaaagaaattatagagcgtgttcatggccccgagcgtattagtacattatatacatcccattgtgacccgttagtaataccactatttactggtttttcccaataattttaaacagtcaagtaaagttttcttgtcggtttctataatcgtcgcctgttcaaccgtcgcaaaacaggtggaataagaaacggttcgaacccgtcacctaaaaagcatttccgatattttaaaatcgtcgcctgtgttgttgagtataggtaacagtttagaaccgttgcttatagtattatacgagacgattttaaatcgttgtataatgacctattttcttattattattttaaaattttaataatcttaaatttttattatatattcatttatatcataattataatcgtcaaacaactcaagtaaaaaaaaaatttattaataacacaaatataattataatatatagtgtactatttaggtttacaaaatgaaatacaccctttacatcctaaagatctctacttgaaatatcgtctagtattactctaaagaaagacttaacaataaacctggaatttaaaaaaaaaaccattaataaataagtacgttagacctgtaaataataatataccatattataaacacatcaatattgtgatattttcaacatgcaagtatacgtatcgttatcaagttataaactcacaaagactgaggtcgatcctacaaggattgtagttaagtgttttaaaattaaacttttaattatatttggttatttaaatttaaaaagaaattagaactagaatttaaaacaataaaaacaagcaaattgatatctaaattaacgatgattaaaggttagggttattgatttcaattgtatctatctattatg

SEQ ID NO: 313787 - DNA, 1821 bp, Cannabis indica
agagacaatgaggtgagcaacttgacaaagctgcaaggtacagaaaaaattctggccaatcgtacccaagggtacttgacaggtaaattacatcgtacaaggctgggtatcagcgaagtaccatctcaagtatacctgcttagacaaatggcgagtcttaagttgtgcattcaactataatagactcaccaccaagtcttatacaaagttcccaagggaaccacgtatgagattacagttatatatgcttacaaggttgtcaaaaaacccttacccaggtcaaaaaagaacaaaaacttggtcgtcttcttggaaccctggccagggttcccaagctcaaagagagcccgccagggttccattaccctgccaagggtcggccagggactctatgccctggcattggccggccaaatgttagggtaccaccttatggccagccagctcccatgagaaagacccatggtcggccaggtcttgaacaagacccttatggtcggccagggtgtgcttcagatctaagtgtgtgtttttaagaactcaaacacattcttcgtgttcttcgtgactcaagagtcaagactcacaacgaaggtcaaaatcatatcttttttgttaagaaatcacacattatacatcttaagactatcatgcgaatcaaaataccaaaaagattacaatctaacgtgagaatcaaaaaatattcaaaacaaagaaaagcttcatacaaccatggaaaaatcaattaaaacaagtgaatagcaagattagaaaacttacccactactaaaaacctttggtgaagaggatgggaagcttggatcgtcgaaatggcacgaaaaatctcgagagaaagcactgtgggcgtcaaccactagagagaaggaggaactttcaaaagttactttttctagatagagaataaaatatggaaagtgaaaagtgttttccctcccataagcttataaaacttcagtgggaccccctttaactcgccatgttgtgtgtaactaaagagcatgcaaaaaaatgcaattaaattactgctaagaatatgatcagacagtcaagagcaaacatttcaaaggctaaatatgctgcaagattttcccagttaaggctacacgagtcttaactgaactggaagtccttatctgcacagacattcacacaaggacttaggggacaaatgttatctcaattttttccacctaacatggcatgtctacgtggccaacatcaatgccacgtgatagtacaactcaccaacaagaaggccaagccatccactctacactcaaaccaatgaggggtacgagtactcaagtgagacaacaaagtgacgaaccagccacctcaagggggctggccaaccacctttagccaaccctatggccagcataggccggccagcttctagaaatcacatggctggccagcatgcactctaaaggtgcatggccagccagcctttggcctgacatgattttggtgggcaactttcatacgtggacaacaagctagactacgaattggacctcaacaacccactaaaatagagagaaaatatcatcaacttccctatttttgaggggtaatttagtcatttgtagtttattaatttaatgtaatatggctttatttacctatttttaagagattttagggatgtaagctctcttatataaagagcaatcaaaccctaaaacttaaagttcgaagcctgaagtctgtctgataactcatatctctctctcacacacccactactcatctcttgagattttccaactctgtttcccacattgtaatcctaagaga

SEQ ID NO: 313788 - DNA, 670 bp, Cannabis indica
actcgccattctaggtcgaatactcgcatttgtcatctctcaaataattctctctttttccagttaaattgtactttttggtgttgcgaaatatcagtaacaacacgtcttaaaccaactcatagcttccctgatgcccattatcttagccaactctggcaaaactttgcccaacttacaaccagcagcagcagagattaggccaccttcaatgtttctcaccatgaatccatagcatatatttgaggtcgtgataaaaaatggtcgcgcttacattaatcagtataaaactaaaaatccaatgaaaataagaatattcatatctagccaaacaagttgtttatccatccaaagagcatgcgcaactaatctatgagcaacacagattagggacactcatggaaatctggataacaaacttgtaaaaacttctaataatgatcacataatcatttgagtaggggactctgatagaaaagcaatcataattgtaaaatcttggtagcagactgcaatccattgtcaacatcaacatcatgcaaatttttaaaaaaacacactatcctttctctaaaatcttgaaggggcaatagtgtcttcactgcacacaaacaaaactataatgaggaaataaatattttattttcactataaataaataaaataagca

SEQ ID NO: 313789 - DNA, 1439 bp, Cannabis indica
ctgtataataatttttctatttttcaccaaaagaaaacatcaaattccaattcgattcatgacaattcataacaagtcatcaaataattaaagcatattgtataagagtgaattcaagcatattgtacaaaagtgaatttaggcatattgttatgtttgctaattagcatttgtatatgtggtgtctttttctactggattttgtagctcattcctttcatttttcatgtgttgaaaaatataatattttaaatggcaagtggcgagttagatttaagtagagtaaggtgtattttttaaaattatataactgcgtgcgattttaatcatattctgctaaattatttttaaacctattttataaaatgttgtctattttgtttgttttgatttttacaaataaatatgttttgttttgtttaattttttatttttttaacaaatgtaacctctttttttaattaatatgaaattcaatgtggatatttagggttcaattaatgaggggtgatatgacaaacttaggtgataaattttattttattacaaagtatacgtttacttgggtaacttttagatgttggtattatttttattattttgataaattagttatttattttaaattatgatagtatatattatagttataatgtatgttacttaaaaattttaaataatttatagtcacataaaatttaatttaaagtaatttgcgatataaatatttaagtttaatttcggttgtaaataaataataagtttaatttttggcagtactaatacctaagttataattctagaacttctataggtatctgacggttaagtattaagtaaattgtcatgtgacaatctctgattggcccaaatcattaaatttttaaattaaacttaagtatttattttcaaccgaaagttaaacttagatatttatgtcgcaaattactctaaaatttaattacaaaaatacataattttttggtaattaggatttttttcccgaattttgacacatatcaaatcgtgcatctcgaacttttcattattaaaaattccccaaactattaaaattatcagatttaaagattttcattcaattccgtttaagtttattaacagacacctaacgtgcgattatcaatacactaaatcatgtcttccaaactttaatatatattaaattatgcctttaaaattctgtccaagctgtcactaggtgccgggttaataaaattgagtagaagttttgaaaaaaaaaatgatactaatagtaacgttttacaaagtggcactcaagaattgtcctaatttatttatgggattttttctataataaattaaaaatggaacaagtttacatttatgaccccaaaaagtgaaataaacaaaaatagaaactaaaagttgttaaattacaaaaataccagccaaggaaa

SEQ ID NO: 313790 - DNA, 1588 bp, Cannabis indica
aaattttttaattaaaatttttattaatttttttttttattttaactttattgtcttattattttagatatatattatttttaaagtaatttacggtaaaaatacttaattttaacttccgattacaaataaatatttaagtttaatttttatcagtaataatacttaatttatatttttgaaactccgtaggtacctgacttttaattattaattcattatccacgtgtcattttcttattggtatatttaaactatttttttaataaaaaattataacatagaccaatcagagattgccagtgataatttgtttaagacttaacagctaagtacgtacaaaaattctagaattatattttaaatattattacaactaaaacttaaatttaagaatttatttacaattactcttatttttttttttttatatatattggagtcaaaatcaagttttttaagattgtaaataataatatatttagggttagggttcataattactttgctatttggggctttatatgattattattatttatacttgtgagcttttcttgtgcaagtaaatgcttcaaaatcacattctttctccccaaacaattgttgggtattgggatttatgcggtgggtttgattgattgattgagtttttgcccttttattgaataaatttcagggctttagcgcccctggccgttcatatccatgatcatcagcgttccatggacccatctctagttcaaaacactccttcatttgaggaagaagaagataaagacgagtggggtatgtatatgtaatgtattctttcgatgctttccttacttatctatagtttgaatttatttattttaactttctcatgaaaccccttgtttggtttccgagtaaattactgaaagaatgtaaaataagagtgaaaagtttggtttttattaatgggtttgtgttgaagggtgctgaatcagctcaagtaactcatttggttgaatgggctcaatttagttcctttatctatatatatgatatatatatgtattacattcatatacagatttggttttaaccactttgttggtttccgagaaataatgtaaataagagtgaaagtttggtttttatttgattgggttgtgttgaagtgtgttaaaatcaactcatgtggttgaatgagctcaattttagttcctttatctacatatagattatatatatcttacatcatatacagatttgatattctgagtattttctcatttggttggattgagctcaatttagacttctatatccactgagctatgcctatctgagtttgaatatgaagaaacaatctcttagtttgttcagctctaagatagtaagattctgtgttttttttacaatgaaattggtctctaaagttgaaaatgaaaatcaagtgaattcccattttcccttaaattggtctctgattaaacaaagttttctccttttttggtgtttatatgttgttttaagctttcctttgcctacacactatccaaatcttatgtctgtacttcattattgcctttttttttataacaagaaacaaaatgttaga

SEQ ID NO: 313791 - DNA, 862 bp, Cannabis indica
cataattggatatcaaatgtttgatggccagttataattggatcggtcggttcttattggattggatcgatttatgcatagtacccctaacaataacccgttcatttttgtttttttgcccaacgatttcacacctattgctgcaagtttagaaacactggattttttcataaaaggagatggagaagacgtgcaaagggtgatagccaataaaattgtagaacggagcttcaatggcaattggagatcgtgggggagcaatttatgggcaaaaatctttgttttaatcgtgctgaaataaagcaaaatgaaaattaaaaataaaatttttaaaaaaaaaagtatagcaaagagaggaaaaaaaagctgagtatcatggtaatttaatgacatcatcaatacatgcatgatatgtgtaaaatgtattttggtaaataaaacattatataaggtacaaaagtttatctagtcttgtgaaagtatatttgtaataaaagttggtttttgtattatttttttatgtatttatttctaaaaaaaaattatgtaaaattttctaatttgttagctcttttgtacaaaaaaaaatgaaaatctatataagcataatatatatatattttttttgccaaagggaaacgcaactctttatgtaataataaattctctttaacattgtgcctaatatatattttgtagctaggtttgaagtaggcagataaatgttatattgtcactactacaaaaacaccctttagaggcggtttttaagccctttcagcgtcggttttcgcgaaattcgctaccgacgctgatcagggcgacgctaaagggtttatatgaaccgacgccatatataccc

SEQ ID NO: 313792 - DNA, 1195 bp, Cannabis indica
gcttatttgaatgctatcttctggctcgctaggattgtaagccttgctgacgctaacggcatgaagttatatgaagtcttcccataacgagacggtcacctcgcttacttgttcttgagccgatccgacttttacacttagtttgttcattgttcgctaaggactttcacgattgatacgtgttgctttctttgccgcctcgctatttgcatttagtgacatatgatttctcgctaatatactaagtgccagtttgtatattaatttctcgcctaagaccttacaattagcgggttataaatatactctgatacttacataattaacgagttattcaataagaagacattgcatcgattcacattccttttatcttgacacatgtcctccaaccgaatttcgggtataacatgcttaaacacattaaaacatacaacccatctcacaagctgaaatcattctaaatgacaaagttctaagcaacaaatgctcttgaaactcaccacaaatacaacaccttaaacatactaaaattactaaattcaaaactgaattaccaaaatattaaacaagatcaagctgtaaaacttaaacaattagccaatttacaaccaaaactcagctctataaacaagactttcatcaacaaaccaagcaaaattcaacatgcaatttcaactcaataataagcattttcaggtaaaaacaattccaatcaaagattaaattcatgacttaaagatgagtaaactaccttaaggttccaatctcaaaatccaccaaagaaatagattcaaatcttcaagattctctaaaaaaaattgcagaagtgattgagataaggagaggggtcagtttgagagatagagaaccataaaatgattttgtttttcctttaattttcacaaaatgaattatatacttcattatagtaaaattagtcaaaagactattttgcccttatggccaaaatcaatatgaacaataattaaaggtagtttagtcattcataaccacaccaatatattcacacataaatatataattcagattatgatctaatgacaaagctcatgaatttcggacctcaaagccggttcgagccaaaatacctaattgtgactatatcgtgccaacttatcaaaaaaacctgcaataaggcaatatgaacttactatataataatatagtgcat

SEQ ID NO: 313793 - DNA, 1829 bp, Cannabis indica
acaagaagtggttttgaggataggacaatctttgtttatggtggtgagggatattgattatttttagatttggaggatttttaaatttttattaaccttatattttgtaaatataaatttttcataagatttttcttgacatggttgatcgtatttatattttagattgaataattgtttgtttaattttttttttttcacaattaacattaaaaaataataaataatttttttattgctaataaaattttatttattaatatatatatgcgtattttgtaaagtatttatatttatatatttattaagctaataatataaatgtgataaatctagttacaaagttttattaaaactactagattttattttatttttgaaaaagaacctcaattggttggttgagacttgagacaaatcactgcatgagagtaagaaaatatctaaagctgcttgcatgcatacatacatagtagacacgtagcacgtaggtataattaaaaattttggtcgtaataattacacattgttttatccaaacatagatcagcaaaaaaaaaaaacagtgtttatttattatttattacaatacgacccttgtacgacataccaaacgagcccatagagagtattattatagggcaccaatatgtctagcacgcaccaataactgttattagtggtttataatctttatataagtaaaatatgtggggttaaatattgaattacaccaataacgatattacacatgacaagggtgctaagcaatagggcaccatgtgcatggatgccctttctcatttcacatatatataatatacactacaagaaatgttactatgtgctggcaaaagctggtattgcgctggtaaaatagaacttacctgtgatgtattggcaaaagggggttggcaaatcaatgttggtattagaacttttgcaagcataaaatgaaaagcgctggcaaaaatgacttttcccaacacgtaaatgcgctggtaaaagttagattttagccactacaaatgtacgctggtaaaactttgacctctttgccagcgcagtttgcgaaatgcgctggtaaaagttacttttactaacgcagtaacgaacagtgctggtaaaagtgacatttcttgtagtgatatatgtggattttcatgtctatggacccctaataataagagcattgttaatggtactagtgggcttaacaccttctaaacgtattgtcttgtgattgattagcgatataacctaaaacttattatatattaaattacatgcaataaggtgttagacactaatacctttaacatttctctcataataacgagaacacaataaataagatattataagtatgatctttttataataaatattattgtcttgtttagataaaatagacaaaataaattcaccactatcacctcatttattacgagtatatacctaattaaagaacctagtagtagtactgttattataaatagaatgcttgtaactcatcatacacaataatttacaccataagttagtgagattatatataccaatatggcacagatgaagatgaatagcataataagctttattatagttgttggtattgtgtttaatctttcatctactacttttgcaatttcaggtgaaagagctttgaataacgtcattcaacttcactcatctgatcagttacaatctgaaatcaacagccaagatggaaagatagtgactattatcgaacctgcttctctagaagaagtgttgttcgaaagtttgtcacagaaaaatcaatgctggggtaaattttgcgcaccttg

SEQ ID NO: 313794 - DNA, 4626 bp, Cannabis indica
agcggccgggaatgagtacctataacatgattctcgtaggctcgtggtttgtttatgtgttaaagatcactgggggttcgatgcgtcttcaaccctccttcccggaagacagggattacgtgaagtccgtctaacgcccagtgatgtctcaccggtgcttgagtgtgaaattgttgttttgattctagtgcaacttcaatcttcattcatggaagccaatgtccgacacccgagtcaacatgggttctatagccatgtgtactctcgctaaaagattttaaattccatgagagaagtggagacttaaaattaaattgccttcgctttgtagatgatgtccttgtgttctgtaatggagattttaagagtatctacttcatggtgcaagatctcaaactatttccccaaacttcaagtttaatgactaatccttctaaatcagctttttattgtaataacatgaatgatgcagatgtccaaagggtgttagatgcttcaagattctaaagacatgagcttccattaaaatatcttgttgtgcccatatgtcccaagagaatctcttaaaagactgtaatgtgcttgtccagaaaatggtggctcaaattagaacttggagcacttagaatctctcatctgctggtcgtgtgttctcatcaactcaattttgatggtgaaagctatttttcgtggttttctgtggaatggtcattatactttaactagtaatgctacagtggcttggaaaccattatgccattctaaatcttaaggtggaatgggatttagatgtattcggattggaatgttgcagaaatgtttatatatgtgcgggctattgctaaaaaggaagataatttgttggtaaaataggttcataatgtgcttgtgagggatgaggatttgtgcaatcataaagctacaacccaagctagctgatattggaggaagttggttataataaaggaaaattgaagagtttaattgaaacgaaccagttaaatgacatcaactacaagatagctcaaggctatcaagtgttacatgaaaatccacctagaatagattggagcaacattgtatggagtcgtttcaacattcctaagtatagtttcattttgtgtttatctatgcttaggagaatcaaaaacaaagatagattgcaaaaatttagtatcattgacaatgcttcttgtctcctatgtaatggtggaaatgaatcgatagaacacttattcattgagtggatgaattatttggagcaggtaaaggaatggctacattgggggtctacctttatctcactaccttggatcaagataacaagttcaagaagacgcttatctcggaaactttggctgccctcgtgtagtacatttgggccaaccaaaaaaacaaattttagaatagcttaatggaaaatagtgatagaatagtgtacaaacttaaagatgtaatcaatagtagaatttcttgtagaggcctaaacatgtaactagtagtgaaaaagagtagtttcatacattgtaaagattttatagatatttttttaggtcctcttcaatttggaggatgctactaggttgtacaattttttttttttttggtagtaatgatatacttgctgattcatcaaaaaaatctctctcttcctcacttcccctctctcacacgcctaccttggtacttctcaacacttgagttttttcagtattaattcataccttgtaatcctaacggtactatagcaaaccccacctatagcgatcttgatagtaattcccttggtataaatacaactaaaaggggagtaggtcattacccgctaccacaagggagccaaacctctataacaaatgttactaccaactactttttaggcttatttgtgcaaatatgtggcaagcatcagatctgtacgaccccgctatcggttgatcactttttgaggtgaacattttggtgctttcattaagagagtggatatcgtgatttgaccaaacgccatggcgaacacctgaaggacttttttcgcaccatttgcatctttaagtcttcctcaagacccacagatcgcaaatctaggcactcaagttcttctagtcactcagaactagaatccccatgaatattgcaaatgtgttgaatcctgtcatcacaataggcgctacaagtctagccactacaacttgccaaactgagacgagcaccccattggttccaggtggcaggcccacacctctaatagtagacccaccattggtgcctcccactaaaggaaggacccaggggcgacagcccctggaacaacagctggacctcaaccttgattctacgcaagagagataagcccgggagtaggcaagccagtaattggtgagcctcacctggacctgtgagaacaccttgagttggctagacttagggaagttgtacaccgtataggcctaattgaagaaccacacactgctgattgcgatgtttatgctcagtagagacatgaattcttaagatggatggatgatcaagagtacatccatctatctcaccaagcaaaattagattaccgcaactgagaggcagcaatctattaagatcgttcaattagaaaaccgatagaagaggccaagatttccttagagatccacttcaaggaagactgtcgctgagttcctaaaaaactaggatagatcttcccctactagttggagaacagaccattcatcaaaggtcaaacggcaagaacagccagatcctggcaaccagcggcatggagggttggccagggatatctatctcaacagcacccctactgtgcagccattggccggctagccaccaactagagtacccatggtcagctagagtacatcactacctacccaaggggagcgaggtgtacaaaggtcgatcatcggtcgactaggatagagagtgggtgaaaacacccaaaacaatgatttgagaagtgaaaattgatcactttaggcatctagatgcaccaaactccaacaattggtgtgatctacccccaatcaacacacaacaaacgccagcgatcgtggagtcacggacgataagaccctaaacaatgaaggtctaatcggccaaggaagcatcacgggcaaccaaacccttccctatgtaggtctagctagtcatggcaaagtactgggtgcaagaccctgcccaatgctagtttggccggccaagcacagaagttggatattggcctggccggcctaggccaactgttatacttaggaatggccagccaaggtatgtagggtctagttgatcttcaccatacactatcccagggtatgggcaatcaacccctttctattcagaatctacagcctccccaaggagggccaatcaaccagatccccataacaatagatctttctgtgcaagcacacttggaccaacttagggacctgatccaaggcatagcttgcccaaagcctttagaccatgaacttgatcggtcaagggatcaccaatctcggcatacataaatgccttgcccttttccaaagttcaagatgcccgtatggaagatgtataccggacaagaggacgtgctggcttacatcaaatactttgagatgcagctcgaccactagaaggttactggtgatgtgcgttgtcacatatttcaagccacattgtccgagaatgcccaataatggttctttaaactcacctcggggagatttaactcttgagctgagttctcatgagaattccatacacaattctcatccttgagacttgtatcatcgcacctggaagaccttgtcgaagtcaaactacgacaaggggaacctttgaaggattagattcagagattcatggctgaggctaccaaagtcaaagtccttaatgaagaaggccaatatacagccatactaggagcatactcccactaagagacttctggaaagatatccggagaatatcaaccaaaaacatgaaggagttcctcgatagagctgaaagctttatcaaacttgtagaagccatacgatacccccaagcggggcatgtcaacaacaagtaatcacgaggcatccaacagcctcatgaaccaccaagtgcataggcagacaacaataactctacccaaacttctagtggtaaacacactagaaacaagcgcgacactaacaactataggaggaacaatggaaaaaaagagaagtttaacaattctcccacactgcagaagagcaaggaggataagtacacttgcttcaccatcctaatagagaagcctgaggccttcttcatggccactcagggaacggtcccataccgaaagccctttcttatcaaaagggaaatgggcaagagggacgtgtcaaagttctactgatgtcataacaacttcggccatgacactaatgagtgttaaaatacgaagagggagattacgtacctactaaggcataacaatcttgtgtcattatgtgcaagacaaccagacccaggtacaaggaggccaaatggagatcccatgccatggcccatggcaggacatctaggggtcataataggcagacccaacattgctggtgaaaccagcaaagctagggaccgctatgttggaaattattttac

SEQ ID NO: 313795 - DNA, 764 bp, Cannabis indica
attaatttattattcaataattaagaattctcttgaatatatatttatatatataaatgcatacacgtatatacatacatatgaattttcttatacggctaatgtcaacttttttaattttttccttgttggcattattgataaaatacttgtaaaattcaatttgatcattttatacctggctttaatggaattttttttaaatgtattgagagaacatccttgatcttacattttatttatctttcttcttccgaggctctttgtaggtgatggaaaatggctcaaggttatcttagcatctgcatttgtttgataattcaaagaacttgacttgcttcaatattcctttcctcaagcgccttggtagggtgttatcttaccttctcactacttcttccttatacttggatgagtggtttagtttttcttttttgtttttttttcccttgaattttcttgtgtttggacttcgaacttgcagttcttaggagaagcaatcgtgatttcagagttaatattggaatttgtacaagctacctattctgggaaaaacaggaatgctagttttatattacctcatttttaaattggctctcccccaataaagcagtatttattttctgaaaagcaagaatattagttttatattcttctccacttttaaattctctctctctctctgctcgtattttctcattaggcaggtccgtcaatttttttatcagcactcatttggcttttgactgggtagacctctagta

SEQ ID NO: 313796 - DNA, 1677 bp, Cannabis indica
tattgtggatggccgaaggtcttgtacttcctaagaagggaatgaggattgaagaaattggaaagaagtacctcaaagatcttatctcaatgtcattttttcaaccatcaaaaaactactctgaggtggagccaacttttcacatgcatgatcttatacatgatttggcaatatttgtgtctagagagttttgtttaatgatgcataatataagtaaatgttctaacagggttcgtcatttttcgtacatagaagaatgtgcaaaagctgatgaccctaaggaatttgaggagttattcaaagcaaagggtttgcgcacaatattttgggaagaagatttacatattgatcgtctaaagttgttaaagattgaacacttgcacaagtcattctcaggcttaagggtattatccatacgaaacgattatatcaccgagtttcctggttcaataagcaatttaaagtatttaagatatttaaagttagattgtgaaggtattaaagagatacctaatacaatatgtaagttgtataatttggagacacttttgttggacaaatgttggcgtgttactagactgccaactgatataggaaatttaatcaagttgcgacatcttagtgttcccttttatttaaaagagatgccattgcaattggggaagctacaaaatctgcaaacactaaatagatttgttgtgggaagacatagagattgttgtagcattaagttgttgaaagagtttcaaaatctgcacgggagtctttttattggaggactacaaaatgtgagtagccttgaggaagtttcagatgtatcattaaaaagtaagaagtttcttagtcagctatctttgggatgggattattacgatgaacctgaatctgaagagttgcacaaagaaagagagctactcactgccctccaaccttatccaaacctgaagaaacttgagatttggaattacaaagccaacagtttcccaaattggatgggagatcattgctgcttgtctaatttagtaagtttgaagttgctaagttgtagtaattgcagcttcttgccgtcgttgggacaacttccttctctcaaagaccttgtctttgtgggtttgaatggtgtggtgagaatagattcagagttttattgttctgctactctcgattcttctgttgcaatacaaacaaagccattctttagatctttggagactttgaattttacaattatgcataatatggaagagtggtcatttattgaaggtggagtttttcctcgtcttaagaatattctttttcagcaatgcaagagactcaaagtgacattgttaggagattattttccgtcattggcagagcttaaaatatatcaaagcggggaattaatgccattattactcccaagagctcaactcatgcaggcccctctgattagtttaaagaagattacaattggtcattgtttcaacttgaggtacttagacgaggcagcctttcagcacctcacctccttggaggagttgacgattagaggctgtcctaatctcaaatgcttggcaaaagaactaccaacttctctttctgtatcttcacatttatgattgtccacggctaagacaaagagtccagagggagacgggggaaggactggccaattattgctcacatcccaaatat

SEQ ID NO: 313797 - DNA, 504 bp, Cannabis indica
cccaactagtttgagtttggcctatgccgttattaggtgggataaagtttccagcactaccccttccagtggcaccgttggtagcgccgccttcggcggcggtggcgttagtggtatgcccagtggcaacaatttggccagttgttccatggccaacagtagtctgggcattggcgtgaatggtggttgccctgccattatcaacggggtggctctccattatttccggcaagattgcttgttgacagaacttaatggacattatccatctcctcattaggtcgttcttgagatcttcgggttaacactattttttctcgtgaaaaacttcaagattttagttaaagctctcaatgaaagtaccaaaatgttgactggatttttagccaactgacgcggagtcataataaatgagacttaaaataaaatcacagtaataagtgcagttaatgaagccgtaacttgcaataaatgaaataaaagacaccaaaatttaaagaggtt

SEQ ID NO: 313798 - DNA, 1360 bp, Cannabis indica
ggttgtcacgaggaggtgacctttggttgtcccatcgagggtttacgaaaaatgacggcggtaattatgttattttattcaatttatggttccacgtcacgaaaatcttcggttttcgtgttggcgtgcccatggctggccgttggataagctaaccttaggcattcttgctgccaagtgtcataatcccaatttatgaggtatatgagtatttaagccctctgatacgaaataactttttcattttccctctcatccttaacttcctcttcccctttttctctttgagtgttttttttttttagagatccatccttccctcagattcacacttttctttccaactttctaaaactttaggagagatcggaaccatttgcagggagcaatcagaaaagctaaagctcaatttctaatccactcgtgttacttgagtttttttttttttgaaaagatggaaactatttttctgggttttctggcatgttgaaaggttcggatatgtatgttcgtagggaatacacatagggctatatttttctatgtagaactgggtaatcttagaaaagtagggctgaaatttgtataagggtgaactttaggaagaacactttgaatattcgtatctttttacctgcccatttcatgaatactcgtggctattcggatgaacactttgaatactcgcatatctgcttcctttaggttttacagagactttgtcattcctagtcgctgttttcagaacatagggttttatattctttgtgtattttgttatgggaacattggttaagtccttcaaatggtgggcgtgttgccgtattccaatgctcatacgtgcgatcgtatgttccttgaggtactgcgataccctcagccattttcgacatatgcaagtgttcccttttcccatataaccgtattcttaaactagtggttttgctcgaaacggtgggtgtttcccagtaacttcagggtcatgctcgaaaacgcatgcctcttgtggcgctgggatacacccagctgttttttgaggtacatcgcaagtcggatatgcgtgccaaactcgcaagttgtggttggttaaattcctcaaaacggtgggtgtttcccagtcacttcagggtcatgttcaaaaacgcatgccccttgggttactgggatacacccagccattttttgtgagattcttctatttgcacacctgcgattttctagtgggctgattggatctttgcgagggtccaaatcagatttctaagtagattttaaatttggcatgcgggtgaggtcacctatattattttcgcacattcaccacgctgaaaagatcttctatctttcagatgagcgatct

SEQ ID NO: 313799 - DNA, 1058 bp, Cannabis indica
agaatacagagttaggatttcctgcaaaacactgtaaaaacatcatatatgccttctaaggctaatagactgactcgtggaataagattaattaacaccgtgaaccatgtaaaaaactccatctcatttattgctgcattttattatttcttaagctcttaaatatttagtttttaaaaatcttagtaactattttggtgctttcattgagagttgaagaaagacctaaacccatagttccactataaccatggtgtttactcaaaaataatttaccaacaggactcctccaggagacctcgatgccgtcatgaaagatgtaaaccctctctcaccagagcacacccagccgagcaaatcgagaggaggggatgcatccaatgccgacaaacgagaggctaacctgaacaaccagcacaaccacattgacgaagaccgagatgttgaaaatgaggaggaagactatgatggagaatatgtcaaagatgtgtattacaaagatgtctatcactatgagcaggaccctgaagtgatttgagtgtccaaagagttgcttgagactaaacagaagctagcccgccaagagaagttttctcagaaaatggagagaatgatggcctgcttctgagacaaatttagagatctagacaagggagactcagatgataactcctcaacggaatgtgtcagaggaaataatagggaaaaccatgctaatgttggaacctctgctcctgtacagaacaaggaaaaagcaaaagtaggtgatccttagaacccttcagctctcgtaccttctcgaaaaattataaatccagctagtagacctacttagtaggggtgttcgcagtgcaggtggtgcagtttttaattatttctttaaaccaacccgcacatgcggtttttccaattttctgaaccgcacccgcaccgcgatactaaaaaaccgcaaaaaccgcaccacaaaaaatgatgtggtgcggtgcggtttctgcgatttgaactatcacaatttttttttgaaatcatcataaaataattaaactatcattaatata

SEQ ID NO: 313800 - DNA, 1280 bp, Cannabis indica
ggtaactggaagttacaagggtatttatacccaaaaaggtgatccacgtgagaagtgtatagacggtcacgatcttctctctaaaaacacaccttccatccaacaatcagggagtccaacaatctatgtgtataatggcactaaatccactttcacaatcaagatgtgacacaatgatgaaattgcccattttttagctttcgcaccaaaaaataaacaacagtaaaaatgtagccattccaggaagacaactccttgatggacaccttgtcatacacgcgcgacaaacacgtggatgcattgtcgtcacatacaaaagccagcttccgtggtcaagtgacatttgaaatatcactatttcatttctcaatttccacatgtctaaatcaagaaagagatacaagcttccactatacaaaacattctgaaagcttagggggtaaatgctatccgcgtttctagcattggacatgttgactccagatcaacgttcaagacccgtcaatgggaccctcattaaaaaaaatgggccaagcccatctgggtgttaccttccaggaacatgttgtggtttttcctttgcaaagtcattcgacttcagtaaattgagtccataagacatgtccgtcatcgcgagaccaaagaggcaaggcacaatgttcccagaagacccttccggtttccttttatattcctagacataaataaggaaactcctgttcctgttgtcaaatcgcaacagtacatcgaattaagattaaagggaaaacttcctacaacaaatattatgcaattaatttagattaattgcccacaatttatgcccgcagtgttgaccaattcaatcccaatccaatccacctagtcatcagatcgtcttctccatgggcttgatctcacgagaaagcccacgaacattctttactttaaactctccagtagagagaaaaggaaaatctaatgtatttctcatactactataaataatccattaatctcatgtattaacatacattctatgtattttcctaaggcatcactactacaaaaagcacatttcctgttagtttttaattgacatcaaaatttttactgccggttcccccaatcgacgtgtatactgtagacgcaaaaaatgtctgtatttgtgtcggttatcaatcgtcgtttcaaattatttttgtcggttttcaacactcgcaaacaattataaaataatttttacacttatctcgtcgttttataacacacgcactaaatagacacacacaaaaaaaaaa

SEQ ID NO: 313801 - DNA, 885 bp, Cannabis indica
ggaggagctcaaatctcagatctagctatgtttgggtaggtgtgatgggagcataggattttagattttttccttagtttaaaccaattttcaaatctcacgaacagtagatctgagctaaggctttgtgggcatcattgccgatcggatatggggtttgtatctatcaacctttggcattaaaattatgaatctagtgaaacagcaagaaagtctccatcttgggttagttttaagctcggaacatggaagattagacaacaaacccttgatgttatggaatgaccggttttcgacaccgtttgatcgctcttatggaatcttgcaaacccttgatgtgtcatcggatcctctccccgcgacaacctcggttgccagaaaggaaacgttcggaggccttcagctcgctaagatcgattccaccgcagaagttgtctccggctccggaaaggacgacgacgttgacggtagggttatggtcgagagatgagagggctctgggaaattcggagaataattccggtgagagagtgttgcgtttcgatggtcgattgagtaagatgtgaaataccaatgaatcttccttgttctataaaattgggatctaatattggggcttgcacctgatgttggagcttacagaaatgcaactgaagatgggatagaatcgagatgccggagctagggaagatgggtggagtggacaatcgtaggggaactggggaagaagaagaaaaaacaaattaattagttttaattatttaaaaaaaaaagaagagaaaaaaaatgattttttagatttttttaattttaaattattttgaattaaaattatgatttgggccaataaaaaaattgacatgtggcatgttattagtatttaac

SEQ ID NO: 313802 - DNA, 2036 bp, Cannabis indica
atgtatcttttattttagtaaaatgaaaaaaaaagtattacaagtttatttttattccgtttgtaattaaagtttaatttccgcgctaattttattagtaatcccagttaagggattagggtttcataagtatattgagtagcatgcctatgtatttagggtgttacagtatgagtgtagactttgctttgcttctctttgtaattaattttttctttcatttctttttatgtatattaacataaggggatcatgtgatgtcaatctcttcctattaaaactgatgatactaccaaaacaaactaactttctaaaaaactgaatatataatggaaaacttacaaaaatattaaaatttggattaagttttataaaaatactgtcacacggaaatcctttcagaaatactgtgtttttataaaaaaaacagtggaatacaaaacagaacaactaaaaacaacagtagaacaaataaaaaagaacagtgaaacaacaatgaaaacttaacacaatacatagtataaaacttacacagtatttttgaaaaaaattccaccccacagtataaaagtaaaaaagttggaattttcagtatgcggtgtaattatccctatataattcctcacaagcaggacaaatgtacattggttccatgggaggacttgaccctcccaatattttttttccttatttttattatatttttgtattttttttaaaaaatttatttacaaattcatttaattgccctccttagattatttttttttacacttcgggcccctcacaataaatttttacttcctctgctctcaaaaaaaagttgtgctaggattcaaaccccttaactctaaacccttatgacatatttgatttattgtaatgaacattagaatggaattatgattacaattttaatgtttaatttttccttgaagtgatgtttggtttggtggaatgtaatggtaatagaaattgtatttgtaatagtaatataatgaagtaagaataataataataattgattacaatatttagtttattgttagaatgaatattagagtcattttaactttattttataggtaaatactattttggattctgtattttgcaaaagttactatttggaccctctgttttgttaaatgacaaaatagaccatgtattttctaaaatagtacaaaaaggaccctaaactgttttttatcaaaataaaacttaataataatccgatctaaaagtgttatgacaaaaatatttacattttctgtatctgttcatgttagaaattgtttttaagttggttatattaagaaaaaagttatcgaaaattaaattcagggttctatttttactattttagaaaatacagggtctatttgttcatttaataaaacaaagggttcaatcaacaactttaacaaaacacagagtctaaaataatatttacccttatttatttagtccttataatatattcctcattacataagtttttttttttaatgtaatcttatataatgtgattctcattacatgtaattctactacatcacttataaaaacaaaccaaacattccaatgctaatcatgattctatctactattacaacaaacgaaacatgataaacccttgtaggcatctcattgtaatgaccattacatcacttatacagtagaacctttatttaagaatactctgttcaagaataacctctaatttgttataacaaaatcaagtcccaatttgggcctattataaataagaataacctctaaattgtaattaattatacaatttctaaatcccatattaacaaagtatacttctatataagaataattacatcttaataaaatatatacatatattttatgaaattatttatataaaattagtaattttattccaaattgtaatacatgtataaatattatatttactcaaaaataattctattatgatataatattaatgattgtttaatgtcattgttgttacattgatatttttttatattttgaattttttt

SEQ ID NO: 313803 - DNA, 973 bp, Cannabis indica
caaagaatgtgaaagtctataaatatatagttgtgtagctattattagatatgaaatgagataatagaacttttttcaattagaagattaatgtacattttactattaataacatacattattataacacaactatgttttacttactaaatatactgacacatattttatttttataaaacaaatcgttcaaataattatactattttaattattaattcaaataaaaaactaaaatattaaataaaactaacactacgtggcttgacacgtaacaatcacctagtatatatatatatatatataaaagatttctatcttttttttttcttaacacacacctttgtttccatttcgtataatttgcatttaattcattatttataaattataaataaattacaaaaaaattagtttgttttcattacactaagaactaatttaaatgtcactttattttgagatttttacacaaagtgccaaatttggctattttttaaatttttaatagttctcgattttttaaacatttatacaaaattatttttttcctttttgaatttcaaaaagtattttaataacaaaaacattaacttcatgatgcaattgttaagtacactgtaaatctgaatttagtcctaattaattcatgagaataaaataataaattagagattagcaaaagcgtaccaaaattcatagaatcgacctttgaatggtatgatcttccaatttttgcaacaatttttatttctctctgaaaccttagtttcttgataatggggattttagaatgaaagatgcgatataaagcgatgcaaaaatagggaccaatacctgtttattaataactaaaataacagttattaatcctttttgactatttccaatttggcccctcatcaaattaaaattatccttatggtatccacatattaaaattatgacaatcatgcccttaagtcataaactt

SEQ ID NO: 313804 - DNA, 1543 bp, Cannabis indica
ggtctgtagagggccgaccctctcaagcttagggctcacttagtttaagggtctaattttttttttctcttttaaaattatatatttttatagattttaaaaagtattacatttttttttctaaataaggatctattttttttttctatggccgactaaaattcagagttggtcctatattaagttatgcctttaattgctcaaagctccaattatgtacatatcttcaacgtaagtgtgtgtattttttttatgggaaatggggtgtctaaagaacacccagcttcaattaaacaaaaccaacaaatactagaaaaacacagtacaacacaaagaaaataaaaaaaccgcaaagaaagtaaaacattacaagaaaaacatccactaactagctcgaagaccactcagcatagtcgtctagcacgctagggtcaagccccacgtgagagactgattcgaaagtgttggtgatgtttgcctatttggcgatattatgcaccattgaattacagcggctagagatgtgaattgctccccactctctcaactgactgcaaatattgagaaatcgtcctctagctgtggagagagtatggtccacctcaaggtcggtgttggtgttaaaagaatttgtaaccacaatgttatcgcattaaaaaagcacccacttgtgaccaagctccattgtgagttctgctgcaaggcaaattacatgagcctcacagagcaatggttcagtgaaatggctcctttctgttttaatggcatcaccccattcattcttgataacaacagccaacacagaactatcgacattcaccttgacatttgagttgcaacacacccatgataatggaggggtctccaagctaaaatgggctcaaatgagttatcagcaaccaatgagtgatccttcaggtttcttttaatcatggtaataagttgtggtaggggagatacaacttctctatgaattttcctatttttctctctccaaaccgcatccactatgcaaagggtacactgtggtcacaaagtctttttgttttgttagaataagtactatgtgttaatttgagttaattgtggcgtaactctcaaaacttttacttgcattcaatcttcaaaacttaaattttaatggcaaaacccctaaaatcattgtgatgttagcaaaaacatacttttgttctcctaatcccgttatttgacaacgtagctcaatccaaccaatgccaagtagactgatgcatgccatggcatatgaggaaattaaattaaaatctattttttttaaaaaaaaaaacatggaatttttacatagataatataaattgacactttatttataaaaaatacctccataaggtgtagacaacatctataccttttatgtgattttaattaccaaaatacctcttacactatcacttatacaatcagacgatgtttgtagggttgctgttgtgtggttgcgcggtggttgcatcagacgaatgtttcaatcagacaatggtcgctgggtgattagccgaaggttgca

SEQ ID NO: 313805 - DNA, 901 bp, Cannabis indica
ctaattttcactgttagatcatcgtcaatggtcaagaacatcttatttgtattttctcctatttttgtagaccttcttcacctgtaaaaggagagctccataagctcatttttcatattaaaaaaaaactacctacaagatcagagcttctctctctagtttatttttctagaatctggagctttgacacttagtatttttttgtaattattatctcgttagaaataaaaactcgaagtagatgtagctccattacttttgcgatacagggagtgaactactttaaatttgttctctctcttataattacttaactacttaatcattctcgttaatttagtgagagagtgtggcttaaaagtctagcccaaatttttgggtcattatttttgtactttcattgagagccacaaatcgagaaagatactagcaagatagttgcatcatgttctacaagtgttgatagatagactccaatagctagccaataaattgggggcatgctagttgatggagcaagaacaggggttacttctgcacccaaggtgctaggagcaggcttcaaaaccagctactcagtttttcctccaaggccaccaccaactgctccggggactggcatgaatgaccagataccacctggggagcctctattgggtattattttaccaagatctagatttactaccatgtatgttgattaacaccctaaatatgaattatctaaaataatggaatttaaatacatataaagttaagaaaccttacattgattgcagtggaataatatgtctccttccactcagatctctaacctttgttcctttctgtcgtagagtattatcaagatctgagcccgattctccttcaggtgttggattcttcacagtcttacacacta

SEQ ID NO: 313806 - DNA, 1572 bp, Cannabis indica
atacttatgctacctgtaagaaacaacagcatttactccatgttgtaactggctaaggacattcatataattgtcttccgagtaatttacttcaacgaaaatggacgccacacccgccaaggcaagagaagataattaacttgttttaagccataataaatcctatgaaccacaatgctcagtaaagtcaattcaacaataacatgatctgtttaacatttaacattatctctgcatatgctaacaaagtcaacccaagatctagttcacactcaagtatcctactaacaaaaaagcaaattacaaaagaaagacaacactattgatcattgaaaaagttaaaaaagaaaactgtttaaactcgaaagcatatctacaaaacataccagaatacagaattagacagatgaaacttccattccatagttgactcaagatctatatcagatcaatcacactgtaaatccagcttcaataactgtacatgtttcaatgtcttttgactaaataaaaccgagactaaacaagcacaaaccccatgaagtatgaaacaatgaaatcataggagcaaagcaactaatggagatgattactaagattaaacagaaacattagatatattactacaccaaatggtttatttgaaactagataccaataagaataaaaatccacaaggacttattagagttaacaaaaaaaaagttatcaagtatcccaacatcaacaaatcaaagatcttagatcataaaccacaggatctcaacaaccacagatcaattcaaaattaaaaaatcaaacatagtacaaatcagaactactactgcttcttcttcttgttcttcttcttcaattattattatttcttactcttttcagtacctccagatgagctcccacctgaagcttgagctgcctttttcgcagtcttttcttgaagggctttcgcatccctgaaaacaaaattcaatttttattattttaggggaaaaaattgtcaaaattatcaaattgggcattttcagtagaaaccctagattaaggaaagaaaaaggaaaactataaaaattgggaattttctgtagaaaccctagattaaaaaaaggggggaaattgaaacctttctcggcgttgctcgggagtcaaaccatcttccttgttcttgccacccttggtccgagcctgagccctttcccgatcacgttccctctgactgccgcgtgagacaaaaggaatcaaggaaaaacaaacaaaaatctgttctttattttagggatttggaatcaccagaaaagaaaaaaaaacaattggtaaactaaaaaacatgatctgaaaatttgaaaacaaaaagaatcgaaagaaaggatatgagtcatcgtcaatgaagaagcgttttccgattagttcgtcggatttggtgcgagagagagagagagagagagagtctcgtaggtaatacgaccaaaagcagcggacaaaagtcaaaggaagaacaaagagtcgtctttatggtcgaatctcagattgctatggttctcttttagtggtatattggtctattttataaatata

SEQ ID NO: 313807 - DNA, 642 bp, Cannabis indica
aaaaaaaatgtacctaatacgtaaatcatatatatatatatttgataaaagtccatattcccttaagataactgtgcaaaattgggaataataaaggaaaatcgtggtataatattactagcaaacgaatgagaataataactcttgaacattttcataatatttttagattttattgaacatgtttagttgagacttgtagtgatagtaacaaagaagactaattatttgtaagaaagaatcatcaacattattgaatttgccttatttaggaggataataaaataagatctttgggtaaaatgttcttttgaaaataggatccctttcaaaaaaaaaggaaattacagaaggattttcaggtggtgtatgaacattcatgtctgtgtgccatgccattagttttatgaaccaattaataatggtcaaactgtacctcttaaataataaataaatatatatgagcctaatctcatttttgcccatttcaaaaacaaaaaaaagttttacagtaaatctcatttttgcccatctttcactaaacactagagatggaaatttataccgcggggatgggtaaccgcgggaccgccccgtaactggggtggggattccgtcatcttagtggttaatggggcggtg

SEQ ID NO: 313808 - DNA, 625 bp, Cannabis indica
ttctttatttttatcctatctttttaccaatgcaggctttaactttttcctgtgcagctcaatttgaagatagcctagactactcccgagccaagtctatgaccttgaagaatatcaccaccacaaacaatttgcagaaggaggtggatgcaaccaacaagaaggtctttgacatacgaaatgagctaggagaggtgaacaagaagcttcttgatgccaacaacttggttgaggggcagactaaagagatccaagcaatgccatctaccgcccaactcgagacagacaatgaggccttaaccaaggaggtcaacgaccttaaagatgagaggaagggtctccacactcttctttcaaagttaacaaaggataagatggacttggaagaggatgttaactctaggaaaatgagagaagaagagctcatgaaagagatcgaaagcttggaaattattgccctagaagtcttttatgaattttgaaaggcgaatccaataggaaattttgattacctcagagataccaaagaggcatatcttatttactgtgtaggtcaggcagctaaagaaagccttgaggcagccaatcccacagccccgacagactaaagcactgagacctcagc

SEQ ID NO: 313809 - DNA, 1412 bp, Cannabis indica
gtctaaccctatacttttgattcctctatgtgctcttagtagtcaagtgtaatagtagacacttatgtgtatatgtttggatgtaactaatagtaggaactctatttaaaggtattttattattttaaattaaaaagtttaaattagcaataatttcataggtagttaatcaataaactaaacaaataatactttaaattgcaatagtttagtatattgttgttgttagtaagccaaaaaaaaatcaaaaaaagggaatttgtttcactagaggtccaactacttatggtgcgatcaaagtggttgagctaatgttagaaaatggaggatggaatatccataaacttaacagagtatttgatcatgagactacttcggcaattttaaaagggagcaatcaaactggccttggtaaggatagttggatctatactttataaagtaatggtcgtttctcctgcaaatctgcttatagggcccaggcggttgaaagagcgactcattgcgaggtcgccccctcaatttggggaaagttgtggaatagcaaaatcccggagcaactcaagattctttggtggtgtatcctgtccaaagctctccctgtttgttcggtgatctggaaatggagaaacaaattgtttcgtgattgtgatctaaaattatatattgcatgtctctgcgatgtgatctgaaatggagaaacaaaattgtttttgacaaagccaaaattgatatggaaaatattgctcaggatcttcggtttagatatcaagaaatgttgggcgctagatcagtgacgaaaacggggttgttaacacatgaagcccttcctcctccggagtttctgaaggaagtggatactgtttgtttccaaacgaatgcctcggtggttcaaaaagaagcagggctggcgatatggcgatagtggaaacaggggactctgagacaaatgaactatgggttgctacggacttcgattcggtctctagtgtcctcgaaggtgaattccttgcaatcttgttggcttcccgtaaagcaagggaaagacatatctcaaaaatccacatccaatcagatgctttggggcgattgatgctctcaactccggtcgtcttactgtgggatggacatcttatcctgtctttctgtcttgtttaaaactttgtgaacaatttgacaatgttttctttttgcatattaattggtttgttaacggtgttgttgatgccttagctgcctgggcccgttgtgccaagctaaatgctgagggtcctcttcgggaggtagcccccgttgtggttactgctatgttctaatttgctttcataatatatcgttcttagttatcaaaaaaaaaaaaacaaaaacaaaaagtgtgcttcaatggtatgtcaaaaagtgatataaatttg

SEQ ID NO: 313810 - DNA, 982 bp, Cannabis indica
taatggtcaaagttgaaaaactcgggtggaggggattcagtccttttatagggaagaatccctgaaaagctttctgtgtaatttccaaatggaaaatggaaatttattaatcccaaaaattgtaaaaaaaataatgataaaaaatagaaaaaaaaaatgacagatgaaaatggattggtgagctggagtgtgagtgactaagttaagaagaattgtaagttttaagtggtgcttttggtttctttcaaaaaaaaaaaaaaaagtggcgcttttggtttattctagttctacattagcaaaaatcacacgtggcataatacacacgtgtgttttagaaagaaaaattaatttttactagaaaataaaaataaaaaataaataaaaatagatttcatcatgtagacaaaaagtcctatactagtgaaagcaaaaaatatttatgagtatagaaacaaaacatacaatggagagtttatggggatcaaaggaattgagacgtagaaaatatgaaaagaaaaattatttatgggtagagattgaacacgatcaaaataacttttaaaaaaataaatgataatttaaattaaaaataaatgaaaattttaatttattaatattatttattttttaaaataaatatattcttaaatattattataatatgaataaaattttattgtatataagcagtctaagagtatacaccttatatcttaataaccacatgatctaaaattaatgattaaaaaagttcctaccggtagggaatttatactaagtcctaccataatcttgtcctatatatataaatggtgtagtgttgtctatataaatgttatagtttttttctttttttaccgggcgttgtagactagtttgttctttattattatttttttttttgtatatttatatataaaaatgtatgtcgctatgtgatttgttatatatataagatttttattatatttgacttttattg

SEQ ID NO: 313811 - DNA, 797 bp, Cannabis indica
tcttaaatagagtttctactgtacaaataaaataatagtaaaaaactacagcaccagtaagtattttgtttgtattgttctgtgctagatcttgctttttgaccttattttcttcaatgaaaatttgattttttttaaaaaaaataaaaaataaacaaaatagaattagaagtaattttatattattaaattaacaattacttaataaaaataaagatgtaaatatagctcacttaaaatatttttagtgatggtaatatttttaagagtgttaaaaatttacacatcacttaaaaatatcttattttattttatctctcttttacattatttttgacactttttgttctaaaatgatccaaagataaacatctctaaaaattattaaaataatattatattattatttaatatatattaaataaataaattttcttactttatgataaaataataataaagaaataagaaagagaagatgtcaaagatgatatagtatggcattcttttgtagcattctttttcatcctaatggtaagcattaattaaaaaaggaaatttgactaaatatgcttacattaccttaaaaattttcccttaaacttatacttactaatatttgtaatatatgccaacttgaatgttatctccaaaataccctccccatttacatcacctccctctctcttcccattctttcttcctttcctacccgacctctaccccaccaccacaacaatttttttttcttctcttcactcattttctacactacaagctactacactacactacaa

SEQ ID NO: 313812 - DNA, 931 bp, Cannabis indica
ttttaagttgtattttgaataataattaattcatttaataataaataatctgaaatattaaattttaaattataaatggatttttgtgggaatctccttcttattaggagatttttctcttctcactcaactaaaaataaacggagatgatgattaaattattaacatggatgggatagtagaaattatattgtatacctactttattttacttgttttagtttataccttcattttcatattccttaagatatacccatttttatagatgatgttcccattagaccccttagatcaatgtaaattatatatgatagacttaagtacatagtgaggggacaactcactcataaaagtgggtattttaataaaatataatatgagagcatttttaattaatggatataaaaaagagattttcttcaacttatcccgatggaatgggagagcactcttgccaaattctttacttatgtgtgggtttgtttatgtagaatgagaagcagtgatcacatttttataaattaattactttatatatatacaaataaatatatcataatttatttgtatcttaagttgatagtaatttttttatattatttgttataaaaaatgggataaatattattttgggttttgtgttttacaaaagttaccaattggaccttctgttttgttaaacgacaaaatggaccctatattttctaaaattgtacaaatagaaccatgaactgattttttgtcaaaacaaaatttaataataatctgatttaaaagtgttatgacaaaactaattacattttatatatttgttcgtattaaaaattgtcttcaagttggttatactaaaaaaaaagatgttaaaaattaagctcagggtcctatttttactattttggaaaatacaaatctatttttccatttaacg

SEQ ID NO: 313813 - DNA, 1338 bp, Cannabis indica
gagtcaacatactcagtaagataagcaggacataaacataggttatgcgagttcggctttgagcttaagctgccctgagctcagtagttgagcttgccatatggataagaacgttcttaagggaagtacgacctctgtaccaaatgcactacagttgtactcgtgttggtagagtcattattgtactcccaggaattactaagggttgtaccacatgcacgacgtaccctctggtactgttgtcagtaacactgtaaccctacaaataatctacactgtactaacactctttaaaacgcatacaaattagtgttagtagtgcaaacatccaaaacatgcattcattcacacatatataataatcatgttatcttacctcgctccgtgctcaggtgtgccggtcagcctgagtggaagtgcaactcgacgctttacagggccctaaaccataatattcaaaattcgatgagagacacgctcaaacatctatcggggatttaaaattgaaatcaaggataaccctatcgataaataggatgcaaacaccctaaattacgcaaaaacgagaaaaactagggttcgggaaaaagccccaaccggcagaccggttcccaaccggaaccccggttcctgggtaccaaccggtcgaccggttctaatggtcccccagaaccggtcgaccggttctgtgctgggaaccctaaaaccgatccctttaactcaaatcatacccaaaatttctaataccctccagtatacctgtaaacactatagtgaagcaaacccaagcaacagaacacaataattcaaccaaaatcccaatctactattagagctccaactaaagctcttgacactaattctatccaaacactaaaataatcaaccaattgagcttgaataacttagataatcaccagacaacttcagaatataaccttatacaacaaacatcaccacagttccaaatttcataaattcaagcctaaaaaccttatatccacaaaataaaacacaaagaggaaaagtgagagatgctaccttagattgaagcacttcaattcctttgaatttcacaagattaagctgagaaaacccacaccccagctgatcccttggtggttcgaaagaaaggaaagaaggagagaaaggttgagaaaaaatggtaaagttctaggattttctagtcattttcagcaaaagaaaatggttatatctaacctattatcattatatttaattaataggctgagtataactaatggacaaaaagggaataaaagattaattatttttcaagataaataccaatagttttaagaaaaggttttcaagggt

SEQ ID NO: 313814 - DNA, 1598 bp, Cannabis indica
gtgaactactataaatctctagtattcaatttatctattgcgattttattagtcaaaattaattcattacatcctctatatttttacgagcttcttagatcagttgacaaaaactgtgtcaacagtgtaaaaagaagtcactaaatagtgaattggtctcattatttacaggaaagagtgaataattaaattacccaaaaaataggagatgaataaaggagggtttgaatgtgaatcctacaattttttctatctattagatcaaattccatgaaaatagggatactaattggcccattcttgtggaattacttaaacatatcttcagtgaatacccctggtcagccgctcggtatcatttagcttggttggaataaactacagttataatcctcccagggtcaatttattaggattttatgtcctaaataaaacttaattttgttataatattatttactttcaataaagatcagaaaacatatcttaactttgtcatatgctttgttcacatgtttatgcataattgtaggtttaatatataagttctaataaatcctgaacatatagttattcacaattacaacaatgttatcacattggataataattgtgattgtatgcttaaaattatttagtctcacgatttttcagtgcacttaatttacactgttgtgataataaatgataaggtttacttgcacttagctaagtagaatatcttttccaatgcattagtaaagtaaactaagatcaaatgtatcaaatatacatcagactggactgatattgacagtggaaaatctatcataaacttactgttatatcctttctaagtcaacatatcacttagttgatcatagattatttatctcaattctaagatggttaaactctggtttaaatgtattgcacgagttttttgacttgttcgttaccagcttaccatagaaccagctcaatacttacatcttgagaactcgatagtacgattgagtgggagtgttgatcgtagatatgaacatctacaacttttatgtttattagaagtaaaacaatagtttcttagagcttggtttaacgcgatacataataaagcactcattttggtaattatattagtttctagaaatcgaaatattatttacaagtagctaagtattttaaggatagaatacattgaagaataaaatggtaattttgttcatactcaatgtagaccgtctatagaggatcaatgattattgtaattgaaatcgtagattaattcatagcgtatctatacttggtgtatagagcgttctatgttatcaagagtgtaattctgaatctatagtagagttatgaaaatttaataagttaggaagcttagttacataggccatggtccccacattaactgagataatggtattttgtagtctcaattaattgatttatcaattaggatgactgtgtcttatttatgaattttactaagaaatgacatatttgagatgaaaagagaatttatgggttatttttttaaaagtaatttgcggcaaaaccccctcaactatcaatttacttgcaaaaaaaccatccaacctcatattttg

SEQ ID NO: 313815 - DNA, 818 bp, Cannabis indica
ggctttaatagctttagatctctggctcaacaaagagacaattgctataaagaaaattgcatcatccattggcaaatttttcatatctttccaattccttggccttgtgtatattccatgacaaagaagtttgagacaattaaggggatagatcgatgggatccacaagaagaggtcccttaccctttttagggtcatggggcagccgtggaggagatctgcttcgagcaggattacgccgaaaaaatctgagtcctttcggacgcttgtttgtagtttgtttctctaacaggtgactgctccacatcaggcggaggacccataggtctgtgttcctaagtttgagtcctttcaaatgctcgattataatttgttttcctatggggcacctctgtgcttgttgcagtgttgcttcgtgcgtttgaagacattagtaacatttattgagttctgtgattgcttgcttgaacttaagaattacttttggttgatcgagattttcaacaactttttaatcttgttttcggaaaattaattatgtgtacagaaaagtatttttgtgtggttaaggtgttaattaagcttagtccgcgagcacttttatttatgagtaatattgttgatcgagattttcaacaacttcttaatcttgttttaagaaaattaattatgagtcagaaaagtatttttgtgtggtttaagtgttaattaagcttagtttacgagcacttttatttatgagtaatattgttattagggtaaatactattttggaccctctgttttacaaaagttaccaattggaccctgtgttttgt

SEQ ID NO: 313816 - DNA, 717 bp, Cannabis indica
aaatattttttaggtttggtgaccttgaagacttgatcggatgacagaaatatcataacatgtttaattgaaaaaaatataaatttcttagtaactaaaaaacgacaagataatcattaattaaaagttattattaatatattattatatttactgttattattattaataataatatattattatattatatattaaaaaaacgttaatagtatatataagttataagtttataaactaaacatacgaaacaaaacgaaatcctcatcctctgaccaactcttatcttcccctatccatttttttttaaatttcaatccgaaaccaagcgatttaacatccggtagtagcaaaacaacaatccttagagagaaaaaagcttaaggtaaggtttaattctgttttaagtttaaaacatttggttttgtataggagttttataaatagagtagttatggaggttctgacattatagaattattctcgagtagtcatgggactagttccgatgttttcttgttaaatttgaggagattttgagttagaaattgagtttgaaactttttaaagcttaagtccgagctttaatagcgttttccgtttaagggcttgattttaatttctgttacgcaaggattgttgtatatatatggtatatatgtgttggaataatttggatacgggggcagtttcagtgagtgcaaaatttgagttttt

SEQ ID NO: 313817 - DNA, 1013 bp, Cannabis indica
tatcttttcaactgcttctgaagtttttcttactgtttttggacccaaatactatctttctccgacctcatcctaatgaattggtgatttgcatttttgtccatacaacatcttatacgatgccattttgattgtggcttgatagatattattataggttaactctattagaagtaaatacttactccatgagacagtgaagtctagcgcacacgctcgaagcatatcctcaagtatttggatggtgctctcagattgtccatctatttgaggatgaaatgtcgtagtaagttttaatcgtgtccccattgccttatatagactctcccaaaacttggaggtgaatctgaacctctatcagagattatcgtacttggaattccatgcacatcaatatctcttgtacgtacaagtcagggtactaatgtgtgttgtaagtaaactttacaaaaataaagtgagctgactttatgagcctgtctataattaccctaatagagtcatgttgcttggttgttcggggtagccctgtcacaaagtccatggctatatctttccacttccatttcaggatttccaagggttgcaacatccctgctggtctttgatgttcaactttaacttgttgacatgtgagacatcgtgttacaaattcagctacatccttctttattcttggccaccaatacatggtttttaagtcattgtacattttgattgatctgggatgcatcgagtagggtgtagcgtgtgcttccattatgatcattcatttaagctctatgtcgtaattggctacacacactcttcacttatacctcaacatgatgtttgtatctttagagaaattctctgcctccttctccggcaggcctgcccttttcttttgtaagaactcatcagtaacttgtgaatctttaagttcttgtagcagtgtcgagataatggttaggttaaatattctttgtgtaatgatctctataccacttttttggagttcccattgtagtggc

SEQ ID NO: 313818 - DNA, 658 bp, Cannabis indica
ggttacttgattggccgcacattttccaaaatgcccacctcttctgatgttaacaaacttgctcagtcctttcaggctcagggaaacaagcttgccgaggtaacccaattcttttttcttagaaaagattcagttttgtgttgaaaaatcatcgtatgtagcgaattccgtgatgggtttttgtgaaatgctcctaaattgattgattttattattttgaaagataaagattggatttttatgaacttaaagaaaaaaagaacattttctggaaaatctaagcaaaatcgtttgatgaaaatgaagttgaaatgtgcttattttttattgtttctgcataataataacaatgcaattatggttttaaaggatggagagtaccgtgaagcattggggaaatgggagacagctcttctgttgaatcctcaaaatgcagttttacatgaacagaaagctcaaattttacttgaattgggagatgcatggagtgctctcaaagcagcttctcgtgtgtgatattgcctagctcatttcatatcttatgtgtttttttagtaacatttcatttgttgtgcttggtaatgatgtgatgattttttagtaccattataattctctattgggcatcattgaacagtcgggatggctgggtttcggg

SEQ ID NO: 313819 - DNA, 784 bp, Cannabis indica
gaagagagagagagggaacgtctggtttcgtgggttgtgggttcgtgatcgtgaagagagagagagagagggagcgtcagaaagagagagggaacgtctgagagagggaaagtctaatttagggggtattttaggaatcttttaaaattagaggaataaatttgtacaaattataaaagggtataaattttgatataggttatattattaagggcaaataatgaaattttcctatatttttagttacaatacttgttgtaactaaaactaaattagtgacaacttgtatctaaatgatatgttttagtcacaaataaatttttattaagattaaaaatcacatttagttacaaaaaatttatgttgtgactaaaaatttatcactgaaagttgcagtttgtagtgaccaaccacaatttcaattaaatttatttagaaaatattgtaattatgatttaattaattagttatgaaatgtacgaattataatttttaaaaaatggtcataaaataaaaagaaaatagtgaaagcaacttaattggtaagttaaaatgataacggttacgtgcaaaaattacaaactaaacataagatcaatttttttttaaaaaaaatcacattatcataaataatgaatttggagtgaatatataacactacatgtcatttaaatctattaagtcttttaacaattaaaaatattgacacagtaattgttatattatttataataatataatatatagattaaatatgtgtaataaactaataatatgtaacata

SEQ ID NO: 313820 - DNA, 1806 bp, Cannabis indica
atttagctacttaactaaaaaaaaattaaaaaaatatctctttttacatgtttataattaaattcagtttttttatcttttttttttgctgaaaaattatttttcttaatttttcttttcatctgatggaacaacttatgtacatgtaggaatgtgagatttttcaaattagatataaaagttaagaataaaaactccaattttcctaatacaatttatatttatttataggtagtacctaatcaaatgtggtatatatatatatataaactatatatatatatatatattgtttcatataattaagacaacacatgctaaccatatgtacttatacaatgttcctcaactaattttgcttataatattaattaattattggttttcataattagtgtattgtagcagttcatttaccactatacactataattaaattatttttaacataccaaaagaatttattaatctgagaatcgcatcttttttaataaaatattatcactaatagtacaataatataagtggctcaatcatgagtgaaaagtgagttatttaattataagactgtaagagaatattgagtctcacactttgatatacataagatattttcataagagtttaaaaatgacataaaattacaaatattcgaatttacggtttctataatatttttaagtattttaatatatttgttttacaaaaatacagatgattgattttttgttattttcaaaataattggtttttttttttttgaaagaaggtggaaattttattcaacttgaaaagcaatcctccattacaatagaagtaaatctgatcgagcagaagcctcatcaaacatacgatctgatatgaaacaagactgtctagcaatgcaatgagcagcccttttacagatcgtttaacaaaagaaagaaaaacattatgtaatttagaaagtacaaacgacaatcgtgaacaagtaaaccaaattgagatggcatttgaaccgagccattaatagattgaacaacaactaatgagtcagtttcaatttccacttcagttaacgccttcgtcttgatccaacttaaaacatctttgacccctaaattcagcaatctcaggagaaaccataccaatcttgctgcttgagaaagcttcaataaacttaccattcttatcccgaagaaggaagcctattccaaaccgattcttagttgcaaagatagccccatcgacattgatcttgaacttagttgaaacaggtttcgtccaatgctctctaccattactaaaattaacatttagtaaaggtgtggaaccatttgattgagtattttgccaattgtcaaatttagtttttgttgatcgaatcaccttcgaaactgtagtcggtttattattctataagagatcatttcgagccgtccaactacgccaaataatcatggcagctgcctaagctactgccttcctacaatgcaacagtaagtctcaaaaccagctgctgaaatcatgtcttcggcaccagctgtgtcagccgaagataaattccagcaagaacgtgcaaaattgcacctgaaaagaacatgtgacacagtttcaagttcaagattacacgtgggacaggtaagatcgactggaacatgcttaatggagagctgtaatgtaatgaccgctctagtagtttggattagtaaaggcaattagcactaatttttattattttattattatttgtgaattaattttaatgtggaccccaatatttagaaataaatattagacttataatttctcaattccggagatttt

SEQ ID NO: 313821 - DNA, 850 bp, Cannabis indica
aaaagtgatcaaccgacagcggggttgtatggatctgatgcttgccacatgttacacaaacaagaacgaaaagtaataaacactgagatttgttatggaggtttggcccccttgtgatagcgggtaatgacctactccccttttggttgtattgataccaagagataatactacatagatcgctgtaggtgggatctgatatagctctctataaggatacaaaacatgaatcaagttagtagatctctaatgagaaagatgaacagccttagaggcatgtgagagacaaagtgagaagagagaaagagagccctattgagcatatacaagagagagagagagagagagagagatacaatagagattaaagtgcccttgaatctagatattgttcagccaattttttgggactttatggcccaatttgaagcccatgtcttgtgtccacattttgggcttgtacatagagtcctgccaagtcaatctttaccggccatggtcctactaagacctggcaggacaaggcctattggaactggtaggtcattatagctccaccaagaggaggccatcctttgagtttagaggctagccttttccaagttgaggacaatttcatgcattgttttcttgaagaggttaggttcccttggtcaaacggaggctcctttggtccaaaagtcacttcttggttggccagcttgtgcaaagaccctggccaacctataggctcaccctaaccagcctatagactcctcttggtcagccaaggatattggtacaactgcttgagggctcgcttcactccctttgattactgtttgacagttttgctatatcttgcacggag

SEQ ID NO: 313822 - DNA, 1121 bp, Cannabis indica
acagtcttctttgaaagactacaggtcatttatttcacaccagaaaccttaacttaacatcagaacatatatatatatatatatatttctttatctctcaaatacacacatgcagcctaaaaagaaccccagtagaccccccttcaatgttcttctctgaagaacacaaaggcagcaacaataacaacccagaaattcaataccagcccctgaaacccaatgattaaacccttcccagatcggtttaaaccacacaaacatacacaaaccagtaaaaaaattaccaaatgcagaaaaagaaaataagaaagagtgcaccaattttatagaggttcccgaaaaattgtgctgggtacatcctcttcgagctcgcctcagattgctcttttccactatagatcttcaaagatcaaagagttacaatggtagataccaaatcacaagtacgattggtaatctattaagtttacagtgttcttcctttttcacttttctctctatttttaatctctaatcttattcttcttccttctgcatatacgaactcctggatttgatgttggatatttgagccctaatcctagggctccaaaactcaccccaatgtaagtctcctccaaccctcaaatccaatctaatttctgtgtgttctgatctggtgttgtatatgatattctgatctggttctgttattgctctgctctgtctttattgtgattgagattatgtggctattatatctgttgtagtggaatatagagaaaggagttagttacaaagtttaccttgctgatctgtcctaggtatttagaggccgaaggccacctagtcttttaactgtgtgtaatctttgtgtatatgttaatctgaacagtgtacagggaatgtggggggtttatttcaataatttccacctaaatccccatacgaactgtacactaatatatttgttgttgtataagtgtatctgagggtcttagctcgaacccactaagggttttaccaacctgtgtcaatccccaataagcttaagcaaagcttaaacttattgagggacacaacctttgtgcccatgtttgctggattcacttcagtaggcacttttgttggaattattttac

SEQ ID NO: 313823 - DNA, 1578 bp, Cannabis indica
tttttttttttttttgaagtgattgatgaataaagtagtcagtggtagcaagaaaatgaattccaacattaggcaagataacaaaaattgatcaaaagacaaccaacaaatgattaaagtgatcaagatcacgtagcgtagtcttggattcactacaagaaatatcactttaccagcacatttttgtgctggcaaaagtttggtattgcgctggtaaaatagaattcacttctgatgtgttggcaaaaagggtcggcaaatcaacgttggtattagaacttttgctagcacaaatgaaaagtgctggcaaaaataactttttccagcgcgtaaatgtgttggtaaaagttagattttagccactgcaaatgtgcgctagtaaaactgtgacccttttactaggacagtttgcgaaatactaacttttaccagcgcactactagcgaactgtgctagtaaaagtaacatttcttatagtgattcctctttgtcaagaatgagcaatggaggttgagggatgtgtttgagaagaatttcttgaaggtcatgtgggctctaatggcggtaagcacatccaagcactaagaaaaaattgttccaatccaattgtagtgggagaaaaagcatggtggtaagaacacactacaaaagagtttgtggaaagtttatggacaactgctctgataccaaacttgataaaatcaagagtaaagacacagataaagagagaaagaaggaaagagagagagatgaagtattttcaggaatcgctattataaatataactactattgcaaagctcatagttatagacaatatagacatcaaaatatgacagcgtgtcgaaaaaatatcgtctcatgaaagttttggtttacctaatacgacagttctatagatgctatcgtcttatgtttagtttcaacatgagacaacatttttatagaagctgttgtctcttgtgtgtcatcccatattaagtttttagtagtgtggtaactaagaatctaacaacttcattggctaacaaaattctagatcaagttaactaacttttaataaattaacattctaactaatcaattgatttgagcttaatcacaactttcattaccattctcaacataaaaggatcatcattataattaccaccaataatatcattagagcttgttatttggtatgatgtaatattttcataggattggtaatttttcacatttttatgtttggtacgagattttctaattttagtttggaaaataaaaaaaaaaaaagtggattcaaaaactaccttcaggatagatgtaatatattaataattttatataactgttcgcaacaatttatcacatttccttttatttagccaaacaatataattcaatttatagtaatctaactaaatattctaatatataaccaaatatatttgtaagttgccaacaaattatattctccgcttgcaactaatcatattattttgaactcctcataccacactttatttttttttaacttttttttattgaatatttttttttaacttttagtcacaacaaaacttgtgattaatta

SEQ ID NO: 313824 - DNA, 791 bp, Cannabis indica
gtagcgtgccttagcattagggcgttacaatagtttctgtttattcttttaagtttctctctagaagttcttagttgccattaattttttgcctcactagggctcgccggccattttttggctttacggcatgactttgatcgggtcttgttgattcccacactattttttattttgatgagattgttcttatccttctgcctaagtgttcttttcttcttcatcttctttcttcataagcatgtctcgaagttttgagttgcctattagattggatctttacgggtgttaattctcttagtgtgttattttttatttgctatgttttgtttttttatgttcatttttattttcaataatggtgttgctacaccacgatactattattatggtagtaggactttgttcattcatggcatgtagggctgacaatatggaccacgacgagacaacataactcaaaaatgacacaaaataaataggtttgagtgagacgtttaataatcgtatcgtttgtgtttaagtttttgacacgtttaataattgtgtcgtgtttgtatttgagtttctgacacatttactagtcgtgtcatgtttaccataaccgtttcgtgttatagtcgtgtccacacatttaacaatcgtatcgtgtcataatcgtgttaacacgataacacgaattaaattccatatattttataaaagaaattcaaaattttcatatttataatgacaatcgtgtcataatcgtgttattgtgtcgtgttcgtgttgtgtgacctactaattaa

SEQ ID NO: 313825 - DNA, 1434 bp, Cannabis indica
aagctccttggaaatggctgaggttgacaaaatggcaacctgggcaatgagcccccctttggcctccaggttagtatatttcttccccgaaagcacttgtttccttgtttttaatgaagacgaagaaaaggctcaggattgttctttagtttgatgcttggaagtgccctaggttgacaaaatgtcaacttgggcgctgagtgcctgaggcacttggtgctctggtgctcaaaatgaaagtgctccgaatatgattctaatgcctcaaatatgttcgtgacatgtataattcatgtcccagtacaaagtttgacccattttcgctaagacgatctcgtaaaactaaaaccctagttaggttgtcaacttagacgctgggtgaaaccctaggggcctgggttgactttcgaggtgttgtttcgtgtattttctgttcttgggacttggaattggatgctcatgtcttcatggtatagaacaccaaaagatagctagttggaaacaacttggcgggatccaaacactattctggagttcttgaagttaacctagggacatagcaagggacccctctcaggtcaattgctatgactcaggattactcaacttcagaatgttttctttcttacgatgtgtcaaacattaatgtccacgtcactggggtaagtttttgggttaacaagtaactcttcattggagctctgtagattagcacaagttgattcaagcatcatcgttttaggatgttcctatagctctttctctacaatcaattgtgaaagcaatccaactctagaattaatactagctcttgtacctgattgcaagattcaatcatgcatgtggtttcttgggttgaagggggctcctgaagcctagctcgagatacaagctttcgagtgaccttcttcttctttattgcgggagagaattaggtcctatgcatgccctttgaataccctgttttaactaaattttatatatttaaaaaattatgatataattgaattagttttctttatctttctttttgtttaactttaaatgatttggttagttgtaataagttttgaaaatcaattttaataatatttgtatttggcaagaaatagtgttgccaaataaattagtatttaaaaggaaaactaaaaatgcaataaatatccataagagaacaataataaatcagaaaatcaaaaaaaccacttatatgtgatatatattcttttgaaaaatgatagttaaatcaagaaaaaatataatcattcagccaaataaaaaatcaagtataatatattctttacaaatcaaaatcaatacaatactaattaatttatgaggaaattatactttgaattttaaaagttgttatgttaaatatgataattttaagtttgtccaatttatatgatatttttttgtttttagattttt

SEQ ID NO: 313826 - DNA, 1229 bp, Cannabis indica
tttttttttaattttattaaaatacgatattttttataattttaaaattttaacatatatttttaaaaatttgatacaataaaaatatatagaaaaaagagtgtgacaatataaatttaaaaatgacaaaaaataggtatttttataagatcatcatattaaatcgtgtcttgtaaacttacatctatataagtgtttagtaaaattgaacgaagtcttcaaatttaataatctagatgaatttttaatagtttaaaaaatttgaaaaatataatttagtacaatataaaattagaaagacaaaaatttctattaacattttttttcagttaatgaatctataataactcatttgaatcttataagtttaaccagccatagtggttggagtatttatatatataaagaatttttccatatatagatgaatattaaataaaaaaatcaatatatttgtagattaaactcggatgtaatgtatccttactatttttttttttttagaaaattactattttatttattaatttatgtcaaacagtacatatacaaaagttaaaactgtcccaactactgacaagatattatataaatttattggacctataatttaatattgataatcatgtaaatattcaaattcctcccctaattatatacacaaccaatattatttgagagcaatacaaaggaaagtatatatatttatccaattaataataattatgtgcaccattcaagacttgatacagtatataataattattaaaccatgttattattattagagaaatgttaaagggcaccagtggtgcctaacaccttcttatgtatcaatatcgctattggtataactaagtatcgggtcccatataatttaatataatagtttttagggagtattgctagccaatcgcaacgcgacatgtcgcaaaggtgctagacactactggtgcctactgcctaatagcaatgctcttattattattttcaagttagctagcttttaagtgtttctgtccatatattaattttttattttttcattcaataaatgtcaatgtcattttcaattatacatataaatatttatgatatatatatatttaaataaaactgtcgatttagatactagttcatatcaaagtagttaagaaaccattgtgtccactcatgttttttttttcattattctttttttatatatcattattgtctcttttcgatcg

SEQ ID NO: 313827 - DNA, 1050 bp, Cannabis indica
actaggaataaaaatcctacagttcggtaggtattttgttttaaaaaaataatgataattcaagagcaaaatcatataaatatcaaaattgagaagcaaaaattatatttattcttttattttttagagggtagtatttgacaagaaaaattatatgtattttttatatcacaatatacgtcaacacttacctaaagagtgacataggctctcttgttgaaaaaaatctgtcttaaattttttctctcaattttcttaaaaatttatagtttgtcaatttttttgccccacttaaaagtttactctagcttgattgttaacaatgtacactgtaattatttatgatcttcaatttaattagtttttgtaaaattttaaataatgattgccgaaagtgaatatcaacaacttattacacgtatgcttcaaaatgatatatttttacactatatattatacaaaattttaaaaattatataaaagactatattattatcatactatatacatttaatataatatataatataggatcctgactttgactctgggtctgtatttgattttggaccttggacccgcacttggtagttggatcgcagcatcaactttggatccggacactcgacctggagcctaggcccaaaccttggaacccccagaccccagccctgaccaaagacttgaatctcgaacctggacctcggtgccagaccacgaccccaaaccccaaaccctagacacatccccatactcagacaccacacgtcagacttggccctagacctgaactcaaacctagaccagactcagaccccgagtttcaaaccccagaccgtaaaagaaatagttataaaacctacatttttaattttaagaaataaaaaaaaatagttacacaaaacacttttttatttataaaaaaaaacaaaaagacttttacttttgtgatttaaaaaattaaaaaataaaagtgttatcaaacactagttttactttttctttccctatacataggagtgacaaaacgtgttatcgtgtcgtgttcgt

SEQ ID NO: 313828 - DNA, 1415 bp, Cannabis indica
taagattaaactaaccttaaaaacataaccttaattcgacgtcgtttttgtttgcaaaccaaatgcatatcaccttgactttcctcagtttctaacaatccacgttgctgaactttaattttttctttgaattattaatgtgtgttctttcctcagttgtaaatagtttaattttctaattttttttcttagataattttatattttattagatttctaatttttaaatataattaattttgaatattttgattttttaaaaagaaattctagtttgttcaaaatacttatttgatttttgaaataaaaaaacttttgtttgatttttttaggggagttttatttacatcccataaaatgataaatacgctccattattaaaaaaaaatataaacttaaatagaagacgtaataacttcatttcaaagcttaaagattcaaatgacaattgggtagattggtcttcgggtttgccacaaataatggtagattattttttttgctctttttgcttcatctaatgcgaacttgagagaagttacaagtagtgtgcaagctcgtgttacagcagagcagaatatggagttgcttcagccggtctccgatgatgaagtccgaaaagcattgttccaaatgcatcctgacaaagcttcggggcctgacgaaatgacaccagcatttttccaacaatgctggccggtggttaatcgagatgtcatacaactagtacgtaattttttagttctggaaatcttcctgtgggtttaaacaatacttggtttaatacccaagaagaaacaacctatagatatgggtgacttaagacctattgcgctttctaatattctttataagattgttttaaaagtcattgctaataggcttaaagtggttatgccttctattatattggatactcaaagtgcgtttcttcaaggtcgtctaatatccgataatattatgatctcctatgagataatgcatcatttgaaaaggaaagaaggggtcgtgatggtattatggcgctcaagctagacataagtaaggcttacgaccatcttgaatggggatatcttcgggccatgctcgagaggatgggctttgatggaagatggatcaatttagttatgtcttgtgtgggtactgtttcttacatgatttcccatgggggtaaggagttaggtcctattactgcacaaagaggccttcgtcagggtgatcctctatcaccgtatctatttatcctctgtgctgagggattctcaagtctattgcgtagctatgaacaaagtggtttaataacgggctgcaaaattgctagaggagcaccagttatttcacacatgctttttgaagatgatagttacatctactgtaaagctacagaggaagaagcacataatgtgaaagaatta

SEQ ID NO: 313829 - DNA, 1632 bp, Cannabis indica
caagaaaatggctttttaaatatcactgtcgccgacagtaatttaggtgcatgcatccattaatcaagaaaactccttgattattttatatgggtattaagcagtattttgggtaaacacttatcagtttaccatgaatgacatagggcccccgaatcgtcaagcaatttctactcaagttggttggcacaccagaatctagattaaagataagaaaagtacaattataccacatagcatgtcaaatgtgatatagttaccaccgtttataagaaaaagttattactctatttcgaaaccgttgttaggttttttatatatcagttgtctcattaggaaacgatattgacattagttgtctctttaggcaattttataaaggttgtctcattaggcaacagtataaaggttgtctcattgggcaacaaaatataatggttattttataaagtaacaataatagtttgtcttattagacaaacacttgacgttaatgaatgtttacattgtgttatatagcttcttgcttttgtgttaagaatgtgattacatgagtataattggttatatttgtatgttgttatgagatattatgctattgcctttcttgctgagtctttgtgactcacgggttttttatagtgcaaataaaggacatgacaagttggggaagccatgagtcagaggtcttccccgaaaaatatacatctcaggtcatctggctagcaatgtcgagttgtctggattttatgttatggtgttttgatgactatatgattttgatgtaatactgtaatggcatcttttgtaaatgtttaaaaaggggatccccaaacttaaaattttataatgccatgaattttatattttaaaataattaacaaaattttaattaaaacacaattttatttaaattgttagtttatcattataaactaatttataaaagcacacatgtgacatccctatggattaaggtcttacaactatattcaactctacccaattccttcagaaaaacaaacactaactattgtttgtatgtttgtttgcatgtttgttagctattctaaaatgatcaggtggactattctatagtcttcaagacaagaaagtattagtttttacaaacactacttttataacaacatgactatatctgaaaacaaagcagcgaaataaaggagatattatttgatttaaatccaaaagtgttccatcatcctctacagctatagaggatgatcccacctacttttgttaaaccaaaaaagattgtgataactgaagagactaatacgactaaagtttctagaaataaaataacattaccttgtcgtagtgggaaagtttcgaggaaacccaccccgttggatgaaactagatacgtcaatttattattagtttaaacaagcaatggatagtcctaatatggaactagtaattgaagtaaagagaactgtggttcaaccattcacatggatcaaccaaaaaaatttcgaacacaaggataagaaggaaaactaagctaagattattcaatggacttaagataactttctgtttctagtatcatgtattagaatattttatttatgaaaattattttctatttaaggaaataaataaata

SEQ ID NO: 313830 - DNA, 650 bp, Cannabis indica
aaaaactgcagcagttgtaacctaaaatggtgtgggaagtgaagtacgtacagtaagaaatcctaagggttcctaactgctatgcattcgtagtcccagaattcagaaaagccgtggttgaattgaattaatgagtgaaatcacagagaaaaaaaaagaaaaatttgagagcaaaaatttaatcccaacagtaactgcaatgccttccttattccccaaaaacattcatacaaagtaagaaatccaattcagtggggatttcaatcgacaaaatccgaaattgaaaatgcgaaaagatgaaaaggaaaatggggcttctacacgttcgtgaaattgagagagatacctggtttagcagaaaaggaagaagatgaagtgaggtgcggctagggctagcggttcaccacaaaggaaaaaaataaaggcaccctttggggtgtaactgtaaatgccttcgtgagattattggattattttggcaatgtactaaatcgtgtctttgaacttttttggccattaaaaattctcctaaactattgagatggttaaatgtaaggatttttgtctaattttaataaaaaaattctgacatggatgaaagttcaagagacatgatttagtacatatcaaagtttgaggggcatgatttg

SEQ ID NO: 313831 - DNA, 998 bp, Cannabis indica
ataataaaaattacaaaataaaattataatctccataaaatttgaatatattatttaaatgatctagttttaattatatttagaaatatctattcatcataattatatatttacactaataaatcatacaaaaagataatgatattgataatagtacataataatcttattatgtcttataaatgtttccttatgttaatatttttttttagttattagctttttctttgattagaatatatgtgattaactacacataaattatacataatttttaacaaattaaggggttatggccacctcaccctatcaagtacatctgcagtactactttatcattatattacttgattcgattgtgtctatttgcgtatcgattttagaataatcatttatttttttggcaatacatacttaattttgctttttttattattttgtaaatttaagatgtcttttaaattttactattatataccaactttttaaaatactttttataatatttaaacaattaaaattacttagagaccaataaaaatatatgctacgtacgtacataaaatggcaaagtcattaagatttaatggtgaaatttaactgatgtcttaaatttgtatatagaagtaaagttagggggtattgtgaccaaaaaaaaatcatagagttaattgtatacaaattaaaatatataggcacttaaccgcaattacttataataattaatctaattaattaacaggtagggaatatcatttatactagatgcactaaaatagagaaactttaaaatatttaaagaattaaactaaacacactagcacacccaaaaatttctctactccatccttcaaaatacatcactaaaatctaattttttttttattttacattcaaaattttacagcacaccatacaacttcttcatttttttttctctaaatcctttaaatgtaatatttttatatacatgtatattaattataataattaaataa

SEQ ID NO: 313832 - DNA, 843 bp, Cannabis indica
gggtaccttatattatgaaaattagttaaaaatggtaccttttatttcaatttgatcaatagttatttttgtatgaccatattacttttttttatgagttaattttcttattatttgtaatgatttttttagaataataaaattagtactttaataataaacttaaccacttccttaatattatttttccatttacatttatattttcaatttatggtattggcattttgctattaggatttacctcatcttcattcttttgctcttttataacatatgtgacgagcctcatcactatcatcgtaatccccaaataatgtctctatattatattaggctcatcaaaacacttctcaatgttagaatcgtcttcatcatcggtcgaactatcactcctccctcttctccattcccaatcactatcagagtgggactcaacaattgatcatttagtgtgggtacatctagtgtgacttgtgtttcatctagtatgcttgcatcttcaaattctgcaagtgtatctttattgatggtattaggaatatcaaatgaaaatggtatagaactttgaccaactttcttatgcacacgttatttcatgcgcccactattagatcatttaagatcaatcatatttatctgttttactgcataatttaatattgtttctattatatctacttttttagtaagtagcttaaaaaataataattaaagaaagaaaaaaaatttcatggcttgttaattttcatttgtacacacgttaattttgaggtttcaatggttacatttttattgtaactatcgtggttacatttttttaagttattagattactattaa

SEQ ID NO: 313833 - DNA, 1002 bp, Cannabis indica
aaaagcattactggtgcctagcattctcctcggtgtcatacacaatccaacttataaaaagtaacatccataatgctctttgtatatctgtatgtaatatgattatatagtattaataataaaggcgcgtgcattaaatgcgtgaaatatagttgaagcctataaaactttgaacaagaaaccatgcacgtgattgggcaatagttgtaaagagatcgaactgtccctcccaaaacaatgaccattgttctcaagtaatttagcttttctttttatttaaggcttttatttttatagtacaaaataaatagtaagaagaagaagaagaacaaagacagctagctatagcttcatgcaaatggatatgaatatcagctgattattgtgggcgtccatttatgtaatcaatgtggccaacgggtagtagttgaactactatttaatgacaaaactcataaataaactttttttattatttatttgcttttttctttagtagtataaatatacaagttaatttttatggtcctcttcatcgattgaccaactatctctatagtccaagaaaattatggctcgtggggagtggtggagaaatgttgcattgttatcattgctttgttttaatgtttttctagtgagtgtgagtgggaggaatgttgtttctcttaggaaggatgatgttgaagagaagaagttcttaggtcttgggaagggaggagggtttggtgctggatttggtggcggttctagtggtggttttggaggtggaggtggagctggtggtggtggtggtagtggtggaggattcggaggtggtgctggtggtggtagtggctttggaggtgggtctgggggaggatttggtggcggtgctggtggaggtggaggtggaggtgctggtggtggtggaggagctggtggaggttttggtaagggtggtggagttggagttggaggtggttttggtaaaggtgggggaattggtggtggtggaggtgc

SEQ ID NO: 313834 - DNA, 685 bp, Cannabis indica
tgtttatttgtagtaaaaataaagtataaatttgcaacaatatttatttatttattatatttattttttaatccaactaatatataatttgtttatgtgtagttaaaatactattgttccttcaagcttgtagagaaatgataatgagtttctaaaacaaattgtatgacgctgatgatgatattgattggaaattgttaccatgattttacaaatgtgattgcttttactaaaccagagttccctactctaataactttaattaagatcattgtaagaagtttttacaaatttggtatgtagatttctaagagtgtccttaatctgtgttgctcatggattagttgcacatattctttagatggatgaacaacttttgtttggctagatgaatattcatatttttggtaggatgttttagtattattttatagatcatggcatgtgtaggatttctttgataaacatgagatgtatagtattcataactagtatgtatggcgttattatattttcaatagatttgtctattactttcaaaaataaataaataagtaaaataaaagaatctcaataagttatgttaatgtgggagaaaattatcatctataaaattattatcaataatagtactaaagttagcatatgcaataactaatatgagatagcaaagatcatcatatta

SEQ ID NO: 313835 - DNA, 1114 bp, Cannabis indica
aactttcgaacatataaacatgattatattccactgtgctgacaacactataatcatgtaaaaataaatatgttctggacttaatagaatttatacctgaaatataatcatgaaataaatcatgtgaaccatgcaacattaaaatgttatttctgatctttattaattagtaaatctgattatattgaaatgagttttatttagggcacaaatcccaacactttccccaccctgtaggtctacccctctttaaaatggccacaattatttcattatcaaataggttatgcagcttctggatatcctagtctcccctatcaatcaattgattagccactttcccagatataggaacatgcacccgctcagcctttggaaaaaatttcttaccatgagtgatccaagggtcgtctcaggatatcattagcttttaccacgtttttccaaaatcatgagtcagaagacttggccttgcacttgagcatatatgttcctctcaggtattttgctcttaaaatttggcagcacaaagattgggatcctgtaaacagattccatccccatttaaccaagaaagccaaattcatttctttagttttccaaaagccaagacccccacggaatttagggaggcacatcttgtcccaagatttcaagtgtatcccatggttacctttatcaaatccccaccaaaagtcacgaaccattccatcaatctttgtagcgagatgactagagagcttagtagtttccatagcataggctggcatagccagacccacgaatttaatgagagttgcacggctgccttggacaacgtttttgccttccacccttgtaattcggaagttagattctcaagaataaaatttaaatcttcatccttgcgttttgactagaataaagggagacctaagtgtaaagtccttttttggcaagttagttgacaaaataattttttcttttatggtaagattgttgtgcattcatattcgatttcttgccttataaattcggattgtagttgctcttttccttgtttggaaagttgcactttcagctgaactttcctttgttgaaaacttcttaaaagagaaggaattctcttttggaa

SEQ ID NO: 313836 - DNA, 725 bp, Cannabis indica
aatatatattgctcggtaagggtttgatgcgcaccgttttggacaaacaatggttgtctgaaaattctgggttgccattttttcggttggatatgagttttttttgaaatttcgataaacatatacatatataggatgctttatttttttatcgttatattatatgtaagatatttttgatagttacatatatatataactaaaaattaccccatatataatgctcggagtgtatcgttcgttgttataacatatttttctcctcctattcttttttgtgatatcagttctcaaaattaacttatcgttaagtaaatatatatattttgaggtgaagggtaacaatattgtaccaaaacacacttgctctagttttaaacctcgaacttgttacaagattatacatgtgacaaaattatactaataattaattaaatttcattaatttgtgtagatgcaaatttacaaattaaagtgatatttataatttggcaagttcaaatacgtgttctaaaataatttataataaattttaaaattttgtgtagatatataacagaaagtggaaactgaaattatcaaaaaaaaaaccaataacaaaaatgatcaatacaaagactccattttgttttgtattagatgcaagtaactacctctagtttgtactattagatatatattggctttttgtttatttaaaaaatattttttaaagtgtttggata

SEQ ID NO: 313837 - DNA, 1056 bp, Cannabis indica
agatcctggtaaaataaattccaacagttcctacattctctcatagcctcatactcttcttatacttctcatataacttttcatctgtaatccacattctcattattgtaacaactgaagagacccatagatagaaattacaaggtttcaacctgtaatctacatggtattatctttagagtcaatacaataaaaaaagagtaggtcattacctaatcaaaggagtcaaacttctatatattcttgtgtcttttatatttattatcattccgcatgtgacagtcataaataaaatttgatcctgctttgactttgcgttagttggctaaattcacagtcaacaactagatatgtggctgattaagtatttttgagtgtcgaatatatttgtacaacttcttaatatctagtaggtattatcaactacaaaagaggtagccatttttagtgatcttgcccttttacttctatatgttagattttcgtagcctccacaatgaatcaaggttcagcactatggagccatttccagttgttcttgttgatggatttcctaagcaggtcacaaggtaaattttctctcatgttttatcttgttttattttgagcattgttttttgttttcattattgttccattatttattattgtttttatgttattttgtggttgttttgcattgactgtggctaatttgtagcagcatttactgagtactttattaacagcaaacccatcccttttgatgattttgatgtggaagttcattgtgatcgcttagctatgttgttcaatcattatggtctaaagaagcagatggaaaacattgatagtaaacccgagtcttcatcagccgttgtgaagaaatgatttatgttttggatcacattcttagtgttttagttgttttggaaattttttattatctcgttgaaacaatgttgtgttggaattattttaccaggatcttagatctactcacaagtatgttgatcaacaacctaaatatgaacttctaaaacaataataaataaacacataaagtatgagaaacct

SEQ ID NO: 313838 - DNA, 1206 bp, Cannabis indica
ataagtgaagtgacatattttttgtaagggaatgaatgttcataaaaaaaatgatatatatataaagatatgtatacttgacttgtggagtctagacacttataactaagaaaggtacaagatttggatctaaactctaacttgtgtttgttgtatggcctaacattaggatagcaagtgcaaccaagtgtttgaaggtgttgtaatctggtttggtgttgtacaagacttcaatatgcaacttatgattgagaataggtgtggaagcctattgtggagatgcaatgcagttctaaaattttcatcccagaatttaagaggcatagaggcttgagcaagcaatgtaaggccatttttaactacgtgtctatattttctttccgctaacccatttttctcatgtgtcgtggggaagggatgcctatggatgactccaagtttagtgagaaatggtgtaaaggttttgtattcaccccaatcagtttaaagagctaataatttggttcccaattgtagttcaacttttgcttgaagtgttagaaaactttgaaggcctcatattttattttgagcatatatatccaagtgaacctacaataggcatctacaaagtgtatgtaatacttataaacatttaaagatagggtatgagaggggggccgtaaatcaaaaaccactaattgaagaagagtcgtaaacacagtgttaaaggccttaggaaaaagaaatttgtgatttttcccaagaaaataagcagtacaaacaaaattaaagtctttattagaaattattttattagaagaatggagtacatgttaggatttatgctctgaaaagtctataaagacatttatagttgaactttttatatatgcttgaatgttaaaatattaatattttatattgaatactttatatataaatatcagaaaattatttattcatatatgaggttgtgacttgcattgtatgaagaattaagatcactgaccatgaataaaaatagtcaataacatttaaagttatgaaatttttaatcaacggatgctattacagttcactgatgctcgttgttcgatgcaagcaatctcgattcagattattgataaaggaagacatctaagtaaagatcctgtatatgatggatattatatatgacatggaccgatatgtaagtaattaagctgtctttatcaaacatgttgt

SEQ ID NO: 313839 - DNA, 1190 bp, Cannabis indica
tatggcataaaacccaacagtatgaagctcaggagcaatttaaagacctattgagaagattcactcaccatggtatggagcagtggatggtagttcaaaacttttatacatgtttatgtcctactactaggactatcatcgatgttgcatttagagacacttcatgagtaaaagcacaactggaggttatgaattacttgaagatatgtcaatgaacaaccatcaatggtccaatgaaagagaaactgggaagaagaaagctagtacttatgaattggatgtcattaccgattcgacaactcaagtagctactctcactaagcaattacaaaagacaattgaagttgccaaagttgtacaaactaggtgtaagatttgtggaggaccacacacttttgacaagtgtgaatcaactgaagatgttgtgatgactcttgctcaagtgcaagtaatttctaacttctagaggcaattcaacaaacccttcttgatcaactcatttaataattgatggggaaataaccaggggcagcaacctcaatttcaaaaccaagcttctattcttagcagtaaaattttcaagctccacttgctctagtaattgatctacaagctgcttttcttactctcaccaatatacaaacttagtttatgactgagccaagagcatccatcaaaaatcttgaaacacaagtggggcaactagctaatatgcttcataatagacctcaaggaaatcttctaagtaatacaaaggtaaatcctaaagataactgcagtgcaatcactcgtggtaaagagttagaagagccaatcaagaagcttattcttgcacaaaataccaaggttgagaaggatgttctataggattacaaggttactaagaaccttgagaaaaagcagacaccaattaattatgaccaccacatcaagattccatatcctcagtgacttcaaaagaagaaacttgacaagtagtttttgaagtttcttgatattttttggaagcttcacactaacctatcttttgtcgaggaacttgaacaaatgtcaagttatgtaaagtttatgaaggaattcttatcaaagaaaaagagattggatgattataagactatagcacttactgaggagtgcagttctatcttacagaagaaactacccccaaagctcaaagatcagggtagttt

SEQ ID NO: 313840 - DNA, 2012 bp, Cannabis indica
ttagactaatagcgatattaaaatttctctttttcgcttcaaaattttaaaaattactatttgatagtgattgaggtgcctactattagctaaagacgagctaggtctgtgtcctaggcctagagcccacaattaacaaaaacaacaaatatttagcttattgttttctatataaaaaagtctcaaaattttacaaaaataccattatatataaaatattacaaaaataccaaaattctccttggaacccgaacgctatcgctcgcgggtcggatctacgtacggtatccacattacattgttgatcttgatgattactacatactcatgcatgtctttggccaaaaaggagtataagtatacatgcatgtgtgttgtatgtatgttacacaatttgtggtaaaagtgttaattatcaaaaataaaaaggttgtcctagtgtggaacataaatccctagaagtgatatcattgttgcttttcaatggtggttgcatgagaaaaatgattggggtcccctatataaatatatattataaattctatatggctatatatataaattattgctcacgcatgcttctaccctattttcgttatgtgtttgtggtttgttgttaagcttctctatggactatgatcattctcatgcatgtttcaatttgttcatttcttcactttttgttacttagtcaaaagaaaactattttgtggaagtttgtaggttgcttgagaagtttacttctagtcaatagagaaatgaatcttatatcattattatttattcaaaatctctatcattttgatgaattgaagtttgttgtcattcataccaacccttcttatatataagagggaattatttgaggaaattatattatatatttattttttattttttattttaattttaatttctttattactctttaatttatattcagttttatatctccaattattatgtacattggagactctaattttaataagttatgtgagattatattttggtactttgattataaaagagggtatttatcaattaaaattattttgcaattatatttaattaatatgtaataaaataaaatgatagttttcaacttatttcgaattatttaggaaaaaaatgggcctaagaattgtattatatgtaaagcatgagtttgatttaggtaagactgagttcatgtattagtgggggagaagttgaagaatactctctttttatatacattaaccaaatttacctttaaataaaatttaattcaaatatatctcttatgagtattgtactcaaattattctcacacactcacataactaagacataatttcaaaaataatagatttgtgttctttgtagatggatgtgtaagtttgtgggaaagttttggcaaaattttaattagagaagaatgaaaactatcgtaaagtaatatgtgtaaaattggtagaatgattgaaaaaagaggtaaacagaataaattttgaaaaataggataaaaattaaaagtatcaaattaaaagacgtatgtagtgtcatttcctattggtgggcatgtttcctaaaattttacaagattactatttttttttttgtatactcaaatagtgtacataaaaaaaaatatttctagtttaggtggccctaagcacaagtctaggaccgggcttaggattatttgttgctattaaatttttagaacaaaggaataaatagaaaaatattgaattactatttcaatacaaaagtagattatagttttaaaaatagaggaaattacacttagtatgggattttaaaagttcttatgataaatatggcacatttaagtttggccaatttatatggtatttttttatttttagctttttttatggtatttgatatgccatatatatgtaattaggtttctaaatcccatatttaatgtttttatttgtttaggaatttttatttgtcattgatgccggaaaagtcaccggagtttgctgccggtgccggaa

SEQ ID NO: 313841 - DNA, 2951 bp, Cannabis indica
aatgacatagcaaacaaaaataaataatacagtgataaaatatatagaaatgttcattttaattaataaaaaatacaataaaaattaatgtttactaattaataaatatatttctttaataaataattattttatttttttttatgtaattaacattaaatagatataataaaaaaaattattttaatttttcaaaataatatataagattcttgtactcgaccaaacagtataatttaattaacagaatataattacatattactctacacagcgaaacacactctatatatttccctataatcatattttccttcataatatttcctataattaaattattttgaacacctcgtaccaaacgacccctaacagatatcatataaagcctcgagcctttccttcagtggttgagcttctttttcattccgttctttctcactcttcattacattatcacagtttgggagtatatttatttggatttcatttttcctttgatgcttcttcctttttattctaacttaaaggctttcatttttatttttattttatttttgtcatagaaagaaaacaaaaggattaaattttatatatatatttttatttttaaaataaattattatttttaattttaaattgtttagactaacataaacatgtcacttgtgcataagataaattttaccaaaagtaagttttggtcaaatttaaccaacaaaaatttaaaattagtgttaatttgtttgttttttttaaatttaagtgttctgttaattgttacattgagaaagagcatgagtttagccgtcggcgctgagttgggtaccaaaaggccaaagtaaactattgacggcggctacgtggaagcgaccccacaaacctccaaagttcgtaatgatcggaccgtccaaccctttttctaaccaaatgggcggctgatgggtcccactactcatctcggtcggtgaaatcaggtgggtcccattacttaacagttcccctgcctaactgtacaatctcattttacttaattaaaatctcatttcagttgtttattaaaaacatattcagtgcgatgcaactcatccaatcatatactgccaactcaacaataaaaaagttaaaaagtgagaaagatctagtacacttgcctccatatctgttatggtgtatcaccaaatgcatatccatttgtcttcatccattatttatgactaaaactattttttttcttcttataaatattaatctttcataatttatcaactaataagctaataacattttattattgatttttttaaaataataataataacattctattgtttaaatttttttttataaatagatataaagtacaaaaaatctacttacaatttttttttgtataaatataacttacaatttaaggtttttattaaacaaaaaggaatatggggccaatagtggaacatttgttatagtaattataaccaggaacatttcaagatccacaataattaaacccagctttacttatgatgcattctttatttttaattttctcatcaggtgttttttttttaaacaaacccaccaggtgttaaggaatataaatgtaaataaatataaattattggtatttttgtgaaagtgatgtactcaattatatttgttacaaacacataccttttcaaatttaccctctaatttcttaattatttttttttttttcgaaaaaaactatcataactttaccctttaagtattcttgtagccaaggtgtctgtgggcacacatgcttttcgttattgtttttagtcttttttcctttgtcaccaccatcacatcacttaaaatttcaataaattttatgaaaaatatattagtttgtgcacatgaaatataattttaaatatgttcaaaaaaaaatatataattttaaagaaaacatcaaatgattctttactataaaattcttattacatgttcgcacaaaaaacaccagaattttaattattattattattgttgagaaggattttttttttgaagtgcttgataaaaatacatgattatttttctgggtgaaaaaggtaaaaaactgaaagtcatgattgatggtggaattcaccaattttgatcatctaatctgaccctttgatcagcttaagaaaaaggtgaccctttgatcttttcttttaccaacaaaaaaaaaaaaaaaggactttaagggctcacttgacaatataaatgcaaaagagaaagttagatggagagtttttttaagttattaaatatattttgaacactgcgaaaaaatcaggtcagatggtaatgaattatattatttatttttccatttaaatgataattacattagtcttgtaataataatttgatgccaaaatataatccttattccaattacaattacaatctattataaaagtaaaataacactttaataaaaaatatatagtaaaaaaaaatcaagggtctacattattttttttaatattttatgattataaaataaaaataataaaattattttagtctatacacattttattctattatattctcatatcattactttggttattctaattacgcgttgtaattaattcttattactattactattccattacaccaaattaaataccatcttataagaaaaacatatttaggtgtacaacaaaatatataaattatatttttgatttcgtactgtttagaatattttaaaaatttataaatgatcataaataactataacatatcattaaaaaaaataagactaaaaaactcttttatatacctaaataaatagcatgtttagacttatttaaaaatattactataaaaaatggtatggtaaaaagagtgagaatttttttaaggagaaaaagagatttatataaaaagaaaaaaatagtgacaaaatatttaaggcaaaa

SEQ ID NO: 313842 - DNA, 1065 bp, Cannabis indica
taatccgacaaagcccctccccggaaccaccaaagcatccattgctagagcaaaagaatcaggaggaggtgtcatccatcgagtaggtcggtttacaacaggatttgcaaggccccctcccgaatgaaggcctctccgaccatactccttaaactctgactgatcgttataggctaaatctagagcaacatccagtcttgactgtttatttctaattaacactgagtttctgtcataccatagccaccaaatagttgccatcatcaattcaaaagcattacgggataatctgtcaaatagaatagaagaatttcttgcattggcccatatacacagcgacggagcatcgaccacacccccaaccgataccacactagaataaaactagaacaggaaaatagaccatgctcaggagtttcagcttcttctccgcatcgtgaacagtaaagtggtacctgaactttccgagagataagttgtgttgctactggtaaagtcaaatggaacatacgtcaaacaactttggtggtatattaagatttcatacaccattccaccgagttaacctagatgaatctgcaactcccacctcaacctggagcgaccacgccaaagcgtagccactcttaacattataaaccccgtctctatcatagtgtcagcactaactatcttctaccccatgcctcgctaatggaatagaaaatattgtccacatccattggcaaaaaaacttgttgaacctgttgagtcaattgtagcaaaaatctcaatactttctctttgcttccacttaaccactaaaatattgttagcaatttattgtttccatccaaatttaattattaagtgctatgttcgattatctatatggacacagagtgctatgttggattatttatttacgtggaccaataaaattgtgccacgtgtacattgtgtacacgtagacattccaccatggcagttaacagccaaaaatggatggaaagggctaagtgctaacagaacttggatttaagagattttaccaccaaaattttagaattggggttagttgcaaaa

SEQ ID NO: 313843 - DNA, 1058 bp, Cannabis indica
aaaatctccagaattgagaattataactctaatgcctatttttaaaaatggaacccaccacaatataaatcataaatgattataaaaatatcaataattaatgttaaatgcatttactaatccatactctagcatgcaatctttacagcataaaacttagcatatagcacttagcatttagaactcagacttagaacatagagagtttaggcttagtttagtgctctttatatatgagagcttataaaagatagtagattgatatctctttaaatgaggagatatcacttattttttacataataaaaaaataaataaataacatgttaattagtccccaagaataggtaaataactgaaattaatctcctattttcgtgggtcgctgaagctcaattcgtaactagaagtgttgtccaagctgaaagctgtagaggcacaaaaagtgcttgccagaagagaggttggccgacctatgctggcaataggatctaccaggggtggtccggctagacccccttggtttgccagtttgctattcttttgtcatgcttaagaatttggactcctcgtcaagcggtacgtcgtgcatggtgacttggcattcttgctgacaagctgtactacatgtggcattaatcttgcctatgtagacatgtcacgtcatgttggcaaaaattaggataacaattagtaaccgaaaaattacttttaacaacgtgagaaaaaaaaactagaaaatgttggaaaacatcatatgtggctgacgtggcacatcagttatagtagtaacattattattaaaaaataaatgtaaaaaatatatattattgtaaacttctcaaaaattaataaatatgttgatttttggagttaatatacaacttgtgaattggagcataattacaaaatttggaccaaatataatattcagttatttttgagctaaatttactataaaatttgcgtcatgcattggaaagagtaatttgcggcaaaacccctcaactattaatttacttgcaaaaaaccatccaacctcatattttggtgggaaa

SEQ ID NO: 313844 - DNA, 1073 bp, Cannabis indica
aaattaacacaaaataatatgagaaaaaaaattaaaaaaaattaagagtagtttttaaatatcattttaagtttaattgttttaaatattagggtatatttataattttgtaaagtgcaataatttctcatacttaatttgaattttaagttgattttaaatatattttatttggccgtttttatcttctaactaagaatttcttttattagtttttaatatcattgttaagggattaattcatttttttatctaattttgttttgtaaatattttggggaccattctttgagttgtcgtgtagtattcagtgatacaagctagagttccagttctttaggtgtgttgtttgagaatgttatagttttattgtttaaatttttaggagtagatttgtctcatgttgttcgttgattttagtagttgatagtttgacaaagcatatttttcggttagacgataagctattcaggttgaaggaagtttttatgttatatgtaaatatctgtctcataaattcatgagtgattttaattaagatataacaaaaaatcattataaccatatataaaaatttatcatgatcattagatgttgtgcttaactgaaactaattaaagagaagttctcacaatatcacaaagtaaaatatttgataaaaaataactaaattttatactcaaaagtttttattcttggcacgagaataataagagacaaaattatcggattaccttttttccttagtttgattaaaataattatgaggcgacaaaaccatatattgttgagacatgaagatctacaaaaaaagtaattttattattttaagtttgattaaattaattaattaatatttctccaaaaaaaaaacttaattaattaatatgaattatttataatatatagttacaatgaacagagaacaaaaatgtcgccctcaaagtaagactataagtcttaaggtttgaaatggtcggactcacatggagtagaaaaaaaaaaaatatgcatctatatacatttcttttttttttgctaaattatatatagagttttttgcatcaggaacc

SEQ ID NO: 313845 - DNA, 1254 bp, Cannabis indica
atactttttttacctttaatccaggttcatatttttcagccaattcaagtggagaattatccccgatgatctcggccgtatgtcacagcaatggtagaccagtatgtgtttatcccaacacactgcttaatattcacataagacaatctagggttttctattaaaccccgcggtataaataccctaaaataaaacttatattttggctcgaaaacatacaccatattgtagagctcgttgcaagattcaaaacggtatatagaactgttgttgaaggaatttttacaacaccaaaattaaataataataataagtgtagagaatttgtgcaagtactcaacccaaaatggcgagcactcaaatcaggaacacaaaatacttaacagaaacaggaactacaaagaactcaagagaatatagtggttcggtcagatcactgtctgcttagtccactgttgcatggatttctgtcttgttgccattttacggtggatcattcctttatatacaaagcaagtgtcctatgatttacatatagattaaatttattatcaatccgttcatacattgagttacagtaattgaactgaaaaatgtaaacaataaatgaagaacagtttcaagcttaatttactaaatacagcaacgtatgcgacttctataatgcgagttggctgttcatattcctgcataagctcgcaggctttaagatgcattcgagactaatcgagtctaggatgtctgtgtccttttaaagtcgcttatatggacatcatataacaagctgagagaaccaagacatgcgagtctatatcggtttatcaaggctgttgggtcaacgggaccaactcacaaaacagagagtcgatctctatgattctacaagaggatatcaggaatgcttgaatatagcccagtacatgctagcttaataccgttccttggtcttaccgaatgcatgccatacgaatgcgattagacttggtcctatttgcatcatctcgctgaatataatttagacgaggttcatattcgagtggtctctcatcgacgtcccatatttccttgaggagagtgaatacacgtgtcattttaataggagtctggtctcgagtttcgaggtgagaaaatctcactataacacatggccctagttagtgagagatgcggtcaagagggaaactataatcgagaggcaggcgaagagatgtcacgaggtggtgacctttggttgtcccatcgagggtttcaaaa

SEQ ID NO: 313846 - DNA, 2213 bp, Cannabis indica
ttttgtttcttgttttttttttttgtcattattttaaggttattttaccgttgtttacccatatcaatttatgacgttcttcaacatccttgttctgctcaatttttaaacattgacagtatcatttaataaaaaaccaatcacaatttatcaaatcattcatatctcaattccatgtagtacccaagtagtttaaaaatcctacaaagtacgtaaagatcattggcatcccttttaatagtaatagaaaaatataatgaaacttgtatgcaaattcttttctttagtattctatgctcaaatgtatttttagttttcccaccattgttccactgctattcgtatattgttcttgttctctttatttttgatgtcttgtactgcatgttctcttgttgtgccccagctccccatatttattgcacttgttatgttgtttctttttctagccagctttcatcctctttttttatgatcttctagattttaccctttcaatgggaggcaacactattacgtcttttcacattttgtggtacatctcactcactttggtgtcttattgggtacattgttccttcataagctgctagccaatttttctttgtgtagtaacatgagcagtacttgtatgtgtccatgttcatctccttcaacacaaccacaacatgttcacatggcaattcatcgatttggaacatgttgcacgtgcatgttctttctttgaggtctactatccatgattcttttattctagttacctcaaacaaataatcagtggttgattttacctgtgttatttgaaaccaacatttattatacatagagaacaacaatgggacaactctacaaaaatgatagaaaaatcaggatagcctcgaaatgattttgtttgacaatttaaattgcataatctaaatctcacctctaggttcaataagtatgtatcgcttttcagaagtatttgttctccaggtggtgccaatatagtaaatgtgttttgtgcttttgtcttattgctatatgtctattgttgcactaatgctctcaagcattctaacattgttgtaattggaagctctcttgatgctaaatttgctgagtttagtgatttttctatgtctgaggtcatggtggaatttctcttattttcacggtgaatccttgaccatttctcataactgacttttttcaagtacggtcttatgcgtttgtccaagccatatagttctgcatgtggtactcaaattgtgtttctgtgtacgctttcactgctctaaagaagggtcggttgtacttagcaacatgtgttttgaaggttgttcagcaggtgatatccatagtatgcgcgtgtaatttatgtgtatatttctcttgctgctttgaccaggctctcgtttctgtctgaaattagacacagtttttctatcaccttcttttaattttcttttgaaagactatttccaagatttgtcattttcggaatcaacaacacataatgcaagcagaaatatgtgacccgctgcatcttgtgtgcatgcagacgataatgttcctccgtaagctcctttcaggaatgtaccgtcgaccactattatcggtctatatgttttccaccattttatcaaagcatctaaagtcataaaaacaaacagcaaactattgtcttttgttgttttcaaatccacaactgatccatggttattttttacaccatgtgcaagaaacttggtatcacgttgtatgattccttagcatttcctcttaagtcatttacaacatgctatttacttctccaagctttcatgtagtttatcttaattctgtaactgtgtttcaattctccttttatatctagtggtgtttcttttgtctttttgtttagaaacttaagtttcatgcattcttctatgaattttattgttgcttgcctctggtcttcatctaacatctattgggcaggtgtggatgtttgagaacctcctgattataaatgtatttgttggcctatttttctatgcttgtagagaccaattacatctttcataaatacatttcagactgcattcttgagagcacgacctccataccttgaattggaaattgtttttgattgcataatagcttagttcctcttgagtatttctttgtctttgtatgcctatgctttatcaacttcagggtggaatttatctgttatgagctttgcgttg

SEQ ID NO: 313847 - DNA, 1571 bp, Cannabis indica
attgttccaaagccgtttatttatttttccttttcacttttttttttattctactctaaaaaaatgtaaaattattaattaattataactctaatatttgtcaaaatatctacaacaatattagatatcaattaaattaaattattaattaactaatttaaaatattaattatttttttttttaaaaaaagtacatgtatcgtcatattttttaaaaaaatatctatgacaaatgtattttagattatagtttttcttacctatgtttggatattaattattattattatttttttaaaaaaaaatatctataacaaaattaaccttattccattaatattattttaaccaaaaaatatcatgtatgtaatgttaggttttttttttttttgaaattaatgttagaatctttttaaatatttataactaacaaattttaagactgtaaatattaattaattaatataaaataattaattaattttttttgttaggatatgtttggtatagttgtcataatttataatttattgggcgataatctttcattgatccttggtgtagatcacgtcggggtttgttaaccctttaggatttctccccgcgagtgtagatgggtccgagagcatactcctctcgaccgtccaaatttgtttaaaatatgtttaactaaataattataacactctttttctcggttttcgtctttttgttctttcggatagtttgttttttctgttgtttttgtttgtcttgcttgttgtttggctgttgccagtaatcaaaataaaaataataattataacactctaaatttttccacatcactctatttaatttttctttgttttttaatattttattccttttacccttataaacttaatttttattaggtagcttaccttcacttataataataaataagaagttaataatcaaatcaaaaataataaatattttttagttatgatatgttggcttcaaaattaattgtattttgtatcatgatttatgttaggcatttttgcaaaaaatacttaaaattataattttttttttaacatttttacgaaccatgtcttccttttatgaattttttataactacatttttatgtaatctcatgaaagcaacatataatcaatataatacaaatataaagtagcataaaaataacatagtataatgttattgtgaaagcaatttgtaaaaactatcatccatattttttttgaagaaaaaaagtttaaatttgtacaaaaattggaaaaagttataaatttgtatttttgtaattttctatacaactaattaatgtatgaatttctcactctaatatatgtatatttatatcaatttataaaataatcataaattatactatttttttcaattattataacaaccgcgcgaggcgcggttatgttgtctagtatatatataaaggaaaagtatgaggcggtgacgtggcggtctaaaaatgctttaaagtcatctttctttttcctccttaattctctcttttctttaatattttattaatttcatatatattaattaatataaaa

SEQ ID NO: 313848 - DNA, 2021 bp, Cannabis indica
atttggtacatgtcaaagttgagggggcaaaaaccaaccttataaatatttcctatgtatgtttaacattgcatgttctaatgttcttgtttgatctttggtattttcatttcttaatttgcttttcgcttacgtttattatataatatatgaagaaaatactttcttatttaattactatatatatattctttgaatgttgttaaaagtaatttggctcactaaatccaattcacacaactcattttcaattctaacactacaagaaatattggagtttctgcccgagcatttcaaaatggtgtttgcataggtcacttttggtaagctatacttgcagagatcgcgttggtgaaagttagatactttgcctattcatattctttgttggtaaaggatgctaagcgccattctagaaaagtgtagacaacattacacaaaatctatttaaattgccaatctttgttagtattattaaatctgtatgcctaggttctatatacgtattcatatatatctttggtcaattatttaagtagttatttgttaacaggtttagcagttaaatctattaatctctcaatctcaactggagtcttaactcaagtatagaagtattctgttagtagaggtatttagtctataaatacctctaacttcttaactataaagtagttgattcatcattgtaaatactcagtacaattaagaaataattttatcaaaaagcttttgccttgtgtatgtgcttatgttctgtgagttgtgagtgttctcggattgttcttggagtcattcctggcatgtgggatcgagctcacattgcaacaggtggtatcagagcttggagttccaagaggaatcttgttttggctcgtaagttcaggattttggtgatcaaacaagaaaatgagaaatgcaaagtttgatcttgaaaagtttacaggaaagaacgattttgatttgtggcatatgaaaatgagattattgctagttcaacaaggtatgtaatagcttttttggggagagaagggtatgcctgaaggtctcacccagaaagagaaaataaagattctcgagaaagaacatagtgctataattctaagtcttggtgactgagttattcaagtgtcgaaggaagactcaactgcagggatatggttgaaactggaaagtctttacacgacaaaatcgttggcaaacaggttgtttattaagtagaaacctcttttaggatgatgtaaggaaaagaaattgaaaatcatcttgatgatttcaataaggtgatcctcggctaggcaaacattagaattaatgttgagggatgaggatcagaccatccttgtgctgaattctcttcccacagataattatgaacactttgtggataacatgatatggtaaggattcattgatattagaggaagtttgaaatgcattataatgtcaaaggaattgaagagaaaagaaaagaagtaagatgaaggtgttggagatgaattattgattcgaggaaaagggtcctagaaggagaacaaggactagaacaacacagggaaaggtaaatcgaaatccaagtttcaaaggagatgtttcatctgcaacaaaccatctcacctgaagaatgattgtccaatcttgaaggattacaaattcaagaaagatgaaaatgcagacattgtttcagatatgcagaagacagtgatggtacgtgctagtatgttagccatctcaaagaacaagtcagaagtggactaaaacatagattatggatattcatttcacatcttccctttcaaagaacatttcattaaatacagatattcataagacaacttgtaatcaaattatagagaagttttgaattaattactgttaggatactgttagcttattatttatgttatttttagagttaattttcttcttcattgtcactttttagaatatttttatgcttgttttcttcagttttaggtttcgacactacgaatgtataaattggtcaaatctcaaaaaaa

SEQ ID NO: 313849 - DNA, 1065 bp, Cannabis indica
aaaaaaaatcataataattaatataaatttatctgttaatcgtgtataatcatatataaatctacatacatatgcaaaaatcaaatttattgttagaattttataaacatgatgatgatcctaaatattaacacaaatataattaaattataaataaaattattaattatataataatccaaaacttcttcaattaatcatgtgttttttcaaattgttgatgatcatcaaaatttgtttttttcttcttcttctccttataatttaaggaaaaagaaaataataataataataattaaaaagaagatatgaaaaaaaaaaatcaaaccttgaagaaaagagattcaataaccagctaaaaggtatgtatggatgattctctcattgattgatatggaattaaacaataataaaaataataattaatcattaatttggttttgattacaattaattacagcatattaaattatttatgaattaatcataaattggaatattaattaatcgattaattaccacacaaattaaaacaacccttcctattatcatgcccaacctttaaatttagaatattaattttcttaaaataggcattccatcactctcaactcataattaaaatttgtatatatataaatagatttatgtcatttataatagtttgttgctaattaactacatatttaggaaatataaaaaagttgtactaccaaaaaaaaattattactaagatctaactactatttttgtagcaacaacgaagaaaaaaccaaatattttacttgaaatatttagaattattattttaatggcagagccagtccaaaatttgacgggggcaacacataaaaatatatataaaaaatctatatttatttttatttctcaataattttcacatatagtttaaaaaatattgaaaaaaaaaattgagggacaaggcacatgctgggtcggcccaaatatttagcagcttgagccattgcaagaggcctctattttccaaggcccaatttctttcttattttttaataaaagggataatttcacaaatgcacaaaa

SEQ ID NO: 313850 - DNA, 2140 bp, Cannabis indica
aataatttccaacagaaaggccctttgcttacctggaataataatgtgccctccccaagaaacatccaggaacgtatcgattagggcattgctaaccatgcttggaccgatctgttttcgaatgttgttctcactcacctgggtttttgtggctcagaccaccgagctcttaagattgttactatcagtaccacatctccctctcctgatcgcattcataagcactttattttcgaaaatgtctggctttctgaaccaagctggaatttaaatttggaatcagcttggatcaattcccctggtccctcgggggaaattcctcgtctcgttgccactcaagccacctgtgccactcaccttaacgcctagaaccacaaaaacatttccaattcaagaaacgcataaacaagcttgagagagaccttgaatgtgcaaggaataccaccacatgggatgatagtgtcattggacatatcaagaatacgcaatctaagctcgatccccttctctataaggaagagacgtattggaagcaaagggtccgaactcaatggcttgcgcagggtgacaaggacatgaaattcttccatcgcttcgcctcccaaaggaagaaagttaacaaaatcctcaaactctacacgtccaattggggcctcgccactacggaggaagacataactcaggaaatcgaatcctatttccacacacttttctcttccaccaatccgtcaccagaggacatccataatgtttaggaaggaattgtgttctttgtctaacactgacagatcccttttagatgaaccttattcaatagaggaagttgaaaagcctttcacatagctacctctggataaagccctcggcattgatggttttaactcaaacttctacaaagccaactgatcgtttgttaagaaagatgttctcccggcggtgcttagctttctcaatggaaacgggaacatttcccctattaataccaccctcattactctcattcccaaaacccagcaacctactacggttaaggattttaggcccataagcttgtgcaacataacttacaaaatcatctaaaaacgattgctaacaggcttaaattggtgcttaatagtttgatctctcccaatcaaagcgccttccttcctggtagactcatatcggataatacattattgcccaggaggttgctcactctattaagcttaaatcaaaagggaagaaaggttggatggcgatgaaattggatatggccaaagcgtttgatagagttgaatggtcttttatcttggccatccttagaaagtttgatttctcgccacaaataatacaccttatttcggcttgcacctctttggccaccatccaatttaatgttaatggcaaagtctccggccatgtttccccttctaggggtatccgtcaagttgaccccctttctccctatcttttccttctttgtgcggagggcctttcctcgtgctcaggcagcaggaaagaaacagaacgctcattggcttcaaggtggcccgcactgcgcccattatctcccatcttctgttcgctaaagatagctttctcttttgtcaggcctccattcattcctgcaatatcatcgaagatgttcttgctcttttgaaaaatatttgggacttccacaacatatagggcatacaaaaagaacaagtctttcactacctgcatgataaagtttggggtcacctaaacagctggaaacataaagttttttcgaaaagtggtagagaaacgctcctaaagtcggtcatccaagcaatccccacgtacaccatggcttgttttcgcctcctagtcgccacttgccactctctcgagtctattatggctaatttttggtggggctttaatgataacaaccgtccaaagactcattggtagagttggcaaaagctttgtaggtccaaaaagtatggtgggtaaggctttcgatctctagtccattttaacaaggctttgctggctaaacaagccttgcgccttcttaaacatccaaactcaactgttgcaagggttttagctgctaggtactacccaaactcctatttcattaattgctcgataagacactcctcttcttttgtttggcgaagcatttttt

SEQ ID NO: 313851 - DNA, 528 bp, Cannabis indica
atcgatttaatctcataagaacttttcccagttttaattgtttaattttatcaatctttcagaagcatctggtttttgatagaatggggtttttgatgctcaaggtcaatccctaacatattcccacaattatttcgatatccaggatcaatccttgccattccctaggttccaggtgaattgatcccggtttcagtagtttgtcctaactgccactggttgacgaccgacttttctgtgttgcaactctatatggcagccattgcgagccggtatttgaatactttgcaatacttttacgtaattgcttgaccagacttaatgccccttgtcccacttttcttgcaacatgttctcctctagagataaacgaagtattctttcctcctacaaaggaaggttatggtccctggtcgcttgggttactgggtagattgggctggtcttggacattgtcctgcccccttacatattgctggaagtgtctgttgggttttgtgtcttaaataaaacccattacaatctgat

SEQ ID NO: 313852 - DNA, 913 bp, Cannabis indica
aaaaaattattacggcatgtgattttaaacataaaattgactaaaacttgtaataagaagttgtaattatcactcatcaaacaaaacaaaaatcttagaactagcggttacatttagttttgacaaattaaaatcataataaaaagtcaccaataggttcaataagcatttacttaagaaatatccaaatcattaattagtgatttggttaataaatcttgatactataacagtaacttattaccatatacagttaaaatagtcaactatataattaatatacaattaaatactattataaccgtttataacatcttctcaatataaatacatgaagtaaataaacaaaaatttacacaattaaaaaaatacatcactcttttctctcttgggtttctactgatttttttactacttcaataatggttagtaacatatttttctccttctatattttttttttctcttccattaatttgttttattttaattcttaattattttgtcaggaccctaaaactaagctacttaataattttagttattatttggtatgattttcttcatcaagctgttatggccaaaatatatacaatgtgcttgattttggtagccactggaaaatggcacaaatgatgattcacaagtaatttaataaccattttttttattcttaattattatgtaatttattttaattaagtaattaattaataatatgtataaaattaggctgtgttaatggcttggaaaaaggcatgtggaagcacatcagggacatcagttatgaaattccaagctggaataaaataccatcttaaacctatgttatttgtaaggtccttgcctcccccaaaaatattataattcaggtaaatattataattgggaaatttacatagtatgctaactt

SEQ ID NO: 313853 - DNA, 2240 bp, Cannabis indica
cttcagttaaggtctctcatatacaatattgtcaccgtcttttgcaattagctctggctaaaatctcttacaattgtaatttgtagttcttttgtctttttttttttctgaagaaaagcgtatttgttataagattagaaaacagttacacctcatggtcattacataaaaagttttccaaaatagtagagaccgagatatcaccaaatctcaggtgagcaaacacccacttagccacattatgagctgcaaaattacatgttctactgacattcgtaaaaatacaactaaaaaacgagggagaagatctattacaaaaggagcgatagttctcaagagcccaatgaggatccttcccactaagtgcattgatcaccacactcgagtcattctccacaatgacaaacttggcaccgatgtccagcaccaccgtaacagccaagcaacaggtcgccgcttctcaacacaacgcatcaaaaaatccaaccgatctatatgaatccggatcaccctgcgaccctagccacaacagcagaacgcatgctatcaaatagggatgtacatcggtcggtttgggcggtttatcctatatattttctaacccagtctaaagttcaggttgctaaaattttagggcaacccgcccaatttaaaaaaaaattacaaaccggccaaacttttttttttcaaagtcaaacaaccttggagctactcatattgagaataaccatagcattctaatctactgcttaaaataagaaaggaatattaacaagcaccaaaacatcaaagttttaaaaaaagtctagagatattagacattcatatttataaaaacaaaaattgagcaagtgaaaatgaggtaggctcagaaacctctttggcaattgaatatgcactggatattacatagaaatgtaattatgtaatgtacacataaataagtacatggacagatgaataaattccatgcatggattgaaaaacaagccaaggtttaagtgccagccacgcttggactggtgagagagttaggaagatggccgtcggtgtggtggtggactttcagactttcactgttccacaaaatagataaaattgacagcagatttaagggctttttttaacttttatttttaataaaaactgtaattatttttaataaaaatctggcagttttttaataggatgaaataaaaaaaatattattttaaaattataaaattaaaaattaatagtattattcgggttatttcgggttgagtgggtttcattgggcgggttactttattttcaacccgcccaatatacagattgggcggtttaattttttgtcgggtttttggtttttttttttggcggttggagatggttggaagttgaagttggctcgatggtaacaagtcatggcggtgtgacctgttttgaagcaaatttggcatttaggcagtctattgggaggtctggaatttcagggaggaggtgcacggggttgtggtgagtatggtgcatgaggatggtgaaaggaaggttgagagaaaggacgagttggctgcgaaggcgaaggtgaagaagagtatggtggacgtggctgggaaggtgctttcggtctctgtttggggaagggtaagttggcgaaattggcttgaagggagctaagatatgcagctgcagtttgtcgttcaagacgagcttcatagctaaggagaagtgcatgaacttcttccacagtaggtcgaacagggcgagctaaaatgggtgttacaaaggcgttgtactccggtcctaaaccatttaagagataggataaatgatcttgagatgaaattggctcaccaacaaaagcaagagtattacacagggattttaatttgtgcaaatacgcaaaagtagtcagcccctccttctttaaattctgtaatgtcgttcgaaaatcggagccccttgcaaattaaagacgcggctgtgtatgttcgttcaagagacacccagatttctgcagctgtggtgaagctcacgatttgcccaagcatggaatcggagagagaagcatacaaccaactcatgagaagctgattgcaacgatcccataccgtgaactctgggttgattcggttcgaggtgttatcgataaactgagatggacagactaccatgccatttatgtaaccttctagtccgtttgcaataatgatattttgcatttgcattctccaaacaagatagtgttggaaattatt

SEQ ID NO: 313854 - DNA, 828 bp, Cannabis indica
atttcaatacaatgttattaatttcttaacgtaataaataaatttttagagtgtgactcaaacttgtgaccaattaacaaacatgtttaatttaccaaaaaaatattaaagaaagaaaagaaaatctcaaattttatcctgcataacaaattaacaatgaaaaaaaaaaatctcaaacgatgcaacgtaattaattaattctttgatcacaaaatttactaattatatgttgatgcattggtcataaaaagtttgtttgtattcccttacatttttatcaaaatatatatatatgtatatatataaatcaacttgtggttcaggaaaaatatatcccaatctcaatttttagctaaattatatatagtatatagtattatatatgacccatgccaagaaatatatatataggggaccaatatatatagttatcaactaactataattgagattgaaattgtactttgttccgattgtatgaaattacagtatggtggtcacgaacaacatgtcaattagataagtcaactattaaggccaatatagttggtgagaatttcaatctgaattatactcaagtatatgactattaatcatgattaacaagtcaaaatgagtttatttacttattaattcatatatacttagtttttcaataatgatctaaaatttgaaactagtaattatgcacatgtgaatatactaaagtcaaactcgttagttaatactctctaatatatattgttagattaaaaatcttttgtgggcacatatgtataatgtatatgctattataaaatgtgatacaaaattaagtgaccaattatg

SEQ ID NO: 313855 - DNA, 1200 bp, Cannabis indica
gatcttggtaaaatataatccaagaaccctttcttagagcagctctccttttgtaatgtacttgatgatgaggtccatccagtccagttcttgatcattggtagccactatctctttggttttgatgctaggttttcgacaagtaccacccccagcctttctacctcgttgtccgaggctaggttagctaagttctgcctgagcattcttttctcgcgggattcgctccactttgtattctttaaattcttagagcaatttcctgacaaccgccacataagtggccatcttttctccacgggtttggtattctcctaacacttggttgaccactagatgtgaatcactgtaaacttctacttttttggctcctacaaccttggccaatctcaatcctgcgattaaggcttcatattcggctacattgttagaagctgggaacgtgagccgcagagcggcctggagtcataacccatctagtgagatcattgctattccggcacgagagccactttcatttgacgccccattgacatataccttccatgctagtattttctgagctgacatactagcgttggcctccgtctcgttacactccacgatgaagtccaccagtgcctgtccttttatagagatgcgcggaacatattgtatgttgaattggcttaactccatggcccatttaaggattcgtcctgaggcctaaggcttctgtagaacctgccggagtgggtggttcataaatactttgatggaatagacctggaagtagggcctgagttttcttgaagcaatcaggaggcagaaagctactttttcaattagggggtacaaagtttcggcccatatcatgcgtttgctaacatagtataccgggtgttgaactttttcttcctccaggaccagagctgcactgacgacgttctcggagacggctaaatataagaacacgtcttctctgtgaactagtttcgatagtattggtggtttggccatgtgctctttcaattttctgaatgcctcctcgcattctttagtccatttgaatttttgacatttctttaaaatattgatgaacgggatgcatttgtcagttgagcgggagatgaatcgacttagggcaacaaccttccccattaagctttgcacatccttgtgtttattcagggagggcatgttttgttgggttttatgccc

SEQ ID NO: 313856 - DNA, 789 bp, Cannabis indica
attagcaatttaaagcctagtacctttagaaaagaaaaacaaactaattaagttagcctacttaacctcattaatacaataagctgaacaaaaatgacattgcatattagatattaaactaactaatctatctgaattattttaaaactatatagtttgttatgatccatctctttcacaagaccaatagccaattttttgtttggtagatttttttccacgtctcaaatgatcagaagtgatgcttttccttttatttaatcaataatagtaaattaatacttaacactgaaacaaatattaacaaaaaaaaaaaaaatcgaaattaaaaatgacatcatcttatcttattgctctagaaataaaaaagaaaaaaacaggctgtaacggcaaatgttgtctattatgtgaattaattttacattaatcttagtcattaaaaacaattatggctaatatggagaatccaagacaatgattgagccatattaagtcaataataacaacaacaatagtcttattaaaatgtttttttttttattttattaatttatttatttttcaatgggccttattattaaagttatgcatggacttagaaatattttgaataggtgaaattaggggtggatagtattcaatctgaactaattaaatccaactactaatttcatccaatctaattataaataattagatatccaattacaattagattgaatgttaagagttgaattttaattagatttgatcgattattagatgtcaatctcaaattttaattaaaaa

SEQ ID NO: 313857 - DNA, 926 bp, Cannabis indica
aaatccacttatttcgacagtgttatatcctccacttaatagtattattgagttgctcaaactcttcctttcctttataagttaatagcaaccaaaccaagaaggaaatcataaagggtcgtaaacatatgcatcattggctaaataacaagagttgtattgtattaaataataaataacattttatttagataaagcaatgtattgtattaattattaagaccaaattttttaatacaatgtatgttgtattatttaatacataacaaataattcgtattagcttgtattataatatttacaaaagattttgagtcacaccaatctccgatccgaacccagacttgggaccggcctcggatccggacccagaaccggacagagaaaaatcttttaaggaatagaaaatggttttattttttgtccactaaccgagttgaaataactaataaaacaaatcataaaatataaatatatatctatatataacaaaaaaaataaaaattaggaagtttgtgacaagaaactcttttgaactcatgaatggttcttaacctgatttggttttttaataacaaataaacaattttcattcctacggcttatacaaattttcataaaaaagaaataaataaaaacttgaaaaagaataacccgaaaaggcattaacacgccaatagtatcacgagggcttagaaataattccaccacccctttatatgatggcttatctatttagggccacatctataaatgacctaagtaaagaagaaaaaaaagaagtgaaatatacagcctcttgagagggaaaaaaccaagaatatacactaacactcgctagcatagcaaaatacaaaattcattcacattctagtccacaaaaacaacaaagaaccacaacaaagatggggctggcgctaattaca

SEQ ID NO: 313858 - DNA, 630 bp, Cannabis indica
tttctttttatttaagttgttgcttgttttgtaccatgtatggtagttttttttttttttgtgtggcttgtttggtaccatatataataatttgtttaagctattttttgagattatcttaaaaagagtctgctggtagtattgacaccctccactctagagatactaattataagtttttttctttcatgaaaatcataatttggattttttttcactttgaaataaaagttcatattttaatttaagggggtgttcatggattgatttggtttgggttttcaatttttttaaaaccaaatcagtattacgattttttaaaaattcaaaaccaaaccagaccaatcaaatgatcaaaccaaaccaaaccaaactaatccacttaaaaatatattggtttggttcaaaaccatgatttgtatttcatagttgttctaatattttttttacaatatttgttcttttttcgataattttatttacctttaataaatttatgatacataaataacaataaaaaattattatcataaccgcattaaatcaatattaatattttacctaaagttgttcctaaatattaacattttgtctaaaaaaatatagggtaaataccattttggatcctct

SEQ ID NO: 313859 - DNA, 1748 bp, Cannabis indica
aaaaaaaaataataaaaaactaatttattacatttatataatatataatctgattattaaaaaacattttcaaaatcaaaagtatctattatacaaaaaaacaaataaaaaccctaaaagtgaggaaacacagtgggggagtggaagctgcagttcttctctgaccacgacgggacgatccaccatcttttccgaccacgggaggagccattagcgccggggagagagaaagcattgggcgagaggaccacggcgacccgccagcagctacggtatgttggattttcatcttctccgaccacggccaacgatcgagagagcacgctgagaaaaatggggcgatgggtatctacggcattcgtcgatggttgcttcccgtggtcggagaagaaggtctcaccactttctctttccccgacgttggtggttgccgtggtcagaaaagaagctatcgcccaacactttctctctccccgacgttgatggctcctcccgtggtcggagaagaaggtgtcgccataatcttcggtcgtggtcatggtcggagtttatcgtccagcccccaccattttctctctccctgattatgcttccatagttttagggtttggttttgaattttttttttgaaacagtttaatcgttttgtgaacaatgtaatttttagggtaatattgattaatgtttatttaatatcagattattatttaatgtttattatattatataaatttattcaattaattaattttatgtaaatatattagttttaaatcaaatttaattttttttttattttaatagttaatattaggtggcaattttataatatgatgtggcattattttaaatgatgtggcatgccacctgttgtccagtgtgcaagataacagcaaggtacctacagaatatctgaaagtgtaacggaaggtatttatgccgccaaaattttaacttagatattaaattgcaaccgaatgataaacttgggtatttataccgcaaattactctaaaaaaaagccctcatgaatattttttataatacttaaatccctccaaaattaaataaatttattaaaattgaaaataatttttatttaaaataatataaataattttttttataataattaagctgcacaaggcaaacttgtcactgggttcatctgatacaaaaatattcacgtcactatgtatatagtggtccttcatacacactggccaaagaaagggagggggtgtggggtcatttgctccttttaactttttgtttatatatttttttttgaatattttgtattttgatcttataaaaataatttttttttatttatgttcttaagtatttttatatttgtccctataaaatttatactttattattttttaacacatatattcttatttgtattcttagaaaatttatattttttacttttatttttacatatatttatttttatattttttattaatactttaattttttttaccctcactaaaatatttgactgcctccgccattgtgtatacacacacattcatatattttttttaagtttcaattaatttctaagaaattagattcttattttaattaatattataacccggccataagagtatctccaatgataaaattttaaaagatgtttggtgagatggacatattatgtggcaaaacattgagatgctataccattggagagaggatgatgtcattttaaaaatttacatggatgctat

SEQ ID NO: 313860 - DNA, 705 bp, Cannabis indica
ttattttatttttgttgtacatttatgaaaaaagcccataaattattaattaataattgatttgatttacactttgactactaatattacgtactaaattgagtttcatataaatatatatacaataaaattgctatgcaatacaaatacaagaatataaatatgcattgtacgagaatttaattatttaaatgccatgatgatttgccacactaaaagaatttggtggaaattggttagaaataataaaaacataagaataaaagtatgtttaaaaaaaaaaaaaaaaagtatgtttggaagaagggagacatgggtggatggagagagaaggaaggagagaggtagtgggggtggaaaaatctatttgtttagcaaagatgatggtaggaaggagagaataagtgaaagcattgaaaattcattaaatgtaaaaatgtatttgtttttatacatttttacgattttttataaaaacaacacgataacaacaagaaatttatataaaagtaacatgaaaataaaaacaaaaaaaaaaaaaaaaataacatacagataataaaaaatcaacattaaattaacatgaatacaacataaaaagactttattttctataaataaaatcaaaaaattcgtaaaaatattaaaaattccgtgaaaccgtatttttgaatttttttttttatttatttttgttgtatttgt

SEQ ID NO: 313861 - DNA, 525 bp, Cannabis indica
ttttatatattttaaattttattctatttcattcttattcttattcttcttctcattatcattcatattcttatattttcaatcctacataccaaacgccacctaaaatgagagcatttgcaccttcctaaaaaatcctatacatgaatatatatatatatatatatatttatagatttcgaagccagagtaaagtcctaaaaggtattactgttgtttagtatttttttttttgtgtgtcatactattgttattagtgtaattaagtagcggttctcatataaattaagaaaaataaattttaaaaaatatcactaactaatcataagataacacttataaaaggtgttgagtactattggtaccaaataacgatactttatatttttagtacttgactctttaataatgggtacgtatgggttcattatatgctttctaatgtggaaagaatgaaatttttataatagagtaatttacggcataaatacctaagtttaactctcagttgcaaataaatatcta

SEQ ID NO: 313862 - DNA, 989 bp, Cannabis indica
catttcggggagaaccagctagcattattattataaaattatcataaattttagagtgattgtgcttttagactagtctattcgtactacgtgtaaggatgttcatccaattcaatccgcgctatttttctcatagtgcatcctattaacctcaaatttggtcaaccaacaacagaatcgtatttatgatggatatcaccacgtgtacagaataagaacaagtaagaaaaacacagtatttttataaaggttcgaccccttagttagcgggtaatgacctactcgtcttttagctgtattgatattagagataataccactcagatcacaagtgttgtgaattttggagtggctctcttaagattacaatagtgagaatcaaaaggtaaacctcaagtaggtgagatgagggagacttagtctcttttacactggtaatggcgtgtagaagagatgatgagctagctaggagtttgagtatttgaacttagcacttagagcttcagaacgtagagacattaggtttagtttagtgctctttatataggagagcttacaagagatgataggttaatatcctttaaaatgaggagatatcacctattttttacacattaaaataatatgtaaataacatgttaattaatccccaagaataggtaaatatctgaagtttatctcctatttttgtgggttattaaagccctattcgtaattagaagtgttgtccaggctgaaagctgcagaggcacaaaaagtgtctgccaggagagaggttggccgaccctccctttgttggaggctagtcggcctatgctggcaatagggcaggcaaaggtggtcttgctagacccccttggttggccagtttattgtctatttgttatgcttaagtatttgaattctccgtcaacttgtatgttgtgcatggtgacttggccttcttgctgacaagttgtattcccacatggcatcaatcttgcttatgt

SEQ ID NO: 313863 - DNA, 2286 bp, Cannabis indica
cgcctaagatagttagggtgttacaaggatgatgccatgagtacagcaaaggggactccagagcctctgagacctcagcttgacaagccttcattgatttttccaactccaaaggactcctacatgaattttgtttaagggccttatttctttccatcaaaattgagtcaaagatgataaaatagttttgaagaaactcattaaagtttccattggaaaatgttcctacattacgccattgagaatagaaaaaactaatgagctccaatcaaccaaagggaacgaagatgcatgaaaactaatatccactgccatccaaactaccacagtgtagttgcattcctaaaacaaatgagttgtgttctcctccacgaatttacacaacaaaaaatttctctcatggattgggagaatccaagccaatcttgctcttgttggaagcatatcagaaataatttgccaccatagaactttgaatctctcctgaattttaattttctagattagaagcaatgtatcactatctattcctgtatgagcatttattggctttaagagcttcataaatgatcttattgtaaagaaaccttttagtttggctccgaaaaccaagaatcacgataatcaagtctagtgagagaaatattattagcaactctaaatgcctcttgagggtcaaaccactggttcatcgtatcatggttccaataaccattgtagatgaaagagctaaaagagataccttgagcgacaacacataaaggcttaggaaatttctcccctcttggcacccaattatcaaactagatggacatctcattacaaccacctattctcttacataacccctttaaaggtttaaaaaggcctggtcctaagaatgaatttccataagagagattgacctggttgttctttgctatctaagaaaagtctatgatgggcatatttagcttcaacaaatgtatgccatagaattcttgaccccgtcatttttagccaaaaatgcttgattaatcaaagaggtttattagaatccaagaccaccaaccaacttaggccgcaataacttattccaagacatcagatattctttcttgtgatcccaccaaaattccctaaggagtttgtcaatttttttgtagcaaaatatgggataaaagaggaagcatccatataagaagcaattgaggtacccactaaatgaattagagtaaccttccctactttcgataagagctttgacttccatccttgaacacgggcttccactcttttaatcactaaagtaaaattatttgaacgccttgtcggagtgaacagagggattcttaaatgaacaacctcatttggcattcttttagccctaagaagtttagaaatagcctgcaaagtagcccttaaaactagggctgaacatttagacccgcgaacctgaaaaaacccgaccacctaccctgacccgctgccaaaaaaaccaaaaaatttgaaaacccatgtggtcgagtctagtctaacccaaaaatactccacacgggtttcaggtttgggtgttaaaagtgagtgtttttttagtcaggtcctaacccataacccgtacaaacaagagggtttaatagcagattttaacccaaaaatattatgaaccaatttgtgtaatcctggttcagtctctccattctatgataagcacgaccactttgagaggaaggctttctatgtaaaaaaatttctaggttaaaagatttgataacaatggggatagtacaatgtgaatggtgatacaaagaagcttgatatgcataaactctactaccagtactaccacaatcaagaacaatatagaatttagacgaaccttgagaccaataagaagagataaaaaatacaaagagataaacaatataagctaagagaagaagacaaaggaataagaagagaacacgaagacatttctttcgagcagaataaggggatccaggtggtaaaggctaaggcttttcctttggaaactttgttgatgagaagtgtataaagaattatgaaactagtttagcttttggtaagttaagagatcttaaagagaggaagagaggcgtaagttattgttcttattggggaaaccaagaccgagatcctaatctcgcggaggtaataatccaaaatcttgagtgatgtgatgaggtgataattacataaaaagggcccaaaaatatttaaaataaaaaatggcatttttaaaaattaaatttcatttgagcccaaaaatataacattcaggctcag

SEQ ID NO: 313864 - DNA, 1452 bp, Cannabis indica
tttttccatcatatgtgcaataatttggggattttcccataacaataaaaacaaaaaaataattctagtttttattagatgctaaatctaaccaagatagtacccataacatcctatttcggcctacaatcatctttaatcacaggctttaattactattttttaagtagcaagtaaatcagatacaatacctaaattgaacactaatcacgaacatgcaacaagattcaagaaattgaaaaataagaaaaaaaattacctcgtgataaatgaggtgataatgctagatttgaataaaaatatggtattgaaaagcacacattaacgccgaatgatggccttagagaaagttcttcaattgaaggacgttcaagatgtttaagacggtcgagcctttctataatggtattggtatggtccatgagagaatcgatatctgaattgatatctagggttaccgatttctctggtgaagaagtcgtaatcactgggggtggagcttctatatactctcgagccctgatttgaagtagaaaatagatttaatagtcaatatcacactttagatttatttgatccgtgctcggtatcttctctgaaaactctaaggaaatttgaaaagttgggtaaaagtggtaaacagtggcattacaaagtatttctacttagaaggtacaattcgtgtaaagatcagatcaaaggatcagattaattctccagaagaacaaaaataatccaacggctctgtatcccatcaatcaagcatttaatgccttgtttgggaccgaggtaaaaaaaattatgatatttttcttgagactcgcactgaagtaaataaccgctagtttacttacttcgttgcacacgcctcatcaacgaataggtgctttgcgaaccaacgacatagtgccacatgttgccttatattcaaaaaatgaaaagatgtcttccatataattgaatcaatttagaatttataaagttttcacattaagcctccacctgtctacctgtacagtctgaagcaagcctttgaaagccacaacattccaaaagcttggtggtaaatgttgtccatgtttccggaaaaatacatgtggattccaaatataagcttaaggcccatcagtgggcccaaataacataaattgggccaagcccaagacccattccgccttctgggaaaacatcaatacaactcgcccaggcaaggtttcatcaagccaagtcagcatctagaatggtatatctctgtgtatctggaagaggtcctcaacgtgtatccaaaagactcatatggtttcacatttactatctggcatagaataaggaattgcttttccaaaatcttggatagagaataagatcttcctaaaaaggaaactggataatttaaaatcaagtaattaatatgtcattaattaccatgaatatagtgttggaatttatttt

SEQ ID NO: 313865 - DNA, 3316 bp, Cannabis indica
tcacttatttcataagtgaatagttgggttaagcgtagctcctattaattacttttataagtgaatagtttagtgacaagcaccaagttgctagtcgtcggaggatcaaacgttgtaatgccaacccccaagttgctagttgctgggaggctgattgtaggcaggccaattgtaggaaggctgaccgtaggcagaccagttgtaggaaggctaactgcaggtaggccaattttaggagggctgaccgcaggcaagccagttgtaggaaggctgaccgtaggcaggccagttgtagggagactgaccgtaggtaggtcggaggccacattgttggtcattagaactccacagtttgtcccatctgtttgcacatcagtatgttcagattgttgaggttgataacctcctacgacaaaatgacttcctaacgttggagtcgatgtccctccgagtgtttgttgatcagaggtttgggtctctattcttataggagttgagtctagcgatgccattggtgtaattggaactcgaaactgactttgagcaacactaggagttgtcatggtagccttcagtgactccatttgtgaatttattgcggcatttggactcctaaatgttgtttcttccttaaaggttgcattttctcactccagaactctagttcgcttagccatctcccgcatctgggccattattgtggcaagttgttcattgacattgggttgttcctgggcaacaaactctccttcttctgccatctgaagtgtggtaatgatagatcgccttgctcacattcagtttgtcagggccccacggtgggtgccaaattgtagaggctaaaatgtacaatgatcggaatgagcgtttgtgggcaccgacaatatgcggaacaaagacaaaggatgaccgtgaaactttgggacaccggggtggtgccggccgaaggcactccgtcagtcaagtcagtaaatttatagtgcgaagtagaaaagaaaataagaaatgtaaataaatacttcttgtgtctatggttatgcgatgattgacggtcaaaccttgctcactggaatgaggaaaagtacgttagatcatagagaaatgataagtttagtcgaaaaactataaaaagagggtgaatattcgtatatccttcgatcccccctcagtcccagtgtgggcctatttattatcttaggaaaacggctacctcttgaaacgtgatccatccctagagaaacggtcttcctccacttctcgaaggatgagcgtcatcttttaggttcgttcctggatgagcgtcctcacatccacgcatcacttggagagttgatattctcgctccgctatgctagggaggatcgctatggttgtgggttagttgggaaacttaacgttcttcttcctccacatatcaaccctaatattacactttaagatccagctttattgtgggttggacattcgaatatgggtatggcccaaaaggattagattgggcgtggcccatgtgagccattgggcttatgggttccttgtttctgacttataagtgggctttgtaagtacttcgttcgttgggcttagagtagtttttggccactacaacaattatgattagtgttgatacataaatctagtcaactcgctcgtatttatagatgagatgaaagttagaagtaattaagtaaaatagaaagtacacacaagaatttatagtagtttactcctgtgtcgcgatagtaatggagttacgtctacttcaagtttttattctcatgataatgattacaagaaaaatagctacgtcaccttgtgagtacttttttgaatataaaaaatgaaatagaggagctatcattttataaggaaggatatcctatttaaaaatatatatataaaaaaaatacatttaggatatttttaaccgttgatgatgatctaactctaaaattgactctgaaagtcagctgtcaatttatgaagcttgagtcgcgcctgcaggacccattttaggtaagttgtagttgaaattcgtaactcccttgaggacaaaatttggacttgataacttcagaattgtgattggagtgtgagacatgactttatagagcactgaaatagatttgaacgcaagttgaattgcatcaatcggatcaatattgagtgagttatgaccatttttttgaaggtttctctaataccaacacccaggttgacctctagttgatgtcaacctcgacgttgggccaagggaaaaatgtgttgaggatgtactttttgatgtctaagtgatattttgacatcacttaactagtttttgtgttctggtgaagtcgttcatcagttcttggagatgtcgctatttcacgaaattgggagactctaaactacccgattcgcgactatgttaatttgttgaaaagtaaaatatatgaagttgtgaattttacttgtctgcgttcatagctcttgtttaccatgaaaaaagtagatgaacacttgagacagaattagaattggctaagcaaaaccaagtgcaccatgtcaaacgtcaacgcggtcgctgagtgctctttctagagctttcgggatgtcgttttgatctttcaaggttcttgaaatcgaggatgagatctcctaccctattttagactatgctagagagaattctcagagcagaatttgcatttagataatcaaaaccagcgcaccaggttgattgtcaacctgggtgttgggctaaactttcatgccccgagattcttattttctccctgagcttacttctatcttcgttatttttatgatggaaaaaatacatgtagaggccaaaattgggctcatgctcaatatcatatgtgataaacccaaagaatgctcaaataagattgggttaggctatttgactaattatgatggtacggtcacaacatcaagcctaataggcccaaacagtcaagtcagacattaacattacccatgacccatcattgagctcacaatgatccgagccgtagacgataccaagtattatcactcatctaacaacctttgaagtggtcagttaaactgaccccacaaataacgatctccctaatcaagtggggaagtgcgcttctaaaggagggtgagcggtcatgagtaacgtccttccatggacgcctataagagtcactctcagttacagggagggagacatcaattttcagtcatcttaatacttctttcttatcgtttactctctcattctctctgaaactacatacttatttctgcagtcaagacagtgttggaatttattttaccaggatct

SEQ ID NO: 313866 - DNA, 907 bp, Cannabis indica
aggtgggcttggtggaggtttttgtattgtcgttttgggtttttgatgaagagtttgtataccaaaacgacaatgactaagccgatcagagctgtgtagagttgttcttgttccatttttgaatacttgaagaaagtttgaggtgatatattagtagtgatttatatataacttgtggggtgtatttatatatatgatattaattgtacgacttgatgtgggactggatctgaatacgtgtggataagagtatttaatggtacggatatagctatatatttatattacatcattgactacgtacacaaatgtatttgaaaatttataatggtgttatttatttattttgttaaaattaactagggttgtaaatttgtgagtgcatgtggtgctaatttggtttatatttattcgtgctacttaaaatttatgggtcgtgttttgttgtgcttcataaaaatacaaatcgtgtatagtgttgtattaatatttttaaaatgtaagtccatcatggttcgtaggcttagtatttttgtactgtaatttttttttcgtgtcagtgatctgtatttcttaaacaaacgagtctgttttcatattcgaatttgattcgtgctttactttttcataataatttttttttacaattactaaattatgaggattttttatattttagttatatttatataacttatcaaaaatattttagtgataatcatataaaataattattagccttatttaaaatttaaatatttacttataattattcaaatttttacatcacactctaaaaataaattagtatatatataattttaattttacatgttttaatagttttaattataaaagtataatatttagcattatatttaaattttattattattttaacgtaatt

SEQ ID NO: 313867 - DNA, 1154 bp, Cannabis indica
tttttatttttattttttactttacgtaatagtttttatatatttatgtacttataataaaatggtcttttagatatgatcgatataagttaaaaataatcgatatttcatttgaaaattattgtgaaaaatattatatttaaattatctatttttactcaaaaaattaaattaggactactttgacaaataaacttttattgtattttatttatttattgtggcaaagtaaacttttattttaaaatatctcaaaacttatgttgtggatagtttacatatcatacaaatattgtcacactaaaaaaaataatggatgaaaacgtgttaaaatcatctatatagaagataaatataaatattaaaagatattaatagtatctagatctttctgaagtgttatatcttattaatgcaatgaagtatcaagttccatataatttaatataataatttttaaaaaatatcactaattaatattgcaagatgttacctctaagtagtattagacaccactaatacaatactgaataacaattttctatatataaacttagactatcatgcattttacactaattaataatggtgtaaaattctaaaaagaaagagtgacaaattggagataatgatatatatatatataaataatttagtcaaagtgacacattaattagtgacttgttacaacacatattgtctattgtttttttcaaatagggaaatttactcccaatacaacttaccaaaacagtccactcattttttgtacaaggaaataactaaatttgatttggtgactaatatactttgttcttttggttttgttttttaaataattgaaataaattagatagttatgtttacaccacaaattagtataaaggtacaggtgtacacttctattttgtagtacaattatttaaaaaaaaatatacaaataaataaataaataaaattaaaattgagtctttgtaattattacatgatcgttagaacaatactaggatgaaatttttcatagaatttaacatagtaagcttattatatatattttagggtaaatatcattttagatcctgtattttgtaaaagttactaattggaccttctgttttgttaaataacaaaatggactctgtattttctaaaat

SEQ ID NO: 313868 - DNA, 886 bp, Cannabis indica
taaggctagtcgatacgctacctgcccgaccttctcgagtatttgaaatggcccatgaacctagggcttgacttgcccctctttgcaagtgcctaatgcccttcaccggagaaactcgcaggaaaacatgctctcgtgcctgaaatgtaatgtctctttgcttcgattcagcataacttttatgcctgcttgcgaagcaagcatttgagccttgattttctctatagtttcactggtcctttgaactaactctagacccaagtacttcttttctccaatttcttcccaatggattgggtaccgacacttcctactatacatcatctcataaagagccattcttatcacactctagtaatcgttgttgtagaagaattctattaaaggagagtacttattccatgaaccctcaaagttcatgacacgatcttctagtatctgaatgattccctctgattacctatcagtctaaggacgaaaagttgtactaaacatcggtttgtacccgaaggttctctgaagacctacctagaattttgatatgaactttggatccctgtttgaaacaatagattaggagctccatagagacaaactatcaccttcacacacagcttagcataataattcattgtataatcactctttaccagtagaaaatgagctaacttccttaaatggtccactatgacccaaactgaatcgtacatccccctggttctaagcaaaccaaccacaatgtctattgcaatatctttctacttctattcaggaaggactaatggttttaataacattgtcgacctctggtgttcaattttgatttgttgacatgttaaacatttagtcacataatccactacatctttctctattctataccacc

SEQ ID NO: 313869 - DNA, 1153 bp, Cannabis indica
atgatccgtcccatttctagctaatgtgggactttgtttacatttccaacaatccttccctcaaacgcaggactacatagcctcccctcaaaagatcttccatcttggatcgctgttattacaaacaaaacacgtcgcctgactttcattgtcaagaagacttttaacacaaagcaccaaacaagatctccaatctgtcttctctaccaattagtgtactttcctccaatacctcaccaatacctcgagagttttttgcacattactaggctcactctgtcggattagagcacgctttacatggagcctcaccaatattgctcattactaggccaactccgtcggattaaagcacaccgcctaactgaacacatccacaaacatcatgagagtacatcaatacacatcaccttaagcaaattcagaggattcattcacatggctaatgttaggatctggctctgataccaatttgtcaatgattatcagacaccattcacctccattccaggtatgatattgtctgcttggaacctaagctctcacgattttgttcttggacaccttcccaaaaagcctcataccaatagagacatgtccatccttgtatactcattatccttgtcatttttcgataatgtgagactttatttgcattctcaacaaaactctaacaaaaatttatttagcttgtccaaataattgtgccaacaattaaactaaaataattctgatatatatattttgaaaacaccacactatcacaccatctcatctcaaatatataataatatatatagctattaattaggattatattttattttttttgacatttataaaactatgttcaaaaaacttttaggccattaaaatttatttaaattattaaatttaaaattttctaattaattttattaaaggtcgtgtgacgtaaacagaaattcaaagaatacaaaaattttagtacttgttaaagttcacaaaaataattttgtatacgagtaatctctatgatgagcatcttaataaaaaagctaattagtaattttttcccctgaactttgacatgtagtaaatcgtgcctcctgaacttttttggctaaaaattctccccgaactattgagattgttaaatttaaggacttttatc

SEQ ID NO: 313870 - DNA, 1208 bp, Cannabis indica
ccattttagttcaaaaaaaaaaggaataaacatagcaagagaagtctattccaatacaaagtacttgtgagtataatgagtgtgggaagtgagtcagagaaaaaaaatcatgagggagaggctcggtttttgacaagtgaagtggttaggtgtgagctagctaaaatacatcgtttagcataccgtaacccaagcataataatataagcttattaaagtcctattgatcaaggggataagtttagactacattagtagagaggagtgcactaatccaacttacggagctttaatgaatgtcaaaattttaaggtagttgtagagaacttcaaagttttggtgggatatacttgtataaattgttgattaggtgactttggggaggtattaatgttatccaatgagaaaagtttaaaggggcatcatataatgttatgacaaaaacatttttctagtacacttaattccatttttctgagatcatcaatgttcgctaggccaacttgaatttctatgtaatctctcaattgtcttgtgtgtggagtctttgtgtaaaaattttttgttgtgttttagttttatgttgtcattgctcgaggacgagcaagattctatgtttggggtgttgataactctaagatttagagttattttgatatctttaagcttgaattttaatctaaattgtagagtaattagtgtctatattatgtaattgcatttaatttgatgtgttcttgtaataaatggaagtgtgtttgttagtaagtgttaacagtatgcatatgtataacagtatgcatatgtatgttggtaagattagtataacagtatgcatatgtatttacatgtttagcatgcatgttaggaagcctgttagattacattagatatgtatgttggcttcgtaccatccgacagtatcacattggtacggctagagtatgactagcgtaccgagtataggctaatattgtggtcgatagtactgtactatctgtcgactcaaagtgctatgttcatgtgtaggtaagggcaaggctaaggccgaggaacagtgaggacgagtagatgaagattgtacatgtcggggcagttaggcctggagcgtacgatcctcaagacatcaaggcttttgtagtttatcgctgggcgacaaatattttgtattgaatagcaaacttttgtaaagtgttttgtaaatggga

SEQ ID NO: 313871 - DNA, 2213 bp, Cannabis indica
cgtgcactttggttaaaacatggcggtcgaaataccaaatttttccacttcaaagcttctgctagacggaaaaagaataccattttggggctgtttgatgatcgtgggcagtggcgaacttccgaaaatgatattgctgcagttgctattatttattttcagaatttgttctcgaaatataatggtggaattgatgttaaagatgctcttagaggatgtattccttgccgaattagtgctgatgagaaccgtgccttacttgagccttttacaagtgaagaaattaagtctaccttgttccatgttcaccttttaaaggccccgggtaaggatgggttaccgggtctttttttccacaaacattgggacttaatagagactgcattcactgctacctgcctcgatattctgaaccacaattcggattgcaaaaaaataaatgagactcttatttgcctcattccaaaggttaagcaaccaactaagatgttggagttttgacctattagcctttgtaatgtggtatataaggttgtgtcaaaatgtctcgccaaccgaatgaaattaagtatgaattcaacaatttcaaaaaatcagagtgcctttattggcggtagaattatccaagataatgccattattggattcgaaagtcttcattgcatgaggaaaggacgttttggaaatgggagcaaaatggctttaaaactttatatgtccaaggcgtacgatcgagtagaatgggattttttagaagctatgatggattgcttggcatatgaggatgaatggattaagaagattatcaactgtgtaaggtcagtctccttctcaatcatcttaaatgggtcgatcaaaggtctctttcgcccgggaaggagcttaaggcaaggagaccccctttctcctttcctatttttcctttgttctgaagggctttcatgtcttattcaagaagcggaaagggcagggaaaattcatggtttacgctttggaagtttggaacaaaggctttcccatctattttttgcagatgatagccttgtctttctcgatgctaatatggatgagtgtaaggcgatcaaagaagttttggagaagtatgagaacctctcaggtcaatgtatcaattttgagaaaactgaaatgtatgtgggctgtaagattgatataagtatggcagagaatatagcggctcatttgggtgtctctttggttaaaaatcacactaaatatctgggtatgccttcttttgtgggaaggaataagaagcaagtgtttggcaacattagagataaggtggaagctaaacttcaaggttggaagatgggcattttctctcaagctgggaaggaaatattgatcaaagctgtgatacaagctataccttgctatattatgagttgctttaggattacaaaaggcattctcaagggaatataaagtatgattgctcgtttctggtggggttctacttctaataaacacaagctccattagggtagttggaagaaactatgtagacttaaggagcaaggaggcatcggttttcgtgatcttgaagactttaaccaagctatgttggctaagcaaggttggaaattgatgacaaagccagattgcttaatgaataaggtcattaaagccctctaatttccccacggtaactttatggaagcaagtataggccactatgggtctacagtttggcaaagtatcctttggggtagggagatcttacttaaaggctctcggtggtgtgttggaaatggttgtactattcgaattaatgaagatgcttggctcccaagaggactccctttcaccctccgatcaaaagctttgctcccggaaggtactactttaaacaagctgattactgacgatggaacttggaaagttaatgaagtttatagctggtttcataaggatgacatcccttgggtgcttggtatcatccccataacatcgagacctgactggctctcttggagtttgaacactcatggtcagtattcggttgctagtggatacaaagtaagatttctccatccggatcttgctgaatgttcgaataaatctactttaaaagcttggtggaagtttatttggggctctaaactcacccctaaaatgaaaattttcatttggcgtgtgtttaatcaatggatacaaacgaaagtggaactcacaaaatgttggaaatattttac

SEQ ID NO: 313872 - DNA, 561 bp, Cannabis indica
aaaaaaaaaaagagaaaaagaagcactattgcttttatgcatacaattttttttaatattttacggtgtaaatatttaagtttaatttacggttgcagctaaattatatttctaaaaatttagtaagtacttggccgttaatgttaaattattatccacttatcattttgttattggtatatttaaattaatttttaaataaaataaaattttaataacctagactaatcagactcccacgtgacaaattacttaacacttaaccaaaatgtcaccctaaccttaaaatttgagtctctgcctcccctgagttaatatatataagaggatacaataaagagatcagtcgaaactatcgataagcgagaatagactgcttcgcctatttattctattatggccagcttggagacatcagaggaagacaatcacctctattcgggtacaattatagcttcattcatttgctgaagtttgaggataaccattagcatagaaatttatcaattataacttaggtagtgacggacctagaatttttacttgtggggacttatttat

SEQ ID NO: 313873 - DNA, 2811 bp, Cannabis indica
tgaagagatgagagtggcggtggtgaatggatgtttttggaataagaaatatgagcggaaatgggtggagaaggcggagatggatggagaaggcacagaaggtagagatgggtggagaagaagaagagaaagaaaaaaaaacgaaagaaaatggaggaaaaggggagttttcgtggttatattcaacaagacttttgctggcgaagttaagctcgtccgctaaaggttttttacttaaaaaaatgaaacacgtcatttcatttatagtgaaacgtttaacctgtgagctaaagtgcgccggtaaaactattctcacctaattttttcaacacatttttaatgcgcgggaattgaattgtcaaaattttcagaacttttgctgcacatttatttgtcggtaaaagtaaaataaactggcaaagttttgcgccttttggtgtttggttttcaccactttttccggcaaagttgggtagttgtgccggcataactaacttttgctgacgaattaccttgccggtaaagctatttgtcaagctaaatttgggggcaaaaattacaaacttttgtcggcaaaacattaaacttgaagcgatcaaagtcaacttttgccatcacagctcgtgaactgcggccgtaaaagttgattttcttgtagtgaagcctggaataaccgtataacaaaaaggtgtatgaggtgcacacactaccatgttctagcacagggaacaagatctgattcagtgttaaaaaaagcataatcatcgctgggcgatctggattatatcaaaggtagacgtctgcgacactcttgggcggtcagcgtccgtgataagccctttgagtacccatgtggatatcagttgggtagactttgagtatggaccactctggatcctagagtgataatatgtcatctgtgtccgaaagctaagataaggtgaggtagacttctgcttatctcttagtcttgactttttcccagttctgggaagcttctccatgactaggctttaatggagattttaattaggaagattatgatatctcttcccttttatgtcatctgtcacctgtttaaaaacattaataatatatatattatcttatataatagatacaaactatataaaatatattataaatgataaatataaatatataaataagaatatatatacccataaatatattacataaatatacataaatttaaaaataaatatataaaaataagaatatatatccacatatataatataaataacaaagaaggaaaaatataaaataattcttgaaattatttcaatcagatgagtatatatataaatatttatttactgtatcatgacttcgaaataattcaaaaactttaacaagcaatatttaccttgagcagaaactcatgctgataacgtattataaaattattatgaataacactacaagaataataggtatcactaacggaactatcactgacgccaaaaagtcctcactaaaagtaacattattacgaacgacatttaaatgtcctcagtaataaaaataatttttttttctagggaccgagtgtccaaaatgcaaattgtcacaaatacaaaatgtatactctgttgtgacaggactgaaaccacagaacatttgttctttgaatggccgaaatctatcatttgcttgcagaaaatcaagaggtggttagggtggaggacaatgcatacaagccttcctaacatcatcaaatggctaggaagatccaaagaaactaagtttaggcgcctggtatttactgctgcaacagccgacctggtgtatagcatatgggggctgagaaacaaggtgctattgaataaagaagaatagttgctcactgctttgatcattgatttgaaggctaacttgaagctaagaattaagatgttttggccaaaaaaaagtctcggatatagacacacaatggtttcaaagtttgtaaatacatttacaatgtatagttagttgattattataggccctttatgggtgctatttgtgtgtaaacaaagtttttgagctaatacaaattctgattcattaaaagaatgatttttttttctaaagtatacatcaatggcgacaaaatatatcactaacaaaaatttcgtcattgagatatatactaatgacgaaatttttatcaatatttattttttctaaaaaaaacaagccattaaattgggtcggatttttccctcttaaacattcactggtgacaaaggcgtcagtgttggactaccacatcgtcagtgagcagtccaacactgacgattttgtcgtcagtgtatgtctccagggataagctcatcagaaattgaaatataaaactcacgaccccattttaacgcataaccccttcttcttccccaaaaatacaatttccttcttaaaaaaaataaaccatatttaccatcactagcctccaccattggttgcaccgtccaccactgccgatggtggtggttgtgccggcgatcagagccatcccttatttttgaggtacgaatttatttttttctattttatttttcagattttgtatatatcataatcatcatcttctccattttcatcttcctcttcttccataatcttattcaaaatctcttcttccattttcatcaaaatctcttcttttagtgttgtctctgatcaaattggtagttgtcgcctcttctctctcggcaaactttagtaagtttagacatatatatataagcctaattatcaattttccccccaaactttgacatgtactaaatcatgctttctgaa

SEQ ID NO: 313874 - DNA, 1766 bp, Cannabis indica
agatcctggtaaaataaattccaatagcccctacttttaatcgtaacccaaaagttaacattgtgactctctctgccgtgatgcctccacaaaataagagaaagagcgatgttattaataccacgatggttgatttatagaagaaacatcagaaggtcacccaagataagagaaaaaaggtcatgatggatcctgaccaaagcttgcaacttcatgaacctacaagagaaattcgtgagcgatgactttgtcgcaaaagtttaggggactcctgtcgaggatcttatgtcctgctcagctgaacttgtctcatagtgtatgactaataatttacgggtatttgttgcgtgtttcaaagattttgatcttttgaagaagcaaaacagcgctcttcaagaaggcttgaggaaggctaagttggatgtagctaccaaagacaaagagatcaaggatcttggcaaagctaacaatcatgcagtggagaaggctaaaaagattgaggagcagactatcaagaaattggaggagaagatcatgattcttacccgcgaccttaaagttaagaaagagaaaaattaaaaaccttatgattaggacgtcaccgactatatctacatcaccctgaccaagttgccaaacttccacttcggagtttttagtgcagagcggtcgagatggccaatactttccacactatgtctcctaccaaaacccaaggtctaggcaagagcctttttccctgagaaagccgaggttggaggagatgctaaagtcacagatggtgctgggaaagtcgcagaggatctcaatatccctgctccgttattttttgtttttatttggactcttttaagaggtacacatgtactcgcactttgtatttaatttttaagacaattatggttatctcttttgatatctgcgtgttcagacaatatatccttcaaggattactttttaaaagtttctaggtttttctggactcgatgagtatttttatgatttatagatgcaacttggtgcttttaaactcgtgggagtttggtcgctattttatttatacgacttttttacacagctcggtgtgtcacgaggtatgaacatctcggtgtttaagatatgaacatcttggtgttcatactttaagtaaaaattttctaagtatacaattgcgaagacaaaaatcttcataaatttcacgaattattgaataatgagtagtataatctttttactaaagaaagcaatggtatacatacatatgtatccccctatacttaggtaattttcaaaaaaattgactaagtatatgaatgcgagtactactgataataatacttttaatgttcgccattccatgctctatcaaagacggagtcgttaagatcagatagtcggtatgttgtatttcctattttttcagcgattaggtaggggccttcctagttgtcgccaaaaacttcgtgcgcaagattgcatgtattaggcataacttttttcgaagccaattctcctactcatagacttctttctttaactttaaagttaaaatagtgtgttgtgtgctgttgataggctacgttttttacctgagcctgatcgcgcgtctttcttccagaaagtttaattgaagcaattgatttttctcattgtcttaatgttaaaaaaatctcttcacaaggacccacctcctactttgagcctaagcatattaagatttagattcttttaatctaagatcaactactgatattgacttggaaata

SEQ ID NO: 313875 - DNA, 541 bp, Cannabis indica
tagtgcggatcgtatgcactatgagccaaatagtacgaattagattggatgaacactacccctaaaatatttatatggtgttttgtatcaaaagtctacccaatatgacaactgacaagtttcgttgctcatatatcgacagtataagatgattttcctaaaaggggggccacgagtaagtggtccttggtttgagaaaatgattgttgggtatcaacccaagtagtccaacatcaaaagaaaatacaagaattgcctttgaaattaaattggactaagtgcatacaacttggtaatcttgcagtagttgggtagttaaactattttcatttggtatgagagctttggtgatcgatatatagttgatttaattttggtttacatactgatatcataccatgttcgttgttagatctaagattgttgctagttgatctataatcttaattcattaatgtgattgtgagactaatttcactttcttttagttcaatctctgagagtgtatttttttttcttgttatcatgtcaatggatatat

SEQ ID NO: 313876 - DNA, 953 bp, Cannabis indica
aaaataaaaaaaataatttttttaaatatttataattattttttaaaactaatattatgtggacccctaaaaatttgtcacgtgtacaagtgtgtacacgtggacagtccaccatgacagttaactgtgatttttagatggaggtgtacagagcaaaacgaaattagggtttaggtagttatgccaccaaaatttcggtttttgtggttaactgttataaactgtaaagttcaggtggtttagccactaatatccctaaaattaaacttattacattaatattaactaaactttattttttttacctaaattattataattaatttttttccctcacaatgctaattaaacttttttacctaaacttaaatctaaacttaaatttcattttaatttttttttcaaaatattttttactcattaagtcttttacaataacaacaaactttaaattaaacacactaattatatttcttaaaacatatcaaatttttacacattaaatttatataataacacaactttgaattaaacacattttatatatgttttacctaaacatatacataaataaatataatatatataccagcttaagacgaatgggagtatgtacgatggtggtggagatgaacagtggtgcgacagtggtggtgggaggaagtcgcgaaggtggtggttggaggaagtcgagaatggtgggtagcgaacaccggtgtgggttcgtgggtgtgagttgctgggttcgtgggcatgagtaggtgggttcttgtgggtgtgggttcaaaggtttagggtttgtgggagagggagattaatggtggcggtggtgtgcgtggaatgaggcagctgctagagcaggcgggttagggtatattgatatgggttgggcttttaatacccgacggttttaggggtttagttttttttttattattattttccattttttt

SEQ ID NO: 313877 - DNA, 973 bp, Cannabis indica
taaagtttcgaaccaaattgcaaaaaattcgaaaaggctccatgtcactgaatgaatacctattgaaaatcaagcaacatgttgatctttttgcctcagttggggatgtcctgagtgacagggatcatattgctgctatcttcaaaggactacccactgaatatgatgcattcatcatctcgaccaatactcatattgaagagtattcagctgttgagatcgaagctctcctattagcttcaaaatctcgaatagaaaagactaatcaagaactagaaactaaactaagtgcgaatcttgctacaacagatctggatcaatcctctaaagccaacactgcctatcagaattatccaaatcgcaccagcagattctataatcaaagtcgaattcccccttcctcatcatatggttcatcttcaagaggagttggtcgtggattcaacaattgaggagctcacattggaggtaatcatgcttcccttccccctttcgctaatactaatggtcatggtggcttcaatttcagcagcagaggtggtaggtttcccactccttcgaatcgtattcagtgtcagttttgccacaagcttggacacactgttcttgactctttctatcgattcgacaaaagctttataggagtgttcaacaattccacttcccaaaatgctcaagctaatgttgcttaaacaacacaaatggatgacaccagctcgtatcctgattctggtgcattgaatcactgcactccaaatttgcagaaccttaacactagtgtcgaatatgaaggagaagagcaactctttgtacgagatggttcatgattacgcccaaacttgtcttgacaaagcggtcattgtagtgtagtatgggcggtcgtgtccacagagagatatcttatcaaaaagtgattagtagaattttaagcgcaaaaagtaaataaatcgtttgtggtttttgagaaaatatt

SEQ ID NO: 313878 - DNA, 616 bp, Cannabis indica
taactgattttcaaattaatcaatgtgtctagatatcagtcacctacaaattatgtaaaagtagtgtgttactatttctaatgtaaaagaagaacaatttttccatgtatagagtagaaagaaaattccatgtgatgtttgactttgtggttttgaactatactttgtgacattatttatgataaggattaaattcaagagcagaacaagccttcccttctcttgtaaggtttcttatattatttttttatctctaatatgattaacaaatggatctcctgaactaagaaacaaaatcagtgtgatttgatttaatcattcaaatgaacttatcaaaagtacttttcaggtaaatattattttgtgtattttcccactaaatgaaataataggaataagctataatgttctgtgccactaataagataggcaatagcagtacaagttgtacagctggtactgatatgatcaagtggatgagcagataaagatttttaacaaaagctgctttgatttcacttataaatatttgtttgacccttcaaattggggcatgccttagacatttttatacaaattttgtgaatctgtgctggtgtggtggggttgggaattg

SEQ ID NO: 313879 - DNA, 2589 bp, Cannabis indica
ttcttctcctcctttgttgatcttacttcaaggattctcaaacttccaaaacccttaaattatttattttaagacctttaaaattctaaaatactttcctagcgaattgaagatttgttcattcgaaattgcttgaattttttcataacccaattagacttctcttgggttgtaagaaacttatatgagttgtcatggctaggatgaagagaagtagaatgttgcttgatgaatatgacccccatatgactcagtttattagagctaagctaattatgcctaagtctaagaacttagacaaggcgcgttgtgggaaggtgatggcaactgagcttcttaaatctatcattgagagtgatgatccgagagatcgaggttttaggctaagacctgttgtgtttagcactcttattgaacatccggctcaattaatacgagatgattagtgttgttgggaagcaacgatacggtggtcccaatggctcctagaacacttactgtagtgcttggttgagattccaaatgaattccagtgcttacttactcttacatccattccatggttcatatccatagatgatttctttggagtctacccctaccagataaacctaaatggctataggatccctgccaccttctttatcttttaccgactaagaaactggcttgttccaactttccatgaaataaactttctttgtgacttgaaaagaagtccaacttgaaaagaagaatgattttaccacttccaccaatttagctcatacaaagaaaatattaccaagagtatctacaacctttaccatcagaaatacttttatacccgtgttcttcccttaagacacataatcttctaaaaggctagccctttcaaaatacctgctcctctgatcgacataaagatgagagttgataccatattgtttgaaatcaaatcatgggaaagagatgggagaacctattaaatattgaaaatcttcgaaaggttgggcttataatgtcttactagcgagtgtatgctaacacttgctttttcaatgaatcttggacaatgttagtcaagtaggattatgagtatgctcaaagtgcaagtgtcatcttgtcttagacaatgtcaaaagaagtgacctcacttcaaagggacacaaagtattagaggagaatatatgtgctcttagaccaggaagatggcgaagtttcctccactcgaacttctctggaaaaagatggggaatcaacaagttgttgatgctccatgctatgtagttgaactttgatgttttgcttttcttctattgtactaatcacttgtcttttttctttgcagaaaacatgagcttcttggttgctatggaatcttgtttaaactctaagaggaaaattctaatgtcaaaggagtcttaacctctcacaaggtaagtagtttacggcatccctgttgcttctgttgcttcaaagaagaaggttaggaagaggagtagacctattaatgttgctcctcctcctcaagactttacctgggagaattttaccattgctggtgttcattagagatctcctatcgatatctctctggatgaggctaatcatggtgttttgaactagggttcatatttggtggagcaactacgtgagtagggtttctggcttctttcacatggtgatgccttaataggctccaaggcagagaatatcccattgcagaagttggttagcactaaaactttgcattttattgctcaaagatgcttcactaacatctttagggtaacaattttgtctcatatgcttctagcttaactttcatttgtttaacatcacctgacattatgctcttgtcttcaagcttgtgttgtttatgcttacaccatggataacgaacacaagaaggtggttaagcttattgagaagctccaggttgcagaagatcatgctgttcctgcagaagaccaagtgactactttaaaggagaagatcggttctctgaagagtgagttgactagtctttgagaagtttctagtggtgccaaagctcgagagagtagcctgaagaaaaacttggtagctgctcggagaagacttcagatcttgaagagtcttcttgtcttgcactagatgaacaaactttaatagctatttatcttagagactaagtcaaggtcttgaaagagcaagttactactcttgagaatcaagctcatcttgatgttaccttctacaatggcttatgctttgatgccatatataaagtttggtctgccaatggaggagcaaagtcattcagtttgtcaggctttcctcacacaggtgccgaagtttgttaagtgttgtgagcagcattgtagtgaagaaactccccagaaaatagatttcattgtgagaggtagtgagtccagtggtctaaaaggctacgagagttgaaggctacaaccctgagcatcccgacttccctccttctactattgatgcaccgattgtagaaagttagggcaaggatgaagctattgttgatgtgataagcattgaggacattgtcagagtccattcttctcttttatttttagcatttagctttagtgtgttagt

SEQ ID NO: 313880 - DNA, 1264 bp, Cannabis indica
aaaaaaaaaaagtatatataatgtgtcccatcaatagaaaaaaaaaagaagagagagattattgttgttatatatattaaaaaaaatctagaacgattttgagtcaaataaataaagaaagtaaaacaaaagagataatttgatgttagaaaataataaataaataaaaaaagaaatgaaaaaattaatcaatacttatcaaaatgatacataaggaataaagagtcatgtacatcgtagaataacgcttaagtatacacatgtccaaaaaaaaaaagttaataaaccaatggtgtattttataattaaatagactgtgttaaaggtgatattttttcaatattacgacactcaatgcaaatttctctaaaatatatatatgcgcgactattcaatagttatatttttattgtaactattatgattacattattcttcggctgaaccctttgctaccaatcttgccttatatctcaattccactcctggcagagcttccttatgttaaaagatccatttgcagcttataaccctttgtccccttggtcttggtactctaatcttggttttatttttctcaagtgaacccatttcattatcaatggctcttagccatttctttctgtctttgttgggaactgcttctgcataagtagtaggctctccattttcaatttcctcagctgcagcaagtgcaaaaacagtgtagtcaacaaatcccagcgtgtcagggggtttaatatctcttttgactatatctctaaccagttggtaatcctatgctcctgatgatgttgatcctccctcttcttcttcagaactatgatcacttaatgttgcaaaaatatccacttgatcagtagtctctactttatctttgtcagtttgtatctcaacactttgtttctcttgactgtagtctatgttggatgttttcattgccatttcatgttctttgaacacaacatccctactaatgatgcattttttgtatccatcttctaggcaccatactttgtaccccttaaccctatctggatatcctagaaacaagcatttgatggctcttggttctagtttatcttgtctaatgtgagcatatgctgtgcagcgaaaaactttcaaatgatcatacattggcatttctcctgtccaaaattcttgtggtgttttgcattttagagctgttgaggggcatctattaatgaggtaacttgcagtctgtgtgtatatatatatatacatatatacagttgtataccct

SEQ ID NO: 313881 - DNA, 1061 bp, Cannabis indica
atcctggtaaaatattctcaatatttttctcttatctcactaatagtttatagaggtaaagtcaactctaagatttagtgagccttagaagaaaaaaagagtgggggagtatctaaagcatttctatttgtttttctcttatctcactagctaatagtttgtataagtaaagtcgaccttgacattgggtggaccttacaagaaaaaggggggaggggggaggggagagcattttcattcgtttttttttaatcaagcttagcgtactttagtccaaaatctgtatagaattataatcaaaataaattattacttgcctacaaaaattaaaaataaaattagaactattcgtattaatgtttatatactttagaatcagggactttttttcccagaacaaattaaagattatatgcatgtatgtagaacaaattgttacttaaaaatagaattggcttgttattatttccttcttgtccattataaaagaaataataacaggagataaattatgaatatcaattgtggaattggttattataacatgaataagtatcagcttgtggtatcaattatgatcatattaatcatgtcaacacaatattgaggtataaagtttgatttttatttttcttttgacataaaatttgaattttaaactatgtacatataatattatattttcttcgagtgatggagactgtaatttgctgcgaattatatatatactagaagaaagttacgtgcaaggcacgtatacttaattttatgttaggtgctctataatttaattgagaaagattcaataaataatcatataatttaaaatggtttaaaaactaattttaattagtgtgtggggttatttgaaaatcaatagtgaaaagtcaaatttaaaatttgcagaaagagaagaggagaatggagattagcttgaaatatatttaaaaaataataatgctacacacttactatggacacttaactcgaaccggtaataaaattataaagaataggggtagcaggcatataactggacatatgaaagaaagaatataaaa

SEQ ID NO: 313882 - DNA, 1614 bp, Cannabis indica
tttttttttttttttaagatatactcatttttataaataatgttcttattatatctcgtaagaactatttggaatggattaatgtcaggaaggaaaagataattttaatgattattatgtttgttatgaagttctaaattttttaagtcttttaatatttttacggtagtattccaactaccttgaaaatgtataatattgaccggtaggactcaaatattccctcagttatattaacgtaagattaagctttttattaaatagaaaatccaataataaatctgaataaaacagaatacgatcgtaaaaaaaattatatagtgctctttcttccgtcattattattatccatcatcttcttctctttgctccttcgaacaataattaaatattacaatttctctttcaaaatttgacattgcaccgctcctcattctagctttggtcgttggttgttgtagtttagattatgttcatcatttggaataagttagtgagttctaaagtgttagctctgtgcatatatatatatgtattttttttatatatgaatcaaaattattggttttcaaatcgttgtttttttaatgttattatatgatatccattatctgaattgaatcaaaaaactaagagttctataataaaaaagcaagagataaagaaatataacaaccactcaaccagtcccaaagtaagaaactagcttcaacatcactactaaataagctaatctactggtactagacttgatgtctcaaaagtcatatttacttctatgaggagttgggtccccgcttctttccaaatccaacaacgacggtgaggaatctcctgttgtactgcatacgcttgtgagcgcggcctctgagcttcttcttcttgtcttgcttagcaatctttggggtctgaccccagacctttccagcacgtgctaacaaactgtgaacattacccatatagattcatatatatgaattagaattgtatgcgtatatatttttaaatggttttttttttcagttttaaccataaaaaataatagtattataaaaaaaaatttcaggtggccaaataaataaatatatagcctaaataaattttttttacacaaataccacttacacacatcttcaaccaagaatctatgcttcctgggcaaccatcgcacaaccatgcagtaacccaacacaaccgaaacgaaaatttaaccagaaagaaaattaccattaattccagcgacttcacttgaaaagacgaccaaaatcaattaaaataggagctatttcgaattcatgaaaaaaaaaagtgtagaaaaactactacgaaactaaaattcaattagaaaaccagtttaatttgcatacaactaatgtcttgacttcaattttcgaatccatgaaatccagatctcaaaaaattgaactagagttcccaaacaatccaattcaagtataatccaaaaaaatttacatcaatactatagtaatatatttatcttggtgtattttcttaatggtgaatttgttcatattaaatcatgaagagacatatagttagagttacgtacgtggaaacactactttgatttttaatatttcataacagttgcat

SEQ ID NO: 313883 - DNA, 648 bp, Cannabis indica
atcacaaaatattatgttttcacattcactaccaccattgtgatttcttctcgctgtctctcttggatttaggagtaccgggcggaaaacgagaactttgaactggttcagtatcagggttgtatttttgtgtagcaagataagtcaaagcagtgacgacatcagctatgacgggccgcatattaggctgctcttgaacacacattgctgcgacagcaagagcttggtacaatcctcttgcaggatattgaccttggagcatgggatctgccatttgcgaaaacttcctccggtctttaaacaagggtcttgcctgcaagtaaccatgtgagccaagaggaacaacatcttcattactaaagaaatagttaaagctaaatttggcacaacatctcataacagtcattcttattacatgtttagttcctcagaagaatattatccactaaatggggttttcttacccaagcaaccaagttctgctctcctgtagctcttgaattgtcaattgctttcctgcctgtaataatttccagaagaactacccaaaactatatacgtctgatttcaaagtcaactgaccagtcattgcatactcaggagcacaatagccataggttcccattaccctgttgacacatgagtgtt

SEQ ID NO: 313884 - DNA, 1855 bp, Cannabis indica
atttttcatctttttagtagataataatataaattttttcttaattatttgtatatagtttatgttcatagactttgaatctaattgccacacaccactcccacgccctttggtatttggaacttcaaggataggtgcttgatcgaactgattgcccctagttcgatcagtgctggacgacccaacaatacgttgtaagccaatggcaggtcgacaactaggaagtcttgcataacagtggcagataggggtgcctcgcccaaagttaatgcaagctcgattatcccaagattggcaatgctgtctccggtgaatccgcaaagatttgccatacaaggcctcaatttggccttttcgagccccatcttccttagagtttccttataaaggatatttactaagctcccgttgtctattaacactcttttgatcctcttattggcgagttggatggtaatcaccaatggatcgacatgaggatatctcacgtttttctcgtcttcctccgtgaatatattcctcgattttcaccttcttggaagggtctggggcaaatgccgactgctcgttctttatctctttcacatttttttctgggcgttattgctttcccctgcgatatatggccctcccaaaataacgaggatgtcctccagttcaacaggaagaggttgtaaccgctggttgtttgggttattgggtcgactaggctggttgtctccgtggccttgtctttatacgtacttcttaaagtggcctcaagcgatgagactttttatctcatctttcaattggcgacattcatcggtcgtatgcccaatctctttatggattttacaatacttgttaggatctcttttgctcctcgcattcctcatgggctcaggcttgccgaaggcaaccttttgttcatgtgcgagatatatattctctcgagtttcattaagctcggtataaatagtatacactggcacgtacttatcgtgcttctctgttttttatcctctgacggttccttagaaccgtcctttctcttcgaacatgagttatcaattctcgtggaaacagtacttgttgaaatgttgatgggtttgcttcccgagcttattttcaaaaaattaatttcctttcgggcttcttctttccgaacgaatacttgagccctttcgttgaactcagttatgtttcttactagacgaccttgtaagttgtgccacagcttgccccctatagttgatggattagtagagatcctcgcctgaagggcgttaagttgtgtactgtcatccaaattcctaaccctagctgcagccgtgctaaaacaacttaagtatgccttaagtgtctcaccgggctgctgctttatattggttagcgaggtcgcttcgagtcgtctatccctagcagcctggaactgtttcttgaaatccttggatagctgctcccaggaagttattgaatggtgagtaaacttgttaaaccagctgcttgctgctccaacaagcgaggtggggaacaaaatacaacgtaaattgatcgtcacattactcgctcgcattattgtattaaagttgtttaaatgcgagaccatatcagtggttctgtcatacgacgagacatgcgagttttcgaatcccgaaggaaaaggggtactcatgatatctggatgatatggctcaagatcctcgtctgagttgtattcagattgtctccctagttccccaacttgatatctcttgaacttctcctccagctcatttatctctaattggatgagatactcttgcttttgaccgagctgttggcgaaggtaaagtttcttccaattcaagtgctctcgcagatccagttggga

SEQ ID NO: 313885 - DNA, 1900 bp, Cannabis indica
attttagtcttttatgttagttgtttatctaatttttttttattaattgtatttttttacttttgattttgcaattgaatgaaatcttaatttctctgcatatcttctttttttagttattcttctcttcacaaataactatcatagtatcaaagcaagatttatgatagtgaagttcttaagcgtaatcatagcttttgcggatccaactctgcggtgagttggctggggattgcaggaggcaacgcgcccctgcctgaggttcggggcggagcctcgaaagttttcgcagacgttcgtacaatcgtgtccgtacaatttgacagtctagttttagtattaaattcttcgacttttttcttgattcgcataacagtttcaattttgatattcgcatagcaattttgggtattgattttcgcagcacaaatttaaattttcatcagttttgtatttagaatttttttacaatttgttattttttctacaatggctaccaataaagatggttcccttcaagcgatcagcgtgagattgaatagaaaaaaattattcgtattagagttatgttatgaaaaaaaattgaaaagaaaaaagatgtggggttatatttttgaaacaaagaggcaaccagcaaatggcaatgcagatctgttagaaattttggaagtggacaatttgaaaatcctcaccatgataaataactctgtggaataatttattggtactcaattagcaaagtatgatgcgacaagagaaatctgggaccatcttgcaagattgtatacacggtctaattttgcaaagaagtttcagttagaaactgatattagagctattgaacagaaagatatgagcattcaagaattctattttgtaatgacagatctttgggatcgattggcactcgccgaatcagcagagcaacgtgcttttgcactatatattgctcgtagagaggaacaatgattggtttaaaatttaatagcccttcgtagtgattttgagggactttgtggttctatattgcatcattctccgcttccttcaaatgattcagttgtcagtgaattgttagtagatgaaattcgtcttaagtctcaatcacagaaaggcattctctcaacacccaattcttctattttggtagaccctcctactacattgtttcctccataagagaacaaacttcacacaaagattggtattgatgagtgtagcttttacaaacataaagatcattggaaagctcaatatcctaagcttgcgaatcgtgcttcacatcaccaaagatatcagcccaaacctcctcatatgggtaaccagctaaagtttaacaaccaatttcgacctccacaatttagtattgttgtagttgttcctccatctgccgcttacgattttgttgctttgtcaaaatagtttgaaaatctctttgctactcaatctaatgtcatgtctatactttggtaggtcaaccacctactagcacgtcaagtatgtcaccctctacgtgcattttggactctggtgcttcacaccatatgtcttagcattaggcatcttttatttctttaagtcctacattatttgtgtctgtcctactgatggtactctcatgccattagctggtattggtcctattgtcagttcaaattttttacttcgtaatgtttatcatattcttaatctttcattgaattttgtctttgttggtcaattgtgtgattctgattattcagtatttttttttcttctacttcatatcatgtgcaggatccacaatctcaaaagttgattgggaccagtgttaggctatttttagcctatgttttggatttaatttatgtgcgtttttagctgtgttaggacggaattacgcttgttttctatgttttca

SEQ ID NO: 313886 - DNA, 2842 bp, Cannabis indica
gaaggcttcttattccacaacaacgaaagcactttttaactctttcatatactaggggattccacttggaaaagaaaatgttccatactaatggattcgggtccataaccatgggttccaatgtacgagatcttgtagcacttaccaatgaggccctgtcgattagtattacactgaagaaatcaattatagacactaatataattagatctgctctttttatcttcttattttcaggcttttcttggttatgttcacaccatggctaatgaacacaagaaattgaatgagcctgctaaaaagctcactactacagaagagcgtgttgttgctacaaataatcaagttattggcttgagagaaagcattgatctttggagaagaatatggctagtctccaaggagtggctgacaatgccaaagctggagagagcagtttgaagaagagcttggctactgctcgaaagaagacttcagaggttgaagagtcttctcatctggcacttgatgagcattccttggctacaactcagcttgaagatcaagttaaagttctgagggaccatgtgactaagttggaggagcaatatgttgctgatgtcaccttttatgatggcttatgctttgatgccatctcccgtgcttggtcatctaatggaagagcacaaccattcaattggtcagctttcccttagaagcaagtcccaaactttataaggcattgtgagaaatgtttcaatgttaatgctctccaaagaatagactttgacttgagtgtttttgagctagtgatcgaagaagttgtgggggtcaaaggctacacccctaagcatcctaacattcctcctctgacagttgatgcgccagtagcagagaatgaggaacaagatgaagctgatattgacataataatcttctaggatgttgtcttagtccattcttattttttgtttttaacttttagctttagtgtgttagtttgtcgtcttgggcgacctttcgatgtggataagccttagtaaaatgttatcaaaattgtttgaattaaattagaaattattccaacttaatataaactttattccgatactttctttttattttactttacctgttatcgcttgactatttagtacttgtagagtacacaatgtcttaagaaactcgattactgggagtaatgtcaatgtttcttaaatgaagtaccaaaaaaaactttgttcaacgctttttctcatcaaattaaatacaattccattactgtaagctaagttgaaagaaaaaagtatactttaaagtagtagttagagatttcctttttcatccaaacttagctgagagtgatcctcactacactaatgccatgcagatgtcatcaatcctgccacctcaataggcaccacaaatctggccactacagctggccaggatattataaacatcactgtggatctgaacaatcggcccctacctccaagggaggaccttccacaggcgcctcccactgaaggaaggacccttggggaacagcccctaggaacaataaccaaatctcatccctagtattatgcaggattgataggaccaggaattggcaagcctactattggctagccccacatggacttaggagaatatcttgagttagctagacctagagaggtcgtctgccgtcggcctaattgaagaaccatgcgttgctggttacgatgtatttgtttagtagagacgcaaattccttgaagaaccacgtgatattgattgcgatgtattcactcaggacagacacaaattcttgagatggataaatgaccaagagtatatcctccaatctcaccaggtggatctggatcatcgcaacacagaggccaacgactcgataaggtggttcaatcaaagaaccaatggaagaggccaggatctcatcagagatccactccaaggaagactagttgatagatcagggaaggtttatcagcaaacagaccaaccaagttctttaggaggaggacagaccttaccgcgaaggtctaatggcaaaaatagcaaaatcctaatagccattggcctgggggcggtcaagaatctttggcactataaagcccccattgtccaactcatggccagccagcatcccagaaatgaacctctggttgaccaacaaggtgaagtcttattctagaacatctgggagcgaatcactcaaatggaaatctttaattcacaaggccaaggaacagatggaaacaactaagacaacaacaacttaaggagtgagtactatcactttagacatgtagatccataaatgtgatctaccccatgtcaacgcacaggctccaccggccagccaaggaggagtgggcagccaggccttgcccagcacaagtctggccggccatggtcaattgtcaagcccatggctggctggccttgaatataccctctcccaaggtatggacggccaggctctggccaattcaaggctacatcttaattaagaaaggccaatcaaccaggcccctattgtattagatcctgctgtgcaagcataattggatcaaatacgagacatgatcaagggcttaactagcccaaaaccatcagactttgagctggatatgtcaaggggttcacctttctcggcatacatcaatgccttgcccttgcctaaattcaagatgccaacttggaagatatacacggggaaataagatcccctagtacatctgaagtactttgagatccaagcagatctctaacaagtatctaaagatgtgagaggctaaatatttttggcaactctagctgaaatagcccaacaatggtattttaagctggc

SEQ ID NO: 313887 - DNA, 1112 bp, Cannabis indica
attttaaacaatataactaatattataaattaattgattatatattataacttctaattcaaacgtaaattaagatttatgcaagaaaaaataattacttaattttattaatactattaaattaatttagatatttaaatttaattttttgaaaaaataattaattaattaatttaaaagtattagttttaacagttaactttaatgaaaaaacattaaattaacaattttcagacatttactgtatctatatacatatattattatttttttttttttttttgaatattattattatatttgtacgtattagaaagttggtaaaaggttggctctgcgattcctgtaacacaaaacgacggttcatctgaaacaaagttggatttcttggctgagatttgttctttattaatttaaaaattaactatctcagaaagcaaaaggcaaaaggccttggtcatgtcgttgtcgttttgtttcatagctgaagccacagccgacgtttacttgtcgttttataaacaccaaaggcaagttttttcaattatttttattttatttgaaaggagagaaaatacaacaacaaactaccccttacgtaccctttttgactttacttaataaaacactccaatagatcatagtttcttctctatacaatacaactacaagtgtatatatataacaataggagtaaataattggtctttactacttttgttgaattaattactttggaaagcgatgtagggttcgataactttctacctatagtaattattgttaatattaattactttcttttgaaggcatgcacttcacaacttcactgatgatatgggcattattctatgaaaaatattgtccataaaaaaaaaattaaaatttcaccaaattaaataacaatatttctacgtgtcattataataattaaattaatacatacaaatttaaacaaataagagctaataatttttttttgaaggaatcattattaataaattaatgatagagaatagaatcgaatcgaatattatattcttctagctaatacatatctcagttctcacaaataacattttagtccattgatatatatttttttaaaaaaa

SEQ ID NO: 313888 - DNA, 3284 bp, Cannabis indica
gccaaggagactgcatcattgtgagctgattgggtggagctcttggggattttttaaaaactctagcacttgtcacattttctaacatagtccatcaagtctctgatcattgttggccaaaagtacccctattggagtatctttttggataggctttgcccccaacatgattgctgcaaaagccttcatgaacttctatgattagccatttagcatcgaccttattgacacacctcaagagaagcatggagaagctccatctgtacattatcccatctaggatcaagtacctggcaacttttcttctcaatttgattgattcacttttgtcttctggcaaggctcaagtttggaggtaagctggaataggtgtcatccaacaagtctacttcttctaggataacaataatgggttcctctaggaactgtaagggaaccaagttttctttgtcaacaatggtggtgcttgccagatgggcaagtgcacttgctgcagcattctgctctctgtggatctacctaatgtgtagcctttgagctgacttagcaaatctttgattttgctcaagtaggccaccatttcttcaccttgagttgtgtattcacccaggacttgattcacaaacagttgagaatcgttgaatgtgtccaagtgcttagcttgtacttcatgcggcagcttgaggccaactatcaaggctttgtattcaacgtcattgttcgaggctttaaagtcaaatttgattgttccgtgcagtcaatggcccccaggtgttgtaagggcaatgcctgcaccagaccattggttagtatagcttccgtgaacatggagtatccatgttagttctttaatattttgttactgctcttgcttcttctctggctcttacttttctcctaagtcttgaggaatctcaactgttgaattggtgcactcagccttgaagtctgcaagggcttgaccctttatggttgatcttggttagtatgtgatctcgaactggccgtgctcaatggccattttgagtagttggcctgatgctttaggtttttggaaaacctatcacagtggttgattgatgtacaactttatgaggtgtgcctgaaagtagggcctgagctttctagaagtcaagagcaagcttttggttagtttctctatgagtgtgtaccgactttctacgtttattagccttttactgatgtggtatacagggtaatgtacactgtcttcttctcttatgaggacaacactcatagcatgttctgtgaagctaggtacacacctagctcttcattgcctaggggtttagacaacactggtggttgggccaattgttttttcagctcttggaatgtgttttttcattcctttgtctactcaaattttttgttgcctctaataatattgaagaagggtacacatttttctatagtgttggacacaagtctgcttaatacagcaatgcatcctattaggctttgtacttccttgacagttatgggtgacttcatgtctaaaagggcttggattttatctggatttgcttctattcccctggcgttaactatgaagccagggaattttccaaagcttacgccaaaagagcatatgagggggttgagcttcctcttgtagcggtaaaggattttgaagcactcgcataggtcctccatgtgcccctaacctttatggacttaaaaatcatgttgtccacatacgcctccatgttgcggccaataagatctgtgaacatcatgttcactagcctttgatatgtggcccctgaattctttagcccaaagggcatgacttagtagcagtaaaggcctaggtccatcatgaagatagtgtgctcctgatatggtggatgcatatttatctaattgtaacctaaatacgcgtccatgaaattcatgacttcatggctagtcgtggcatctattagttgatcgatttggggagtaaaaagtagtcttttgaacatgctttattcaggttggtgaagttgatgcatactctccacttcttgttgggttttggcaccagtactgggttggatacccactgagggtagaatgcctctattatgaagtcattggctctcagcctttcgacttcatctttaggtgcttggccacactctttatccaacaactgccttttttgctgaacatgctggatgcttggatcaatgttgagtgcatgggtcctcatggagggctcaattccgaccatatctccaagtgaccatgagaaaaggtctaggtttgcccttataaattctatcaatattgattttatttctagagccaaacctttctgaatctttagtcttcttgttggggaagtgggactgacctccacttcttccaactcttctacaggtctgaagctttctgtaggatccccaaagcaaggatatatgtctgtgtccctaccttgggctagacttcattgccccttgctaggctcattctctaggattttggcaggcttcttctctttttttgccttggacggggcctagttgtagtaatgagaggcagaatgctggtctcccctcacacattccactccatgcctttttagaaatttgaggcatagttggtagatagacgccaccgccttcaggtccttgagggtcagtcgacctatcatggccttgaaatctgatggaacatcaatcacgacgaactgcaccatcactgttatggtggtttgattttttccaactatgaggggtaatcaaatattcctgataggtgcgatgccttggccatggaagccatgcatcacttggttgcaaggcgccaagtcagtgagttggagccccatcttttcatatgttgatttggaaaaaaaatgttggaggaggctccatcgtcaaccatacatcttgctatggtcatgttctcgattcgtacagtattgactaggtggtcattgtgcgagaaattgaactgggtagcatcttttttggtgaaggagatccatgggctctacaagcttttgttgcttagagctctggtctttgaaagctaagataacaattttgggcttgtgacagattgtctgagcatagcgctccctcttcggaatattttactaggatctagatttactaacaagtatgttttattaacatcctaaatatgaagtctctaaaacaatgaaataaacacataagggtttaagaaaaccttacattgattgcagcaaaatataatgattccttccgttcgtgatctttagcccttgattccttttggtagcagagcat

SEQ ID NO: 313889 - DNA, 555 bp, Cannabis indica
gttctctttctgtctacaaagaacctaagctatctctaatcaaatcgacatcaaggtaaggaagtaggtatagttactcttgaccaaagtggattaggctattaccgctgaaaggggacgaaccactataaaaattcattgctcatcattgtcaaattcatttcgtaaaccagtttacttttgaacaacattcacttgtgttcattttgctcatttaggatcttcttaggttcgttgatgacaaattgcgtttacaatttggtgttttcatttagagcagtgaatgcaagcgtcgatctccacttgtggccatggtaagcacgaggcggatgaattatgaagaagaagacactaaggtcccctcaaatgaagaaaacgccatggaccaccaataagaatttcaacctactcagcctgctagttgttgtgatattttgcacatgcaagtgtacgtatcgttacaagtagtaaactcaccaggagtgaggttgatcccacagggattgtagttaagtatgttgaaattaaacttttacttctatttgattaaataaa

SEQ ID NO: 313890 - DNA, 2019 bp, Cannabis indica
gatgatgacaacaatgactttgaatataatggcgactataaatgagatatggtgaagataacaattttgaatgtaacgataactcgaagacagtgatgataacaattttaaaatttaattacatatgattagttttctatatatatatatatatatatatattatagttgtcttttttagttgttatgaaatttttctactatatttaaatttactttttgagtaaaaaattaaaaaaaaaaaaaagtttactagaatagttactcatattattaacaaaaatatcaaaaaagaattaaaaaatgatatttcactaaacaaaatacaaccacacgcgaagcacgatttgttttctagttctataataacccaaaaataagatggactcgtgaagtataaaaaattaacttcaaagccacattaaaaactttcttgccattattattaatagttatttattctagagtttatttattactttatttatcgattaatgaaaatttacgttattattgattatttaaataatattttataatttaaatttgtcaaatataaattaattttataaaataataaaaaagtaacaatacttttgattaaagtactattaaaaaaaaattaacaaaaaagtagagagctccctacatttatagaatttcttgcatattctatattataaagagtaatttttatatcccatttgttctttgcagatgatcttattttggtgggtagggccacgatagaggaagctaagagattttggtagtatctggagctattttgcgattggtcaggccaacgtattaataatgagaaaacatccatcttctttagcaagaataccagtaatgggatgaagcgtggtattaagcaggctctcgacctcaaccccgtagtaggtaacattaactacattaactacctgggtctcccgttattctgaagtcgtaggaaagatacagatttcattttcatcatggataacttggtctctaagctgcatgggtggaagttgaaatccttatctaaagtcggtcgtgctactctgataaaatcagtgggattttctttaccagtttataccatgcaaacgacgaagttgtccaagaagcttgcagcgaaaatagatggcatggttagagatttttgtggggctatgagcagggcaactgtggcatttgtcttaagcctgagatcagttatgcctccccaagtctaggggtggaattggcttctagaggaccttagaaatgaatcaggctttcctggcttaatgggattgggctttcttgaataaggataattctttgtgttgcaaggttttcagtgccaagtacctaaaaggtagacctttcttgaagtgttcgtacaagaattcagatttgttattctagaagaatattgtgaaaactaaaaaattcttaagaaagaagcctgtaagctcatatcggatgggaaagatacagacatttgggatgggtcgtgggtgattcatagtcaagactttcatccctaccctaaaaacgggcgaccagagggttggaagaaagtagcgaatcttcttattgataataggatttgggatatttccaaactcaacaacctttttgaccaagagacaaccaataatatcctcaaaagggggaaggcacagaggtcaaggcagggataaatggatctaaactaaggaaccttctcgtcgcttttctacaaaatctgcatgtcttgctcaacccttgtcaagagtccccctcccactatggctctcgctctttggaataaactgtagaattctaggatcttggaacgccacaaagtcatttggtggagcattctctctaatgccttacctatcaggtcaactcttgctaaaagaatgcagattgaagacgtgtcttgcctcttttgcggtgagggagaagaaacgatgggacatctttctctctactgtaactttgcttttcacctttggaggtcctccccttgagggtgatgctgttgggttttatgccc

SEQ ID NO: 313891 - DNA, 1821 bp, Cannabis indica
aagatgtggtaaccaaacccgatggagagaaagagatccaggttcagatcttgataatgctctgcgacagaaaggaaccaagggcaagagatcttgaacggaaggagtcatattattccactgaaattaatgtaaggttttcttaaacccttatgtgtttattttcattgttttagagaattcatgtttaggatgttaattcagcatacttgttagtaaatctagatcctggtaaaatattccagcacagggttcatctacaaaacatgggagacaaagggtgagagttggatggagggaaaggagaaaaacatgtttgatatgtcgaccaggccgatcaagataaaaagaaggaattaaatttcaaaatggaattcccaaacccagaagttcaaaatcacgaagaatatctagaaagttttagaaaccccatcaatgggtgtatgaacaatttcaagccaaaagtggtgcaaaattagggaatcaaaaggcctaagcatatgttagtcaaagttaaaagccctaatgtcttctactctatgattagtcaagaatagttcaagaatatagaaactttacagcaagaaattcataaaataatgtatgtattcaatagaaattgcataaacatgaggaaaagaaaatttactcactatttgaaggtttttgaacatgctcagagggttttagcaatggagtttccagcaaggtttcttcaaaaattcaagaatgacaaaagaaaaaaattctttgctctgcttttttgaaagctaaaatggctaaaagagtccctaaaaagctttaaaccccttttataggtatttgagagggatgggttttcccctaaaaaggaatgttagcactcattacagtagtataaacgtcatgcatgctataccatataaccgtgagtgcgtaattcgacgtacaactttcaagacaagcattaagtgtcccagagattaaagagatgttcgatcaaaggtgataacaagacacgtgtcacccattcgatcagcttcatggccaggtaagtccatatgcgaccatgaagatcccgcacagacttggggcgaatattatccaaattttggcacaatgatgtggcatcaatttgggtgacacatggagcatattttatcacgtggacgagcaatcctactccaaatgagttgtacagactgttacgatacttgaagtcataaatagaagatgggatgtctagacaggtcatgtataaacatctgactagctccattaagcaggtagcttccatgcactgactgggggatgtgagttagcaattttaaaaatatatctcgcatatctccaagcttgcaagtcacagcataatccctacattcatgggattgattcgtatcttcaaagaagaaaggaaacttgtttaagtttcctacttttttattgtaattatagaaataaacaagtttcccattttatttctcattgatttagggaaaccaatttcatataattaatccctataaagagtgggttcatatcactattcagggatacaaaaatattcaaagagagaatactcaagagagaaaccttattatttatattcccttattttattattctcaattgctttaatttgactcactgtcgttggctaaaagtggtcaacaaaaggcttgggcgtgtggaataggaatgagaagtgtgaaaaatttgattgacaactctcttatttatagatgagctcaatctcctaatcctaaagctaatggtagtcttttaaatttaaagctttaaaggaagaggtaaatgacaagtaaaagatacaattatatc

SEQ ID NO: 313892 - DNA, 507 bp, Cannabis indica
ggaatcaagggttagagatttgagtggaaggagacacttaattccactcccatcactgtaaggtttcttaacttttatgtgttttgtttatcgttttagaagttcatatttaggttgttaaatcaacatacttgtgagtagatctaagatcatggtaaaataaattccatcagtaatcacattcctcttttttcaaattcttttaataataattcacctattgttgaaaatggacagcagttaattggtgctccaaaaaatatttcacatttaactaatggtgaaaattcagaccataaaagaaggaggccaaatggtgtggatatttttgaaagtgggcctattgatatggaggatgatttgattatatcacttaataatgcttctttttcaaaaaatgggcttttggtgggttctggagtccaggcccaccgcgagttatgagtgttcttagttggaattgtcgtgggcttgggaacccacagaccgttcaattccttaaggatc

SEQ ID NO: 313893 - DNA, 1934 bp, Cannabis indica
cattgatttctaaagcaaacatttcttgaagctttaagggcaacaatactgttgtcccagaagaatcaccaataagattagatagatatgtttgctgaaatttgataccatcctgaaagtttattgttactatctttgacttagtggcatccaatgccacaaccaggtcatcagaaaccaataacatctcccctgaaaaatcaccaggaaaggcagcgccatgtttattcagcaagtctccattcctagcatttattgcaaacacctcaaactgggaagagccagcagagcctagcgcatatattatctcactgtcagaaggccggataatctgttggacctcaatactgcaaacacataaaacacagaacattaatgacgtcgtattttagaacagaacacacctctgaaacctgagagaattttctgaaaaaaaaatacaacaattggccctttgacctccatttccgtttacctttctgcttcaaagttctttttccaaacaatctcgccatctatactagatatagcatgaagacacccattactaaaaacaaggatcaaattatccttgtcgactttcaaatttttctgtaaaagataaccacattaaaccggatgtacgtaagaaaaattgggtttgcaacacttacaagatcctcacaccatgcaacctgctccaaagcaaatcagagaggacccaaaaatctcaaaaagcagttagctcttgcagaagcaaaattatattctgctttaagttaaccagaacattaatttgcatttatacaatttcacaaccagcaataattatttttatgaaaaatgtagtacggaacaacaatgaccaggtgaagactttacaatgaagagaatttattttcagccatcaatatataggaaatctcagaccctttatgcaccatgatattgcataatttaaaaatacgccaattttaaaaaacaaaggcaaagaatgtctttacaaaagtttgaccaagctacccttaacattcaaagaaacctatctctctctcttccctcacaccccctcctctctttctcacgtaagccccctctttaatctgtaaacccaagaaaatattggcttgacactaattgatagatttggaacactttgtgcaatattttttagtatgtttgcaaagaaaaaaaattccagatgaagactgaaaattgtgaatttcgtaataaaatggatgcaagatggttttgtgatagtcccataaaatttattaggtaaaaatcaatgcatctaacgatacttcgagatctaagtgaaaagttagtcatcaaatttttgtgcaaaaagttctcaccaaagttttcattaaatccatcgcaaaccatcgtactcatcaattagcatttttttttgaattaaaataagttatagtttaacgttgcaaaaccatcgttaagcagcgctaattatctctttttcccatcggttttcataagaccatcacaataaccgtccttaagcatcactttttgcccaagaaaaaaatcaaatcatggacctcaatcttttcttgggtttaagttttgaattagattttcaatcattaaaacataaaagaatttgagggagagggaaaaaaaatcattgcgttttttttttcaggttttagagagagaaagatggagcatacatgagatgagagagaggagggggggacagtgttacgggtcgcttggtcaatttttagtaaaaagacatacttgcctatgcttacgagggactactcaatttaatggtttcattttttttcccttcaataacaagttaccaataaataaattttttttagaattatattaattataattaattatattttttaaaataattaatttttaatttaaatatttaacaaaatatttttttagtaattaatatttataaataattt

SEQ ID NO: 313894 - DNA, 558 bp, Cannabis indica
atcaagagtctatgctcattgtaataaaaaaagagagtctatgcttatattaagagacacggttcataaataacctaataataataaggtttttatagtcaggggcatatttataaaattaattgagtaaataattattattataatattgtgaattatgataaaaatgttactaaaataattttatataaataactaaaaatatttataaaccacacgcgaagtgcggtttgtttcctagttaaacgataatggaggcttgagaagaggctttgcgtgatgacgagaggctacatatggtgattgtgtgaagatgagtgtgaaagttcgataagcttgatgagagtgttgaacccaaatctgagtgaggctagatttggagaagggaaacaaaaatttgcggcataaatgccatatgttttcaattttatacacttaaatactatattttttttttggcagatttaataccaaatgttgtattttaggcattttcgttactactattcactgttagttgtaactcagtgtacacatgtaaggcccagattaaatccc

SEQ ID NO: 313895 - DNA, 1099 bp, Cannabis indica
ttttaaattttattctattccatttctattcttatgttttcattccacccaactaaacgctaccttagtttctacctcgtcaatgtcaacgaagtaacccaagaaaaaataataaggccagagagggcagcaaatggaggacgacgacatgggaatggcgtcggtgaggcaaaaagcaagaaaaaagtggtgaggaaatacttaaatacaacaaagtattaacaaatgctattccaatgttgtctattaatattcagtgtaagtattgctttgtaaaaagttcacgatattttataataattattaaatatgtgtgacccgatatccaattacaccaataacaatatgacaattctagatagtgtttgacaccattaatatattttactatttagcatttctaaaaactgtagatgttccttcaattataatttcaatatatgtatttgatatttgctgccgtcaatctcaaattacaatctcttgatcaatcttcgtgctcaaaaatacatgccagaatatttttttcttatttttttttcatgacagtgttcgttatatatagtttcaacatcgtctctgtaaatttttgaaaaaatttgaatagtttataaggccgaaaataagtttgaagttttttgaacacgagtggtacactggaatatcagtaactatttttggtaatataaactattcagaattttaaaaaatttacatggataatattataattagtcttcctcaaatatatattaggattgtctattttctcaaaatatatttatattattattgtaaaatattttatgatatgccacaaataaagactatttttggcaaaagtctaaagtgtaaatattattttttattttgtattttgtaaaatttatcatatcatttattttgttaaatgacaaatcaaattttatattttttaaaatagtacaaaataatatcttaaattaagttttattttaataaaaattgaattagaagtattattttaaaaaataaaagatcaaaattatcatttaacaaaatagaaaaaatctaatctgacaacttttataaaacacaaaattcaaactataatttaccc

SEQ ID NO: 313896 - DNA, 1179 bp, Cannabis indica
attgaactccattaaaactttctacaatattttaagcttagttaaaatggaaaagagatccttaccatttacttatgcctccaactttccacaaccttgctcttaaactcctgggattcactttatcgtcacaaaaatggtggcgaaatgggttttcgaagtttaagatattttaatcttgctattttgggaaaataagagtagagactctttacaaggcctaattctttagcaacttgcttatttaaagctaggtattttctaaatggggatttttaaaatgctccactaggaaataatctaagatttatatggtgtagcatatgggagtcacaacaaatggtgaaaaatagattttaatgatgtgttggtgagcattgaaccattgatgtgctgagagaatcgtcgctacctgataatgagaaccctttgttatctctgatgaccttagtttagcaactgccaaagtgtataatttattgtgtgttgatagtgaaggatgagatgtggagcttatcacaaatctatttggagagagagacaagaacatgattctgcaaattccatcacaattatcttaggctggtgatcattatgtttgatccaaagaaccatatgttttatacactgttaaaagtaaatataatctccttcaaaaacttcatggtaggtgggttgaaatggaagaatctattttttggaagaagaaaaaaatggggaagataaaattacctcctaatgttaagaacctgctgtggcgtgctggtatgagttgctttccaacaatggttcaactttgatctacacatgtggaggttacctcgttgcttcctctttgtaacttgagtgatgaattaattgttcatggcttggtgacatgtcagaaggttcaactatgttagaatagggttggtattgaaacaaatgtggcaccagatgctaagatttttgggtggtgtgtggaggtcttcattcaagtggataacaagatgaaattgttgggattttatgctctaaataaaaactcatttcaatataatcagatttactaattaataaaagatcaaaaaaatattttatgttgcatggttcaaaatgattattttcatgactatatgtttaatatataaattctattaatttccaaacatatagttattctatgattatagtgttgtc

SEQ ID NO: 313897 - DNA, 1291 bp, Cannabis indica
aaaaaaatatatacatacaaagaaaatagcataatgtcaaaacaaatacaaagaaaataacacattattacatttcaaccgttcttatcttaccatcttcattagatcattacaaattcagaagaaactaactaaatccaggacaagttatacattccatactgacctaaccttataaatatattacttgttctatattccaaacgtgcatgtttcgataaatagagatggctaattattatatatatttatacaaacaaaatattataaaagacagctccaagaatgccaactcagtcagctgaaattttctaagcaaagagttgaacaggcaccaaaacaattaattcttctattaagagattaaatcacataagatagatcatcattaattctaatttattagtttaaactttaaacgcgtaatcaactcttccaagcttatcgtgtcacatatatattatattataatagcacttttcttatcttcctaaatgaaaacatgaaaatgggcatatttagtatctaacttgggaatttggtataaagttatataaattagtatttttgtagcaccgaattttatacactatcaagttattgtgtatatgttataatataaaatttgttaataaaatttcttgaaatataacttttataggaacatgtgcagttttttcattacattctacttattttatcgggaactaaataaaatgatgagtgatagttaataaatgaataaaattaaatactctttattctttttatgttaacgaaaaatagaaaaagaaaattatatataataattcatatttttctttttcatttcttaatcgttaaagtaacaaaatgtgaaatatatttaatttgaatctatttatttattatcatcaactgtattacttgtttgaggataaaattgaatatataatatatcatatatgatgaaaagatcatattaatgtgaaaattttattattaaaaaggtatatgctagaagaaacacaatttaataatgtaaaatgttcaatgaaaaaaatactaattatttttattaataataataataataataataataaacacagttatatatttgtttacttattttattaaaatttaattagggagaacttttgtaacatcctgaacctcaggaacgccacgtgtgtgcttttataatcttattatcaataatctattagtttaggaaaagtgtggtttaattcaaaaaaaaaaattatctttaattaaatttaaaaaaagaaactttagttcaaaatactgt

SEQ ID NO: 313898 - DNA, 439 bp, Cannabis indica
agggtataaaacccaacagaatggtaccagcaatggcaagagggggaataccagtaatggcggtaacaacaatgataacaagcgactaaagaataccaccgagccggccagataagatccaaccccaaagttcactacctacatcattctcctggacactagagaaaacatttataatgcaactcactcagtggtgccatattataagccttatcccatgagataggatataagcaaacgagacatgaatacgttttgtcgattccacaatgactacgatcatgatgctgatgagtgcaacaatctgaaggaagaaattgagttcctcatgagacaaaacaacccccacttgaagagatatgtacacgttgtgacaacgaccaacccccacaacaacaacaatagccagtcgaggatgaccaacaattgttacctcccc

SEQ ID NO: 313899 - DNA, 2427 bp, Cannabis indica
tttcggatactaaaacagataaagatgtatcagtgtatctcttttaagggggtgtattatagaatttcccaatattattttacgggtattgttattaagcatcaatagtgtctagtattttttataggtggtgcttctattatgcaaagagaggtattaagtactactagtgtattttagtaattttcttattccacttgtacttaactttttaagtttaaattttaatggtaaaatcattcgaacaactgttagcaaatttaatatgttatctatttttcacagttaactaccaacatgaattacttatgtacacttttgtagtacatgtggcacatttatattggtacacattattatttaaaaattataaaaaattattttaaaatttataatattttttattttgtaaatatattattttttgtttttataattttatttaattttaaaatgaacattttaataataatagtaagtgtattaatataaatgtatcacgtgtacaagagtatagagataagttattcatggtctgaaccacctatcaagacaaacccaacgccagttacaattggcatccaacaaacgagatacttaaaccttagaattcacaaccattagattgaaggttgcttctatgtttccccaactgttaacccaaaaacttttcctgatgatatagacatcaatgtttgacacgtggcaagaaagataaccatctcaaagttgagtagtcttgagtcatagtagtcgacctgacaggggtccctagccctgcggctaggttgactccaagaactctgaaatggtttttcggattccgataagtcatttccaactcactatatttcagtattctgtatcaatttcatgccccaggaattgaaaatacacgaatcaacacctcaaaaattaacttgggcacctagggtttcacccagcgcccaagttgacaaccctaactagggtttcagtttttgggaccatcttagtgcaaatgggtcaaactttgcatttggacatgaactagacataccacaaacatatttgaggtattagaatcagattcagagaactttcacctttgagcacccgaacacctgatgcccaggttgacaatctgtcaatctaggccacttccaagcatcagatcaaaaatccaactcatgcatcctcttcgtctttatcaaacattgggaaacaagttctttctggaagaaacaaccctccttaggtgccaaaataagggaccagcgcccagcttgacacctagttctggcccagtgcctaggttgacaaaatgtcaacctgggccaattccaaggagtttttccaaaaaaatttctcggcatattcttcattttcaataaaaattaagattcaactattttcaaggaccaaacgaaacttctaggtggcctgaactggacccagcacccaagttgacatattgtcaacgtaggccatttccaatcagtttctcaaaaaagtgttttgggatttttttccatcatcagaaataacgaagatactagcaaactcaggaagaaaatcacaattccaagggcatcaaaattggtgtgttggtttcgattactcaaatgcaaattcggctccaagcattctctccaaaatggtcaaaaattgggtaggagacttgtcttcaagttcaagaacctgtgccaaaacaaaatcccgaaagcttcgaaataagcacccaacacccaggttaacaaatggcctggtgcgctgagttttgcttatccaattctaattatgtctcgaccgtttgtttattttttcacaataactaagtgtcatgaagtcagaagattcaaattcataacttcatattttcactttttcgacaaggtgatttactcagaattaggggagcttcgagtcttgcgtttccgcagaacaataatatctctgagaactggtgaccagcttcgccagaacatagaaatagactaagtgatgtcaaaatatcacttacgcatcaaaaaatacatcattggtgcgttcttacactcacccagtgtccaggctgacatcacatgccaacctcgacactaggcccaaaacaacttttagtaaaatgaccataagtctctcaatattgatctgattgacgtgattcaacttgtgttttgaaactatgtcaatgttctatgaagtcatgtctcacacttcaatcgtaattctgaagttattgactccaaatttcaccccaagggagttacaaattcaaactacaacttacccgaagcggatcccacaaacacgactcaagtttcgagaatcgacgatcaacattcagagtcaatttttaccattagatcatcatctacggtcaaaaatagcataaatatattttttttcatatcttttggattatttattcccatttaataggacctc

SEQ ID NO: 313900 - DNA, 1590 bp, Cannabis indica
tgctcttaggagtttacacaccaccctcttgataccaaatttactattgatgtttaaagaaataataacacatgccaatattataggattctctattctttttctcagtgataatctctaattttcccatattgatgtcgtgctacaaatttctatatatcaatgttgttaattttagttattgatgagctattccttcttttaccaataaatattaatttcattgaaaatagtcatgaaacatatataaattacgtgatgctgttaaactctagttgatcttttcaactttttcaaatttgaaagagacaagaacaaaagacaagtgtacactgtcaagtctacaaattcctcattgtataaaattcgagcataagccaactgggacaagttgtcaagtctaccgtcaagcccggcccctttataaatgggtactagtcctagtggccaggcccaaaaccaaatttgtcctctagtgattttgatttttatcattaaaatgaaaaggtaggtagaaattcaaaccagccaagctatggggccggacaaaagcccaggaattaatggcatgtcagccatgttttaccaaaaaaactggtccgttgttggtgatcttgtcacgaaagctgtcttgagtattcttaatgatggtgccgattccacagccttgaatagaacgatcatcactctgattcctaaagtcaagaagcctcaacgcgtgaaggatttcaggccaatcagtttatgtagcgtcatcttcaagcttgtcactaaagttcttgtttcaagattcaaaccggtccttcctttagtgatttcagaagaacagagcgctttcttgccgaatcgccttattactgataatatccttgtggcctttgagctggtacatgccatcaaaaataaaacggctggtcgaaatggtattgccacctttaaacttgatatgagcaaggcgttcgatcgggtggagtggtgttttattgaagctgttatgaggaaaatgggttttgctgagcgatggatatccttaatcatgggttgccttacaacaaatactttctcttttttaatcgatggagaagtcactgggactctagctcctactcgggggctcagacaaggttgcctgctatcgccatatttatttttggtttgttttgaggggctatcaagattacttcatcatgaacaacttaccggtcatttgaaagggttcaagttaacaaggaatgctccgccagtctctcatttattctttgcggatgacagtttgttgttttaccaagctgatgaaggttcttgtttagccattaaaagagtgttggatctctatcataaagcctcgggccaatccttaaatttggataaatctgtgatgtccttttctcccaacacaaccttagctgctcaggtgttctttcatcgtcaactctccatgcctatttgcgaatgtcatgaaaaatatcttgggttgccatcctactctgggcgggataagaaggaattattcagtaatatcaaggagaagatttggaaacttatgaattcatggaatgagaaatttttttcagctggtggtcgtgaagt

SEQ ID NO: 313901 - DNA, 547 bp, Cannabis indica
tcagatcgcattgagatgggtgtacgagcaaggggttagcttagtagcaaaaagttacaacaaggaaagaatgagaacaaacttggaaatctttgattggcctttgacccatgaagaatcacataagattgctcagattccccaaagaaagacagttactttcgcatctatcctagggccacacgaccttgtacttgatattgatcaacaattatgatcattaattcattaatttaaattcattatatatgtattcggattcatccacactataatatactttgtagtttccaagagatcattgagtgagtgccaagattactctcttcatttcttttcttgtattatgaaatttttatactttttgattaatgtatcaaatgctttgtgcttctaacatctatttgtataagatttactaaaatacagtgactttcattataagaccagtagtactatatgtttgacttaaattttacaattattctctaaaaaaaccaacgtaaatagaaaaaattatgaaataaaaaatataatatttattatg

SEQ ID NO: 313902 - DNA, 531 bp, Cannabis indica
gacatatgacatcaacctagacactcggtaagggagagaacgtcctgtggatgtactttttgatgcctaagtaatattttgatatcacttagtttatttctgtgttctggcgaagctagtcactagttctcagagatgttactattctacatgagagattcgaaactcttcatttctgagtaattttcccatgttgaaaatgaaaaatgcgacgttttgaatttgacttcatggagctttatcattgtgaaaaactagatagacggttgaaccagaatcagaattagaatcgaataagtagaacccagtgcactaggccattcgtcaacctgggtgttaggtactttatttttgagttccagggttgccgttttgatacttctgaagttcttgaacttgaggatgaggtctcttaccccattttggaccattctgaattcaatggtcgaatcagatttggcatttgattgatcgaaaccagcgaaccaggttgattgtcaacttggggactgggcccaacaccaggttaac

SEQ ID NO: 313903 - DNA, 825 bp, Cannabis indica
atttgctcgcttattcttgttcgcggctggaagtaccattttgctcgcttgcggctggctaactctttgattggtgtggatcgaaagcccgctagggatatgactctgataccatgttgggaatcatggggttccatttcaaaaccaattggtgatgagtagagtagcccatgttcttatatatggctcaatactttcacatttaatccatgtgggacaatattgtccaataaatgtatgttaagagtaggccatgattcattaaaaagtgataggtcatataattatgagttagttatgggttggacacactttaactctatgattggtttgagatttgaaaaaaaatttatgtttttgaaaatttaaaaagtgagggtccacattagaatacttaattggtttggtgttttcaaaaactaattttgaacatgattttgagttttaagctaaaaaatgaaaacaacaattttatgttttctatattttcaaattattcaatttaaaaactcttcaaatactctcttacttttttatttttagattatcaaccaatcacaaatccaaaattttaaaacataaaaagataaaattacactacaaccaatcacatttttaaaaataatttttcatatacaaaattcaaaattttgtttccaaaacactcttttagaaaacacaattttcaaatctcaaaccaatcaaacccatataacccaatccaatctatttcttgagagacgctctaaatttaaaacaactttcatacatgcaatatattttacattcacaaaatatatacaaatatatattttatgttttcat

SEQ ID NO: 313904 - DNA, 1945 bp, Cannabis indica
aggaatcagataacaatgacgagtgtaattgggccccacgaggcccaacaatttgttgtttgggatgaatgtgggacctgctctttttgttaggtcagcaggtggatagaattatagatgagaacgataatgtggacccgatttgggcggccccttccctaatatattattattttttgttttacctcacgcttttgtacttttcaacttttatctaagaagaaaaaaaatgacaaaatatattttttttaattaaaataacaaaatttcacgaaacataaagggataatttaaaaaaaaaacataaaaacaatgacaaaaacattataaaatatgatatgcctagaatttttaatatttttatgattttttttatgttgtactttgatattattttattattatttttatctaatttttgtattattctttcgtatttttatataatactgtaaaaatataaaagataaaattttgaatattttttataaaaattagtattttatataattatttcaaatataaatagtgtagttaatgtattagctactttcattattaactagtgaattaattttagttaattttagtttcacgcgctcaaatcttttaatgtaatttgatgtatttttttatcttttaccaaaagagaacgtctacctattgttgagtgctctgtggcagttagaagtccgtcaaggttttcagttttttacagttttttttctggtttccatcttccttctcccactaaatcaacttcaaacttcttcttgggtgtaattgctactgtaatttcatcccaccccatagcctgactgtttgtgaaactctccctcattatggatctgttgaaagaaaaaatgaaaggcaagattaatcttacagaggaggaggagactgtgtttgcatttgatctgggcgagcctttttagtgtgggtttgaaattgaaagtgtcttatatgccagaattttaacaacaaaaaaggtatggctctccactcacacttcagctcaaaatggttgagctgaaaggaagcatcgacatatagtcgaaatggggttgactctcttaactcaagctagcatgccactcaaatattgggtggatgtcttccaaacctcggtttacctcattaacagactgcccacaccggttttgagcagcaagtcaccatttgaaatagtttatcacaaaaaacctgactatcatttacttagaacgtttggtgttgcatgctttccctgtataagaccctaccaaactcacaaatttcaatttcactcactcaaatgtgtcaatctaggctacagtgagtcttttaagggttataaatgtctaagcactacaggaagaatttacatttcaagacatgttattttcaatgaaaaggaatttgcttttaaaaatggcttcctaaacacttatgctgctgaacagtccttattcattcacaatgaagcttggtcacaatttcctaaccttcaatttcctgttagttcaacaccttctgctgtcacttccactcatcgagcatcccatgttgtagcacttgcctctcctgactagtcgtctcttcccagccaacaagacaagtctccaacatctattaatctcagcaatgatattactgattatgctaatattgttcctgatatatcaggtcccaatgctacattatctccctctgctgctgctggtataaacaacacaccagatgaaatacctcctgctggtgtcacttccacaatgcctcgaacacaagggtcacatcccatgataacccgtgctaaggctggtatatttaaacccaaagcttatgttagcacctctgatgatttattttcaggtgaaccaccttcagtagctgctgccctcaagattaagaggtggaaaactgttgggttttgtgccctaaataaaactcattacaatctgattag

SEQ ID NO: 313905 - DNA, 1016 bp, Cannabis indica
taaaattttaaaaaccgaccataaccgaccgattttcacccctatgaaataagatgagtaatcctttttatatagccaagggactcaatatacttgttgttataatttgacagttaaattaatcaaagactaactaactaacttaaggttctttcaaaaaaaagactaactaactaattaaacgaatgattgttagatttaaagaataataccacaataagatatgtattataggtaatacaatatttttgcacaatatatcaatattattgaaatgaatgtaattatattgaattggttgtaatgtaaataaaagcaattaagaaatattaaatatatttttagaaagtaatgaagcacaaattattgcatgatgtgagcgaatgagtgggtacaatacaggtaaactcaaccaaggaaggcacgtgactagtagttagcttattatttacagactaataacaaagataaagtaataaacaaaattaaatgattggcctataattagtagttgtaatccacataatttgccaattccagagtgtactttcaggaaaccataaaatgcattacttgtggtgtaataggctaatagctctaatcttatctaaaaacgtgttcaacaagcatcattatatatcgtaatagatgtaacctaaatatgtgaggcattgtaaattataatcatatattttacttttattaattatatttatacaattattaaaaagaaattatgtttaaacaaggcgatatatgtttgtttatggaactaagatcattagtgtcttattctaatgtaagtacacataattttttctactattatatattagtaagcaaagttgagaagaaaaataaaataataactaactaaaatttataaaaaaaaataaaataacaactaaaaaaagaattagtatattatatatacttgtataatcttctacactattatatatttactaaaaaataaataaacaaaaaaaaagaaaaaaaaaagaaaaagaaaaaaa

SEQ ID NO: 313906 - DNA, 1117 bp, Cannabis indica
gaacaacatcatcattgatcactactgtgtcaccatattcgtgaacaagacttttcattgcaatgtcatcaatttgttcattccattgaaaattacaagagttgaggttatcatcagtagtctcatcctcatcaacttccattttgctactcaactcatgaacatcccaaaacagtttgtatttcactttttgggcatatttccaacagaatccctcagtgattttgagataaattgtttgccctgcatcttttgcaagtacaaagggagcattctgatcacatatattcttgacccagatgcgagtgatattattgcattcaccagatgttccagtctctggctttgtgccgaaccatttacatttgaacaaaacaactcggtggccaaatgaatatttcaactcccacacattgcataaattaccataaaactccacaaccttaccttcgcgttctaataaacagaataaaccactattctgagcaattctatggctatctttctcgtcagtaagaaatctgactccatcaactacacaaccagagtaagtatttatctcaaaatcaggtccaatagctaatgaaaaaagctcatcagtgaccttcgttggctcagtttcacgcaaccgtttcacctaaatatatatagatatatatgttataaattgtacaagcaatatgaagaagaacattcaagcccatgaaaagacaaaatagtgacttacatgatttgccaaccaggaaggaaattcttccttatgcctttcttctactttgacatcagatgttccctccaattccttcttatgctcactgaaaactaattgattaggatcattttgtagtaaaagaaaagcaaggagaaaacgacgaagcaaatatatcacttacctaacatacggatctaactcgtcacaatggagcagtacaaacaagtgggcctgttgcaacatatcacgagtcaactttacagatccctcgtctccaaatggttgaacacgatgtgagaacacatgaaaggatgaacgagtttgtttaggacctaaattgtcatcttctttattagaatgggtatcaatgtcatggccatatatggagcaaaatctaactgcttc

SEQ ID NO: 313907 - DNA, 1622 bp, Cannabis indica
gaatctctcttgaaatttcccccttgaggtgtctgcgggggctttctataatataccatgttgcaagtttccttataaaaattctcacgagtatccaccagactggagtactcagtatatcttggttaatatttcttcttgaattttttggagttctcgcttcgtcctggaccctttcctcctttcttactccatgattgacttgcgttctgctttggaacttccactttagattattcaagagtgatactacatcctgtctgtgccgctccataccccgagaaatgggtttgcatgggtacttgtacggatgtggatggaccgtaaaccattggggtatactgaattcaaagaatgtaagctggtgaggtaaatccaggagtggaagcaacatgggctggtgctggagggactccataaaggctttctgataagaatcttccaaactaataaatctttgtgccttagccatgaactcggatagtgttttggccctccttctttgtatttctccccacaaaagagaaccaactgcgagtccagattgtaaggccactagtttcatgtcatcgtcactttggtcttggctgccatcattcgttgaatgaaactcttcaagctttcttctgcctattgcttgatgttggtgatggaacccatctccaagtcataatcgcaggcagtaataaattatttccaaaaggttgactacaattccttccaagagtgaattgatctaggagccaatctcttccactaatcttcaacaaacttggtaaggttcagggagaagcccaaatatttggcatcctcactaaatcttgccacttgcatcatcttgttgtacttggctaaatgggttttaggattagtgcgtccatcatacaactcaatttgggacattttgaagttctccgagaggggagcttttgcgatcctccttacacgggctttgagtcctcatctttagaatcggtgagggccccactttatttttagaccaattttgccagtgccactatctgttcatccaacctctttgtgtcattgtcagggagatcccttccacagactttatcatttaagtggttcctgagatcgttaccatgtggcctcgccatctcactttttttctttcttttacttggtatctaaacatcttctaagatccaccgtggatcaactatcactagagtactatccccatgtcccactgtctcggtttactgaatcactaagacagtttttccttcccttgcgctttggtactttcgtaccagtcccttttcgcattacatggcctttatgggctgaagtgcatcgagcctagaggcgtagatcaccttctgtgcatgagaatgcctattggcctaattcacatttattcaaggaagttgaggagcatgtgggttcttagggtcacttaccttttccttccccttgtcatgtggaggagcagaggttccaacgttagtaaggtttccttttgtgtttccttcgatgcactccaccgaggggtcattgttagaatcttccttatctatatctctgaacttggctcgaaggcaagccatcatcttctccatcttatgggaaaacttctcttgatgagcttgctgggt

SEQ ID NO: 313908 - DNA, 1404 bp, Cannabis indica
tttcaaaaaaaaaaaaagtaaaaggatttaaacattttgtgccttttggacttgtcatgtcgtgttgtgcttaagctcatatttttcgtgtttgatggtgccaattatagcatcatgtcatgtcgtgtccaagctcatattttatcgtgtcttattatattcatgttggtttcatattgtgtcaaaaaaacatgacccgtatttacatcattactctcaatagagaggtaaacatcttgtacctctcaaaaattaaaaaaaaaaatagataaaaattggctaaatgcttaaatatagactccaatagaagatgtataatttagctataatagctatggtcttggtctaaaaatattatctccaaggctatttaggatttttgtcccccaaactatgatatgcattattatgtcttctaatttttttaacccgttaaaaataatccttaaactattcaaaataatataaatagttcttctgttaagttctatcacacgtagctaatagaatattgacatagatatttagttcattacctcgtcaacgctactcatgtaacttaaataaaaataatttaaaatttcaaaaatatatttttattaaaattaataaattaaaaaaaaaaatcattaactaaaaataaatcaataattaaaaaacaaaaaataaataaaaataatattaaaagaaggtctattaaaaagtctaaaacccagcggaccatctattgttcatctttttcaacatttttaagtttactaattaattaacaaatatcgtatcattgttcatcttccttagtagattcatttttacaaacaaaactttaaactattaaaggtgatgcttaaagtttgacatctaatgtttaatcgatgtcaatgcaagttgacaatgataactcttcgtttttttgaactgacgcaagtcgttaatgaagaagaaactacaatgaagttcgaagtcagccacttacacaaatacatcatagtgggaggatctctaagaatctaactcgccatgaacttgatagtgaatataacatagttgttggagacacaagtgaagatgacacattgacttttgcagtggttagttctgacaaagatttatggcttgaagccatgaaacatgaaatagagtccatgtaatcaaactccgtctaagatcttgtagaaacacctagtgactttagagtcgttgaatgtaagtggatgtacaaaaagaaacaaggtgccgatgaaaaagttgagacttacaaagcttgaattattgcaaagggttatactttaagagaagatgtaaactacgagaaaatttttagggtttgtttgtttacaaaagtaaaccctaattgttttcctttcaattaattaaggtgtcgtttggtaatacttttgtttt

SEQ ID NO: 313909 - DNA, 2705 bp, Cannabis indica
aagcactcatgtttgcataggaagttgtttaaacgtttcttcattcgggttgcaaccattaactatcattttctcgtaaattgcataggcacgatcaggattaccagataagctgtaagttcgaatgagagcattgtaggtagaaacattaggttcaaaacctttactttgtagttcttcatatacaaccacagcttgttcaaccattcctgcaatcccaagactgagtattagattattgtatgtgcaaagatcaggaaaaatccctctactccacatttcggtgtagagcgatagagcttcctctgctcttcgtgatcttccaagtgcgtaaatcaaatggttatagcaaattaaatccggactaaggccagttcgctttagttcttcaaagtaaaacaaagcgtcatcaatttttcctaaacgacataaaggttccagtagaattgtgtaagtcttcaagtttggtctgattgcttctttaaccattttttcaaacaattgacacgcagtttcgacatctcctattttcccgaatccatttataagaatattgaaaatcactatgttaggtttgcaaccatattccgccatctcctcgaacaaaagcattgcttcttcatgtcttcctaacttacaaagtccatcaatgagcgggccgtacatatgaggaacgggggagaaatcgcgacctacatgatcatagtaaaagtctatagcctcatccacaccattaaattttgccaaacccgaaatgagaaaactatgtgtaactgcattaggcatgacacttgaagatttcatcttattgaaaagtttaagagcctcattcaatctactttccctcgatagacccccgatcaaagtgttgtaagtaagaagattcggtgagatacctttcttcttcatgacatccaaagtatgaaacgcttcatcaacattgcctgctttacacaaacctttaataaaaatggtgaatgtaactacatcatgagcaaaaccattaacttccatttcattccaaatttctttcaatgtttccagctctccacaatcacttaacttgttcaaaaaagtaatgtaagttacccgattaggtttgcgacttctactagctttcatcttcacaaacaacgcctttgcaataccgagtttacctgcttcacatagagcaccaattagaacagtataggtaataacatttggctcgcatccttctttctccattctcttgaatacatcataagcttcatcgattttcccggctcttccaagaactctaatgcatatggtaaatgtataagtatcaggtctcaatcccaaatgttccatctcttttaacaaacccattacagtttcagtatcactgcaattcccgaatgccaccataagtgttgaataagttttcaagcttggcttcatcccttccatgaccattctattagaaacctccaaagcctccttacaaaacttagactggagaagcaaatagatcaactcattatacgaacaaacattcaaaacaaaccccgcctttttcatcttctcaatcgcagttggtgcttgtcgaattccaccgttgatgtcaagacttttgaatatagtaagataagtgttcaaatttcggtaaatggttttcttttgcatgaaatcaaaaacagcagtcatatcctccagcctcttatgagttaataagacttcaaacatgtaattgcacgtttcggtggtgtgaagaacataaggtaacccggcaacaaccataaaatatgaaaaagcataatttggatccgttgttgacttaagaaccctcataacatcttctgaaagtgtcacaactttattcttctccttggctagttcctccccttcctttcgggttttcataacacacccacataaacctatttgttgtttcctcaatgccgacctacttctcatgtacccatttgtgcaaacctttaaatttccaaagctactttctttaaatgactctctatgactcgaaatagctaatacagtctccgaaaaaacacaagtataactgaaactacaacagtaagtagccggagagcaaactgctaatagacccataaaaagagcatgtgaaaaaagaatgaaagataccgacttcgaggcataaaatctgtgacgatacgttgttagatgctccgctttattttctcacactgaagtcgaacctagacctgtgctcgagagatagctatccatataccgataagggattggtcccagcctacaaagataacactcagatcaagttaacacaatatggaattgtatggatatcaaataatacatatgctcatatacctctgttggtgaaaatgtgatgtagaatcaaaaacttttgacactatttggcattgttttctgatttcaaaattgtgttttttatagaaatgaaaatagaaaataacttatagttttcgaaatcattggtgtttggctaacattttctaaaaagaattttcagaaaactaaaaacatgtttggataataaaagaaacttgtttacaagaaacaacattcttaaaaggtactgtcatgaattccttttaagataaaaaagttacatctcaaatgcatatatagaagtccttatttataacttaactatgtcattattatgaaatctggaaatcctttcaaggaacaaacttacagttttaaatttaacaaacaaa

SEQ ID NO: 313910 - DNA, 1436 bp, Cannabis indica
tgggtacttatgccgctattttagaacatcgtctttggctaccaaaaaatgccattgtgtgtggctatggtaggatctttgaccatttttaaatggtattatgttatatatcgttggactctatttgaactacaagaaatataagttttagctactaaaaaattggtagcaaataatctatatttggtagctaatactttttttgctaccaaattttttggtagtaaattagtaattgtatcatagtcgctgaaagtttttgctaccaaatatttggtaattgatgctattttcttagctactagctttttggtagcaaatcatctttattctattagcaatattattagcttttaatatccaataaaattattttgctaccaaaaattagtagcaaaactaataaattataatgttgaataaaactcttgtgacaacagttgcatctttttccatagctacactcttcagagcttttctcaaagaaggtacagtattttgttcctgtaatatattcgaaaattaattaattaatcatagaacaaacaaagtggaaactcgagaaaaaaattaagaacccctagcaattattttaaatatttactaatcatataaagattatatcctacttaagaaagtaaaatacttcacacacaaataccccatgaaataatttttttttttctgtattgtttacaagttacaactgagtttatgaattatgcatctcatttggagactactcattcaggcaacaacccagaatattagaaagagacaacaaactctaactaattcctgatgatctatacaataattgtaaattcacaacaatgtaaatctaaaaggctatagaaaaaatctaagaaagcagagaaagcagacacataataattattgtagaatcaataaaagcttaagactttctaataatctaaataagcaatcttgcatacctttaccaagtcaacatcattagccatggaagctgtatgcagtgcagttcgcctatgcttggtatattttattttttttgaaactatagtgtttctaaatacatgaaaaagaaacaattgacgagtgttaatttccatcgacacaatgaagagagacgaaccaaaaagctaattcctcaaccacaaagttgcgtccaccatctggtgatgaagatgatactgaaatcccttcagtctgaactcaacatcttcaagctttgatctgcaactatggagtaatacctccaagctcaaagatcacctgccatggaacataaagaagaaacaagaagaaagaaacgtaatccctaatctccgatcaaaaagttcgtcaacaaaatacccagaaatcgtatttatacccagctaaaccaagaaacccgaaatagacagctgttaccatctgaacaatcaaaacctaaaatatctttgctgacgtgg

SEQ ID NO: 313911 - DNA, 1592 bp, Cannabis indica
tcgaaggtacacttcttaggatttaacttcatcccatacttcctaattactacgaaggcttcctcaagatctggccatgtccctcaaaggtcttggatttaactaacatgtcgcctacatacacctttatgtttctccctagctaatttttaagcattcagttgatcatccactgatacgtagctctagcatttttatgcccaaatggcgtcaccttgtagtaataaatgctttaatcaattttgaagctaggatgctcctcatccgcgatgtgcattttaatttgatctatccatgttggaacttgtacccagacgtggcatctaccatctgatctatccacagaaaaggaaaacaatccttcggccaggacttgttcaggtccgtaagtcaatgcaaattttccatgagccattgggtttcgggaccagaactgggtttgcgagccatatcaaatataagacttcccaaaggaaattgttgggagtcaacttgtccacttctatctttccagcttcaactcttaccagatctaaaggtctcttcttctagccgacatgtgttgcatcttcttaaatatttaaagcatggaagacggtgttttgatcaatcccaatcatgtcagaatggctcaatgccagcacatcatagtttcctttaactgtgtcaatgatattctcccttagggacagaggtaggttccttcccactctaatagtcttcatgggatctttgtaacatatgcttatctcctgtacctcgtccattggttctagattcctcttagtcccatccttgagatccaattcatcttaaaaatctacccagtcggcatcaatgtctattagatcttttgctctagaaattgtaagtgtctcttcctgaaccatgaacattatttgtgttgagacgttgtaataatttattacactcttctgattacctttaatcgtgccaatacatctattgtcgcatgggaacttcatgcatagatgcctaatcgaagtcactgccctgaaatcaactaggattggctgccctagtattgcgttgtatgtagtcgagcaatccaccacaatgaaggttgagttcttgaaagcactttcattgttccctcccttgagggtgataggtaactggacctttcccatcatcattagggtatccccattgaagccttgcaactaaatggggcaaggggttaagtctactttagtaagcccgattacgtggaatgtaaaattttaaaaggatgttaactgagctcccattgaaaataatcctggaaactcgtttgttggaaatttatgcaccaatcactaaaggatcattatgggggaagcgcatatttttggtatcatcctcggtaaaggtgatgggcaaattcatcattctagagcgctaagcagaagattgcacaagcgcgcacacttcccgttcttcaaccttcctcaaatatctcttttgtgcattttgagtacttctggtgagatggggtccacctgagattgttgctacgtgttcatccactgaaggtggagcaagtctgggaggtattggggttcctagtcctggtgcaagtaatgccaccc

SEQ ID NO: 313912 - DNA, 1110 bp, Cannabis indica
atagaatagattgaagagaagctttgaacaagcgtggatcttcgtgagaagatttttttaagcctaacttcaggagaaagtaagcacacatcaatagctaaagggagttcactacttggtgttgttcaaaatcagataagcaaggtgaattataacgggttgtaaaaaattattagagtgagcctaaatttgtttaaattaattgcttttgtaatatttgatactttagtaatcaatttcattctctgggcatgaccccgtataataaaacagtgtgaaagaacactgatgccacatataattctcttgtgtcaagtttttatattctgtaatgttaattatgttctgctactacaaatctgtgttctccagcaacaagtttctatgttgttattacagatcgtaacatctgtgtttttaattactggaatttaattaatattttggcatttacaaaaatatgatttttcatttggtatcagagttggacactaaactcttagtgtgatcctttaatgttttcttgtataatatgtgcaatacatcgttttttgctgaaggaagttccatttctcatccaccacttccttattggaaggttagaataagggtatttatcaagtcacgagatgaaaaagtttggagaatcattctttcaggatggtctcatcatgttgtggtagattccaaaagcaattcaaagttaaaaccttaacttgaatggcctattgaagatgataagttatcagcttgtaatagtaaagctttacatgctataattaatggagtaggtgaatgttttattatgcttatatcttcttgtaaatctactaaagattcttggcaaatctttcaaactcaatatgaaagaacttttgatgttaagcgctctaggtttattatgcgttagaacaaatttgatgatcttagaatgtaaagagcgcctagtcttaattttgaaattagcagataattagggtttaattatgaaaatcatttattagtattgaattaattatttatgataatttatttgaattcagaatgcatttttatgtcacatatagaaatttcataattttccatattttgtgtctgacaacattggaa

SEQ ID NO: 313913 - DNA, 1549 bp, Cannabis indica
agtgaaaattcataaataagacatagtctaattataaaattataattgattaattaaaacaaattaagtgagtcttacaagcagtattgtctcaactagtatggggaccatgggcctatataactgagcttccaataagtagatctagaattaatagaaattttatattagaccataaacataaaaactacatgtaaacataaatgacttctaatcatctattgtaaacataaaatcccaacaaactcccacttacactaacataaaacaagtagtgcatttcaatcaatccattatcttgatatccagatcaaatatagtgtatacgactaaacccaaattccgataactgtatggttgtggtaagcaactagttttccaccattacttccttcgtgttcataaaatattatgcaacatcatttttctatatgcattactcctctagggataatgaattctttaatgtgtattaagttcttccgaatgtttagaagacacatctctgattatatccaaaatggaatagagataaaaatagttaaaaactttcttcagtttgaataactttctagtgtttttgaaacaactaagttatttagcttcactagtggaactaaattattatagatgggttcttacatccttttagaataattcctccaccccaagagtaaccaccatctataatattccgagttggtgaagatataagaattctaatatacaaccctatcatctaacatataggtcactttcacaggttctttcttgattgtctcccaatattccttgttcaattacatcttagatggctcccactcaaaagtaggagtgtggttcatatataagtgtgcatttaacccttactattgatgcttaatgaccttttgttttgacatttatcttagtctaaaataataagttccttctagactaaatcatcaacatagcattctagtattaacattaatgtaaaatacttgcttaagttccttctacagattttgcctaagtcattcgaatagactttacgaaatttcctatcttatccttattcttttgataagttattactatccatatgaatggttagattaactttcttagttttgttccaaaattcctatcacgatcttaacatagcaagctatcattagtgtctttcaaatattaataggctggaattttaaaattctcccactaagataaagtactgtgatactatgtctaagaactttattggtatcaatttctattattacagtaactgtttattggaacactaataggatcaacaattagttatactagttgctagtttgtttattatattatatccatgtctaatcaaaatatgtgtgccataaagaaactgtgggtattgagtataatctagagttgaatgttaaaagtgtttgaactacatatattaataacttttccacccctaagtgttatagagattttgtggagttataaatataatctagacttcaatagataaaaaagatcattgaactgcatatattacttctcaacttcttcc

SEQ ID NO: 313914 - DNA, 1612 bp, Cannabis indica
ttttgttgagcttcactgatagatttgtactcaaagtgtggtagcctagataattcttttccaaatattttgaaggagttgtgaataagatgtttttatttggagtgccatgattgcagcttatgcaatccatgggtgtggagaagaagctataaatatatttgatcaaatggttaagaattcaggtgttagacctaacagcgtcacatttctctctgttttatcagcttgtagccattcaggtctagttggaaaggggttagaaatatttaatacaatgctgcaaataccaactgaaaccaaattctgagcattatggaatgatagttgatcttctgggtcgcattggagagttggaaaaggccatggacattatcaacaaaatgccatttcaagcagggccacatgtttggggagctttgcttggtgcttgtcgtattcatcacaatgtcaaattgggagaggttgcagccaggaatctttttatgttagatcctaaccacgcagggtattatatattgctgtcaaatatctatgccgtggacgagaaatgggaaagtgtggcagaacttagaactctaattaaggagaagaagctgaagaagacatttggtgagagtacagttgaagcaggaaagaacatctatagctttgttgctggtgatagatttcaccccgactctgatcagatttacgaattattgagtatgttggagttgaagatgaggcaagaagcttatcttcctgatattgaacttctgcatcatgatggcgaggtattatagttatacaaatgaaaatgaaaatataaagtactctcctaagccaagtataatttaggaaaatgctactcttccctccaatgtctctgtgggaataggataaaccacactgaaaataaggctttgacctgataaggagagattgactctatgatctttaagaaaacggaggtataaagattaagtacaaaatggaatcttaactcttctttttgtaattactttcattatgctccaagataaaactgaaaagaaaagccttcaattatcagtgtaagtgagccaacattgtacaaaattttggcaagttttgtttgatatcgattttgttgagataaggttccttcaaatttagactctaggcacattcttctctaaaatggtgctgtcaatcctatcaatgtctatagagtagtggtgttaaccaagacacaaataactttgtcttgactctattagtgtagatagatatactaaattaaatgtagtgatattaatgagctgtaaatataacagctatagatttcagaaggtaaagttattagcaaagtaattgctggagggtctgggaagacgaaagcacgaagatccccgcaaaacatttatatttgttttttcaagaaagtttgtcatatagaaactttgctactgtttcttatataagtcaaaccaatgagacagaaaagtattaaagcaaaccactaaaccagcgcacccattagtgcggttacatgttttcattggcatagtaatcgcaattcattttggctcctgtaaattttgtcaatgaatgtgaagcaaaaatcatgtgacagaatgatttagttcat

SEQ ID NO: 313915 - DNA, 619 bp, Cannabis indica
accataattaatatatatatatatatatataaataattaaataatgcaaaaatgttagctagagcgcacatcatgatgagaaaactaatatttgatattatatatgattctgttatgattataattagttagcactgtacgtatttaattagttatatatatatagttgattgtctgtataagggccattaaatcatgatttacaaactatagtcattattttcttgattaattgttatggttaatttgcatgctatatctatatagttaaaatctatgacttttatatattaatagattcatttttgttttttgaacaaaatagattcattttttaaaataataatatatattctttttgctttccttttgcaccattttatactgacattaagaaaggccatgaacaaatttaaacatagatatacaaattaatatgggatgtcaattaattaatacactagaataatgtaaagctatagctatcataattaataattaatagaagccactatatatatagctactttatatatatatttatgtgacagtcagtagtcccgtgatccgtaagggaaaataccgggtaagctgtacaatctcacactgcctgaggaag

SEQ ID NO: 313916 - DNA, 622 bp, Cannabis indica
agtttcaagtagtttgttatttggttatttacatattatttttaaaatatgtgttgaatttactgcacaataaacatgctattaacaataacgacagtcaacaacaaaacatgttcctatcatccaaaatcaaacatttaatttcatagcattaattttacaataagtaaacatacctcatttattttttaatattgaattttcaagagctatatatgaattattgttgactttataaacccttttgatctacatacataaagaaaacacaagaaaacttgggtgtaataatgaactcttctattctctcaacaccatagtgacaccatctataataccttaattacaaaaaaagagtagtacaacctttttataagaaattaattgaccaatttggcctacatgcccaatgtgagaattaattatcttggcccaataggctgaccaaagatgtttaagagcatgtccatgagcctcaagcgtgttagtacgttatttccatcttattatgacccggtagtaataccatgtatcagggccggccctgacttttagtgggccataaaaaaaaattatttgggcccttatttgaaaaaaatatggtatttttcaaaattagtaa

SEQ ID NO: 313917 - DNA, 1764 bp, Cannabis indica
cctcccagctagcctactgaccactaaaactaatttctaataaataacatgggtggtatttaatttcaaactatcaatgtacttaaaagaaagttgatcacatacacatagattagatagataaggaaatgtgggttaccgtgtggttggacttgtaccaatctccaataagaagagtgtaatcaccagctgggtctggaaaaggaacaggaattctgggcctgctaaggattctaatacctccaaatccaccagcagctttgtggaatgcaagagaagggaaatagtaaaaactcccaatctgatctttcacttggagaatgtaggtgaaatttttgcctggtggtattgggcatgtcgttccccatacaccatcttcaaaagaattcctcctgttttgaattccattcctataaccacagcacaaaacgacatcacttctctactacccaaaatttatgcccatcatctgaaatagttcatttactgattatgcgttgaaatttcagctataagatttaagacagctaataataattgaattgatggctaccaaatttgcatgtgcaaagtaaaccccaccgtgcaagtgcctcatctcatttttggaggttaccgcatattaattcaatttggaattagttttcaaataaataaataataatcaatttgaaagttcttccccaaaattaataattggaaataataaaagcgaaaaaccgctatatttttctacttttgatcctgtggctagtcttgtcaggattaagagtatttattagaccgcattcaatatttttaggtatattcaaatttcatctaattatatattagatgttaaattttattatgctatccgattcaattaatttcagtcattcgattggatgttcgatcagatcggttatatgtattagatgtattctatgtatatctattgcattgattcagtttttttttttttaatattttagacctattattttttagatcgaatggtatttatccaaatttttttaaattcaatatttattcgatccaatctaaaaaaaagtaaaattttaatttaaatttttatacgtgcatatgtatatattttaagtattaaaaaaataaaatttaataaaccgaccaaactaaatgaaaatataataaggtagattgaataaatatgggatgtatttgatttttggacacttcatctaacattcgatacgattcaattggatattaaaaaataacattcaatccgatcgctatcacaattagatatccaatgtttgccaatcagttttaattagactgaattgatttatatacacccttagctggaatataaaagcacatttaatgagctaaaataactcaattttttttttcatcaatagtgcttagctaaatatagctaacaaatttgttagttttagtgcttagctataattttttattatttttataatatatatatatatattttttatttataagtgtaaaaatataaatattatgtaatatatgatattttattaatttgtgtattataaatatattatttaaatgatataaaaaaatacgaagaaggtgatcagagccggcttgagttaaggcgggctaaacacaagcctaggacctacccagtttaggaactcaaaaataaaattaaaaaatatacatatattcttttagtaaattttaaaaatactacattttcttatgaaaatcacccaataattttaggaataattacataaagtaccattctct

SEQ ID NO: 313918 - DNA, 1425 bp, Cannabis indica
cactgtttcaagcattatgcataaagtgctaaatgctttcctatttatcctaagttgatcaaaacaaatgacatcaatctcataagctatttgatgcaaaatttgcctattgacaaaaaatatcaagcatgtataattgtcttctcaaagagcttgattcaatactacgttcaataattttttttcataatttgtaaaaccattgcactacatgtaacacacattcatccaatacatataaagagtcatgatcttcttctttctcaaaatttttctttcacttaaagttaaacgaactattatcctacaataacaataattaagtaaaaattggagaacatcatttcttaaaatccaactatagacaaaaataagcattttgcttgaaaatgactccaaactattacataaaacattaaatacgagaatttatattttcttgaagcaatagtgcaatactaggactttcttaataaaatacttcatcattgaattctcaccctctttccaataaattcctttcttattttactactataatagcttttctaaattcagtagtaacacaattttgctttaatgagttggaaaggggttgatcttgcagtacacaagattttgccaagagaattcattgtaccattttttttcttctaaaagatcattgtaccattctgctagactaattaatcattattattattacttgcataacattcaagactcattatatgtttgaattggcataggaaatattgtggtacttctaagtctaaatcagcaaattcataaatattttcaaactgggattcttacactttctttttagacacataatttccattagttcatgatatctagacctcataaatttttcctgtaattatttccatgaccaagatgatgacttggtaactcttggtcttcatagttggtgaccctactctctcacaaaataacttcttttggtcagatagtgacattttttttttctttcttttgttagcttctcttattatgataggtgagcccaatcctttgtgcattattgtgaagtttgttttcttctaggggtttaggatagtcatccattctgatttgctacaccaaaagtaaattaattaaagtagtttttattttataaatgtattttttagattttagcttaaaacctaaaaatatataattactatgtaaaatcttttttgtgtatttatatttgttggtattggttgtactaacagattcagaaaaatacatgtacattggctttagtgttgagttaataatacagtgtaattattatactattatcataagtttaatcatatcttagggttggttttcctttctaaccccatatagccaaatatgctagatcaccaagtgaaaaaaattaagtattacttgcaaagaaaaagaaaa

SEQ ID NO: 313919 - DNA, 482 bp, Cannabis indica
attttagagatattcatatttagcatgttaatcaacatacttgttagtaaatctagaacctggtaaaatattctcaacatctatatgtaaagaaacgatcttcactagtcacaggggaggtctacctactcgtcgcacatattttaatatatacgcaacttatattaaatcctctcggtcctgcttgtctttgactatgcgaggcatagtaagcgactagaccttatcaaggtcgcatcatctcacaagtttagatcaagcgaggctctatttgagtcattaattaacacgttttttttcctcggggatcagatccatatgtcaactttgtaagagtgtgatttcatatttctaggtgaaatattcgcactataacaattaccatctcctgaaaaataaaaactcgaagtagatgtagttccattactatcgcgagatggggagtgaactactataaattttgtgtctctctaaattatata

SEQ ID NO: 313920 - DNA, 990 bp, Cannabis indica
atatttattttcaagcattatggtatttttgacaagtgttgctcaaattttgttgtatttgtgatagtttaattatttagtgatagtccaaactgcaaaaatcgcataaaccgcaccacaccgcactacttttttcagtgcggtttttgcagttttttagtttcgcggtgcgggtgcggtttgggaaattgaaaaaaccgcacgtgcgggttggtttgaaaaaatagtcaaaaatcgcaccacccgcaccgcgaacacccctagtaatttctcctacacaaggcttttatactgtaatacattgtaatcctacaacattcgccctaggagaccaataatatagactcgtggattaaggatcattaacgcctaaaccatgtaaaaatatgttgttcttatcattattgttcgctattttctttaatctctctaaatacttggttttcgaaaaattcagtaaaaaacaaataaaaaaaattaaaaagagccactaaaaatcctaaaataaaagagttgcttatgatcgagttgtctaagatagtgagcaactaaatagctagtatcttgaagggggatgttagtgttatattttaatataatattttgattgattaaataaatgttacaagtgtgtcactgtcacgacccgagccctaggccgtggcaatgtgtaatatccataacttgggtggtcaaaggtcacactttgacccttgtaggaagataaagcttataaatgatcctttaatttatatcacaaaatactaatttaaaagtaatggattaactcctatattaataagaaaatattagtaacaaaattaggaccactcatcaatataaaagaacaataatatccccacagttatgtagtcaccgaatagatagatttaataagtcaataaaatacaaaaataatacctagcatccatcattcctcatttctaactagtacatcgctaatttaagtcatccagaccatccatttca

SEQ ID NO: 313921 - DNA, 955 bp, Cannabis indica
taattctacaatcaaatgcaaaatccccaattcttcgatgcatgtaaactgaaacacatgaaatgtcaaaaccccaacacaatttattcaaaaaaaaaaaagaaaatacaagagaaaaaaaaaagtttacaaataaaacagtactcgcagattcagataatacaacaagagccaaaaagaggtcaatcggcagtagcaaaggaaaccctaaatttgcatctgtcaaaaaaaaaggaagatccatacctcaaagtgttcacgctcagtgggaagcggaggaagtagatgtttgatggtgagtgtgggaggaagaagaaggtgcataaagcttgtcgtagacctgctcaccgataaggtagacaccgaaggcgacgagagcgatgccgaggccgggagtagcgtggcggaattgattagtaagcatcgggtgctttctccactcgtccctcctcctgaagaactctcccgtcgctcccagtggcttcttgtagttcgccattccttatttctccctcttcttctctcttctttcttcttcgattagcttctcttgttggttgtttcccttccctaatgtccttatatttcaatcgattgttatcttttttttttaaataattagcatttttgttctccattatttaattttgccccctaaggcttgctaaaaattaccataacggttaaataattatactcattgtgttaggttagacatggatctaatccaacctttttttcctcatggaatctaattcaattaatattggatttgaaaaatcatcatcacatccaatccaattagaccacaaaattcaagagaaaattacactctatatcttttttatattgtcctcttttatttttatcctcttttttaaagtctattatatttacctctttttttaaatattgtaccaattttacccatatcacttcaagatactctctatgt

SEQ ID NO: 313922 - DNA, 1109 bp, Cannabis indica
tcttttcaaatattgtgtttttatttttttaatatagcatactatatggtacctaacatcatctaatatcataccatgtcttacaattatttaacgatttcttatactaattattaaattaaattatgtgaaaatccgattttaattaacaccaataatgacatgtggctcttagcatttttcttttcaaaaataaaataataattgaatgtaactatttttttttaataaaaaacatggtttccttaactatccaccatttggcactaattttcactaaatagagaatttaataataataataaaaaaagctgaaattacaattcagagttttttttttctctgcaaacaattcacagttcttattacaacttgtctgactactgttagaggctcaattcacagttctactcatgttatgtataataatttatgggttaacaaacctataatgagacaagaattttaaccaatcatttttgctgttctttggtacagtcagaactcaaaatgaactattctttttacaggttacagaagctctgagaaaagaaggcctagaatcatcaaatctcattcttggaattgattttaccaaaagcaatgaatggacaggttggttactcaaataaatgacacttattctctcatggtattctatcgatcaataaaaaccctatacaaacaacataaacaatttaaagacaaggtaaaacaatcaccaatccaaaccacttggtttggtcatttggtcaagtttggtttccttgatttgataagggaatatgggcaagaaaatcacatgtagagggatgtgatactcaactgtacaaagttattcactttacccattaaatatttgtggtatccactatattcccacttaaaaaatacaccaaacaaagaaatcactttaaatgcccctacatcctaacacttatccccataacaaaaacaccccctttagtctttcagcttttcaaaataaagataccctacaaagtacaaagacaaagaaaaattcaaaggaaaataagatgaattctacaatctatcctgaatattaggtggtgtttggttggaacgaataaaaatataaaaatatgaat

SEQ ID NO: 313923 - DNA, 865 bp, Cannabis indica
aattttattaatgacaatcaacttaaataataattaattattcacttggaattttttctcgttagagatacgatcatgattagaattagaaaaacgagctaaataaacagccgcctaattctcagatcgtttgagatataaaaaattaaaataaaatccgatgaaaaagatcgcagcatcacaatgaaccttaagaatacatatattttgtttcatccactgtttagaagacacaaaagtagaaactattgtagcagtttcattcaatctcgtagcttaagcatttaactattgtgtaaggtgtactactaacaactttttcaatcgcaaaaaatttgttattcccaactactaacaatgatttcataacaagtcatcgaagaataaagaataaccaataacgaaacaaaataaaacaagagtagaacacttaaagttatgtcacaaaaacaagataaaaatgctcaaaactatatcacaaagacaagactaaaatactcaaaatcatgttccagagataagactaatcgcagtagcaaaaatcgaatgacaataacaaaatagaaccccaactaagccaacccaaggaaggtcagtggacttggccagagaaaaaagataacctctaatatagatttaggaacaaaaaatcctaacttcttcccccctaatgttttgtttctttcttaaaaatatatggtgatatagttttattgtgtcatatttataagcaagacacaaagaaaaatatattcttttttgaaatatgtaggaaatttaaataatccacttaaaatgatttttttttttatatttttacattatttatttatttttacatttttttttacaatattttaccgag

SEQ ID NO: 313924 - DNA, 699 bp, Cannabis indica
ttaagaatatgagtttataaatataaataagtttgattttttttttcaaaaaaaatcttagtttgtttaattatttattagatttttaataattttagtttgattttgtaagatatgtgtttatcaatataaataattttgatttgattttaggaataacttagattttttttttggtgaatgatatgagtatatgttccaaccacaacttgttatatacaaactaacaacactcttgggcctgaaaagatctatctatatacacaatccaataatccattctttatctataacataaatgttttttgatagttgaaaatgaattccactccttatctcaaacttaatttgcttaacaaattacatgaagaaattgcacgctttggtactaaaatacttgattcctacttctccaatgtgataagtcagtaagtcacagcggctactaattatattttttattttcttcgcgtgtccttctaatatatgatgataatttttgtttgtttatataaatatatatgtatataattgatattaaggttataaagaataaaaaagtggccatatttttcacatttttttggtaactaccggccggagaggtattgatgggccagtggcctttcaagttgatttacctaacgatagagaattattagggtaacttacaaaaatattagaatttggattaatttt

SEQ ID NO: 313925 - DNA, 637 bp, Cannabis indica
agtttttttttttgttttgtttttttttttttttttgtgcagcataaaatggaatgggctcttgactacttgtgctattatttatttgaggaaattatagtactacatatattttttttttgggatttttttaattttacacttcaaaacagtttttttttacatttttacggaattgtacataaaaacctctattgcaactagcgctgcaacttaaattgcaacaaaaaatcgtacagaaacctttattgcaactagtgttgcaattactttagaaactcaaactgtaaatttgaaaaaaaataatatattaggtaattctcttatttatttttaaattgattattttacaagataaggtaaaaattagagttaaatcctatctctccacattttatttatccccagtccccaccatctcccttaaaactagaaacatcatttaaaatgagattttttttttatttagttttactcgtattaattttaattgatatggcaagagagacatgaaaatggagactatgggctcgtttagaacgtcgtattaggttgtattgtattgtattgtattatattgaattggattatacatcatatttttatataatactatattaaactttaatttatacta

SEQ ID NO: 313926 - DNA, 1440 bp, Cannabis indica
ccaaagggctgggaaaaaatgcagaaaaataaatctttattttgcttaaaatcccttttatgaaccttactccaaaatggcaaaattactcaattgcccttaaggccataaaacacccacataagcacttcaagggtaaaatagccacttgcacacgcaaataaactcaaataattttcagattattctcacataaataaaataccaataattaaacccaacattgtatttcggccccgaacccggttcggtccgaaatacccggttgtgactataccgcgcaaacttgtaagaacacacctgcaaaaaggaaaacacaagcattatgagaaatgtgacccttatggtatacagagaagttatggtgtggggaagtctaatctagtagagttaaggaacaatgtgaaggcgctttttggtaatcaaacgaaatttgatgagtctttgagtttgttgactaatgagatgaagtgtaagtttaagaaatgtgagttgaatatgaagtcatatattgatgcaaaaattgatggaagtttgaagttttatttggacatgaagttcaacgagttgagaaattgttttataactggaaatgatggtagaaatgttaaggtcagtgatgaggatacttataatatggtaaggtttacaaattttttttattgatagtgtctattatttttttttttgtttgctatttttggtcattgagtatgtcattagttataatgttgagtttttactgattgtcttttaatttaatgcagaatgatgatgaccttgtattgacaaatgaaaaggagctagttgtagaggtaatattagttaaagaagaaactaataggtttactgttttttaattatttgtgagttgtttttgtgtaaatttttgtatgattattttgttaaatctgttttatttttcatgttcttttataatttattgtttgtaatggaaacttttatgttcttttatgattttttgtttattttagtggtatcctgtttaagattatttttgtggttttatgttctagattaattattggtttttatgtaaactttttttattatttttgataatattttaatctaatgttgtttgttttttgtgatatcctgttttagattattcttgtggtttcatgctctagattaattatttgtttgtgtgtaaacttttttgattatttttgataatattcgtaatctaatgttaaactttttttaggttgaaaaagttgaagatgaaatgtttgtagagaataaggtaatttttttaaatttgaatgttgatgtaaattataatgtaaattattagattatttttgttatatattgtagtgtaatgtgaaattatttacaggttgaaaatgttttagatgagacgattgtagagaataaggtaactttttttatgtttttattgtagtttagttt

SEQ ID NO: 313927 - DNA, 1150 bp, Cannabis indica
atctcttttaatgaaataattggtttcttttaatgttaataaaataattggtattttgcatgaataaacagagtgaagacttggacgttatcaatggttatgtggactctgattatgcagggtgtattgatacatgaaattcattaattggctatgtgtttaacatgtttggaacgagtatctactgtcaacaacaaaagttatcaaggaggcattttggttaactaggtttatggaagagttaaaactcaaccagaaggttatcattgtgcatcgtaataatcaaagtgcaattcaattaaccctaaattgtgtgcactatgaacgtactaagtacatagatataaggcttcattttataagagaagttgtggagaaatagctgtgaagattctaaagtaacgactgaagataatccttcagatatgattaccaaggtagtaccaagtaataagttcgagcatagcctgaagctgattggagtcaactgagcccgaaaagagctagggaacaacagtatttagagcaacaatttttcaagtaacttcaacttgaagccaaggtagagagttgttagttagttacaagttttgtcatccgggaagctagttattactccaaaaagaagttatgggatgcttggtgtccatcagaaagatttgttcgtaaagttgtggccagtttggattattcttcgaaatatcctgtcttccgtaaggaaagtcttctggataacttgtcatcagtctggggatgtacttccagatagcttgttttcagtcttgaacgcccatccagaatgcgagtattctcttctggattgtctgtacaaaaagtgtgtttctgaagttgacgtgtgttgactcaaaattttagactagacttctaagccacattcgctcgctagattggcgagaataaaatagttgttaagtaattataagagagacacaaccaatttatagtagttcactccctgtatcgcgacagtactgaagcacgtctacttcgagtttttattttttcacgagatggtattacaatctaagactaagtgttaaaagctccaatttctagagatagaaattagagggagaagctctaaccttgtgggtagttttctaaactaaaaaatgagcttagggagctc

SEQ ID NO: 313928 - DNA, 1154 bp, Cannabis indica
ataatgactaacaataatagctaaattttatcgataacttatcgatgatctgtcgataattaatcgagaacaaacatcatttttatttttctcaaccaacatcaatccgaatcaaaaaacaccataaccaccattcaaattcgatcaaacactcaaaaaaatccatcaaaaataactttatttcaacacaaacaatgaacaatcactctcaatcaacgagaggctttaagcagattgactcttcaattaatgagaggcgtggaggacggcgactgctcctataggcaaatgagaaggagctagagaaaaataggggaggtggctgctgatggggggaggggctgtagagagagataagtttatttaggttttttcaattttttttttaaaaaagtgtgaaaggttttttaggtaaaattgagaattattaagatagatttgtataaaacaattaagagggtattttttgtaataggattttttttaaagaataataaatgaaattttcctaagtaaattaatcaattagattaaaggaaaaaaaaagaaaaaaagatagatagcacattatcttaataggagcacctatgtttatatttttttttgttgaaaagtcaatattttggtccatgaaatggcccaatactgacaagcatcaaagaaagctattgtattgaagttggtctaataagattagggttttgggtatgcatggtggtgggaagggaattcaaagagaaagaagccaaagaatgaaagagagtgaatgtttttgtaacattgttggtataagcaaattttttttgataaaagagaaattggaaaatttgcggtaaaagtctccaaaagtatcgctttgaacagattagtctccaacctctagaaatagcggtaatagttcccaagcccacgttttttgtaagtccatcaatacccaatttaacagctctgttaagtgttgataaaaataccatgtgtcaaaagtttattggtttacatcataattttaatgaaaatttatttaaaaaataaaataacataataaatattattaaaataaataaataaataaaactttaatattctttttatttctttattttttttttttttttggtctgagattctttttatttattttgtttatatctctc

SEQ ID NO: 313929 - DNA, 784 bp, Cannabis indica
ggatcatttgaagcttgcaaactcaaggagaagggaaagaaaaattgatagaatctgcacaagaatctttaggttttctcgagaaagaaatcgaagggaagaagtattttggaggagaaagcattgggtatttggatttagcagtgggttggattcctatatggcttgatgtaatggaagaaattggggagatgaagttaatccaaccagacaaatttccatgtctttatcaatggtctaagaattttcttacagataatccggttgtggaagaattagctccctcgagagaatctcttctcgagtattttcatgctagtattgcctatcttcgctctttggaagccaataagtagtgaaatgaatctacttattggataattatagaataaagttgccaagtaactttgtttttttttttgggttttcttaaagtttgttatacaaatgtgttttatttaatcagttagtttatttcaattatattttcttgtaaactattagaaattttaaaatttctaaatggttataaataattattatgtatgcaataataaacaaaaatattaaaaagactctcatagatacggaaacgaacaagaatgtaccataacaattaaattagccttataaagagtaattgttttttatttattaaagcgtttatatattacaatagcctaattttattaatatattctaaaaaaaaataggtaaaaatacaattcgcttgactttcttatttggcctctcctcgaatttttgtctggttccgccactgcaa

SEQ ID NO: 313930 - DNA, 811 bp, Cannabis indica
aaaattattttgtacactaacgtgccaaaaaaaaggctttacatatatagatgatatgattctaaatttgacatgatccaataatgattcaacacctatatatattgtgttagattaatatgagactatatgtgtatataaataattctatgaatcgataataaggaatatatattgaacgtatacaaataaaaatgatcgaatattgtaacctctatccattgattaatgtcagcccccactaatgtagatgtttagatctgtaaaactaagaagaaaaaaaattacggtatagatttttcaagttctcactaattcttttttatggtgatttgataaaaattaaatcaacagtgagcttaaggattaataccttatatttttttttttttgaaagaaaccatatattgcaacaagaagataagaagagagtacaggttacaatatatcaagatttggaatactacccttccaaatgacctagctctcaagtcttaaagctgtcctatctaacttatgaggaacacctttaaaactcctagatagatatactggacagaaacattaggaaaattagagagagaggatacaatatgattaactaagtctgagagtgaagacttatccttccacctgtgtttaattttacttattaaaatcttacaatcactctcaacaatacacagaggaaatcaaacaattaaacaccagttaagggctgtagccagcgcctttgcctcagccataataggtgataaattgccattcaaaggagaagagattgctgccacaacctccccacttgaattcc

SEQ ID NO: 313931 - DNA, 2080 bp, Cannabis indica
caagctactactttccatatcaacaattaagcgatgacctattttccaacttaatgtgaacaattccttcctcaatggtgatctccatgaggaagtcttcatgacacttccttcctctactactatagatagacaacttgtatgcaagctgcacaatcgatttatgatctcaaacaatcttcaagaaaatggtaccgtaaactctcggatgcacttcttcaagaaggatttcaccaatcccaagctaactacactctattgacaaagggttcaaatgacactttcatagctcttctagtgtacgtcgacgacataatcattactttattaaacatatctctgctccatgaactacaagactcactcaattcaaagttcaaacacaaatcccttggtcctctcaaatacttcttaggctttaaaatagcgcgatcaatagaagggttgttcttatctcaacaaaaatacacgattcaactcctagaagatacaagaaatacaagcagtaagcttgccaagaccctaatagatccttgtatccaactggatgatgaacaaggagaacctctcgatgatccttcaccacatcgtcaactcattggtcaactcctttaccttactttatcaaaatctgacatcacatacgtcgttcaaaacctcagctagttcatgttgaaacctcgtacaccacatttgcaggcagttcaccatttgattcgttacttaaaaggaagtcctggtcaaggcctcctttactctacatcatcttcattgcatctttgtggattctcatacttcgattgggcctcttgcccaactactaggcattccaccataggtttttgtgtgttctttggtgactgtctcgtctcgcggcggaaagcaacgaaaaatctcaaagaattctactgaggctgagtatcacgcgctggctacctcaagtagtgagcttacattattacaatatttgctcactgattttcaaataccgtaagatgctccagcctttatctattgtgacaatcaattagctatcaacatagtcaatagtctcaccttccacgaacggattaaacatattgagcaagattgtcatttcatcgaggattcaagaacaacaccattcggctaatccctatcaatatcaccttacaactcactaatgcattcaccaaacctcttccctctaccacccttacttctcacattgccaaaatatctgtatacaacatatacaatccatcttgaggggataacagaatttatatacatttatgcttcagttagttctacatcgttagtggttattctattaggttggttagtttatttattgagctatttgagctcttatttcctttgtaaatatttctatatataggtcatagattcagtattgtaatatcatttaattccaaaaatacaactcaccacagaaggagcaggtcttaagaggaacatgtacgaccattcgacaagggcatctacgactaaatcataattataagatccacccgcatactaaaattcacaagatcgaaaaaataaataataataattgaggaataatgtttcaatgaagcaaaaaagcatagtttccattaaggaacaactcaatcaagctttcaacaaaagttttggtacagcccaattgcaaccatgagagtggttacgagaccacaacgggttaaacttacttaggtaagagcaaaggatgtgtaccaacgtcacaattggtggtgggagtgctgaaaatcagtaaaaatgaaattaattaattgtacaaatgttctattttttgtgtaatcatatatataaaagtcatttaaaaaaaacaagtaaaataaaagagtgttttgtggaaagagcttaagagactattaccactactagtacaagtattgtgaagatgtgctatcagtatcatcacccacttggcctgccctcttccatttaagttgctccactttgttaaagccctcttttatgaactgctttttggaagtagactcgcagaaattcttgatactctgccatcttcttttttatctgagccttcttcttttttatgtgagctatc

SEQ ID NO: 313932 - DNA, 4673 bp, Cannabis indica
ttttatagagttatcattacacaatcataataataaagtaaatgaacacatgatttacagaggtttgccccccttaattaatgggtgatgacatacttcccttttagttgtattgataccgggagataatactacttagatcactatagagatgggatctgaagtagctctctataggttacaatgtaggaatgtgttagaaaatctcaagtatattgagaagaacagtgggcgtgtgagagtgagagagatgagttattagacttagagctagggtttttgacttgcactttatgactttgagcttagggttttagtgtttgattaaggctctttacatagtagagctttaacccttcaaatcccttataaataggtaaaataagttgttacttacatattaaattagtaaaatacaaatgactaaaatgccctttaaaagtaatattttccctctattttcgtgggctattaaggcccaattcgtggtctggtttactgtttacttgtgatactgtgcaccaaaatcctatcagaccaatgtctggacggccatgaacttgctggatgcatgctggttggtcgtatgatgtctagaaggtgtacgacctatgttgggcatagggccggctaggggtggccaaccaacccccttgaggtggctggttcgtcattcatcgtcttgcttgagtcttaagactcctcgttgtctaaaatgctgagtagataatttggccttcttgttggcaagttgtactaccacgtggcactgatgttggccacgtagacatgacatgttagataggccaaaatcgggataatattcgccccccaagtctctatgtagatgtctctatagataggggctttctaccttagccaggagatatgtagccttaactggataaatctttcagcatatattgcctttgaaataactactcctgactgtttgatctcacttgttgcagtaagttaactacattgctctttagttgaacacttgcatgataagtacaaaggtggtcccacaaaagctatataatcttatggagggaaacctctcttcactttctacttttcattctctctctaaaaaaatcaacttttaaatgttcctcctactctatagaggccaaagccccatattgcttcaactcctgggatttttgcgtcatttttacaatccaagcttcccactctcttcaccaaaggtttcttgtagtgggtaagctttctattcctgctatttacttgatttagttgattttgccatggttgcatgaatattttctttctttgaatgttcttttattcccacattagattgtaatctttttagtattttgatttgaatgatagtcttcagatgtataatgtgtgatttcttgatgaaaaagatctaattttgaccttcgttgttattcttggctctttgagtcacgaagaacacgaagaacgtgtttgagttcttgaaaaacacacgttcagatctgacatgcaccctagatgtccatagaggtcttgttcaagacctggctagaattgggtcttcatcatggggtctagtcggccatagggggtaccccaaaagctggccggcccatgcctagggataaaggccctggccgacccttggttgggtcattggacctagctggccttctcttagcttgggaaccctggctggccaaggccaaagttctaagcaggtagccaattttttgtcctcttttgacctcggcgaagggttcgtgatggccttgtaggcatgtacaactataatctgttatgtcgttcccttgggaactctgcataagacttcatagtaagttcattacagtcaagtgcacaatttaggactcaccatttatctaagtagatacacttgagacagtacttcgttgattacaaaccttgtacaatgttatttatctagcaagtacccttaggtacaattggccagaactttttttgtatcttgtagctttgttgggttgctcatcttcccttgtctcttctatgcaggtgattttagtgatggtctggggaggtgacaactgctatgtcgtaggtctagtcagtcttacttttgatagatagcatatagtatgtccccttgctaccttctatgcaatctccggactgatagtaatatactatggccagaactaagtggtcatgtcgtagcacaccaccatatgatcttcatgttactaggatggcaatgatgggcaaagttggtatagtagacgaggttgcataaccccttgatggtagagatccaaaggtaggccaggtacaggtgcctaaagttgaccaggatgatgagagtctgaacattgagtccaaggtggaggaggttgcgcctgttaggaggatgacatacaagacctgtgctatcttctccaactgccctttgggatcatatgataatgagagacagtcattaaacaggcttggtcagccctcagtgataggtgtggatcatgtcttggtacagtcttaagagccccaagttattgatgctgggtcacacagagactggtgggtctctcctccatctgttatccccgtcgatgcttttgatacgatactggcaagtggaatagttaaaggcatccactgtgaggtgccctcgagggatcaaagagcacaacatatgtaatatcccagaaaatattatagtatttaattgggcatattttattaaatatgcaattattctgataatgaagtaagattatgatcctacttaggttaattaatgtgaatttaatgaatgattaaataaagcgtaatttattaattacaaagattttattggattatgtgggtatcgtggatactatctttgaaataaaatatttttgggcccggcgatggtggaatggtcagaaatgtcacaataataaaatatggatcagaatggaggttataccggactaggttagagtgttaggttgtcgatttggcagaatagaattactaaaatgcccctaggtttgatttttaaatttaagggttatgggggaaaaatggtcattttaagggtaggatttctagttttgtttttagttcttttgactgaatgaatattagataatttaagttatatttatatttaagttataagtgtaattttgagttagatttttatgaattcgggtatgtggtgtagatggagtttaaagcttgattttaggtctgaattaggtttgtttaagtgtgattgaatgattttttttggggttgttaagcatgaattaggtaagttgagtttaagaactcaaagttcactcaagtatggtaattttattattttattgtatttctgagttttggatgtttggatatattttttttatggtatgagactgttctagaaggtttcattaggattggaggagatttggttcagttttggagcaaaaaccaaggtttcttctttctgcagtaggggaaaccggtaaaccggtttcacaagcacagtgaaatcggttaaccggttttgtcaggaggggaaaacctagttttaggcttcgaaatcaattttgttcgggttgtttcccagaacttagaatatggtattttaatgatgtttgagttattttgaaccactaaagagttagagtttgtccggttatggagctagggtttgtttggaatatggataagttatttaatggattttgttgtcgttacataggacccaggatcgtcgagctttattccactcaggtcagcccgcatgcctaatttcttaactgaggtaagaaaagtattaagcaccgtttatgataactatatgattgttatagtctcgattatgatcgagatcccaatatgtgtttattgtgtctcgatcttgatcgagattaatgatatttatttgttatgactcgactatgatcgaggtgatgataggggatgattattatcgtttgtgactcgattataatcgaggtaatgatgagaaatgattattgtcatttgtgactcgataatgattgagggaaaggcatggttattactgttattgtgaataaataaagatacggtcactaccgttatgagtaattagtcctgaaactgcggataggtttcttacttatcgttcgctatatcgggcaacgatagtgacatacgtagctcgtggttaacgagtggtaagggtactttatgaagtactgggattgtgtgattacaatcttgtgaaattaattaagcatattattatgtgatgagttgtaatcaaaaacattttgttataatgtgactaaatgaagtttatactacttatgaaattagtcacttttcttgcagagtctctatgactcaaggtgatgtaagaatacgtggttatagggatgtgaggttagagtgctttatgaagtactataattatgtggttatgtactgattaaatatccatttagtataacgatgaagttgttgactataagatgttgtggttttcctatattgcgtaatatgtatgtgattgtataaatgttaaaactatatagatatgcatgatggttatgcgtgagtcacaaatatatatatatatgtatatgttatattgagatgtgaatgtctacgtttacaatgcttttgatttaatatcttttcttgctgagtcattgtgactcacgggtgcttcgtggtgc

SEQ ID NO: 313933 - DNA, 547 bp, Cannabis indica
cttctttttttattttaattttatttttattatatatatatatatatatatatatactcttttttttatatccgctcttttttttttttgacattctagccttatgagcaatatgctttatgtcctactaccctcaagtgaccaagtagtttaataattttttgtcactttgcgtgaatttgaaaggggagtatattatataaagttcttagtttacaagtggtcctgtttgattaaaaatttatgaaattaaatattaaattcttaactattgatagtatttgcggagatgatcaaaattctatgctcttgagattaggttaaataatggttgttttttagctgttttgtggttgatcggctattttcagctgtgcttgctgaaaatgatgaggttcattcgttttggcctgaacacagtataaaagaaaaaaaaaaatagtctagcatggtataaatgtgaaattctccatatcacagtattttgtaatcttttccctattttcaatatactagttagaagttacgtgccgaggcacgtaaatat

SEQ ID NO: 313934 - DNA, 828 bp, Cannabis indica
atatatacatttatatatacactgatttatcttaagatttaaatatatatatacatttacatatgtatatacatttacacatatatgtttatatacacatatttacacataaataacctaaaaatactatacatacacatatttataaacaaaaacataaataaactaaaaaaaacacacacaattttaaacacaaatttacacaaaaaataatctaaaaatactatataaactcaaatgaaaactaaaataaataagctaaaaggattaaaatagagattaccttcaccaggaatatgcaaaggggcagcggcagcggcggcgacggcgggtggccggacgtgagtggggttggtgaaaattttaggggggaaaattttttggggtttaggttgagaaaaaaatgaaaaaacaaaaaacaaatgaaaactatgggtggtgctcggtccaaataccacaaaatgatgaaatttgagaggaaataggggcagccagcggtggttaatcggagaatatgcagagagatggagaaggaggaaggagaagaaaagagaaagaatgggggaaaggggtgcgtctgaagctttattcagcttcgacttttgccggggcaatttaatgcgccagcaaaagtctgagctcagtgaaaattaatgaaacgctgcgtttcatttaagttttcacttttgccggcgcaaacgggtgcgcaagtttcccacctaaatttttctcacttttgcacttgggcgggaagttgactgctaatttttttggcacttttaccggcgcataaaaagtgaaaacctgatgcaacgtgtcctttggtca

SEQ ID NO: 313935 - DNA, 1755 bp, Cannabis indica
cactctgtccccatacttcagctcagaatggccgagccgagagaaaacatcgacatattgtcgagatggggttgacactccttgctcaagctcatatgcccttgaaattctggtgggactctttccaaactgttgtgtatctaataaatagattacccacaccagttttgaaaaatcaatctccttatgagactgtccatggtaagaaaccagattacaagtttcttaaagtctttggagtcgcatgttatccgtgcattcgtccctatcaaacacataaattccaattccattatgtcaagtgcgtgaccctaggatatagtaatactcataaaggctacaaatgccttagttccacaggaagactctatatatccaggaatgttatattaaatgaggaggattttccattcaaaaccggtttcctaaataattacaagcctgaacagtcagtgtgtgtcagtgtgccttcttggtcagccttgttccaatccctaaaccaacctgtgttcaatattcagagaagtacaactcacctgatacaatgtctcaagtccttggagaagacgttacagttcagtcagatcctaatgatcaaaaccaggtaactcgggttagttctcctgctctttcatctagttttttcgattaattaactgcagatgttcatagtccaggtgtttctactagtgatctgagtgatggtgcacactctggacactcacctggtactgtcaatactgggtctgttgattcccctcaagaaatcgtgcctgcagctcattctcacccgatgatcattagagctaaggcagggatttttaagcctaaagtctatataggacactctcagtggaactgtgattatgaagagcctagtgtcgaagaagctcttagacacaaaggttggaacaaggctatgtcaactgagatgattgcactcaagagaaatggaacatggatattagttccaaagtctgaaggaatgaacattattggtaacaagtgggtctctaaagtcaaattgaatgctgatagcacgttccaaaggtacaaagcgagattagtcgcaaaaggcttcaatcaaaggcctggaattgactttggcgagacctacagtcctgttgtgaaggcatcgactgtgagaatcattcttaccatcgctgttgctaaaaactgggatattagacagcttgatgtgaataacgcatttcttaatggcgagttacaagaagacatgtacatggaacaaccccaaggatttgttgatgcctctaaaccgaaccatgtatgcaagcttgttaagtctctttatgggctaaaacaagcaccgagggtgtggtatgataggttgaagagtactctcataaactggaagtttagaaactctagagccgattcttctctatttttctgcaaagttccaggtgtgattatcatggtgctaatttatgttgacgatattatagtgactgggaataatattgtcaaacttaatcaattcatcgacaaacttcatgctatgtttgccttgaaagatctaggagccttgcactacttccttagaatcgaagttcatagagatgaaacagatctctatcttaatcaaggaaagtacgtcaaggaactcctagccagaactgaaatgctgcacctaaagccgtgttcgactccaatgacagtaggcaaaccactgtcaaagtcagatggggagactcttcaaaatcctactgagtatagaagtctcattggtgg

SEQ ID NO: 313936 - DNA, 623 bp, Cannabis indica
aagtgggattaaaagaatgggatgaggagattttggagggtttatttgatcagcatgaaggagagcttattcgtagtattcttttaggcactcaaactaataatgattcttggtactggtctaaggaatcctttcaagtctaatgtttaaagtgcttataagctcttacaagctgtcacaggtaggtggagtttggatgataatgcagggttttggaggagtttgtggaatttcaaattacctccaaaagtgaagaattttttgtggggggctcttaccaactacttacctactctcactttatttagataaaaaatggttaatgtggatgaggtgtgtcctgactgagcataaaatttagaaaactgaaaaatcctttcaagtatatctacattgttggacttgaaaccgtttcaactgaatactgaaaaaatcaacagttaaaattaacattgaatgtagggttttaatattggtagcgaatccaccaaaaaaaacaaaaacatgtattataatcataaataagtttaaaatttaagatatatataatatttatttacttatatgtacattctgcttaatattattaaataaaaaaaaaattacttcacctttcccatata

SEQ ID NO: 313937 - DNA, 1922 bp, Cannabis indica
aaagaaagatgatgcaaaactgcattaggaaagagatcacaccaagaatctgaaccaatatcacaatcaatgtgttcacagacagaacgattacgccaagtgaacttatttcccacaaaaggaagaggagaaagttgaaacttatcaagaaagtaggaaaagttgtccatatccttattatcataatgtgtactaccaattttatcatcatatgataaaaaactattaaagtctcccataattaaccaaggaaaattaggagcattataaaaaaaattatcaagaaggttccaagttaaaggcctttgagatgaaataggagaaccatagaaaccagtaaagtggaacatatcattatcattaagacatatattacaattgatatgattacatgaaaaagttagaatattaacaaaaacattgtccttccaccaaagtaaaagtccccctccaaaatacttcctatggacttcaaagccatggtcaaaacccaggccaactctaactctttctacaaagcccaaagataaacgggttttgatcaaaaaaagaacaccaagacaatgactattcacaagaagggagagacgacagaatgcacgtgtactctccaatccacgtgaattccaacaaagaaaacttatttttctgggcgggtgtgcataacatcacctacatgttccaaattagtagaagcagatgaagaatcctcctccctatcactagcacgcaccctcttcagctgggacctaaaagagccaccaacaacagcttgctgggaaatgaaagatgggcgcttaaccccagaagcagatgccagcccttttccatgaaccatatgatcaagtgggctagaaactggattgactcccatagtaacaatagccccattagagatagtaccagcacccccagaagccaaggtaccaggggcattaggaaccacccagtattactagcactggtagcaaccaccaaagaatcgatggagtaagaggtaaaagtcgaagagcgcataggattgtccaagaagaaactatgaccagtaggaaacatactagtgatattgggatttatgggggtagagatcataacatcagaacttgtgtgataagtcaaaaactgaggccatgaaccaacactagtattcaaaaaagatggggaaattaatgttatttcccaaaaagtccctagtaggttgattgaggttaacaggggcataatcaaccagggtcatagcaggagggtgagggtactgataggggtgaaattcggtcggttacggtcggtttttacctgctgccaaaccgaccaggcggttacggtgtgattgttcacaaaatcgtaaccgaccgttaacatcaaaaaaccgaccgtaaccgaccgcggttataaacggtttgaaacggtttgggctttacaaggcccataaaattggatttaatgttttttttttaccatttttgacagtttgaccacttattatatgttccatttacaatactttgatatctataatcaaatataaaacttataatcattctaaagtccataataaattacataattcgtcaaagtcttaaattaagtccataataaattacataattcatcaaagtccttaattaagtccatactccataataagttccatagttgatcaaaatccataataaagtccatattacaacataaaaattcaaactaaaatagtccaacttccaaataaaaataaagagtccaatgtccaaataaaaataaaaataaagagtccaatgaccaagttcattacaaacaacaatatttaagaaataacatgcatagtctagcttatgcccaatctaacttgcttcagctagagactccaaggtaaatagtagaagcatcctctacaaaattcataaaaaaaaatgtaaatgaac

SEQ ID NO: 313938 - DNA, 1927 bp, Cannabis indica
ttgaaataaagttttatttagggcacaaagcccaacaataggctgctctctagagttgaatacattgtgatttgtagcaggtgcaccagatagtgtaggttgctgtataggatgttgtgtattagggtgtaaatcatgtattggtataggctgctatattgaatgttgtatgggctgttgtattggatgttgtgtatcaggtgggataatttttgctggagtagtgttattattggatgtatgtatggctgtttctgaggttggtaagggcatagatgaaatctcagtggggggcagattggttgattgatttttggtacaattggttgagtggacagggtagttatgggtgcttgtgatgacagattgatagtggcattaagcatgggaggttgtgatgaagcagtaccacaaccaaaaaatgtgttagagggagtaacagtagagggaaaattatatgtagcacaaggaaaagaagttgaaggtgaagaatgtacctgtgaggaacagggacgtgtgaaagcagaaaaacaactttcattgaacacaacattccttgcaatgtagattcttccttgtgaattctcacacaaatagcctttgtgatgagatgagaaacccaggaatatgtactgatatgatctgtactcaagcttgtgattattgtaaggtctcaagtgtggaaaacaagcacaaccaaaaggttttagaatcttgtaatcaggttgacttccaaacaaacattcatagggatttttgaagtcaagaacaattgtaggaagtctattaattgtgaaaacaacactttgaaaagaataccaccaatatgacaaagtaagaccagattgagcaagaagaaccaaaccagtttcagtaatgtgcctatgttttctttcagctcttccattttgttcatgatcatgaggccaaggatgctgaaaatgaattccttgatcatgtaaaaaatctagcaaatggtctgtattcccctccccaatcagactgaacactcttaataggtaaattaaattattttcaaccatgcttttgaactttagaaagacatcaaaggcttgagatttaagtgttaaaggttaaatccaagtgtacctagtatggttatctataaattaagtgaatgtaatattgatacccttctttagaggagatatgaaatggaccccataaatcagtacgaattaactgaagggattgtgaagcatgggtggtggacaaggagtaaggttgtttgtgaatgtggtatggtttttaaaattctgcttaaagtagaaaaggaaagatgccccaatttttgatgccaaatattaatgtcttgattaaagacagttaaagaagctgatggtaaacactgtgaagaatagccacaatgagtttctttattaatatttgtcatattacaagaattcactgaattaacaatggaattattacaacaattttgacaattatgaacagttggaacattggtagactgagacactgttgtgagattacattggagggtatgtgagggttgactggaatcaccaagcacatagaagtcatccttaattggtcctttgagaagaacaactccagtgagtttgtccttgacaaaacaacaattcttgtgaaattcaagatacacattattatcatgtgttactttagacacaattattaatttttttttcatagcaggcacatttaaaaagattttaagtataaattgtgagaattgttggaagataaggaagtggatcttatgtgaattatgcgcaaagtcttaccatcacctagagagagtgtttcagttccagcatagggagtgggggaatcaagagactcagaaccatttataatatgaacattttgttgggttttgtgccataaataaaacccatttcaatataatcaaatttaatta

SEQ ID NO: 313939 - DNA, 1308 bp, Cannabis indica
cacagtaacaaccaagcaagatattgctgctgttatttgccaatattatgctgatatcttcacagcagcccctacggatgaagaagctcttgcagccattctgaatgctattccaactactgtcaccatggatatgaacaatgaccttatcaaacctttcacagcccatgaagttgaagttgccttaaaatcaatggctcctgataagagtcctggcatcgatggaatgtcagccatgttctaccaacaaaattgggatatagttggtccgcaagttattgctgttgttcttggtgttcttaatgaaggtgcagatccaactcctctaaactcaaccttgatcacgctcattccaaagattaaaaagccacaagttgtcaaggattttcgtcccatcagtctctgcaatgtcatttccaaacttatcacaaaggttttagtgagtcgattcaagcatgctctcccatatgtcatttctgaaactcagagtgcattccttcccaatcggttaatcacagataacattctcgtagcttttgagctcatccatggtattaagcacaaaacatctggtcgtaaaggagttgcggctctcaagcttgatatgagtaaggcttttgatcgtgtcgaatggcaatttgtgaagttaacaatggaaaaaatgggttttcacgccaaatggatttctttgattatgggctgtctcactacaaatcacttcacttttctagtcaatggagaggtcacgggctcactcacaccaactcgaggactccgtcaaggttgccctttgtcgccatacttatttctcatttgttctgaaggactatctcggctactacagtatgaggaaagtattggtaatctacatggctattctttaactcgtcacacagctccaatctcgcacctcttttttgctgatgacagtcttcttttctgtcacgctactgagagttcgtgtttggctattgaaaggtgcttggatatatatcatcgagcgtcgggacagcttcttaatcctgacaaatcagtaatgtccttctcacccaatactactttagccagtcaaattttctttcatcgacacctcgccatgcccataagtgagtgtcatgaaaaatatttggggcttccctcctattcgggtaggaacaagcagcagctctttggtgaaattaaggataaggtgtggcgtttaatgaacacttggagtgagaaaattttttcagctgggggtaaagaagtcttgcttaaagcggtggttcaatccatacccaccttcgccatgagttgttttcagctgcc

SEQ ID NO: 313940 - DNA, 1979 bp, Cannabis indica
aacaacaaactgagcctctgcagggtgaagtggatatgcaaaaaactcctagggagaagaaaatgtagtaggaaatatggagaatcagttagaaattcccactgaggaagaaaaagacttagctacggagaagacagatgatttgcgacatcaatttcttgattcaatgtcaatggaactacaggtagattttgaactagaagaggcctagttgatcaatggagtcctgctgaacattagaaagtggttagagagtggcctgcgaatggtgactggacatgggtcaatatgaataaagctagattctgagaggaggctcatgggttgcctattccatatttgacatgggagaatatttatattatgccaagaaggtgggagagtatatttatttcgatagagcatctagagttcctactgttagaagaggattcttaaaatttcaagtggattttctcatcaatcaccggctagtggctggtttttacctgaatattttaagggatagaaagcaatggatacagttcaagtatcacaagctacctgctttatgcttcaactgtggttttctagctcattcttacacaaaatgcgaaaggtcaatggaattctttattacatacaaatacgtcataataaggaagagtttactcatagtgagtactacgacgctaacaccacttaggtttggaagatgctgagcatcattcagaacattttcaaggttgaatgtaatacctgattttttttaaaaaaataatattcaaaatttattgaattaattatatatataaaaaaaagattgtcttatttatttctattgatagtgagtagagataatttttaaagtgtagtaactatgtctcaaataatatatatgaagaaatattttactgatttgaaattgttctttgtcaaaaattagcatttctatatcgagcatcattcaaaaaaattttgaggttgaaaaatcaaccttattgctttatgcgatcataaataagcaacatgtttgatgattagactctattcttagtgatttaaccactttgaccaatatcactcacagtgagtactacgacgctaacatcacttctaggtttgaaatatgttagacatcattgggaacgtctttgaggttgaaaaataaactttattgctttatgcaatcacaaataagtaacatgtttgatgagcgaactctatccttagtgatttgaccacttcgaccaataacactcatagtgagtattacgacgctaacacctcctctaggtttggaagatgttgggcattatttgaaacgttttcaaggttgaaaaatcaactttattatgttttgtaaaaataaattagggactcggttgaaaattagacttactccttggtggtttttcgctttgattagttacagatatgttaccatgtacttataaaagtattgattttgtgtataaatttaatttttgtaacaaatgaaaattttattttattgatatttaccttttaccaaaggtggttataagtttttaaacaaataaaatataatcaaggtaaaaaaggaaaaaaaaaacacaaagtaaaattaaaaattgatataacattgatgctatttgttctaaaaaaaaagacatttttgcaatccaaaataatttaacccaacccaataaataccattacaatctatttatgggattttatttatttattttataaagggagaacttattttgtcaaaaaaagattattcagctagcacaaaaaataaaaaattttgactggttacaacaggttctatgagaagtaactacaatttttaattaataaaataaataataaatattatttaatttttagctaattagtaatttttttccctgaattttcacatgtagtaaatcgtgccccttgaacttttttgaccgttaaaaattcttcttgaactaatgagattgttaaatttaaggacttttgtctaa

SEQ ID NO: 313941 - DNA, 890 bp, Cannabis indica
taattagtagtagtaattaatagctatatgtcattgatcttgaatgttgacaagaccatgcatagaggtatgatttgggtttctcatgactcaaatttgcaagtcagtcactgtgatgttcaagccttacaatgtatgtgtgtgtggttttctcaggctattacttatataatgctccagttttggcatgaacagaaaacaattgctaagatctcgttttttagtatttctctagcttagttgtagcaattaaacatattctgttgaaaaatgagctacaaaattaatatttctcaaacaatgtattatgttttcatactttgttagtcaaagtatactagtactaatcaatcaaatatatttttatttttaaaaggtgataatgcattgttattaataattataattagtgtgttattatttataattaagtttttttgttttttttgttttatttattttaatttaaaaattattgaaaattttaaattatataatattaaataaaaacaattaaatcaaaaagttttaccattacgctcacaagagtcatatatttattcatcaaaaatgatttttctcaacgcataaatatgagctcgtaaaaagactttttctaacgcataaatgtcctagtaaaagttaggcaattttttcatttgccttggcaaaagtttcaatattaatgcagatttaccaacccctttcaccagcacaaaaatattctggcaaaaatacctctttcacaatataagaataataatttataattagtcacaactttcagctaagtcttcctgtgactaaaaagaagattttttgtagtgattagaagcatatataatgggaaaatagaaaaattgtaacgccctaatgctaaggcacgctac

SEQ ID NO: 313942 - DNA, 1025 bp, Cannabis indica
acctggagtcttcagtctcgggacatctggggttgttattttgtagtcgttgtgcaacctggattatgtattttgtatattttgcaaaaagtttagaaacgggatctcggtacttgtaaatgattatgtaaagtttataaagtttaatatttaatataaaagttttaatttgacatgattttcgagaaagttctttgattagcaaagatagcactgtaattaaaaaattattgtagcgtgacttagtattagggcgatacaattatcaagagtcaatttttaccaaaagatcatcatgaatcataatcaatggccatgattatcccaaaatattttttttcatattttttgtattttttaattgttattttaatagaacttcctccctataaagggagggctcatctagctcagttttcacattcttttaagtcctcacaaggtctgaacatctctctctactttctctctctagaaattcgagctccacacttagtaagttttcttgtaattctcatgagaaataaaaatttgaaataatcgtagctccattaccatcgcaacatgaggagtgaactactatagattttgtgtgtctctctacattatttactttaatttattattcatcttgccaatctagtcatgagctgttgttggccacttttcagcgtcaacacgtgaataccacaaaaggtattaaatataaatatcaaaatttcataaaataaagtcattcacctaagaatttttctaaatttttagatggcaatagaattcttaaaaattatcatataccgaaatttttctactaaaattttaaaataccatattctgaactacaagtgatttgatcattcacgagaatgtatgtaggcagctcgattaattaaatttattgagttttgttgtacgtccaaattctctcaaattttcccaagctttttcctaaactgtttaatatcatcataattagaatcaaaatgtatttcttttaaacaaaaagattgtaattaagagattat

SEQ ID NO: 313943 - DNA, 2511 bp, Cannabis indica
tcggagtggtcgccggttgagcattgacggtcggggttgagcgtcaacagtcctgggttcaccgtggacggccgtgggttgagcgacgacgtctgctgcgggttggggattttgtggattggttgctgtgagtgtaggtaagttgagagagaggaagagagaggctgagatgggatttgaaatgtgaggggtagttttgagaaattagtaaagtggtcatatatgaccaattttaataactatgcatttaggggaaaaattatagggtattttaagtatggaaattcaaatttccctatccttattcttagataatcttttcataccctattgaaatttaatggatccgacggaatacatttttgtaagtgcaaaagactaaataaaaaaaaataatatttactatttagtatggttcacatttgacccacattatatttttgtttttccatattataatattatcatataccaaatttgacacatatttatagaagtgtgctaaaaaatagtaatgtaccattttaattacactattagaaatggtctataagctaatataatcgatcaattatttactaaagttaggaatttaattgaaaaatgatggacattagagacttaagtgcagaatgtagtacgatataagttttgaggttttttctgcaaatgttgacatagaaatttggccacactcgctcgttagattgagaagaatgtagtgaaagttaagtataaataagagggattataaatttatagtaattcacttctcgtgacatgatagtgatagaggtacgtctacttcgagtttttacttcaggagaattacaagaaactggctaagtgtggggcttgaatatctagagagagaaattagagagagatgctctgactatatgtggacttagaagaatgtacaaaatgaactagaggatctctcatttaaaagagaatgagccccatttaaataataataaaaaattacaaaaaatatgaaaaaaattactttgggctaatcttggccattgatgatgatctaacggtgaaaattgactcttggtgaaaatcgtcaattttcagagtttaaatctcgtttgtcagatcgtttttaggtaatttattgaaaaaaaatagcaactaggttgagaataaattttggacttaaaatcttcagaattacgatatggatacgagacatgacttgatagctctttgaaatgtaaattgaatcgcgtcaatcagatcaatattgagtgagttatgattgttttactaaatgttgttcaacaccttactgccaggttgataccttacgcttaggttgacacccagcgactaggtcgacatcttgacgtcaacctggacgtcaagtgagtgaaaaaacatctcatacttgtattttttgatgcttaagtgatatgttgacaccacttagttagattttgcgttatggtgaaatttttcaccaatttttggagatgtcgtttttttgtgaaattgggtcgacttgaaactctgattttgccgatattccatcttattgaaaatgtgaaatataaaagtgtgaattttacctgtcacaagtcgtagctcttgtttactacaaaaaaaatagttgaatgcttgaaatggaattgaataatgataagtagaacccagcacaccaggtcagttgtcaacctgggcactgtgtgctccttgggtgccttcctggggctcgttttgatacctttttggaattcgagattacgaatgaggtctcctaccacgtttttgaccattttaagaagaatttcgggagtaaaatttttgtttgaggagcgaaaacatgcaaactaggttgcatgtcaacctaggcgcagtgcctagtgccatgttaacctgggcactgggtccttgttctggctccctggaaatctcgtttgctcctcaagattgcttgtatattcattatttctgatgatagaaaaaaaatacctggagcattttttaagaaaatgttggaaacagcccatgttgacaaaatataaacctgggccttgggtccaattttttgtcaccagatgactccgtttgatccccaaaaatacttgtatcttaatgtttggaaaaaataaagaatatgcccggaagacttcttagaaaaattccttagaaatggcccaagttgacacaatgtcaattgggcgctgggtcccagttctaacccccaggcttcgaaagcactcaaattgttgatgaaaacgtagagtatgctcgaaagacttcatctgaactatattgatggaagtgggccaagttgacaaagtgtcaacatgggtgctgagtccctattttggcctccaagttaaaccatttctttcgtgaaagtatttgtttttaggttttggaagaagaagaagaaaatctcaagatacttcttcaatattgtggcaggttgacaatatgtcaacttcggtgctgggtgtttgggcacttggtgcctcatgtgctcaaaactaaaattgc

SEQ ID NO: 313944 - DNA, 1125 bp, Cannabis indica
atttttatttttttaatttaaaatcaaaatttcaaaaacataattttgatgctttaaaaaattttaaaaacattttttttctctctcttgcttttctctcgccttctttgtacgtccggaatttcatgttgtggttgttaattttaacttcagatgttggtaacaaaagtttatagtttttgtttactaaatataaatctaaacaaataccacatgtaaaattacttggcaaattattatatttattattcaaaaccaacttataagctatattgtggtaattatattgtgacaaatcatgattctcatgagagaaccaaaattcatccccatgaagttgtagatgtttgtaatgagcaatctgaaagaaaatttaaagtgaacgagcagtgtctaaagcaatatatgggtggtgaggttgattgagaaaatacctcaaatcatattagagttattttttttttatcttgacatatatgattattctcggagaaatttaaataacactaattattacgaatattcaaataaaattaaaatatttactagcagttatgctagtattttcttaaaatagtgagtactcaaaatataagttactaggcaaaaaaaataaaagtaaaaattaaaagaagacaagagaattatagtggttcagttagagtttgatttgcttagtctatttttggtaataatttagcttaatttatttgatttggatcacccttttatataaagagcaagtatcctttaaaattatataactggtaagtttagaccgtttttacaataaatgaacgtattaaatcaaaataaacatttaaagaataaatcaagaaaaatttcgtccgttcttgatttggctgcaacaatgtatgcaacttgataatccgcaactcgtctattcatattccaacacacgagctcgtgagctctatggtgttgtactcacaggatgggcctttgggcctacgttgttgaatgtatgcattcacctttgatcgcatagtcagacattctatgcgttgacaacgtgagacatgcgagtctctgacgagttgtcaaacacattagtcattcgaaccaaacctatgtaaagagatgatctttactcattgcaggaaa

SEQ ID NO: 313945 - DNA, 1139 bp, Cannabis indica
aattgtgaataactatatgttctggatttaacagattctgtacacattaaaccataaatatgaaaactacatgtaaacataaatgacttctaatcttctattgataacatatcagattatattctaatgggttttatttagggcataaaatcccaacaaaaaccacggggaccgtcgtccgatcaaatcatcacctatcaccaatgttcaataatgagattacaaagttcttctctagtataaatagaggctcacaacaatatcaaaactaaataatcttggatcacaattacattcatcatcatatcaaaagatggatacacaaagaaaaagtttgggtctcactaaatgagtattgtagaagagcactttagagaggagaattgtcaactcggaactagtagattcgtagagcaccctataaggattcaccacccaaaattgagctaaaatagatgagaatcaacctcttaatcttcaagacaaagtggcaaaaatccactttctctctctaactttcttctcttctttccttttctttttctctgctggctgcttgcttctcacgacaaaagcacaagctacttctctctctctctctagagaaacaaaatttcatctctgattctcttattctcataaatgtgtacatatataaattttgttatatttgtggagtttgttaagaataattctttagctttgcgtggaaacttgccaactattgctgctatgtacatacatctctatcgaataataagcattgttatgtgacctttgttgaagatgtgtgtgggtatggagtgtgagtatgctcgcgcagtacataccccaccagacaccatctactatctctccattgagttgagcgatgttagtctatattttgctttgtgtaagtagaacaactactttaagccactgaggttagcttagtggtgagagaaaaatgtgaaaaatagataatgcataaattcaaacttaaaactcttaagttattagtaaatagtatcgccttacgttatatttaaaaataatagaacaagtgctttgatctttacttacgtgtccgtattttaatctatgttatacgtaaaaaataattaggataacaattaaaattaagaggaaattacact

SEQ ID NO: 313946 - DNA, 2041 bp, Cannabis indica
gtcttgtcttttgacatggtagtctgttgaattttcctggtgtttcggttggtgctttgtttgtttatccacttaaatctttgtttgtttggagtcatggctaatagacagaatcagtcagaacatgtgggaaggaatttgtctggtttagcgatcgaagaggatgatgaggaaggtctgttattcgacaatgtatcagatgatttatcggaaattgatgacaggtggttgctggtgggaaggttcctaacgaatcgaccaattgattttcaggcgatgcagaataaaatagctacactttggcagccaggcagagggttatacgttaaggaattagaaccaaatctgttcttattccaattctatcacgaggttgacattgaacgagtaattgagggcagcccatggacatttgatagagcacctcttgtgttcgagagagtgaagacaggagagaatccacggcaggtagcattgctgcatcttgaattatgggttcaattgcataatatgaccacgggattcatgtcagaaagaatcattcaaggcattgggaattacataggtacgtttcttcgatccgatcctaacaatttcatgggagtttggcgtgattatttaaggatccgggttaagattcgtgtggatgtgccattaaagaagaaaaagaagcttcagatccaaggaggaccggtatgccatgctacgttcaaatacgaagacttgcctaccttttgtttcatttgtggagtcctaggacatacagaaagattttgtgaacgattgtttgacacccccaaagagctcatagttaagaactttgatgagacattacgtgcagtccccagaagacggcgttatgcagatggttctagatggttaaaaacgggattggctacaaaatcggttttgcctcagcataaagcttcgggcagcaacaatggtggtggaggcggttctccggtgacagctgcgaatcttggacaacagatgagtattcccaacaatcagggatctcatttattgcctaatattcaaggcaataatggtgctgatttaattagaaatttacgtggaaaagagaaagaagatgggctgaataatgtgaaatcccttgaaacaggggaagtaattggggaaaagcagctgctggcgccaactggtgagaattcaaaaaatggattgacttttcttgaaaataaaaggagaagaacgggccttagtgatattattgggcctgatgaggataatgttgatgaggaacaatacaaagcccatgacaatatactttatgctgatatggaaattaccaaggatagtgagaaagatttgcaaggtttgttgagtagcccaaaaaactcagatggggcgggtcttggtttccaagcccgccaatcattatgaatgtgctaagctggaattgccgggggcttgggaaccaacggaacgttcaattccttcgagaaacggtttctcaaaagagacccaattttatctttttgtgtgaaataaaatgtcaaaaatcaaaagtggatggtgtggcttctttattgggctttgaaggggcttttactgttgattcggtgggcttggcaggaggcattgctctgttgtggaagcataatgatgattgtgctattttgggtttctcacaacaccacattgacttagcaataaactcatcccagttcggtcaatggagactcacggggctgtatggagagccaaatcggaataggagacatgaaacttggactctaatccgaaccttgtctagacaatcggggttaccatggtgtgttattggcgacgtaaacaacgttgctcgtcaagaagacaagaggggtggccgactttatcctcaaggtctgattactgggttcaaccaggtgcttcaacaatgcgatttgtcggacttagaacttcaaggacacccgtttacttgggagaaagggagaggcacgaaccattgggtcgaggttcgcttggacagagcacttgttacatcttcttggcaacaggtttttcctaatgctactct

SEQ ID NO: 313947 - DNA, 901 bp, Cannabis indica
tttttattagtatgaaagtttttttgatttttgattcatcatgtagtcattataatataaaatgtatacttttacaataaaaatatttttattcaattcaaataatatatattataaaatatataatgatatatattttaaaaaaataaataatattaagaaatataaaatatcagcccttattatttctctctcttaaaatatcaacattctctctttctcgctcatgtcaaccaccgaccctctctcctccattgtgtctatatgactctctttctcttttagtcgctactacaagaacaccctattttacaatttttttttttgtgaagaaattggataaaatgaattgaaacctcattgaagtcttatcagtttccaacatgggctaaatggttaggtaagaatttgtcatcttaaacatggtaggatttgtcgttctcaaacagatcatcaaaagtaatcagactgttgaagagggacttgaggccaagtgagctcaattagcaaccaaaaaaattgaagtgatgaagttacgaggaataatatgctgttcttgatgtcgaggagtgctctgctattgaattcttcacaaaattaggtgagaatgggaagccttgcttgcttgcttcctttggggtggtcatgtcgcaaacaatatatgtctgttttttattaaaatgtttgctaatatagttgctcgatgctttttaataggagtgatatataaaaaaatttctaatttacattaaaaagaaaaaagaaagggtaagaaatcactacaaaaaattgatgctttagtgaaaattttttaatcataatatatatatttttttatgattaaatgtgatttttaatttcaacaaaaatttatttgtgactaaaatatagcatttagaca

SEQ ID NO: 313948 - DNA, 948 bp, Cannabis indica
attgaaaaagcactgtagcgtgccttaacattagggcgttacaaaatcactagtgagcatttatatatgtttagattttaactaaaattaaaataatactactcacaaataaataatattagagttacaagtttgatctcaactatatcaacatttgaccttaaatttcatcatattacttgagttgagtaattaagggaaaaaaaatagagaaattataggttgttgagtaacatcacacctggtcataattgatatctctcaaggatttttcccttatcaactattaataaaataaattctaacataatctaataccaagattctaaatcaaaaccctttcaattccacattctctgacacattttgcgaaataaatttcaaaatccaatgtgagaccggatctgtggttccgttataggaggatacatgcgggtttttgaatcccgaaggaaaaggggtattcataatatttgggtgatatggctcaagctcctcgtcagagtcgtatctagatagtttccctaattcccccacttgatatctcctaaacttgtcctccagctcgtttatccgcaattggattggatcctcttgctttggaccaagctactggcgaaggtcaggtttctttcaattcaagtgctctcgcacatctggttgggagtaattgttggcagaccttatcttactcatagaccgcatcctactcatagactttatctttgagtaccttgcggatttactggttcccatactttctcgatcattagctcgttgagtactttctcctcttcgagttgatcgactatgggttctggatcgtctcgaagtcacacttgcttcttcacgctctgttctttcctccgagaacagtttgccgtatttcccccattaggtatgtacgagtccttgctctatgagttatcgctgattatcaagtcagtc

SEQ ID NO: 313949 - DNA, 2239 bp, Cannabis indica
tttttttttaaccaaatataagcataaaaaatcaaattttcctaaaggattaattaagtaacagttagtcaacatttgacagtcagccaaaatcaaaacattatcagaacctatttaagagactctaatcaaatacttaactattcaacaaaatatatgttctttcataaaattccaaaagtaaatgatttttatacaaaaagaaaaagaaagaaagataaatgcagagagaaatttgacttgtttttaggtgcaaagaaatcaacgactttgatttttccatgttgttccagctgtggtgtgtgccagctcaggatattgataaaaggttaggcaaaaagaagaccacaatataataaagggaagcctcttgtctcaaattgggactaatttactgccccctatatatttaatttaattatttataattaaaggttatttaagattttggtctcgagctattattattattattagatcgtgtttcataaatatttcgttcattaaaacttttctcaacaaatcttctgatcgatttgtttatactaacaaaatattgatctccttcccaacaaaaataaataaaaaacaaaatattgacctagctctttagtaattttttttttttgaataaaagatggtgtttattcaataactttcagtagctacaatagtctttaaatcaaaaggaacatcagtctcattgaaaatacaatctgactttaaacaagaccctcttgctacacaatgagcggccttgtttgcatatcgttttacaaacattaaagaaatattatttaagatagaaagaagttctcgacagtcacgagcaatcataccaaattgtgatggcatatttatcgaacttttgattgcctgaacaaccatcaaagcgtcggtctcgatcaccacatttgcccatttctttctttttatccaacttaaagcctctttgaccccaattatctctgccacttctggttgaaccaaaccaatacgacatcccttcggacctggagaacgtgtaacgctgggtcggggtttggtgaaccaactggtcgctcctctagttgaagtatcgggccccttttccgttgcctaggttacaccttcgatcccagaaatagctttaataagctgtccattatgatcccttgccacacagccaaacccaaacttattctccgcttgaaaaatggctacatcaacattaaccttaaccgtattcaacattggtttcttccagtgctcattaacattattaatatcatgtattaataatgcccccattttttgtgattgaccacttaaccattggtcaaggactattctagccgactgcaccacatcatacgccgaacaagttttgtcattccacacaagatcgttacgaactgcccatattttccagcgtaccatagctgcttctcgaacaacatcagcaggtttagaggccgttaaatcaaaaaaaactaggtgttgaaatcactgtaattcgcaccatcaatgttcaccactgataaattccagcatgatctactaaagctacaaccgagaaggatgtggaatattgtttcagcagaaaattgtagaaaggacacatcatttcaatattcacatgcttagtattcagttgtacattagttagtaggcatcccggatattgcacgccataaaaaatgttgaaccttttgaggaatatcaagctgtcatagctttttatacccatctttgttctgaacattatgcacggttgcagtattctgatgtaggtaagagtatgcactcttaattgtgtagaagctcgaagaagccttgttccaaaacaaagatcatcttccaccgaatcactgagttgaattgacagaattagctctttatccctctcctcaaataagtcattcaacacctccatatcccaactcttctgctcaaccgagagtagattagataccgtcttcccttccaatgcaggatgattggaaataatgtaaggattttggtgatgaggaagtcacggatctctcaaaatgctaacagagttcccacccccaattgatcttcttgcaccagcacacaccaaacccttggcttcaaaaatgcttctccatatgaagctgggattctgaccaatttcagccgtgaggtagctaccagtagggtaatatcttgctttataaatcatactaaccaaagagttctcattggtcaataatctccatccttgtttaccaagaaa

SEQ ID NO: 313950 - DNA, 516 bp, Cannabis indica
taaaaaatattatttttctatgtaattaccacctcatatccaaacacaccttgcattttaaaatatagtgtaattactatactgtgtaattagcaccatagtaattattctacctagtaattacataattatttccaaacacacccttaaagttatatagtggtatttaatgtttgattttcaaaatttatctttcaataaataaatcttataaaaagatgtgtataaaactagattttgagtttaccatttatatattgttttcatttaaacatacccaagattatgtgttgcatttttattttagagtgcaatttattagaaatgactttattcatggaagctgaggttgaatgtggataatgttctcgaattctagctcaatttcgtttatgattcgaaaaaaaaaatgaaaagaatgagattgcttgcaaaagatttcaggcaaattaggtacattataagagttcccccacttagtagttgagttttatatatttctgttgggttttatgc

SEQ ID NO: 313951 - DNA, 2028 bp, Cannabis indica
aagcaatgaggaatcaagaatgcgaagacacatcaggttccacaaatgttgttggtgaaggctttgaaagtgactgtgatgttctctctgtcataactgatgaaaatttttttgactcttggattttggattctggttgttcgttccacatgtgcccgtataaggagtgctttgacacttataaggcatatgataaatgtactgttttgatgggtaatgattctagttctagagttgttggaatagaaactattaaggtgaagatgtttaatggtattgtgagaacactgactgatgtgagacatgttccaacattgagggagacgttaggctttgaagttttgaatccttcttataaattaagcctggatggagttagagctcatgtccaactcctcccatctttggcgagtggaccgtgcttctgttctttgaggaaccagtgaatgggccttgtttcagtattgggcctctgagatagcacatttattagtcatcctgaaaacactgataaaaaagagaataagggatacatatgtcaaaatactaggtagaatatcatagaaccaagtagtctcatttttcatttgtagtatacatctagtgaatccaaatgcaacaaaaaccaaacatacaccccaaaaataatatatataacaaggatttaaagtttctattaaagtatcattttatcttaattttttacctagcttagaatacgagtattacatgtggcaagataaagcatcactttaataaacttggtgggtacatacaatgagtggacataaggaccacacacttgaagacaactggtggtcggcaaaaaggaaacgatcaacattgtccttgcattacacattcttgcccgatgaaaacatcaatttaggagaagtaatcacaacttcaactaggctcatgaaatgaactctagtcggtgactgacgagagcatatacgatccagatccggtaaatcagcttctaatccttaaggatccgatattcattcccggcctccagattatttgttatgatctttcactaagaaaatattctttatttattgtcatttattataattgatatgaaacgtccatcacacaaagtgaggacacacaaaaattcatatagcacaagcactaataaaatttgtgtactatcttttttacaccaggggtgaccctaagtaactatagaccttaagaataagaaaatcattgggccctcattgaagaaatatatgatattctcaaaaattagtaaaaaatgtgtgtattttcaaaagatttttttgggggccctaggcaaaatgggttctaggcataggcctgacccatcttagtctagggctgcccctgttctaaatttgcaaagctcgtttgaatcttgtttatattattctaggtataaactaagaaatttataaagaagcgaagataattagactattaccattataattagtacaaaacctctataaattctattattatattatattctttgctctttcattaattataaaatcattactattgtacttgtgacttcatgttgttggttaaaaatggagtcaacaaacatcatattttatgagagagaaaaagttaaccataagaaaagaaataaaaaagtaaaagacatttgctactattaagggtgttcaaatatccaatttaaattttatagtgctacgaattttctttttttcctccattttatccttttcttataaattttcttttttttttatagttgacctaatgcaataattaatatagattaacaaataataatgtaagattaatcactacaaaaattacaaactctcaaaatttttatttaatacaaaaattactcaataataaaaataataataagaaaaaaattattttcactctagtatcttacaaaacaaaactaattataatattattatagaaactcgttcaaattttaaaaatttaaaataaaaattgtaagaaaaatatggtgttgaccgagattttcggcaactattaaaatat

SEQ ID NO: 313952 - DNA, 4669 bp, Cannabis indica
atggaggattttagttatttttatgatataaaaagcatggggcacaacaatggcttttattgctttagtaaatgggccacctctgagattaacggggtagaaggcatggtttccaatatgggggattgaaaatctaagtggttttacgtattcaaagtaccaggagttaggacagatttcaatcgtcgacctagcatgtcgcgtatttcaacacttagtttatatttttgttaccttgtgaagttgctaatgtttgttttttgccgatcgcagatagaacagttcaacatgttctggatcctgctcgcaaagagatcgttgaggttctcggtagcctatccgttcaagatcgtgattggcaattgttgtgcacaaatgccaaactgcgagaacataagctaatccccgaggacgctagccttcattgggaaccagtgtacaaggaaccctctaagaaacaaaaggagagaatagacaagcatctatccaaacaaacttcaagaccaacatcaggtaagatatcgagtatgcacgtaatatttcatagcataaaaattgtacttatgttattgcttctttgcagaaatgactttcttgaagcaagctccacttctcaatcgaaagcctaaggctagaactgtgaccacgtctcccatcatcccgcagaagaggaagagttaggctgtcaagactcgtgtagctgattcctctaaaaagcaggtctgacctgctcaagacaaggggaagaaggtcatgattgaccctattttcagagctcgcgacgtcctagctctccaagacaagcttgtgggcgaggagttcatgtcgaaggttaaaggaactcctcctgagaaactgatgctgcgctccacaaaattggcctcacagtttattgccatgttttcgaaggcttttgtcgcaagtaccaaggaggtcgatctcttgaggaagcataacactcttcttcaggagaatgtgaggaagttgaagctggatgcgacttccagggagaaagatgtcaagaacctccaaaaagccaaagagtaggaggaggagaaggcaaagcagacagaggataaggctaacctctcagagccgtgagttgaggaattgactcggaaccgcgaggagtatgggaagagacagtacgattaggttgtctctgactatatttatacaactttatccaaattgctggactttgacttctctgttcttggggcagaagcagctgagatagccgaggcttttcgtgctatgttgcctactcaatcccaaggatgcggaggaaaccttttccctgaggaggcagagaacgcaaacacttaggaagtcgctgatggagttgctagcaaggtcacagatgactccactgctccaacttcttaatttatccaagttttttttttactattattgtcgttgaacttttgactcgcgtttcgtacattgaacaaattccaactttttcctttctcgaacaatatatatcctttcgaggatgttttcttttgcatttttaagcggtacaggagtactcgcatcattttaaactgcttttatcttattgtttctgtttgcaatgtttttactaatatagctcagtgtaataacttacaaatgttaaacttgcaaaaaattaaaaacttcgagaattttcattataataatcaatagtacaaaggtagggtataccccctatacttaggacatttatcaaaataaattggctaagtataattacagtgcaagtactattgataataatattttaagcttttgccattccaagctcttttgatcgtggttccattgaggtctgatagtcgataggtcgcactaccaattttttcagtgatgaggtatggtctttcccaattgtcaccaaaaactccatgtggtaagtttcttgtgtttggcatgaccttccgtagaactaaatcgcctactcccagacttcgttctttgaccttagagttgaaataacgagctgttcgctgttgataggccgcattcttcaaatgagcctgatcgtgcttttcttccaaaagatcaagttgaaacaactgattttcagtgttaccactaatgttaaaaacatctatccgtagaggtcctgcctcaaccttgactgacaccatggctttgcaccgtaagagagtgaaaagggggtttcaccagtcgtagattgaggagttgtattatacgaccatagaacttggggaagttcttctggccatgtacctttgcattcttcgaggttacccttaatggtatgcttaatgatcttattcaccgcctctgtttgtccattgctttgtggatatgcaaccgccgaaaatgctttcttaatccctaattcatcgcatagctggcacattttcttacaattaaattgttttccattgtcagaaattaacttataaggtaaaccaaacctgtagatgatggtgctgtatacaaactcttgcaatttggcagtagttatagtcgcaaaaggcttggcttcagccaattttgtgaagtaatcaacagcgactacggcgtattttactcctcctttaccttttggtaattctctaatcaaacctatgccctagaccgcgaagggccagggacttgttatggaaattaattggctgggttgtctgttcacatatgtagctattcgctgacatttgtcgcaccttttagcaaagctagatgcatccgctcgcaatgttggccagtaatacctctgcctcatgatttttaaagcaagggaattacgcccggcgtgattgccgcagattccaccatgcacctcccggagtatataatcacactcagtcccatcgatacacttcagtaatggctactaaagcttttgcgatagagctcattgtcataaatgacatatcaagcggctcggtatcgcatttttttagcttctactttatcttctgggagtactcctgttttcaagtagtctactatcagggtcatccaggtgacctttttggctgtatcaacctccatcatttcatctcgatagattattggatgggtaaatacgtctacaggaattacattgagtaattcggcttctcttgtcgaggccaatcgggccagagcatctgcatgagaattgtaagcacggggtattctagaaacaactatctttttaaacgtttgtaataaatgtacaagtaagagaaagatatttgcccaaacgacctcctctggcaaggtactctccattgacttgacaaaccacgatctgtgaatcactacagacttgtaaatactcgattttcatctcaagatggagttttaatcttgcgatcaaagcctcatattcgacttcgttgttagatgcgagaaactcaaatctaagggcaatgtgtaccttgaatttgttgggacttatgaggattataccacctcctgatccttcactgttagatgccccgtctacatacaaagtccatccttcgccatttggtaagtcaggatcaatttactcttctgcgataatggctacttcgtcacttggaaatttgagtatgaagtctgcaagagcttgtcccttgattgccgatctgggtttgtacctgatgtcaaattggctcaactcgactgaccacttcggtaatctatctgaggcttctggttttgccaaaacttgccgcaagggatattttgttaaaatctcaataatgtgtgcttggaagtaaggtcgtaactttttgatgttgttactaatgcaaataataatttctccatttgtggataacgggtctcggcatccagaagacgcttgctcacatagtacaccggatattgtctcccttggtcttcgcagattaatactgaactaattgcgtattcggacactgtgaggtagatagataaaacttctccaggcattggcttgcaaagtattgggggttgccccaagtgcgctttgagggcctgaaaagcttcttcacacttttcggtccattgaaacattttatttccctttaaaatctgaaaaaactctttacatttatcagaggaatgtgatatgaagcgattaaagcagcgaccttacctgtaagactttggacttcttttggtttggttggagatcgcatttccaccaaagctctgatatttgcgggattagcctcgattcttcatttgtttaccataaacccaaggaattttcctgaaccaactccaaagacacatttgagggggttaagtcgcattttatattgtcgcagtatttcgaacatagcctccaggtgagtgacatggtcctttgcatgttgagattttattagcatatcgtcaacatatacttccatgatctcactaattaaatctgcaaacaccatgtttaccagcctctgatacgtcgctcctgcgcttattaaaccaaaatgcattacattataacaatacaaacttcgacctatattaaaagaggtatgctcctgatctcgtgcatacattgaaatctggttatatcccgagtatgcatccataaagctaaaaagcgcatgtcctgcggtagcatcaacaagttggttaatgcttgtcctttggacatgctttatttaaatcagtgaaatcaatgcatgtgcgccatgagccattgggcttgggcactaatacgggatttgctaaccagtttggttag

SEQ ID NO: 313953 - DNA, 1627 bp, Cannabis indica
tattttaaaatgtactgaaatactgtaaaataaaaaagttctacatctccaattttctcagaaggcaaaacaattaaagtatacttaccaatttcaacttcgggcttgctttaagactctaacctttcaaactacaaaaccaaagagttaagttttaggttcacaaccagtaaatcctccaggaccaatatgattataaaaatttcttttgtaattaggatcaagtaataaagaaggcttcaagcttctagcagtagagagcaaaggaaaattccacctctaaattgactctcattattcctatcagtataattttgttgtgggaaggcaattggtgaaggattcgttgtgaaccataaattaaaacatcaaaataagtttgaaatatacaaacaactaataaaaatgccattagtaagctgtgtagtcaaaccaacaacacagcttcagatctaacacaatgaacagaaagaatccataaacaataaatattgatatgaaactgggctctaaaatcaaaataattaacaattcgaactggaaaatggaaagtaagaggagattgaacctccagtttctgaagcacgagtgagtccaagtttctggagtggttgtttccggatccaaaagggattctcctaatctgaaaattaacaaaatcaataagctaaactaaactaaactcttacaaaaaaccagtgagagacatcatacgaatttcccaataaggatatatacgctcttagtaaaatgtaagatatatacctggctccgacttacaatacgtatgagaggtcgaaataaaaaattgcatacgaaaaagtgctcatttcctaaccattggatttaagagattcacatttttcaatcatccaatggcccataatgttttaaggtgttaaaaacctcaaattctactaaggtactacatagttagcctctatatatatatgatcaatcagtctatatatagctccaaaactaaactgagcagatgaatctgtcatctcattctcatgtcctaacctaagcaaattttatgaaattagaatagaaaagtgttgattaatcaatcctttaattagctgaaaatagattcaaacttcaatctctacactcagtgatacctcatggatgatgataccaaacaccagtgaggaagggagggaaatccgaattaataatcggtatcaaatgagagaaagagaaagatacctcctccgtcctccggctcggtaagacgtgagaatgagtttcaacggagtttccgcagaggagatccgactggagctttgttgttttgatttgagtttcacaatttcatgggaagaagaagaagaagaacagaatagtcattagtaagggttaagttgtaattccagactacttaaacaggggtatattagtcattcacaatagtcatttaaagtaaaaggtgatagctacttacttctttactttttactttttactttttactttttactttttacttttcagcattaattgggtaaaaaaaaaagatcagtgtttttttttttgcttatagccttatactagacctgcccgtatgtggtcattctctttttaaaactgtaaagtaatttgcgacataaatacttaagtt

SEQ ID NO: 313954 - DNA, 707 bp, Cannabis indica
gggtattttgggccgaaccaggttcgaggccaaatatatttttgagattttatttttgcatttatttgataaatgaataatctaaaatttatatatgttgtttatgtgtggagaatgataattatacccttgatatgtgtgtatgcttattttggccttggtgggcattttggtcatttgaccatttagtcatattttaacagaatggatttttgataatagtggaaaatctattttctgattttacacaacctaatcgagccccctctctccatttcttactttcctaattttctctaaattgatttcatgttgaattaaacttggcgttgaagattgttggtgctagggttgtaaaggacttgaggtagtttcttatttctttaattctgaatttgatgttgaatattgtgtgaattgttgtgttcatgttatgcctaggttgtagaatgcatgagggtgtaaattcatttgagttggtgtgctcaaatcttctcttttgaggttgccttcttctccttcttcttagtcttcttattctattctttgtactctctcctttccttttttttttgtactttttctctgtaattttcgtactccccttagtctccaagtgcagccaccattttttatatctccctctcttggctgcctcccaattagggtactaaagtttaccctaattggaaatccaagtcatggtc

SEQ ID NO: 313955 - DNA, 699 bp, Cannabis indica
gaaatttaaaaaaaatatttttttatgttttatttttaattttacggtttaaagtttttatttataaaaatacgtttgtaaaattttaagattataaaaatactttgctcaacaaacaataagaaaacaataaaaaattaatctgatcatgatcacgataactataaaataattaaaaataattaaaattcaaagcaattaaaataacggtttattaattttattgaagagatatttttacaaataaaaaaatttaaaacaatttttttttccgtattgatgtgtgtttataattttttaaattttggactattatgctaatttttctattattattattattattattattattattattatattgaatatagtaattctatcaaaatgtatttggacttgttaaaaaaaaagtgtatttgggcaaaataatcaagttattattatcaccttacccactttagttgtcacttaattacttctttctcctgagattttaacaagattattgttattcaataagctttaaacccacaaatttgtcttacaacaaatttcatcaacaatatatcaactcctcgtattacccctttttttttaatatatatatatatctttatatattaaaagtgcctatctaacggcatttcttggtttaacagaatatactaagaatattctgttaaatttaacgatgtt

SEQ ID NO: 313956 - DNA, 680 bp, Cannabis indica
tttgttgcgatggtttgaatcggtcgcgatcaattggagatgatctgagatgatcatcatcgacgtgatcttttatacaacaatgagttgaaatgtgattgtgctatttaagatttgacatagatcacttttttttgttgagttttttcttttgttccaaaatggaggttttccaatttgaaatggagtgttcttgttatgaaattggagaagctatagtggagtttttcgtttattgcaactaagaaactatataggtttcctttttaattttgaaaagcacacactggtaagaaagggaagttctcagtcgaggatcataaatagttggctcgtcttattgcttgtccgatgttggaaactaatttcggtggccacgatatgaacagctgaagtgacacgatatataaactcattactttaaccaacattttttttatatgtaattttaatgtgcttaatgtatattaataaaaatctccctatataaaattctattttactctcgccccattcgttgtgtacccgtccctgcagatcaaatttacatcactaattgtgatacaaattttgcaatgtatgaaactaattaatgaactaatgtgtaaagtactgtccttttttggcaagttagttgacaaaataattttttcttttatggtaagattcttgtgcattca

SEQ ID NO: 313957 - DNA, 2222 bp, Cannabis indica
taggagttagttagattggtggttagattcgttgctcacttaagcttgtatataaacattattattgtgctctaataagacaattcttttctctttttctcttgtttctttcttttcctttactttcttttcccttcttcttctatattactctcttcttgagctccataacaatggtgagaaaaaaatcaaaacttcaacaatagccaataaaataatcacactattaatatacttttataatattaaaatattttttacagtattacattcaaattgatattttcaaagttacacagtatattcaaataaatttttagttacaatatatttatttaaagtaacttaaacattgtattaaaattataaaaattttgcgtgagaaaaaatttatatatttatataaagtcactataacaaattagatttttgatatcggttcgaaggacgtttctttgaaaaattgacatatttgatcgaggttctatgaaagaatcgtcgtcttcgattacttattcatgagtaatctcctcaggtgttgttttttatggaaactaaattgtgtgatagtgctctttctcgctttaaaaatgttttaaattttaataatggattagaagttgctcgggttggattgaaaggtagtattatgttattgtggcaagatggtgttgatgtaactcttttatcaatgaatacaaattatttaaattgttatgtcttgcttgatgaaggccctcgttggcatttctttgctatttatggttttcccgaagctattaataaaaagtatacttggaaatcaataaggagattagctgatgtttcaccacttgatccatggttgttaattggtgacatgaatgaaattttctcacatgaacgtaaaaatggtggtccgcatgcaaagaagtgataatcaaatgcaaatttttcgaacgacactcgatcaatgtcttttgagtgacttacatgttgctgctgacgatttcacttgggctaaaaataagaaaaatccatatggtttagaggagagaattgattggtgtttcatttaaaatgtatggaaggacactttagtcttgccaaatctaagtcacttaaactactacggttcagaccatagagtattaatggttgaaattgttttcactcaaacaccaacctgtattgccccaagaagatctcagtttagattttgagaaatttttgcttaaagataaggagtgttctgaaattatttccaactcttggtgtcataatgcatgtgatgaccgtgccactagtatagtgacttctttgaataattgtgctaaaaaactttaaggatgacatctcaggaaatttggaaaaatgaaaaaggatatttttcttgcacagaaacaagtccaacaattaaatttgctgatagttctgatccaaattattcccttaatgttcaatcagttgaatctattttggatgaattgttggcaaatgaagaacaatattggcaacaacgatcgagggtcgaatggcttcaattgggggatcgtaacaccaaattctttcactttaaagcttcaactcgacattcaaacaattggatcaaagctcttattcatgatcatggaaatatcacaactacaaaagagggaatctctaacttggttgctggttattttaaaagcctttttactgcatctaatgaggatcattgggctttatctcatgtcttatccacaattccaacaacaatctttggaacaaaatgaatttttatcacaggacttcactacttcggaggttactgcagcttcaaaaactatgggttcagataaaagtccaggtttggatggaatgtcggcaatattttatcaacacaattgggatattgtgggtgatttagtaactaaggtggttcttaatgtcttgaacaatggtgccagtcttgaagccttcaaccatacactcattactttaattctgaaggtcaaaaaaccaaagacaatgaagaattttcgcctgataagcttatgcaatgttacttataaaattatttcaaaaatactagcattacgattcaaagaggttcttcattcggttatctttgaaactcaaagtgcgtttctttctaatcatttgattacggataacattcttgttgcttttgaaatggtgcacagtttgaaacataggacacaaggctctaagggttttgctgccctcaaacttgatatgag

SEQ ID NO: 313958 - DNA, 1455 bp, Cannabis indica
aattacctatttgctactcattaataaaaaaaaacatttttatatttataagttattaaaataatataaataaagttaattatttgtatatttttaatgagtattaatggtattattgacttttatagctaatttacaccttgtgcatttgagcacaaatacaaaattgggccaaatataattttgtggtatattttgggtcaaatttaactcaaaatatacaccatccaatggagatggtcttagtaataagtaattagtattaattaaataaatatttaaaaaaaatatttactgaagattttatttctttagttatttattaagaaagatgtggagctttagaatacagatgatgccatgacggaaaaagagaggagctaaagttaagtcatccaacaactttcaagtttcaactttagggaccatgccattatgtaatatttattttataaatgcttatatagacattaaatttataactacttttttagttttgagacattaatatggactgtggagtttagattttatgaactatggacttggaatttttatagactatggaatttaaaataacttagtttttacttttattataatgatttatgaacacgaagtttgatgatcaagttgtttgttggttggattgatttttgtactttggtttaaaatttaaattaatgcttattttcttcttttaatccaaaaaataaggtgttatattatatatgcttaatttaataaataaataaagcaaaagaaataaccatttgactctataatttttttaaaagagttaaccaagttgatcgggtcaacttgttgacccggcaacacgatcaacctgtgacccgccaacctgaccttatctcgagtttgggtccattttttagactcgaaacccgtgaacccaaaacctacggactcgaaatctggttaacctgcatgatgtttaatcctacccagattgatagattgtcacctgggcgctgggttctaatgaacttgcctggattctgattttgatgcctcaaaaatgttcgtggtatgtctgagggtcccaatataatttttgatccattttcactacaacagtcccaaaaattgaaaccttagttgcgaatatcaacctgggcgctgggtgaaaccctaggtgcccaagttggcttctgggttacaggttcatgtaattttagctctcagagcttagattaagttgctccatgtcttgatggtacataatactaaaatatagtgggttggattcaagttattgaagtctgaacttccatcttgaagcacccaaagtcaacctaggcatagggctagggtcccctcctaggtcaactgctatgactcgagtctactcaaaaccatgacgtcatccttcatgccacgtgtcaaacattgatgtccacgtcaccagtgaaagtttttgggttaatatttgcc

SEQ ID NO: 313959 - DNA, 821 bp, Cannabis indica
tttttaaacataagtaaagactactcagatgctgactgggcaagctgtctagatgatcgaagatcaataagttgttgctcatacaagcacagaaagtgaattcgtgctttagcaaacacaacatttgaaattaagtggctctcctctgttttaaaagagcttcggattactcttcctccacttccaattatttgggttgacaaccaaggggtagcttctcttgcagcaaatccagtgtttcatgctagatcgaagcatatcgaaattgatctccattttgtaagagatcaaatactagttaaaaaggtggaagtttgatatgtcccttcaatcgatcaaacaacagacatactcacaaaacctctaacaaatcgttttctctacctcaaattcaagcttcaagcgtgcttctcatcctttcgcttgaagggggataaataacaaatttttgtcttttttattttgttagttataatgactgttgtaatatttgtttgttatttttttccatattagctctgtcctaacagagtttgttgcactggttttagcctcactgtattgtcttctcctataaataaaaggttctgttcaaagaaccataagtaagtttttacaattctttatgttcaattcttgagttggtccaaataagaattgtatagataagcatctctttcaataagcaatgaaagtatagagtttagagcgaaactaacgtttgtggtaagtgaggatgcaaaaaacgaaaacacaaccaattgaacacacacatgatgagaataagtgttaggttatttttagtattaattttagattaa

SEQ ID NO: 313960 - DNA, 1201 bp, Cannabis indica
ttagtattatatataaatatactcattttttattgcacaattattttgagctaatggaataaaaggaaaagagattcttacacgcgctacgattaccatgacaattttaccttcatctaagttatttagaaaatttctgaaaaaaaaaattgtttaaaaaattaatatttttattatattaatattttaacctgaggcactttggaacctgtttggagaagtctctaaggcatttccctcatttatggccatgattaagatacaagtgcttttgagaagcaaagaaagccatctaggccctagataaaaaggtgggtgcccaggacactaagggttgatgccttgggcacccaaattgacataaccacaccgttcatggttttgtcaatccaaatatgattccatctcgagcattattcttgttttgttcccaaaacaagatattagacttggaattaggagaaaatagcatccaagtggttgttcggcccctaaacaccactaggcaccacactgggtgcttaggtttccatttagcctggagcacagtgttcttttcatcaaacgataggtctattcaaccgacacccatgtgtactagtgatcacccagtcatcactagtgattcactgggcatcactcgtgctcatcaagcaaagttgtgaagagaacttcacgagggtaaaagaataaactaaggatagttatcacatcattcaagcctctccaaatattcctaaagcccaacaaaccatgttttgggccctaagttaacattttatctcaacctaggcacccaaaggtcaactgaatctcgtagtcacttgttacagtgcacactgctcagtaaagtggccataagtcgttgaatttgtttccaaatgatgcgattcaattggcatatgaaatatattttcaaggcgaacctaagtgtgtctcacactcttgccacgattttgacatttaggcccttaaaattagcttgtgagattatgtaggctttcctaacgaatttagtgcgatttttctattattttattgtaatttaataggacctcatttccaataaatggagggctccctaacgcatcattccaacttttcattctctgtacaaggtaagagcttctccctcctcactctttctctctagaaattgtaaagtgaagctagacttagtcattttttctctagttctctt

SEQ ID NO: 313961 - DNA, 1464 bp, Cannabis indica
aaattctaaaaactcacttgaggagtgaactcttggacaacataagtcttagagaactctactcaagcattgagatcaataacactctaagtggactagcctattaccgctgaaaggaggtgaaccactataaaattcttgtgttcgtctttggtgaatttacttttgcaaactatgtttactttgattaactattgcttgtgttcatcttgctcgttttatgatcttcttagatccgttgacaaaaacaccgcgtcaacagtttggtgctttgattgagagtagtgaacataaatgttaatcaccccttactatcgcggtgagtacgagatggacgaactatgaggaggaggaccatgatgaccccatgaacgaaggaaacaccatggcacaccatgaagagtaccaacccgttgggcccactggcgaagggacctctcgacatccaggcaaacaacctatgcctgacgacgaaggtcaggtccaagatttgggaagctcatcgtcaccatcccatggtgtacgatgaactaccaatgtccatgaggtgttcatggaaaacgaggcattgtgctagcgtttagatgaaactctcaaaatcaatagagagtggcaagaaaagtatggagcccaggaggccacaacgccacaacaaagaggaacccgcgggcatcctggtatgacaagaaggggacgaccccgcgggagtcgttcaacatgttaccctctcgaaggccaagagagatctaggtcatgaacaatccaaagtcgtgatgctaatcttaatgccataccataagaccttctcgtgagaacgacaaccatggcgggaggagcgagcgtcctccatcacaataatgaaaacgagtaacaacctcgagtcgtgagaataggaggaacaatgcaccccctcctacacagcaacaagttaggagggacgcacaacaacctactgccccacaagacaatgctacagatcccccacaaggaggctctcgtgaggagagaggcacaacatgcaataatgggatcccaccatctcaaccatctctagcacctagggatattggtgttgatgagaggagaagagaccatgttcggaaccctccttcaccaatcaggttccccccatcacaaataaggcatcctaagcctccacgtactaattcactagcaccacatcaaccagccccgagagagaggtcacgaaaaagggaagcacctctcagtcgctttccaagtaaagacttgcctcgaccccctcaaaaacgggcgagaggactaccaagaaaaccatgctcgacaagtacctcaacctaggggacatggacgggaaagacgacgcactgtctcctgtgataactatgttcgtccgtgaccaacactcagggagactggaccacagcatgcataacctcactcaccccgagacaatagttacttatcaagatctcagactaccgc

SEQ ID NO: 313962 - DNA, 889 bp, Cannabis indica
caatctgactggggggtgaattcagatcctttacaacacttcttgaaaattctgggattgtgcacaagcttgcttgtccacatactcatgaacagaatggagttgttgaaaggaaacacaggcacatagttgaaacaggtctcaccttacttgcacaagcctctctacccttgaaatattgggatgaagcctttaggacagccacctatctcattaataggatgcctacacctgtcctacaaaatctctctcccattgaagcattatttcatacaccacctaattactctatgctcaaaatttttggttgtttgtgttatcctaatcttaggccttacaataaaaacaaactacaatatagatctacaccttgtgtatttctagggtatagtatgtctcataaaggttacaagtgtttgtctaaagacaaaagactatacatctcgagagatgttgtctttgatgagagtcaatttccttatgctcacactgctgctatgcaaacaaaagcatactctcagcaccttactgtcacaacaggtttaccacctgttcattgtgtgccttcatctcccattcctacatctccatcggtgcctcacaccttatctactccctcaaattctgtccaacagcaacctaattctccaattattcctactattagtgttcaaccgtgcacccatactgatgctgcagtaccaacagttcccagtcacaccagtagcaatactgctgcaccagtatccacaacttccagtccacagcctacatctctcccaactatttctactcacccaatggccaccagattaaaagctggtattcgaaaaccaaaggctcttttggctgtttgtgaaccaaaaacagtcaaacaagcccttcaaga

SEQ ID NO: 313963 - DNA, 492 bp, Cannabis indica
gctattttattgacactcctataagtcactttgtaatgactcatattctaacttttgtatatctttgactagataattagattgttgactaaaagtttctctgcgtcgacgagtgtcatagtgtgattctaatcactactttaaaaaaaaaaaattaggcatgagacgaaaatttctaactcaaacccgactcatttattaatcatgctaaaaactaaaattcaatccaattcctatgatagcgagttttcctaacctaatcatttaactttaattaacacatttatataaagtttataacctcttcacaatttttatgtaatattttataataaatataattgtacatattttaaataggatattattgtgtcattttcaaattgagtgtatctacccaaaattaattcataattcgtttaataaatgggatattcgtgtaaacctgtttattacatgcaaattttaaatcgccttatcatatctatttca

SEQ ID NO: 313964 - DNA, 1777 bp, Cannabis indica
ccatatttcctgaagctgagggtatggggacaaaaggaaagattactcttgaagaaaaacatcatttgtttatatctgaagctgaattgcagatgcatgaagctcggagtccactatgggcaaaacccgaggtatataatttttgccattaaattttaatgtgcgactcatatgagccctttcatatgtcatttgatatgtttgtcgttgattttttcattagatatactttcagtcgttggtgatggaggacattaacatggataaagaaatttcttctggtggagaagttgagatagaaagatttcccactcgtacattcgaaaccagatcaaaagacttggttccagtttttgactacttccagactatcaagtaccaaaagatgaggtacacttagtctgggttgtcttttgttattattctttttcttgctcaaattagtcggagcttgtatagtgaatgtatgtattgttgcttttgttttgtatacaggactcatggtatagataacaataccaatgggaggcacctatatcaaaagtctggggtgtctgaaaatggcagtctttctcacagaagcagctctgcttcgctcgactccttggctgacggtggtgctgtagcggcagatcttcacaatggcattgaagaaactaggtgtgatggtctgcaggcgccagtagcaactgagcgctttgtaaataccaatgacatctcaaaaacgacaactcagcttgagactgtaaataataaagagagcttaagaatggaggctcaactcaagtatgtaaataataacatagaaggcctgaaaatggagaatcattttgatgatgattgcgacgaggttgattagaggtatttttttagtttgctagtgtagtttttgtttcttctctttggttttccccacactgggaattccagtttttatgaactcaattacagtagttgtcattctctaagaaggtaattaatgttggcactttttatgtcagatgtgcagatattcttttattctccgtgaaggttattaacagtgtttctactactatgggtgcattttagagaagccataggaggcttgactgtgttacggaaaattgtggatactatgttcttgggttttatcttctgttgcccttgtaaataaatgccactaaaaaacattaccaataatcatatataacatgtaaataatagcatcaactttgcacatcactcttctctttttctttttattacctgtttatctatacttattttgctactttgtccatcctctatatagttgaagattcaatgtttgttttctactttgttgaaggaaagttcgcaaccttatagcctttttttaaagttctgatttttctcgtaatggcaatgtattatttttagtttttgttgaagttaaacccttaattaataacaatcaaagtttaatacatcattaacaattattggaaaagcatcaatcaaacaagttagccatccatgtgcatgcacaattaattaatgagcaattttaatggccgtatatagaacatgaactaggaattgaaaagcaaactaataatatttttaactaaaaagtaagggtattcataaaatagcacgattcaatccaatctaatctgcacttgtgtggattagataggattggaaaatttaaaatccgcacttgtggttgattgacatgtaaaagtaaccgatccaattcaatccacacttatttataaagaaaaaattatatatataaataacattttaatgt

SEQ ID NO: 313965 - DNA, 742 bp, Cannabis indica
tagttatccagatttctaacatgcccaaacactggattggacaaattaacctgtctaatccaatccagtcctgcgtaccaaacgggccctttgtgttaggttagggaaagttgtgttttttaaccaaatacattatattatagataatagaagagatttgaatgattacaaatatgtaattgtggtggttgtatttattttagttgtttgattattattaaataattgtaattaatttaaatttaaataaaaataattaataaattattttataatatgatattaattttatttttatttatttatttataaataaaaaatatttataaacattagttttaaaaatgttttattaaatattttaattaaaaaattaatttattttaattatataattaattataattattttgagtctcttagtaacttattatagtagattaaccatagtatttacatttttaatataacaatcctataaataatgcacgagtagtgctaccgtcaacctcctgttacaatctcttagtcaatgtccacgcccgaaaatacatgtcgaaatatttttttttcaatttttttaaaacaggagtgttcgttatgcttacaacatcatttctgtaaatttttgaaaaatttacgtagtagtttactagcgccgaaaataacgtttaaaatttttttagtaacgcgcgtggtaaattaggaatattagaaactactattttggttaatgtaaact

SEQ ID NO: 313966 - DNA, 2681 bp, Cannabis indica
attcctatattgtctatgttcttcttgcaattattaattgttttaattttaatttcatgttatttttttcatatgatactattcttctatcttttatcatagattagttgtgttccttgggctcctgtggatgataatagaagtacaaccgcagagcaaattagattaaatcatgactcttctagtccaagaaggaatgatataaggacaaatttgcgaaaaagagattgaagtaaatcataattcttctaatccaaaaatgaataatgatgaacacactgttttgttaaaggtatatttttattttcttatttcatatattattatcttttactattttcatacggtttacaaatttataaaagattttgtgttttgcctcttatacgtttgcagaatttaatgaaagagagtgcttcacttaaagaattaaatgctgagattagagaagaaaatgtcaaaataaagaaagaaaatgctgaaattggagaagaaaatgctgaaatcagagaaaaaattactgaaataacaaacgaaaattgtggattaaaagatgaaatagctgcagtgagaaaacaagttgatgtgtttatgcaatattttacaaatcttctcgagttgaagacaagtttcaaaaatattgagaaacttgtattatggttagcggagaatggtggtacaaagcagagaacttgtggagaaaaagagaatgctaaggaaagcggtgaagatcttgtcattttaaatgaaagtaaaaaaacttttgcccaaaggaatttttaagagtgcacaaatgaattgaaatctagtaatattatttttagcgatcaagattgtgatcttaatattgcagagattctacaggtaaattttttgaatctaattcaatttgaatattcttttatcaaagttttcttatattttgcaagtatgtataatatttacaaaatagccatatttcattacgctatgttttataattttacctatcaaataataatgatgtgtatcttattttcatttgtaggattctaatgtaaattcatcaaatgaaagaaggacaacaagacaatgaagcaaacgagggatctagaagcatggatcatgttaatgatgaagattataaagacgttgtagaggcaaacaaatgtggaaaaacaataattgagagcgacgatgatattccaaccttcaatcttttatctcaattattttcgaaaaatgaaaatgagtcgttgtgtgaaacattaaaggtgttacacagtaaaagaaatgggaagacaaccttaagccgctatcttatttctctatttgagtcattaaataaactaaaggacacaagacaacgtgatcactaaagactcaacattcaacaagcatcatttttttgtacttcatatatgtttttttctagttattctagaacaaaagtacaacttctttattaaaaaaagtacaacttcttagttttaaccatttttatagtttcttaatattagtttcatttttttgttatatacctaaggaatgcttaacacatttgctttggaatagctacttgattgaatgacattcaaggcttactaaaaccaattgagtaatacaagataacaattttgcaaaaaaatagtgatttctatttttaatgctttaatataatttattttctacgagtcattgtctaaacaaattctttgttgttaaatgacacatttttttgtttgcttttttgtacaatcaaattaagtttttattattatattttggtaaactcagtgtcttgttgcttattgcagttgtctaccatatttggctaaatagaaacaaatgtacacatgataatagctcttacacgattagtcatatagtcaaggagaacaaaaagaattgtaaagtatagattgtatagctatagacaaaggaggattgactccaatagccaaaggctaatgagtaggctgttaacttgattttttggctgctgcccgagcctctgctttattgtggggctttgtttgaaacttacttgttgattaatgagaatccttctcctttgattaaaaaaaaaaaaaaaaacttagtgccttattttaattttatagttcaattttattttccccactttctttgtatctattataattagtttgatcgtatctaacttaatgttatagttttatttatgggtgtgaattcataatgtttaccttttagaagcgaattggtggacttactaaaaaaatatttaaaaattaaatagatctgaatcaatttctctcaattaaatattgcattatctcaaggtaattttttttttgtcaaagcatcattttattcattggcttgctacgccctttgggcagcttcagactaaaaactagttcttgaagtataaaatttgtcttgatacgaattgtatgatgtgtggttctgctaatgaatcaaaacctcatttgttccttaattattatctaactaattggtgcatctgtgagattgagaaaaatgtattatattataggattgccttattggcattaccaagatggatttcttttgtaaaattaagcaaattcagcaagtaaatgtttgcttgaaattacggttaacatgtcctttttaagtaaatttagtgacttaaataaggtaattcaaaatgtatttatcattaaaatggtaaa

SEQ ID NO: 313967 - DNA, 758 bp, Cannabis indica
aacagtacgtacccttactccccgtttctatttatctatttaaaaaagaaagaaaaaaattgcttaaggggtactatagttcttttcataaaaactctgattgtataagtaccaatccggattctcctctccccaaacgattgtttgttctaattctcattccttaataaacaatcgatttgttccacaactctttctgactctctggaaatcccaacgggattgcccacaacactctattctcctctagttttatcaaacacccagttcccaataactagtaaactctcttttctggaacctagaaatgctgcaattcaagactttaaagaataaaatgtggatgttctcttactgagatcgcttcacaaagtcctcttgtaaagcaacaccaaccaaaaacctttctcttcatccacttaaatggaagttatgaacaaacccacaaaaagatccaccaccatcactatcttcatactcaatgacaaagttgcagccctgagatctccacttcccaaactctctttctggtttgccccaacaactcggccacctggttcataaatcaacaacaaatttaaatcatagattgaaagaattacagaaagaaaaaatatatatattaataaaattagttatatttagtaacaaacaagttaatggcttcttatagtttctcaaacatttcatacgggtctgattattccagcttgtttgaccctttatcccatactgctgctggatttaatgggatattt

SEQ ID NO: 313968 - DNA, 1450 bp, Cannabis indica
tagtattatataaaaatatgatatataatccaattcaatataatacaatacaatacaatacgacctaatacggcgctccaaacgaacccttaaagatttattttacataatctctattttcctttttgcctgattgtaatgtattttgtggtcttgattgatggaattgcaggagtattaagtgtgtgtgaactgagtattatgtgaatggttagctatttttttttcttttctcttgaccttttttgtgttagtatctgtctttcaggtaagcacttgatgctatgctatgtttcgaattggataccaacttaagttctctggcacttaatagactttgaattgggtatatagtatctaccttttaggtaatcatttatagactttgaatggtctcacattcattgtttgtggctcatgttttaattttgaatggttcactctgttaataactaatttgaatgtgagtaaaatttaagtgtatgatagtgtttgagttcatttcttttgttactacaggtttaactacttgaagtaactcctcaaattttggtaaagatggggttcccattgtgaataactgtccataaaaacctgtgataatcttgatcatatctttaactttcgagcacaattcattatccctatttaaaaggcctaccatgaaaacaaatattaaaacttaaggaaacaaaattaatgttacatagttttaaaaaaactttctcaattcacaaacgccaaaactatatactatccgagaatcctaccaaaatatactatgtaatttatttacattattcttcattgaatttttattagtaaaataatctttaaaatttcaaagacaatttgaattaaattcacgaaaattttaatcttgtggcaataaaatttttctaggaaaatttaatttggtcttttatgtgtttagagtggaaacacatactggtgttataatttgtaaaataatacccattgaaacaaattttaaaaacattaatttataatacaactagatctaacattttagatccaataactattgttatgattacactagctttatcaaattgtagaaaattattttttattttatttatttttttaatagttgtattcaattttatcaaaattgtgtatatgcctgcatataatttaaaaattttcctctttaattttatattataaatattaacccctagatacaaactttaactttaaaatattatttaattaattaattctatagcccatgatttagtttagcatgttttttctattgaaaagagttatgctagttttcaagtacttgttacaccaattacaagaatgacttcataaaatacaaaattactgaacttaagttcacatttaatagaaaacaattttggtattaattttaaactatacctatccacatacttaataatattataagattcatctt

SEQ ID NO: 313969 - DNA, 707 bp, Cannabis indica
aaaagtatggttctaaatttattaacttagtgggtaaatgaagtgaaattccttaagatttaaattaattataaatactaaagttataattacaacatctaaatatgtattaatggcaaatactaaagttataatagccttgtttatgatatactataaagtaatataaaaaaaaaactcagaattataaattcaaattcaaaattatgtgataggaatcaagaaaaagaaaaaaaaactaaatgaaaacaaagaaaacttaataataataaaatatatataagcttcaacaatcttagtgttatcccatttatttgcaccaagacgtggcaatagatatgaatgacacgtgttccatatttccgatatctgggaggaaaatactcctagcagcccaattatagttggtcaatatatgtagcgcttgaatgcccgagcaagttggtgaggtagatgtccgaccaagaagcagatgtgcctatgccgggcaaggcatagaagatggcaatatcggagattaatctcgttgcgtccagacacgaagataattcctataatcacgagattgagtcagagaataacgacaacatattttagtttcctatttcttgaattgtaattatagaattaatgtgttttctattttttttcattataagcaaaagagaaaccatccctcatgtaataagtgttggaatatattttac

SEQ ID NO: 313970 - DNA, 652 bp, Cannabis indica
  modified_base (38)..(38): a, c, t, g, unknown or other
ttcaatcatatattatgtatatttatatatatatatanatataggtatgtataaagaattgtatggattagtttgatttgaaccattaacgagaattctaaaactgtgattgaactaaaaaattgtatcaccaaattcatttgatccgaattagtcgaggtttgaaacgtgttaacaattttatgaacaaccattgatctaactaaataggccatcctttttttaaaagcaatgaatacatcattgacttctttgatcatttgggcatgctcttagttaattgttcttttagagcatctccaatagttaaaatttaaaagatgcttgcttatgtggattgcttattttgcaaaatataaggatattatatcattatcgataaataaatgctattatagaaaattatattgatgccactatataacattgatgctatctcttttaaaaaaaattaaaggtaaataactagtgtgatcatatttataattaaaataaataatatattaaataataatatgtaatattataattatagaatttttgaaggatgttatactattggagtagttttagaattaagagtgtaaaaaataatagtaaaaaaaaatatattaaatttttagatgatataaaatttttaacacttttaaaa

SEQ ID NO: 313971 - DNA, 1416 bp, Cannabis indica
taaagataatactctctctctcttaacccctcctctctctgtgtgtgttcgaagaaaccccaagaaacacaagtaattttcagatcaaattcaccctaccagcaagattttcagcagaactttagaaagaattggaaggaaaagtaggtaaacccagaacctattatcttgttagctttgaagagggaaagtttggcttttatgcatgatttttgagaattcgattccgtaagaatttagggatgttagaaattatttttaaagcttgagtatagttgtttgtgattgatttgaaagagtgttattagctgtagcttgtttggagtgagtttgagttttagaactcaaacttagctcaataatggtggatttttgtttaggggtttaatgatgcatttgagtgttgaaatatgtttagaacttgtttttaagatattttgaaaagtttgaccatgtttgggttataactgaggaagaaaattttgagtttttgaaatctacagcgaaacggtttactgtttctgaataaattgggtaacgatttctgtaatgatcatttaattttattatgagaattagcatataattagtatttatgatccgaaatatactttaaattattatttcaacaattatggagatatatttgaattctaggtgtattaattatgttatatataaaattttatattttacatattttatgctcggtagtaatggaatgcgacgatttggccaacaaaatcacttggatatagttgagtatcttagaattagcagagaaaagtacttaaacatttggaatgtcgagagtatttagggttgtggttttgcactagtttaccctagattatttgggttacttcatggttaagcaagggtaaaattgtcatttttcctagattgttatcatttaattttgagtggaatgtatagtaattcttaagtttaattaattatatataagttgaatatagttagataagtcatacttatccaaaaactaaaaaaataaattcaaaccttcctccttctctctatgcccttagggttcggccacaagaaaaataaaggaaaactcagggttttccatcaccttcataccagaattcaagaggaaattcagtaggaatccaaagattttgatagctaagccaaggtaaatcctttctctttgttttatttagtagaaagtaaggttttcatgcatgtttttaaggttttgttattgtttgttttggtttaagtttggcaatgctttctagagttatttcttagataattatgttgttccaagctagttttgttagttgttgttgtgtttgagcatgagttgagctttcaagctcaaacttgactcttaatggtagattttgtttttgatgcttgatggtgtattttgttgggttttatgcc

SEQ ID NO: 313972 - DNA, 1437 bp, Cannabis indica
atcaattatttaagctctcttcaactatgtatatagtcccatacctacatagcctaaaaatcatcacacttgaccttccccagacgatgtgggattgcacagcttacccgatatttctccttacggatcacgggactactgactgtcacaataacaaactcatgaaacaaatcaaaataaactatttatttagttgattgattcaataaacataaaaaaaagtctaattttctatattcgtgtaaatatttaaaataatttataactaacaaaaatagaaaaaatcatgattttgcataggtttattaaaaacgtgttaaatactataacctataaaattttatctaaagtgataacttactacatatttgatgcagaaattatattttagttacgtaaattgaaaaaaaaaaagttttaagttgttgtcatcactatatttcatttgtaattgttattatattcaaaattattttaatcaccatatctcacttattagctactacattcaaatttattattatcatcgtatctcttttatattctttcaaacttgttgtcattgtatctcgcttgtaatagacaatgcattcaaaacagtgataattatatacatattagagataccaaaattaatttagggaggaatgtgatttatattaacttgttattcctattatataaatatatataagtaattatatagcattttgtatttgaatagtggtgtacgtttacagtatttatattaggttgtaatttattattagaaaataaatagttgtagaatttttttccaaaattatatttgagtgctttcttaataaagaattaagaaaataataataataaagcttttttttttttgaacaaataataaaataaaatttgttgtataattgatagagattttagttttatcaaaaaatttaaaaacaaaaagagaataataaaataaaatttgttgtacaattgatagagattttaatcttattaagtaattataaaagagagaattaaaaagagaacaaataatgctaattaaagagattttaaaactcatatctctttttatatatatagataataaaatactatataataatattttaataacacatataaattcatatattttaatataatattatataatagaataagattaaatacaatgtaatgagcattaactttagagcaattattagtgcagacaacattaatgttgttgtttgcttgggccatattgttgttattatcaatttattaataattacaatagctaataagaacacagaaataaaataaaataagatagttatggtgtcggtagaggacaacattttattaaggctgttcacatattggtttggtctggatttttatattttttttttgaaccaaacagtataacgattttttgaatattggaaacca

SEQ ID NO: 313973 - DNA, 2788 bp, Cannabis indica
tttaaagcctaaaaagcctcttcccatttgtcaatctattaaaacttcttgtttccttttaaaatctaaaaaaaattatctacacttatcagaagatcgtgaaacaaaatgatttaaaagttgcggcattaccagtgaggctttgaacttctttaagcttagttggagatcccatctctactaagactttgatttttgcagggttcatttcaattccacgttggttcaccatgaagcctaaaaatttcttagatctcatgccgaaaatgcatttcactgggttgagtcacatcttgtaatgatgcaagattctaaacatcgagtttagatgtgcgacatgatcaatttcttgtttggatttgacaagcatgtcatcgacgtaaactttcatggtttttcctaataaattagcgaacatcatgtcaatatgttgctgataggttgcacatgcattaataaagctaaatggtattactttgtagcaatacagacctcgatctacaatgaaggaggtatgctcttggtctggctcgtacattgtgattttgtcgtacctgagtacacgtccataaaattgagaagttcatgacatgtagttgcatcaacaagtctgtcaatgcttggtgaagaaaagttatctttcagacaagctttgtttaaatttgtgaaatcaacacatgtgcgtcatgtgtcattaggcttgggaacaaggacgagattagctaaccagttttggtagaatgactcctttatgaagccactcgcgagtagaaggtcaacatcttctttaagtgcttagtacctagcagggtccattttacagtgtttttgtcgtatccttgcacatctgggtcaatgtcaatcgatgacacatgatatcgcagataattctaccatatctgaatgtttccatgtgaaaacatccaaaatttgtttgaggaaggtaacgagcctttctcgctgttgtatgtttagtttagaactaatttttaaaacttttaaaatgtcagaagagtcaataggtatcgaatggtttcttcaactggttgtgcaatgttggaatagtcgaggggcggtggatcaagattgagtcttttgacatgtggaacttcctcgattcgggggagcttccagcatataaatcacattgcatgttttcttttttgcgatcttgatcgctaggttgtaacattctcgtgagttagactagactcatcgcacaaatcctgcactagtgggtgtaagaaatttcattgtaagatgatcaattggagtaaaaaatttcatctcctttgaaattggccttcctatcactgcgttgtatgccgaatattgaccaataactgtgaaatgcgccatagatctcgctattactggtgtagtttcaagggtaatgggtaactttaccatacccttgatttggatggtatctcctgcaaagccataaatgctcgatgtgatgggtttgagatttttcttgtgcaatcccattttcttaaaagcctataaattgaaaaagttaatcgagctacattatcaactaaaatgtggtgtacattgtcacctcctatattcgcgtctatcactaatgcatcgacatgtgggtggtgcacccatctggcatcgtttttcatcaagattatgtcattgcattctttttttgaacaatttgactgatctgtcggtgaggttgttgacattggtcaacaacttctcttttgcttcttttgcatatctttcacgcgacttcttcaattctccgccaatgtgcgcgcctccgatgatagtgagaatattgcaaggagccatggagccactcacatcttcgtcacggtttccaccattatttgcttggggatttcgatcatctgtccgtacttcattcttcttcttatatttgacaaatattccttgacgaatcaactctttaatttcatcatgtaagacccaacattcaagagttgtgtggccaatatctttgtgatacttatagaattttcgcgtgtctctcttgtcgcggttgcccctgatgggtggtgattttttaaaaactcatttgtgttcttcgattgcataaatatggtcacggggaactgctaactcagtatagttgacaaatcgaggacctctcttgcgtttgggggaactttcttttcgagtaggagattttgctaatttcagactacgacgtcttgctaggctgcgtctcttgggattgcatcctctcagactctgttgtcgaggacttctagtatgattttttgatcctagagattgcctcttttattttgttttttcaaactctgagagagaattctctatctgcttatggagctcgaccatggcgaagaacgccactaaagattcaagtcatcatgcttgtattccaaaaatcaaatcaaggtaatacacttgtaattaacatgtatacaaaagaagactcggtagctttctcgaccttagttacttatatattaaaatgtttgaaataactttgtaaaccctcaccttcttcttgtttaatgttggacagcattgtgtatagtgatttgtaggtcatggtcgcctagaagtgtgccaagaataagtctacatagtctcccaggtaaaaattgaggcttcgggtaactggctaaaccactcgtgtgcgttatcttccaaggttacggcaaggatgcaacacttggccaattgtgggacctaatcgacctccatgattgttaagcaaaaatttcacatttagaatattaaaaataaatacaaaacacaatttcacctatgctgaatt

SEQ ID NO: 313974 - DNA, 1033 bp, Cannabis indica
ataaatatatataaataattgaatttataaataaaaaaaattataaacagatatatattaacaattaacatagatatttattagttatataaatctcaactttaacataaaaaaattattatttcaaaatattatatcatacaataaatttttatagggatctattacaagtttcaaaaatataaatttatacaaatatttactaagaaaaaaaataattattacaaaaagaaaaaaaataaaaaaacagtagttgaagatgcttgaaccaccgatcggaagacgattaggagccatgtccaagccttgaactactatcggaccattgagccacctcgtcgaaaatctaacgcctctaatcggagacgccttgcaccgcaccactccaccatgttatcgcctctctgtacaccgagcggcgcagcgcctccaagcgtttcttgtcgaactccgtcgttccacaaccacggccggcatataccagatctggctcaatcgcttgaaagagagattacgatgcggaggtgcgacgtcttcaagcgactggaatagagaaacttcatagtaatcattatatataaagagagtgagtgtgtgagagatgagaaaccagagaacaaaaaaatataaagagggagaagatgaatagtaagaggaggcggctagggttttaagtgtgagtggtaagagattagatttatatatgtaaaattaataataataaaatataaatataaaataattttagttagttttttatgtactgaaaatataaatacaatattttatgaaaaaaataataaatataatatagataattattgagaagtgggaaaggacatagggagacgtgaagtgtttaatatttttgtataatataattatattattttaataataataatagtatataaaattgaaaatagagaaagtttgaaagagttgggagttgtgttataagttatagaaagttaggcactatctatagtggtgccaaactttgtggtgcctagaagctattattcttgtagtg

SEQ ID NO: 313975 - DNA, 887 bp, Cannabis indica
tacaaatgcaaccacacctgcctaattgctctagattaaaccaaaaatatatactcaacataattcaagcatcaattaacatcaactcatccatttgctcaaaattacattctcaagtgaattaaaaccttttcaaacttcatctaatccaacccaaactgaacaaccattaatctaagctaaaagaatctaaataatccttcaatatcaaagcttaaaacaaccctagactcaagttaaacataaaactttgaattctcaaagaaaatcacccatacattctataaacttaagaaattcaaagataaaagtctccaaatcttacctcaagactacaccacctctaaaccctgttaattcagccaaattaatgagaaagattcccttgttgttgctggtattcatggccacgaaagagaaaaaaaaagtcagggataagcttaaggtgataatccttttatttccttctaattcccaccttttcctattttgtttattatgtttattgtatatatttttttaactaaataacctagtaataatcagccaccaaactacatatgacaaaaaaagtacatatttatcctcaaaatgtccattttgccccttatgcaaaccctaagggtattttggtattttttctaacttatctactaaaccgataactcaaaactctaaactagtccgatataaaatccaattcaatttcatcttttattgtcatgacattgctaaccttcccgtcaagttccacaattgttaggctcgaatatatatattattcgaattatggtatctacgatacccacatattttaacataatctccgtaattaataaattacgctttacttactcatatttacctaatcaactcataattagttt

SEQ ID NO: 313976 - DNA, 1216 bp, Cannabis indica
gtttaaattgcatgtagaaaaataaataaataatatataagaatggaatatatatttaatcggttaagttttaaaatatatttgtattatatgtgttagatttttaaattactattttttatattttataaaatagtaattggatgtataatttttttaaaattttatataaatatgtggattggattggattggttaattttacctatcaatccgcacaagtgtggatctttgattttttaaaccaatcatatctggattagattggattgactattgcatgaacactcctagtaaaataataagttgttcgatattcttttttaattgttttataatttatttatagttgatttatagtagtcattaggttaattttctcgttattttttgttgttttataattgacttatagttgttatgaggttgattttttgttattttctaatttttttttgcactttttaattttacttataaatatatatttttataattttgaaattttaaaaatgtatttttaaacaattaaattcgtataattgtaaaaaaaaaaaatataaatcgtaaaaatataaataaagcatatttatgtaaaaccgcaaaagaaaggagagaaaaatgaaagaaagataaagtctccaacaaataaataaaagtaaaattaactaaaatagttttaacaaaaaaattattatattaataatgttaagaataacagtataattttattatataccttttctttccttcttatataccaaacaacaaaaataagaaatatattttcattttcttcattctaattttctatctcttaaatctctttctttccttgccaaacatagggttagggttaaggaacacaaggactaacattcgaacaacaaattaactcatcttagtaagtagatttttacctaaaatttaacttatataattattgtatcagttattctatcagatatttacgctattttttaaaaataaaaaataaaaccatcccatcttagtaaggcacttcaatgcctaaaaggttccaacaaacatttgcattttttagcatttccaaaaaagtggtattatattaacaacaattgagaactatattttcttcataatctatacaccttttctagtaaatattataaaccttgtttaatctcaactcaatcagttacaggtatacaagttacaattatcacagtagtattca

SEQ ID NO: 313977 - DNA, 1050 bp, Cannabis indica
aaaaaagaaagaaagagagagagagtaaaagattgttatcgaagatcacaaattctctctgataattattcttttttttttaatttttattttaaaatttaaatttgtttgtgttgtttgtctctctttcttttcatttcattttctttttttttttcttttgtctttgatttgaaatgaaatctttattttccatttccatgggtgtttgctcaaagcttccttcttcttcatcttcttcctcaatatctcgcgagataataaaaaagcgtgaaaatatcgcgagatgagggaataatacgtaagcatgtgtgagattttaaataaatataaaagctgtaaagtgaatttgaagggaacatttgcgtatggtaattagttgatgtttacggaaaataaataaataaataaataaagaagtggacatctcaatatttatgatttgattaaaatcaacggttgtgattaaaaagagagttgtgggacccacttcacaagttgtgtatttgggtagggaccactatatgggttgtttcactttgattgaggagtgtgacctttgatagcatgaaaaggtgtcagagatagtaaaattaattaaattttattaattattatttttttaaaaaaatatacctaaattttagctataccaatcattgttttgattatgagttaattaaatattaattttaatttgttaaattataatttaatctatgtgagatgagttattataatatttacgaccaataataagtgaaattatgagttatttatagattaattgtgtttaggaccaatttaaaaaaatgaattataaataataatctatttgtgagtgtgttgcaatgagtctattaaatgatataattttaagaattaggttctaaatttcacactaatttgattaatattattttagaaaaagttattttgagtctataaccttccaatgtatataatttactaaattttgatattcatcaaataatactctctgaatttttatactctctgaatttttataattgttaatttttttttttg

SEQ ID NO: 313978 - DNA, 1503 bp, Cannabis indica
ccattctttttgagtttagaaagtacgaaaattgccattggattttttttattttattttatattttttgctaactttttctttattttaagagttttttttttttttttggaatgaaattaataatgatgatggtagggtctaaaagagggttggagctcaaggctgatgatatgaaaccgctttgcttcatttggaagttgtgccattatctgcggctctctatgtgctcctaaattctttgttctttgttcttctgataactttaaatttattttatttattttttgggttgtcacttttgaaaatttggacactaggatcgtcgaccgcataagaagtaagactttggtagttagcttgtgtactcaaatagtacggaaaaagggttttgaattaatcttcgctttctaattaataattgaggagtgctaattataaccatttattataaatttttaattaattgcaacgctcgaaattatatgacgaaatatttatttttcggtattcgttaaaattacagtatcatctctataaatttttgaaagcttttaaataatttacaatgccgaaaatagagtttctgatattctagtttactacgcgtgttcaaaaaaattcaaacgtatttttgacattgtaaactattcgaaatgtttcaaaactttacagggatgatattataagcataacgaacactgctataatattttttttaaaaaaatctgacatgtatttttaaacaaaaaattaactaaaagattataataggaagttgctacacctcttaataatttaatcttcaataatattagattatctaatcacctattttaggtcttagatacatttaatctttagtgttcttcacataacttactctatataatgacagatgttatgcaaatctaatgtgccaacaaatttatacatatatgtacaattcatttaatttttttgagagaagggatgcccttaggatagaggatagactcaagattgcaggggtcatcaccaaatcaaattgcagcttcatctagtcccagagctaactttgccaaattatggcaaaagtgtttgccgtgcgtttaacatgagagattgtggcattggggaggtgagataaagccaatttaatttgcttgataatgtctccgaagagggagaggtcttctctgctggttgctaaggcatcggtgatccttttacagtctgtttttatctgatggataggaaaagattcttcaatgcactagagcagcactttgagggtagactttgcttcgagagttgcaacttctccaccttctttatatggaaaaacaatcgctgctacaactccaccttctttatatggaaaagcaatcgctgctacaactccaccttcactgttacgaattataccaccaaaacctgttgtatgatttgattgcgagcatgctgcttagtgttgagcttgagaagacctggtggggggagtccaattggttggaggaacct

SEQ ID NO: 313979 - DNA, 2794 bp, Cannabis indica
atgcccacacctgtcattccaattacaattagcacaaatgccacactgagatataatcataataaaacacacaacaaaccattccaagtgaaatgaaatcacataaattattaaaaatacttaaattgaaaatgtctatactttatagtagaactgcaagatccttgtaaatactataccttaagtgcccagttcaaaattatttaaatttagtttattatctcaatgtcaaaaattatggaacaaagtatactggccctgctatatacaatatagacatacacaaaatacaaatataaaataaaatttaattataagaaaatttacaattatttataatacaattggcattgctgaaattaagctttgaagcaaaggcattatatatatttatatgttggggtattgccaaaggacactttaaggtatctactatctatgtcttttctgatgtggtatgctattgttagtataaattaatatcgaattttcctaaattttgggtgttgaaatatggctatttagaatggtgataaacatacttctaatttgtaattaccattaactatcaatattttcaaattaaaatcgaagcacatgatatttaagtgcataattaaagattacagggtgcaatttattaaatgtacaaaataaaaatatactttagtttatctttagtattatttatacatgtgggcaccgcatgcaagacaatacaccaagtcttgtccatagtcaaagaccaaattgttattgtagacaatacacagaggatgaggagaattttgtaaatgacaagcaaaaaactattgtatatatggagagtttgtgaattgtctttctactcattccagtacttatatatgtatacattacttattaactagccacgtccatcatttaattataataattaataataacatctaatgattaattaaaattaatgagtgaggaataaaagtcaccatattgatctcaacatggattgattgttagaagaagtatgtatacatatgcagttatatatgatcttaattaatcagtctttaaacatgaattataaattatcttaatagactaatgtataatttaagatcagcattacccaagaagttagagctccatagttactttatactgagatggtatttctatcaatgcttccacaaaaaattctgtttcattataagatatggggatgtctttcaccattatcgttgtgaattcacgagcttcaattattatatgtacacataaaaactaatcatcattatgagattcagagtacactaaaaaaactaaataatgataaaatattatggggtgcgaaatattatataactaacctggcaattgtcaaaagcccgagatgtaacaaagtcatcgaacttttggattaagacccaaggtacatcatctacgccaaccaaaattattgacaatggatattcactgcaaggtatattgtaattaattataatcatattcgaaaattcaaaattaattacattatagaaaagaataaggtgaaattttgtagaaataatattatactaatgatgatcataactttgcttttactattgcatccactgtagaaattgtgtttatgcttcttgtcacctatttaatttgcaaattgtattttttaaaatcgaaagaaataattaatataaagatcatatataatacctaaaacactatgaagaagaaagaaccccaaagatcctaatccctcaatgccttttcggcggggtcctgacgatacgagttcgaaaataccacaaacttcaaattgctcacaatccttgatagatccctcttcatcgtatcccaaacaggatccgttagtgtgttaggagccgaaatgaacctggtagaggcaatgcttgggttccccattggtcgaggtggaaagtggagagacttacccccggttccaaagatgttgccaacgttgaagcctcgccaccgctgccactgattctagagcgaccattggggtttagggtacgataaagagagggatgaactcttcgaggatgagagagggtgagacgtcatcgataatgagatgagggtgagagagatatgagggtctgggaatgagatgagtatattgatatatatatgccctttggtctcagtttgcaactgagactaaagagttttgtatcatctttagtgtcggttttaaactgagacgtattttttttttattcttttaagtctcggttttagctttaatgttagtttactgaccgacaccattgagctttttaaatgtcagttttaaaccaacacctaaaactaagaatactctatagtgtcagttttttaaattaaatgaaacttgaactgacactaaaagtgtcttttgtagtaatgcatagtacttctggtagttcttccggccagtttcccttagctttctcaagtcgttttttcaaggtatattttaatgttttattgactgctttaacttgaccattttcctaagggtgtgccactgcagagaaaaatcttcatgattccatggttcgcacataaatcagtgaataattggctgtcaaactgtgtgccattatccgagactatcttgtacaggagtccgaactgacatattatgttttcaccacaaagtctagcactttcttagatgcaattgttgctaatgactcgcttttgtccatttagtgaaataattcactgcagccactacatactgtactccccctttacctttaggcaattgtccgattagatcaatttcccaaatagcaaaagg

SEQ ID NO: 313980 - DNA, 805 bp, Cannabis indica
aacagaacaggacttgttttcatttttgtttcactgatcacgaccatatttactttgtagaaaggaattagtttgtgctagctcactggctgtaaaatataagttgttgtttttcatttatagaaattccagggccattttattatattagggagttttgatctctgactgtgtcattgaatgtgcaatatttgtgggtcgtgaatgtgataagcaaatagtacacattcaagtgacttgtgatttttttcagttttgatttcacttcaaatcaacaatcaacattattcaccttcactattattatttgtttcttatctagtattagtctgtggatcatgattttaacgttccctggttgaggatacacttgactagttattaaaattcagttatttttggttttatgttatttcagttggttagagctagttcaagcttttcttcatcttagttctcttgactaactctataaataattctctctgtaccttggggaaagcaatcaactcaataaaaagattttctttctctctcgttcttattctcaagttggttcatccatggctaccccattcggtgtcgtgcacctacaaacacttttgctattccaactttgatgttccttctctttgtctggatcacacggtccgtattttcttatgtccatatttatggcaccacatggagacctttgtaatagtttttaataggggtgtttaacaaaatttacaaaccgtccaacccgaataaactgtctaaaccaaactgaataaaccgacaaaaaatacaacccgaaataata

SEQ ID NO: 313981 - DNA, 2739 bp, Cannabis indica
caagtcaataccaaatatagtattgtattaaataatactaatacaatacaatacaatctaacacaatacaatatgttgtacaaaacgagccctagtataacttataagaaatctgattattgatagtgtgctttacctgttccttaccataattgttatttttttttcttagaagacatataaatatatttatttatgtgtatatatatgtttgtttaaacaaaagaaactggtcttcaaaattattattgcgctaggaaaattattttataatttttttattttttttaaatttacggttaagttgctctgatagttgctttggtgatttctatttagattgctatgtagattttaattgtaatttagattactctattggttgctatgtaaatttgtgagtataaaaataaaaaaaatccttataaaataatattatcaaattaatgtagatataagaaatgcaaacaataatccatatattattcattaattaatattaagagttagtcacatattgctaatgtgtggaaataaattgtgatatataagatgaatgagctactcctcccattgccaattagttttgagatggaatctcgttcatcttatccctaaattttaatatggtatcagagccacttgtgatccgttgtgagccagtccaaacagatactttcattgtctccccttttaacctccatttgtgacctttcggctaatgtgtgccaatttctaatgttgtggtctttgacctgtttcaaaaatctacaaatatcctgacctgtacacccacaaatttcccaatatttggccttgtgggattctttcaaatgtcacgttcggtcctatggtctcttaaaggtccgtttactatacctacacttcatgcccaaacgtgaggatggtgtattaagagttagtcccacattgctcatgtgtggaaataaattgtgatatataacatgaatggacaactccacccattgccaattaattttgagatgaaattccatttatcctatccccaaattctaacaattaagaaataatattcatttatattactatagtataccatgttttttctaacacctataataataagatgttttacaatactaattatatatagatttttttgaaagattatatgtttaagtattaaattattaggcttcgaaaaaaaaataacaactaactacaagcaactctaaatttaaaaatttattgctcattataagctttgacacttgtcaatttttagaacatattaaaaactatatatcatgaatttgttcccattaaaaataaaattataatttgtcgttcataaattaatagttatagaaggttattttttttctccggccaaacccactagctttacttgggcataagtgcggtttgatcgaggttgtgttttgttatagcaattaagtttttgttattgtgattagtcttatctctatgatatggttttaaagttttaatcttgtctctgtgacatggtattgagtgttttagtttagtctgtgtgacatggttttgttttgtttcgttattggttgttctttgttgttcgatggctcgccatcaaattgctgttagtggttgagaatagtaagttctttgcgacttaaggagttattagtagtgcagttacttaccttgcgcaatagttgagtgctcaagctacgagattgaatgaacatgctgcaacagtttctactgttgtgtcttctgagcggtagataaaactaaatacaggtgttcttaagtttaactatgatgctgcaatcattttcattctttttttttttttgtctccaacggaaaaaatattctaaatagattgcatattattattttagcttattgttattaataaatttacataatttattagaaaaaaataaaaattatttcaacaaatgaatcgccctaataaatcaaagggaaatttgatattatatgcttaaaattaatttatccactaaaaatatgctagcatattttgcatcatgcaaaatatactcacactatttttctatccaattttacccttaaacaaataaaaatcaaacatccatgtctctctctctttttctggcgttaaccccgacctagaacccctaccgtcgaacacacagacccagaacttcagtcgcaaggcctcgccgtcatcttctctcacggcctctctcgttttctgcatttttttcttctggtttaccaggtttttgcgatattttgcgatatttagcgatgtatttgcaatgatagaacaaacctgaggtcagggatgaagtttagtgatgatttgcgatatttagcgatatttcgcgatgtttcgcgatgtttagcgatgatattcgcgatatagtgaattggagatgttttcacgatttcgagacgtttcgcaacatctagcgatgtttcgcaacatcgtcgaaaatcaaaaaaaaaaaaaaatgtagaaaacaagcgatgttgtgaattaaagacatttagagatgtttcatgatttcgcgatatttcgcgacatttagcgatgtttcgcgacatcgtcaaaaaccagaaaaaaaaaatgcagaaaacaagcgaatgggtttcgccggaagtggtgcggtggtcgtgggttgtcgggtgcttctcgtggagtggtccggtggggttttgttgggaatgggtttggagagttagagaaagagagagaaacgagagagttagagggag

SEQ ID NO: 313982 - DNA, 1223 bp, Cannabis indica
tttttttttttttggtgaaatggggcagagtgtcttacttatccattaaaaaagcagtgggtcgaaatcgaatcatggaccaaattgggatccaaaatatagaaatgatggcagccaaacttggtcagacgacattcctaacttgttggaagtgcaagggattttaatttatttggttcctttaaatcaaactaaagtgagaaaaacaaaaacataaatactaaagcctaaatcatatgcccaaaagaaatacgaaatcgatttggcttcatcttttattttcccttgataaacaatatattctttttgtttagagaaaaaataacattacaatcaacaaaattattaaggaaagagtcaatatgaagaaaggatagaataagacaccaagcggatgttttcgtttgataaagaaaatgagaattgttattagatatcttagattaggtgtgttcataaaataactaatctaatacaatcggtatgattcgatctaattcaattcacaaaaataataatttaaaattctaatatatatatatataatataaatatatttacaaactcaaatgtatattccattctaatttataaggaaaatataatttaaaaaaaaaatgaacatttttatacatacaatttttttcttcttactttgaatttttttttatatatatattttatttatttaatttgtttgttatacccgaaattcagcgagcacatcagaagaagacatgtgtcgagctgggaagaataaagaactcaaacacgtaatcataatcacacttgacatagaacgcacttcagaggaacagttctccaactgatgcacacgacctgtagagaaacaagagtctcttgccaagaaatgagctaacttatttgcatatcattttacaaaacacaaatcaacaaaagataaagccaaaagcaaatttcgaacatcgatcttcaacaataaggccaaactgtgaatgcataaaaataccgctctgaatcgcttggacacaaaccaagctatctgtttccaacatgactccatcccacaaatgagttacaatccaactcaatgcttctttaatgtctattatctcagcaatttcgggttgaacacatccagtcttctccttcttgaatgcttctaccatagcaccatgatgattttgagctacacaacccatgccaaaagacaagactcgaaccaaaaaaactaaaaggaa

SEQ ID NO: 313983 - DNA, 900 bp, Cannabis indica
tcactcaactaaatttctgacttcgtcactggtcgcatgaaatgttccctacaatcaaggtaattaatggagagtttcacgatttagatcattgacctcttgtggttgatcttgaaaatgtcactaggaggagagtggatgataagaagagaggttttcggtttgagactcattggatgcggaataaagaatgtcgcgagattgtgaatcgtgtgtgtctgtcacttgtttctccattggacagtcaagatggtattattgatgtttttggatcatgcactactgctcaactaggtgcttggaataagagtaaatttggctctattcctaaattggttagggagactcgaaaatagatggatgatctacttagtgtttatgctcctttggtccatatggatgaagtgaagcgacttgatgttaaattggttgatctcttgtcacgtgaagaaagctattagaagcttcgtttgcatgcaaattgattagcattggaggataaaaatataaaataaaaaatcataataaagcttcggttctttgggggaaaagctatttaaattctcattctgtttttaacacttttcctttttcttttcttcttcttcttaattgaaaaaactctaacacccaattgcttaccccacgacccaaccttcttttattcccctctcacacactctctctcacggtgcacaatgtcgaccttctccgaccactccatgtcagacggaccacagaacttaatcccacgatccaaaaaatctcaacctcgatctgccctcttctctctctccttcgatctttctccgacccccctctatttttttcgttcagtccgactcccctccgacgactaccacgaagagagagagagagagaggaggagagagagagaga

SEQ ID NO: 313984 - DNA, 1610 bp, Cannabis indica
ttgttagacatgtagctgaccagacttatgtattttatgtctaatttgaagtatgccatttgcactttcatagctttcaatatcttgcttaacaaagctttaaatttttctttagcagttgcaattcaccaaatactatagacctttgcttgtgtattttcttgaagggacctatttgtatgcatgttgaacgaaaaataaagattaactttaaaaagttatcttattagcaagttgtttcacacaattttgaactaaaaaacgttattattcattaattggtctctcatatgtgttgttgtcgtgcaacgtacatttttttattctaaaagcttaaaaatctgaagtttggttttaaaactggtttcttggctacccctgcatggcatactaggtcggggctaccattgaagagtggtggaaactcagctttttttttatactaattcccgtacggtgagctgtacagggaccactactgaagagcagtgtttttacaagttggtcaatggtagtactttctgagatgttctccattctagtacctttctaggagaactaattccatgttctcattgtacctgccaagcttgtacgcaccattacatgtcatctctataacatggtaccgacctttccaattttgccgaaacactcttctcacaggatcattggtatttaggaatactcttcgaaccactaagtatcctacgaagaatttcttttccttgacttgtttatttaagtaccttgcaattttttgttggttggtctcttctttgttcaattttataaagggattttcccagcagggtatggtttacttcttggtcataggttatcctcctatgggatggtggttccaattcaacgggtagtataacttcacagccataggctaatgcaaagggtatttgcctggtgaccgtcttctcagtggtcctatgtgaccaaagttcctctaggagtaagtgaggccaattgccttttagtgtccttgagggtcttatttatagcttctacttgcccatttgtctgagggtgcgcaactacgaagaagcttttaataacattgtgtctgttgcagaagtcaatgatgttgttgacaataaagttgaggactttcttggaagttattgtcgctagtggttcagcttctatccacttagtgaaatagtcaattgcgactatggaatattgtactcctccttttcctttagggacttgatcgattaggtccgtccaccacacatcaaagggccaaggagactgcattagtgtgagctcatttggtggagctctcaggatctatgagaatctttggcacttgtcacattttttgacatagtccattgaatcctcgatcacagtaggctaaaaatacccttacatgagtatcttcttagagaggctttgtgtaacgccctaaataatcaggcacgctacccaaaatacttatgaaactctaatcccctaatcgggattactaatcaaaatagcgcagaatttaaacttttatattaaacagaatgaaaataaacttgtaatatatttaaactttcaaaatagttgggatcccaaaaataattacaaacttattacaagtcttt

SEQ ID NO: 313985 - DNA, 2439 bp, Cannabis indica
ttatttaattaattcaaatagttttaaatgcgtttaattaattagtaagacgatttctcactttgtattttcagtatcgtttatacgatctccacgatcagaaaaatgattttcttcttgttacttcattctgtgtgttcttatataatgcatcagaaccaacatgggaacgatatccttttttcacaaaaaaaatatatgcaatatatatatacgattataatatatatgtatctgagcagtactagattatttggtgtgatatttcgacggttttttatcgtgcaatagagcttcgatacagtatttttgatcgggttattttatcttggggacgattaggctaatagtctgcttgcagagttctaagcagtaccgcgaacgtcttaaaaagagcgacctagtccgcaactcaactcaagttttaatttggtaaattcgttccttttattttctacaacaactatttttaacaattttaaaacgatttgtttctgtcatgactaccgatgagaattttggtgttgttgatataaacaaatgtttttcgttttgagagaagccattttaaaatatgaaaacagaaaatgttatttttcctcactatgaaaaaggttgcttatgttctgacgactaataaatccgttgtttgtgatactgctaaggataatgaaaaacagaagcaaactgctgattagcaagctaggttgagaatgattttttgttcaaaaattatattttgaatggcttatctgatgatttgtatgactactataattctaacaaaattgccaagaaaatctgagacgcacttcaaaagaaatacgacactgaggaggttggaactaagaagtacgctgtcagtcgctacctcaaattccagatgactgatgacaagttagtggaggctcagtctcatgaactttaaaaaattgctcacaaaataatttctgaaggtatatccttagatgaataattccaaattgctgttattattgacaaattacctcatggttggaaagattttaaaaatattctcagacacaaaacaaaagaattttctttggaaagtccaatcactcgcctttacattgaggaggaggctcgtaaacaggaccagaaagaagaagttcttgttgtgtccaacaacaacactaagaaatccagtgggattctaaaacccactgggaaaaatttcaagaatcagagtcccaagcatgctccaaaccgcaacaataattctcggaataacaatcaaaattagtttccaaggaaccaaaacaaatagcagcaaccccgtaataagaatgacttgacaccgtttttgtgctttctttataacaaactaggtcatatggcacgcaagtgtcgaaacaggtctagttctgctccacaagctaaccggactgaagagctaccttatacaactatgatttcagagatcaacctgattggtggatcagaagggtggtgcgtagacattagcgcttctcgccatgtttgcttttatcatgctatgttcaaaacatacacaactgcaattgaggataagaaagtgttgttaggtgactctcacactactcttgttgctggtactggtgatctggaattaaagtttacctctagaaaaactatgattctcaaagaagtcatgcatactccaaagatgagaaagaatttggtctcgagctatctcctcaataaggcggggttcacacaaactataggggtagatttgtttactttaactaagaatgggatttttgtggagaaaaggtatgctactgaaggaatgtttaaattgaatattgaagttaatgaagtgaatatttctatacttgttgtgttcttttaatacttggcatgctagactttgtaacgttaacaaacgaataattaaaaatattattagtttaggtttaatccctaaattatctttgaatgattttgaaaaatgtaacttttgtagccaggctaagatcacaaaaacaccacataaatgtgtaactagagaaagtagcttctagaattaattcattcaaatatttgtgaattaacaagaaacggaaaacattactttatcacttttattgacgattgttctaattttatctatgtgtatttaataaaaaataagagtgaagctcttgatatgtttaagttattagtggttgagattgagaatcaacgtaatagaaagatcaagaagctacgtagtgattgaggcactgaatatgattccactacatttgttaatttttataactcacatgaaattatacatgataagacttcaccacattcacttgaaatgaatggtaaatttgaaagaaagaatagaaattttactaaatctattgtaaccattttacttaattctagtactgctaatcattggtggggagaaattctcttaactgtttgctatgtgcttaatag

SEQ ID NO: 313986 - DNA, 1366 bp, Cannabis indica
aaaataaaataaagttaaatatagccgaaccaggatatactacagaaaagaagtcaccaaactaaaaaaaacgaactgagctaaatcataaatcattgatggtctaatttaacacctacaatcattgtaatcgaatactatggtttatatcatgttatctgtaagctattctagcctaatccagtcaaaaaaagtacgagaatccaaacgaaaattcatgaagtaacgctgacccagaaaataaactgaatttcatatcatagccataaaaaaaaaaaaaaaaaagaaaaagaaaaaaagaagaaagagaaagaaagaaaccgttaccgattaacaggggaggaacgcccaaaacttgtttgtgcagtgggaggaacgcttgcggttccaaaaacggcgcctccgcctgagactgtcgctttataaaaatatgaagcttcttggtttggatttgattgaagaagaagacgaaaacggaaaggaacaaaaaaaatggttgctttaagtgattactcgggctgccattatttcttgggactttctttcaaaaaataaaaatttgaacttgcacattaaactctctcttctctccttaattttaaattatatttttaagataagcataatcaaaattcttcttctgcttctttcttttctattattattattattattattattattattattattattatttatttgtttaattattgttggttgttctattcttctagaaagtaatcagaaaatcaaaataaatgttcttttttcttttattttattttgaaggaaaaaaatatattgttggttgtgtggtgttggaatagtcagacccaacaacaaggtctcgttttgactttactttttgttttccattttcattaaatgtattgttattgttaatttgttcaaaaagaaaaagaaatgtattttattgttataattataaatccatttgaggaatgtcgtattttcaacggggtcgacacattctaggaagatttattgagcttatcgtcattattttaagtagtgagagttaatttatatctctttctcttgttgataatatctctttcaccaaaaaggaaaatatgctaataatattttcaaaacaacatacgatatattattagcatatttattacgatatatttatttagggtaaataccattttggactgtgttttgcaaaaattacagattgaactctctgttttgttaaatgataaaatggactctgtattttctaaaatggtaaaaataggatcctgagcttaatttttgacaatttttttttttaatacaactaacttgaaggcaattcctaatatgaatagatacaaaaaatgtaaacagtttt

SEQ ID NO: 313987 - DNA, 1088 bp, Cannabis indica
ctcagtaattgtaatagtaatagtaagagagaaggtaatgtagatgtggaaatggtggaattcgagatgcgagccgattccggtagaaagggaaccttctccgtactcttcctttttctccttttcattctcattcttcatcctctttgatttttattattaatattatcagtattttctgtttggagagagaaagagagaaagtttcttcaattttataaacagatactcactaaataattataataatctttaaacaaaacataattcttattcccttcccccttgcactgttgcttgttacgcacttcttctcttttgtttttgtttttaaagtttctgatttatatttatagagtcggttccgcgcttccttcgaattttctctttatgtttaatctttgcggatttggattgtgtggatcatcagcggtttggggattagggttttatgatccttcttgttttctttgtcagctgttggatttgaatcgttctgatgctcgaatctgtcattcgatgcacagttgaggaatctgggattggttagggtttttcatttagaaagtttctacctgcgtttcttgatcttggttagtgtttcttactgggtttgtagctcttcgtttttttttttttttttttttatttattaacaaatgttattattgtttttaattttttttttcttttattttgggaagggtatgtgttgaggattattgggatatgatttgggttgtaaatatttttagttttgtttgatcttatattgtcgatttcctctgaaatattttgtgattcttggaggacttatttctttctattcccatttttgaaaaggaaaaacaaagaagagaaaaaaagaaaaagaaaaaaccaagtcaaaaaaaagtcaaaatctgttcaaaaacccacatccatagtcgcccaccactttttatctgtgggtttatccttacaaatatttttggttaatttttacaccagagtattccataactcgagtttgagagtagattttttttttttttaacaaaaacttgaaaaaaaaaatactaaatttagaaagagttgtgaaaaaaaaa

SEQ ID NO: 313988 - DNA, 950 bp, Cannabis indica
aaggcaagcaattttctctctcaataacgtgagttgttctgactcaaaattgaaattatccaattctgttttctacatacagtataaattataataaagcttaaaataccaaacaaactccagaaaagcttgtaagaatatgtctacccaactaattttgaaagctacctccatttacaaatgaatatatattttcctttgtctctttctttactatcacagctacttgtttcttaatatacaattattttcatcaatgtatagactaggcttttttatttttaaaaaagaaataataataaataaacaaatagtttggtggatggacagaaatgaagggaggaaatattcttttggcgaaaaaaaagagagatggatggagatttttttcactcccactcaatatttctatttttggaaagattcaagaaagtggtaaaataaatatattatatattacaattattgaaaaaaaaaagatttaatattttttttttgtttgtttgttagtagaagttgtgttaaagatcaaaagtagaaaggattgagagtataatgaaatgaattgaaaagataatgtaaaatttatatttaagaatgggcatttaatttggggttctctttatccaaggctgaagtcattcttgtattgtgtgcaaatgggttaatttccattaatctaatgttgtttttaggcttattagtgatgaaaatactttttattagttactgttagtgtaattcgaattatgctattttacctgttatgaatggtggtcatgaatgttatattatttttaatattataatatgtagattaaaatgtgttaatatataatattatgtgaataatatatattaagtgtatggtctacatagtaatttggagaggagttacaatttgttgttatttgtaactcttgtgttgatcacacattattagtgtaata

SEQ ID NO: 313989 - DNA, 966 bp, Cannabis indica
tgtaattcaattagtgaaagcccaaaaagctattctcacttttatataggttatagataatttacgatgagagagtttaaaaaattattctattttatttagtacaagagttcaagtacttgtggggttttagtattctattttgtttttaatattgtatattattggaaaacatgtggaatatcagttaaactacaatgtacatagttatattttatatataaaaaattaagttataatctctatatgtaacaaaaagagatttatccctactaataaatacaaaagtatataaccctactttagaaaattttgatattagtgttatcatttattttaaaaaatatataatttttaattgattaatacaatgtagatattccttcattaaaagaaactaacatcttatagtgaaattgttactaaaagttcttcaaaaaaaaaaaaaaaaaacatcttggtgaattttgtttagcatggaagctcaagcttcaatattacatatattatatatgaattttttatgtcggtattcctttttctcatcatcccccaaaactatatattatatacatagttttttattaacatattatatatctatatatttttgagaatatcatattatatattataaatagttaggtgtttataaattaattattgctttggtcggtagtatataaaataatatccttgatgaaagtgcatatacttttgattggtatataagacatatatatctttgatctgatattttgggtgtaattaataaaaaatttacaaaactgtatgaataagaaaaacagtagctatagtgtactctttagatctcagtaaataaaatatttatacatattgatgaattttggagtgtgataattaatgggtggtttttgtttagccaccattatatacaagaatactaaaaccccacaataagagcttggttctcttttttttttt

SEQ ID NO: 313990 - DNA, 674 bp, Cannabis indica
aatattcaagaaaaacacaacaaattagttgtttttccattattattgaatagattaacaaaaaaactttaatatataaatgatgatagtgtctcttttggtcaatttttcatctatattgagtatgacatgtgaggtgttgtggtgggagtcattcataaccccacaaagcaaagaaacctttaaaacacccatttccataccttgcttataagctaaacgaaacgaaaaaaacaaatttgtagacatttatctatatttatttttgttatatattaactatttcttttttccatattatttatttttttcaaaaatatatcttaaccacatttactatcctttcaagtaaaatacactcttttatcttattttatttttcattaacaaaacaaccaagcttctctaaaaatataatggactttataatttaataaataaaacatacaatagatattataaaataggttaagaaagccacacttacattttcatagtttacaactagtttttgtcaataacttttttgagtgtagcctatttactaataatttaagggtcaataacttttactagttaggggtcttattgtctttggctttttttgaataactttttaataacatgataatgcatgatataaaattggaataattacataagacattattttt

SEQ ID NO: 313991 - DNA, 2369 bp, Cannabis indica
cattcttaagcctaaatggcatcaccttgtagcaataaacacttttgtcagtttggaagctagtgtgttcctcatccgcgacatgtattttaatttgattatacctggggtaggcatccatgaagctaagcaacttgtacccgaatgtggcatctaccattctccatgagatcagaaagcaatctttagagtaggccttgtttaggtttgtaaggtcaatacacattctccatgagccattgggtttcttaaaaaaaaaaaggtttgcaagccataccatatataacacttctcggaggaaatcgttggctgtcaacttatccacctctgccttcacaacttctgctcttaccgaatctagcggtcttctcttctgccagaatggtctcgcatcttctcgaatgttcaaagcatgacagatggtgttacggtcaatctcgatcatatcaaaatggctccatgccagcacatcctttgtcacatgggaacttcatccataaatgcctgatggaaattaccgccccaaagtccactagggttggccaccctagtattgcattgtatgcggtcaggcagtccaccaccacaaaggttgagtgcttaaaagaacttgcattatctcccctctgagggtgataggcaattgaatcttacccatcagcattaggtcatccccgttgaagccttgcaattggataggacaaggagtaggtccgcttaagtaagccctatcccctggagcaccaatttgagcaggatgttgactgagcttccattttccacaaggaccctagaaactcgtttgttggcgatatgtgtgtctatcactagaggatcattatgggggaagcgcatgtttttagcatcatcctcggtaaaggtgatgggaaaattcatcgttttaggacattgtgcaggagactgcaccagagcgcatacttccccttcttttacctcgctcagataccttttttgtgggtttcaggtacttccagcaagatggggtccacttgagattgtagccacgtgtccgtccatcggaggtagagcgagtccaggaggatatggggttcccggtccccgtgcaagtaacgctaccccagctaaggccggtaaagcagagagggtaggtaatgatgttcttggagcttgagaacgccatacccctgtggaggatttacaatgttttgctactcgagaacgatcatgtgtccgtgcacgaaccccctgtcaaggataaatgataaggattcgaacccacagtcccaagtgtcccgcctggacgaaagtttcaatctcatctttcaaataatcacactcattagtggtgtgacccttctccctgtgatactcgtattctttgttttgataatgtctattcctccctttgtgcgacatccgtggaggttttctatagtaatccatgttgcaggttgctttgtagatattttcttgagcgtctattagacttgtatactcagtgtactttaggtcatactccttccttggcttctttgaagaatcactgcaattgtggcttttaccccctcttttgttccaggaatggcttacagtaggctctgagacctcagtcttcgcttgtccatagctacactacatccagtctgagtcgccccatacctaaaaatatgggtctgcataggggcgagagcggaagtagtaggtccgtaaacagttggaattcgggatgcaaagttgggagtagtcgtggaaggagtcagagttggagttggagggactccaaaggcttgtatgtaggcgtcctcaaggtttgtgatgccttgggccttcgccataaagtcactcaaagttttggctctctttctttacatctttccccatagcagagagccaacatctaatctagattggaaggccatcagtttcatgtcatcactaaccttagtcttggcagctgcctccatcatcctttgaataaaagccttcaagctttcattatgttgttgtttgacattggtaagagaactaagttccatgtccttgtcacgtgcaacaataaactgtttgcggaaagctgactgtaatccttccatctgtcaattgatcctggagttagtagtttccaccaatcttctgctgactcggtcaaggttaaggaaaagcataagcccttggcatcatcactgactcaggctacttgcatcattttcttgtactttgccaaatgtgctcacaaatcagtccttccctcatacactcaatatgaggcattttaaagctctccgaaagtggcgtcttcgtgatcctccttacacaaggttccgggtcttcatctttcgagtctaagaggactccactttgttttttgaccaacttggttagagtag

SEQ ID NO: 313992 - DNA, 773 bp, Cannabis indica
gaccgtaattaaggctgacaattggtgttgctctatagtacaaaaaagtaccagaaaaaaaaaaaccccaacaaaaaaatagcccccatcatttttaccgaaaaccccctctatacatcaattgggggaacaaatctccgtttcatccgacggccatgattaacttaaaatctatatatgtttgcactaaaatggccaacctggtttccctcgcagtaacagtccttctaacgctcactttcttttacttttttacttttttggataaacatttccgttaacttgtataacatccgttacagtcaaagttatcacgaccttcttgagatgaaaaaaaaagaaaactgttttagctatcagcaatcatcatgtcgtcgccaccattaacggctccgtcaccgtcagggatttcgccgtcttcgtcgacccaacgttctacgggggcacactcggccttgtggcggagtttccaatcaagcgcctgacacgcgcgtgagcaataattcactgccccacacactgagcaacgacgaaattcgtgcctcctcgtctccgggcggccacaacccacgtgcgaacaaagccttaatccattcccaggtgagcccccacgtgcggcgaaccactccgccatgaaccgactggcgggatgagcctccggtgccgggacgttgcaaccgaaatcgctcagcaacggacaaccggaaccggtaaagtgccgaaactgcggatgatgagggtgctggtgttggtgctggtgggagagtgggttc

SEQ ID NO: 313993 - DNA, 1214 bp, Cannabis indica
tgaagaaaagagattttggggtttatttgctaactccctagctgcaaccttactataatcttattattttccccatacaaccttcctaaattcagctaagggccatagatattctcttgtatggatcagtatctcttggggttataaggaacttcttatggcaggtcttcgaaaatcagtgggtgatggttatacaatctcaatctttaatgacacttggattcctgattatggcaagctgaactaccttaaccacctcttagatggcagtttagtagtagcagaccttataacccctaacaaaaaaatggaaaattccacaaatccataatatcttccctgctgacatcaaccaagccattatcaacatctcgcttaccaccttccctacctccgacacccattactggtcccttacaccacatggaacctatattgttaactctggatatcacaaagcacatagcttaatccaccaacttgacccgtcaccttcagacaccatggaaactcacaaatggtggaagatgatgtggactcaaccactaccccaaaaaataaacaatttctttggcgagtttgccatggcattctcccaaccagccatagtttgtataaaagaaagtccgtgtcctcaccaagttgcaactgttgcaaccaccagtatgagacccaagtacatgcctttttcagatgttcaactgtccaacaggtataaaaattaacaactttttatacatttatatctaataatgcctctctagcttgtatggacttaattcacttggctgctagcaccttcacagctagcaacttttaattttttgcttgtttgctttggaaactatgacattgcaggaacgaacatctgcaccatcgcttcattctcacacctatcaaaataattcaatggactgaagactacttggctcattaccacaacatcaacaatcctcatacagctgcagttcagatttcatcacgacagacatcgtaccatgagacatcgacaccatcctatcacttgaagcttagagtgaatgctgctcaagatgcacaaaagcacaaaatggaattaagtatggctcttcacaacagccgcaatgaagtgcttttgactttggtgacaccatggaggggtctccacccacccttgataatggaagtgttgggttttgtgccctaaataaaacccattacaatctgattagtta

SEQ ID NO: 313994 - DNA, 2161 bp, Cannabis indica
gttttttttcatattgtatcgaaatgattttcttagtaatttttaagtaaatagttattttatcacatcaaataggaaaaatcattctattgaaatgatgatgttttaataatttaaaatacaaataaagaaatttcttcccattttattactcccaaaccaaacacatcttaaaactaaatcacgtccccccattaatatatatatctacattaataaactttcaaattataaataaaagtcttaggactattctacaaacaaaatcatgaccagtgaatcaaaacatccagttccactcacgaaaaatctttactatagaatagtacttatgtatatttgataactgaccatgatatatttttttgtcttcacaattctatgtgtttattttgtatagatggataaagcatcggttcttggagatgctattgtttatgtgaagcaactacaagagagggtaaatatactagaagaacagtcgaagagtagaactgtggaatctgtggtgtttaaaaaatcccaagtatcaatatcatcatcaactgatgaacaaaatcaagatagttcttcaagtgatcaaaatttcgagggtcgctctaataacgatcaagattataatcataataacaataatgataataatcaaacactaacattacttcctgaaatcgaagcaagagtttatgaaaaggatgtgctcattcgaatccattgtgaaaatcacaaagggattgtggtcaaaatattgagcgaaatcgaaaagcttgatcatcatctttctgtggttaacactagtgtcatgccctttggcaactgcactctcgatattacaatactagctcaggtataattgaccttcttaattataacgacattataggtcttatatgcttgcaaataattatgtaataattcatatattgatctgtgttttttttttttccctgtggataaatatagatggaaaaggaattcagcatgaccgtgaaagatctagttaagaacctaaggaaggcattattgaaaattatgtgatgtatatgtgaggttctatgctgaaaagtgtctagacacatttttaattattaataaataagagttaatattttgatatatgcttaaattattaatatttattgttaaaaattttatataaatatgagaaatttttttatctatatatatgaggttgtgactgattgtagctataaaaaattaaaatctcttagttatgaataaatcagtcaataatatattaaagttatgaaatttttaatcaatagtttctagtatggttcactgatgtccgtttttcagtacaagtaatctcgattcgaataactaatgtagaattaaatcaaagtgaaagtggtgtatataataaagattacatatgacaatgaccgatatgaataaaactatccttatcaaacatgtatccttaactataaagacctaattcatatcataacaatatagaccggcctaaatcttgagtaatcatgatcctgttcatgttattagtttctttgattcattcgttaaagtttctcagagaaaatgattcttacaacttttgttttgggaatccaataatgtggatgattgggaacatgatctacaattatgcaatcctgactttactaatggatagaatgttggttccctttaagtgttaattctggaactgaaaagttgtgtacaaatttaaatggaatctaaatattatactttcactagtaaattagcggtactaaaggataaaaaattaattaaaagggcgaaataatattttgaccaaaactaattacgaattgacacaagggctaacaactggaattgattatattaatagacactgcagtaacactcattaaatataattctacaaaactaagagttcgattccatatttatagtggagtaattatagaattaaataaatatgattatttggttgataagactcaataaataatctactttattggagcttagaattataggtctatggtcctcaaatttccaccttaaaatactttcaaggataggaataaagagttgtataatgttgttcagaaaaatcttttataattggcaatgtagtaattatttatttttgcaataaataattttttaaattaattaaataggaaaa

SEQ ID NO: 313995 - DNA, 897 bp, Cannabis indica
tgctgttttccactgtagaaaaacataggaccccaaaaatgacctaaaacaaaaataaaacataccaaagctccaaaacatctatacatgccataataaatcatttccaagcaataaaacctcagaaaacacagtaattctaaaatcaccattgttgaaccaagtttgagttcatgaactcaaacttggtcaactccacaaacaaacaccaaaaatcaaaccaacaagcttaaacaacctcaaaataaactcagaaaactgcagcaaaactcatctaacataaacagcaactaactcaataatctgcatgcttaagccaaccaaaacatactaaaaaagagaactagagttggagcttaccttaggatcacacctctagaaaccttgctaataacctcagaattgaaaaatgggagataaaatcttccctgatttttgcttgaactgaacaagacagaaggagagagacaagaaatggattttctatttttgtcatttcttttgaataaacctaattttcttccactaaagagaacccctaaattaattattccttaggtggctagttgccaacaaaagagggagccacctaaccatcatggtcaaaataactaaaatgccccctctttaaagcttaaacggtaaaatggcttaggggtaaaatagtctaataacacaacctcgcctaaccccgacattccaaatgtctagctagatcaccccgctattctaaaaatactaaactataaaaaagtgaccctgtaggccatatgtcgtattccactattaccgagcatagaaatataaaattcatgtataataaaaataacacacttaaaattcaaagatatatctatatttattatttataaaaataataattaaaagtctactttt

SEQ ID NO: 313996 - DNA, 1192 bp, Cannabis indica
aaatcacacagaacttgtctgcactcttccaccagcaggccgaaagaagagggcatttgaataccactactgattgcctgaacagcaacaaggcaatctgtctccagagtaacttcttgccaattgttgaatttgatccagctgagggcctccttaatgccaaaaatctcagcaatcttgggggaaactcggacggggagacttttggaaatgccttcaatcaatctaccttgagaatctctagcaagaaagccaaaaccaaaacagttttccgcttcaaatatagagccatcaacatttaccttaatcatattttctataggttttgtccaatgctcactttccaaaacttgattattataaacaagtaaaggatccaatcttttttgttgagcacataaccattgattaagattcgatcttgctgaaagaactacacttgcagccgagacagtcttttgattccacaagatatcatttcttgcactccaaatctgccaagcaatcatcaacacttcagcagccgaactgctacttcttgcagcagtaaccataacaaaccaacctctgaaatcactcacagcaaacgaactcgagttaatagccgatctattccagcaagatcgagcaaaatgacactcgatcaacacatgggaaatggtctctctctcgacattgcagaaaggacatgacagaggaacaacaacatgttttgtctgcaattgaactttagttggaaggcagccagtgatggctctccagccaaaatgaagaaccttttgagggactttaatttgccagaattctttccaaaagttgtcgctgttttgaacctcactcccctcattctgaagcattttgtacgagctcttaactgaataaaaaccatcagcttctctgctccaacaccagcagtcgggaacattttgttgggatagaggaatacctaaaatcagagatttatctctgtcattgaacaagtcagaaatcacctcgacatcccagcttttatgttgaatttgcatcagacttgccacagtttttccttccaaaccagggtgagtagaactgacataaggttgctgcagatcaggtatccaagggtctgacaaaatgcttgtgttcaaaccagagccaatgcgaactctagcaccagctttgatgacatctttcgattcaactatacttttcc

SEQ ID NO: 313997 - DNA, 1418 bp, Cannabis indica
accagacgtctcttcagttttttggccaattaatgctctgacttaattagtgcctcgaaactcgtttttttctcatcacgttcgacggttacacttgattacatttgatttcccaatatttacctttgggagggaactgatgcgtctaaaggcatttgaaatgattgccttttttcacctctcagcctataaatatagggctaagttttcctcataattttacttttaccaatttcttcattaaacaagactcagagcaaaaaagggtttttacttcaagtctgccgtgagatttctaccaaaatcattcaaacagcttcatctggactgagcttagacgtcgaacagtgagtaagttttcaatctccttctctttttactttgcatgtttaatttctgggtttcatatgtgcattcttgacttgtttgtaaagatagatagaaaatctaggcttaaacttcgtgattttctctgtaataatttgcatagcttcacggttcacgacgtttgcttttgatcgcacattgttcatctttcaccttgctcattcgaagcttcgtgaactttaaccttaaacccaaaaatttcaaacttttgcgttttgacttattttacaacatttttcagtcttttaatctgttgagtactattggtcggtatattttcctgtttactgttcgatatcccgaccaaacactcatcttctgtgttgtcttttgtagatgaaccttggtgagttttggggaagcgaacaccaaatcgaccaggacttgcttcaacttctgtacgaggatcaccctcgtcttcgtgccagtccgtcctcttcatgtgacggggtttctaattcaagctttgaagattgggaggtgagtagtgaatgttctcctactccagaacccgtagtgcaacactatcattactccgagcagatcgctggagagggacacgaccccttcatttgggaatggaagaaaggttggaggcgttatctgctgtccaactaaacatacattgtctggtcaggtgttgctgacactcttcctgttggccgtccaagttcgaggaacttcagcatttcaattgttattcctgctgttaccaggaacttctaaaattgtccttggatctacttgatgaaaaacgagctcagtcgcaaaccaccaacgcagcatattaacaccaaattacaagatactttaacaaaagagtcaagaaaacactattcaatgttggagacttggtgctaagacgagtatttgcaaatatgagagatgcatttgtaagagtgttcaacccgaattgggagggtccatatgtcatcgaagaagtagttagaattggactttataaattggctcgactcaatggctcactaataaagaactactggaacgtggaacatttgtgaccctactac

SEQ ID NO: 313998 - DNA, 958 bp, Cannabis indica
ggatatcaccatttgaaattcaaactcataacccctatagatgttatagactcaaatgtaactcttacacacaccataactcctatagcattaagaatttcaaataaaggtgtgtaatatcttttacactcttaatgttggtgataatggtggaggttactcatagtaacaactctccaaatgttacaaaaagatgacaagtaatatagtcatatgttacatattattaatttattacacatatttaatccatatattatattattataaataatataacaattatattatatatacatttcatataatgtgttacagatatcatatatcttgtatcaaatatataaatatataaagaaaaaaatgaacatactataataagattactttaagagaggagttgtttgcatagctacttttgccgacaccaccattcatgtggaggactttttctactttcatttacactaatgttattatagctctcgctattgattattgaggatcttaattgggcttagttaaaattattatacccatataagtgttggagagctattatacccacatagttgaccaattcacaacaaaactaaatggacaatacacatacacattagttaaccaattcacagcttcattaaaaaaaatacaagacccaatccaaaattaaatcaatccaaaaaataaaatctcactagtattcctcaaaatccacaaatcaatcaaacaagatttatataatggacaagatttatcaaacaagttaccataacgaataattaaaattacatgcaataagagggtgagtggagtgggctagctatgtccggtgcaatgagagggtaagaggaggatgttagagattttattactatggaagaaaattaagatgcattatgttaggtctttttttggcattttagttgtcaaaatattttttaattaatgtacattt

SEQ ID NO: 313999 - DNA, 1146 bp, Cannabis indica
ctgactcgggactactcaactctaagatgtttatctttcctgtcatgtgtcaaaacattagatatctacgtacaaccaaaaaaagttttatgggttaacttagttatatacaatataattattttccatgaaatattattcaaatatttattattaatttatgacaacaaaatatctaattaattataaaacctttattatctctttcttctttattttttactaacttggtggagtattctaaaaagttttacaaaataatagtggaaatattttaaatgatcaaataatcaattaatgtaatctaatgtgaacattatccaagatagtgcagagatcatgggcctatgaaatctagactcccgataaaatagatccaaaatttaacaaataaatttcgtaacttattaattactcatgactcaactatagacttaaaattgcactcctaatttcacgaaatactctatatatcaaatatagatatgttataatattgtccatcatttatatcataatgatttatggtcctctatagataatctataattaatagggactaaaggtatcattttaatcttttaattatattttattcttaaataagttagttgatttgatgatattttaatcgctgaaatgagtgctctgccattaaatactttaacttagctcataggaaattatctttttacttctaacattaaagctataaataattccttaggaaatatgtaaagaccgcctagtttaatttggaaattagcagttaattaagatttaattatggaaattatttatagatatttaaataattatttatgttgttatatttgaattcagaatgcatttttatgtcatatagtgaaatttcataattttgcattttcggtgcccggcaacatggaacgcggtgtatggctcagtaaaatcacaatttagtatttcagtatagtgggacagtttatttagacattgggaatgtcaggattagtagggaatttagagttttcccaaaataccccttagtacccttttatgtcattttattgtgtgagggcaaaaaggtcattttgccatatgtgccttgttatttatgaattttatttaaaagtttataaatctgattttattagttattttatg

SEQ ID NO: 314000 - DNA, 615 bp, Cannabis indica
ttataacaataaagtcccatattcgttacaaaacttgtattctcctgatcagagatatgcattttgatctggttatatctagaatatgcatccataaaagtctttagctcatatcttgctgttgcatccactaacttgtcgatcctgggtagtgggaaataatcttttagacacaccttattcaagtttaaaaagtcgatacaagttctctaggagtcgtttgattttgggacaagaagtgggtttgaaatccacgagggataaaaggccttgcgtataaagtcattggtcaataatttatcaacctcttctttaagtgccccttgtctctcggagtctaagggcaaccatttttttctttttcctaggtaactagagtcgatatttaaatgatgacagatgactttagggtctatccctattatatcagaatggctccaagtgaatttgtaactccctaacttttaggcacgctacctaagatgattaaggaaccctaatccataaacgggattactaataaaataaacgcgggaaattaaactttaaacgaaaatagagtgaaaataaacttgcaataatttttactttgcaaaccaaagttacatgtttcag

SEQ ID NO: 314001 - DNA, 951 bp, Cannabis indica
actttacaagtttgattattttttataatatatttcttgcatttatttaattaagtatttaattgcttaattttgtgttaaaagttttaatttactgaaattagtttaaatttccaattcaccccctcttggaaacatatcttgggctaacaatttttgtatttttttaaaccacaaccgcaccacaagacattaaaattacaaaaattacaccgcaaaaaatgtggtatggtgcgggacggtttaggcagtttacactcatcactatacaaacattaacataaaaataaaaagattagtgtaataaagtttcaacaattaaaaaagaaaaaaaaatatcctatcaaacttttaatgtcatatatactaatcaagttatggtagtgaattgtctctaaaaaattatgtaatgtacatatatatatattatatatatataaaaaaaataatatgttaacaataaaaagttaacaaaaaataaaaaatgagaataatttatatggatgttccttaaatttaattgtatggcatgagttttgtgagcacatgagttgttcatatataaagaaatcatagtgtaaaaatttaatatttttgtaatatataatgcagtgttgtttgaaccgtgattattaaattcgataccgcaaaccgcaccgcccagtttggctaaaatgcaaaccgtaactgcactgtaaagaatttcaaactatattttttgtacggtgaggtgtggtgcggacggtttgtgcagtgtgaacggtttgatgaacatccctaagataaattaataaaatcttatatattcaaatgaattatattagcaaaatatttatcaataaaaatataattttatcttataaacaaatataaaagaaaaactaaatgaaattttccatatattacttttaaaattaaaaatattaaaatatactttcactttttctatgt

SEQ ID NO: 314002 - DNA, 616 bp, Cannabis indica
agatttccgaaacacaaattttttaagttttttttctatggtttcaacttagatttaaatttgggatctaatccttgtgagtaaaggtaatactaccattaagttaagagaaatgttaaaagaaccttgaaatttctaatactagaaaataaatattaaattttacatatttatatttaaattaaattaaattttgtagaaccaacttaataatgttaataacaacaatatgagacatccattaaggcataggtggacctatgaaggggctagggctgaccttgagatgaggcgagcaagacttgcgtcttggacttctaaatgttcaggactctaaaattgtaaaaaaaaaaaatattaatttattagtatatagataaaatgttaaataatgagaaatatatattaaaatagggtttagcatagtggttgaaagtgttgttttaaatattgaggttaattaaactttactctttttttcttatataaatattaaatgtgtgtttataaaagattgaactttggatttataagaactttaggtcgtattaggttgtattgtattgtattgtattatattgaatttgattatatatcatatttttatataatacta

SEQ ID NO: 314003 - DNA, 1557 bp, Cannabis indica
tgctataaaatagagaaagtagaattttaataatgtattttaaaaaaaaataaaaaaaactaattgagaatactatatttgcttcactcctaacatgagtctcattacactttgagaaatatgagaattacaactaaatatataaaatacatgaaaagtattaaaacaagatcatataagaataagaaaaagaaataataatagtacataacattatatgaatataaagaagaggaggatctctcaaagacttaaataaggtcaaggatctttgtcctaaaagttattttctcgctcacatagacacttagaaattttttagaaatgctcttaaggatttcttaaacctagtatgctcaccctagtgtctaaggatgagtatatcctcacaaggttctaaccacaataaaagtaatttcaaccaagagtatcacaagtaaataatatagtctctatttatagagttttttattcccatatgaacatgaataacaaccataaagtctttggatatgataaatcataaattgagcatttgtaaaattaatcgagtaatttggaagagtttaaagttgttagaaaggctctcaaatgttcaaaaagcaagcaattgcatgctgaaaaaaatagtaattagttattagttattattttttttttgaacttcggtcaattcttctcgaaagtattttaaaactacactcacttgattttgaacaatttatacaccttataagtgaataaatcaagcccccaacaattatattttcaatagctatcattcattcacatccataaacaattagtaacattttttactaatataagagtgatacacaatttataatcatcatttctcaaggatttgtaactcttttttatgatcaataccaacattttgtaactccatagtgaatgttacaatttgacaaattaataatttgtcacacttaattatttgtaacataattatttaatctaaatattatattatataaaataatataacattcttctactagattaaataatatttcatatgtgacataatattttatttaatcaatcaaacattatattatagagtaatataatattccctcactttattaaataactccactctaatagaaactatttcattgatgcataatgtaaaatgtattttgacttgaattttaccatagtttaattaccccaatatttgtcaaaattttgattgtcgtagcattgaaccactattccttgataacaactcggtgataacacacacttttgctatgttcactcaagaaccttatggattacttttgaaccattaattaccacatgcacaaatccaatttatggactttctagagaataactcttaattctcataagaggtagcaccacccctactatatttaggtggagtttaagtattttacaactccttagacacttcttaatcttaagtgagttttattttaagcttaaggcccattagaaaatcttttagttttaaccctccatttttcaccacatgtactcaagtactcatctatagatgtgact

SEQ ID NO: 314004 - DNA, 984 bp, Cannabis indica
ttatactgtcttgttcgaccaataaagtacattgtcttgttttttgctatactctgttgttcccgagatggttgttattgatctcgttagtctactagtgacaactattattttgacttatctttagtcacgtaaagaaagatttcaattcataaccatgactagtattttttaaggtaatataaataacgcatttaattcttcaatatctgagctgcttcattttccagctcttgtacacgtgttgtgacacgtgttgtgacacatgttgtgaccatattaatactcgaaatatgacataacaaaactctttatctcctaaaaggcgttccccaccatgacaaacattgacaatttctttgcacctccaaagcctattgctccttttaatgcaacttcttcagtttctacaaacacatttcatcatatttcaaatggaaaatacacaaaattccactacttcagatgctatctctaccaaatatgacagagagatccacaagccaattcacttgctagactatcactgtgatatgaccattgttctgatggaacttattttctaattatatatgttgattatagaaaagtttagatttctcatattgggatgcagcgaaatattatgtctcgttctattccaacactctaatctttgaatcttttctatagcaaggtttcaaacaagtgtagaacttggttcttttttctctgagattaaatttgaactttgcacaaccttcctcaataacttgaatatcaccttgacaagtgcgggctaatactcaaacactaatagttgattttctttctttgagttgggcaaagataagaggaagagaaagagagacaagcgagctatatatatatatagagagagaccaattttctggtgaaatgaattgcttgtatgttaagctctcttttatttctatgtatagccaaagtccttagatttaggtttctatttttttttcaaataaa

SEQ ID NO: 314005 - DNA, 1010 bp, Cannabis indica
tttttttttttatctttttttgaggatttatgaaatcccaaatttttaaagctaaatgtcggattactaatttatattatgggcaaaacaaaaaattataccaccacttgctattttggcatctctaacagagtgcctaattttttgctaaatttaacccgcaataaatctatttgtttttaattatatatttatcattgatcatgataggctttaatttatacttttaattacaatattagtattaattatttcttaaaatatttaatttattaataaacattaatgatattttaattttttgtcataatttgcatcttaaaatactagagtattgctactagggatatgacatcggagatggtgctaagtactactggtgtcttttaacatttctagatgctaaaagtgatattccccaaggtaataacttttatggaatatcactaatcaatcgtagagcgccacttctagatagtgttaggaactattggagcccaatagcaatactcttagaactattgtgcactaaaacacaataataaatattgtaataaatattttggtaattgaataaatattatgtgtgtgattgaaatatattaaaaaaaaattatgtatatgtttgtcctacattgtttacgtgtgaataatttgtaaaatttatattacactcgtacattttttggtaaataaattaagtgtatgattgaaatatatatatgacatttgtttatttatttatttttttgtgcaaaatttagtaaaatatttaaaccttacattgttctttctccaataatactaaggcaaactccaacaagcctctaaaaagtaaaaaataatgtggcttggcagtaaatttgttccaaccacacgactaaagtcacctcgcatataggtttgtctaaaatatcccattaatagtagtggactgtcgacaacactaaggtggcgtttagttggaaataataaaatagaatggaaagaaaagaaaacaacctccattc

SEQ ID NO: 314006 - DNA, 1356 bp, Cannabis indica
tatctcaatcatagtgtggaagactgtgaagaatctaatccacaagaaggaggatcgggctcaaagaatgagagaaagagatttaggttcagattgtgataatgctctgcttcagaaaggaatcaagggctagagatctaaacagaaggagtcattatattccgctgcacccaatgtaaggtttcctaaactttatatgtgtttatttcattgttttagaaattcatattagggtgttaatgaaacatacttgttagtaaatctagatcttgataaaataattccaacataaaattatctctaatgcctgatgtgaaaaatttgttaatttgacataatttatctagtgtcacattagtactacataagcaaattggttaaaaatgatgatcaaaatgtaatggaaaatgaaatatttgcaatggtattaatagttcaagaagaataatttaaaaaaaaaatgagtaaaactgtaccgatgtcatagttcggagggacaaatattcgttagttactttaagaaataatagataattataaaaactttaaaagcataaatactattttagaccctgtgttttgcaaaagttattaattgaaccatctgttttgttaaatgataaaatgtaacccttatttttttttttttccaaaatagtacaaataagacactgagcttaatttttcactaacttttttttttaatataaccaacttgaaaatacgagtagatacggaaaatgtaaacagttttatcataactcctttagatcagattattattaaattttattttgacgaaaaatcagttcagggttctatttttactattttgaaaaatacagagtttattgtgtcatttaacaaaatagaaagtccaatcgataacttttgcaaaatacagggtttaataatatattttacccaatttaaaatgatgttaataaaataggttaatttattttaataggaaaaaaaatatagtatttgagtttcatattctgtttaaatagttacagaatttatattaaaattttaatacttgtattataatctaaatgattagtttaacataattttttttttattattggaatatttttaatacattatactaattttgatataattttttttatcagcatcatatagattatttaatttagtcttatgtgtgtcatatttagttatatatgatatattggaaaaatttatagggcaccctcaaaagattatttgacatactttctatttcctttagtatatgggtgaacttcttactataatttctttttataactgtattgttataaatattaataattatgtgaatgtccaaatcttttatttattacc

SEQ ID NO: 314007 - DNA, 1141 bp, Cannabis indica
accaaaactacaacattccacatcttctcatgtgtgaatctttcaaggattacttgaaagatttacaagagttcatgacaatttagaccaaagaaactgaaaaggagagaggaaaggtgaaaagggtttgattgagtataagaacttaaaaaatacaagagctgtgaataaatgaaactctgctcaatgagcaataagttgtagggctccttttatatgaaagatgaattgggttacaggaggatctagaatcgtaaacctcaataagaaacttgtcaaagaattacaaaaaggggaatattcccaaaagggtaaaatgaaagaaatgttgcacgaattgctgatgtaggcactaacattgaggttgatacttgctgctgaggtggatgcagagttggaagacaaaagctgacttggacatggtcatttctaacacctctcaaacttagcaacgattgattcaccccaagtttttctatgagaaaataaaatatcgcattcgaaagactctttgtgagacaatcaacaactttgtcacttgatgacacatatcaaatttctaaggttttgttcagaaccttatcccaaacataatgaacatcaagttcaatgtgttttgttctagcatggtatactagatttgatgtaagagcactgtctcccatattatcacaccaagcgatatgtatctcaggcaaaggaaatttcaactcttgtaagagggattgaatccatgataggcagacatcgttaagggccttgtattcaaatcggtgttggagcaagaaataaaggcttgcttctttcattgataggaaagtttacatttgatatttttaagacttgattgaacacattaatagaaggatgtcttaaacgcctatgtcaaatgtcttttagggaatgtaaagaaattgagttgataggtgaagtgttggctacatattctgaaagaagtgagtgaggctgagatgtttgggcagtgaggctaagatgtactttcaaacatcatacacctcaccaatgcactctgtaccgcaaccgtacaagtgttggtagtgtatgaatcacaacatataagcatgcatatacacttaacatatatatacactcaaatatttatattacacattatacacag

SEQ ID NO: 314008 - DNA, 1467 bp, Cannabis indica
tatatatatatatattggttgttttatggtatctaagtggaaaataagtaatgcctctgtgaaatatttttgtgaagtctgatttgttgcattgctttaccaaacacatttttgggatggagtgattgttgattatattcagtgtaacacttctgtaccacatgagcaagaacattgaaatgacctttgagtttctaaatacggttcttaggttgatctactagaatttgatttgttgtagattaagattaactacttgaggaacaaaggttggctttgagaattcttgtcgtaagttagcaaattaccttaggttgactccattctattgggttcaatatattcattctctttcctagaacaatccttgtcactctgaccatttggttaatgtatttctgcacatgtcctttacttagagcacttacaatgactcctttacgctattcttttaccgaaatgtactttttcttgttttacatactaacttttacaatacgatatacattagctgatctaattcttcttcatataatttaaattttacatttttgtaaatattttttatgcatttcaaacaaaagaaaatgaaagaatgaggtaattagagtgtagaaaagagaaactcgtaaaatatggtgaaagctcatgttatatatacactggaaccaattatttgctaatggctaccacctcacttcatcactgacatttgtgttgaaaactccaagataatgggggatttggagaatataaatttatatttttcatcttaatctatatcaaagctcttgcgtcataactatctgattgcaataagtcttgtttctcctgttaatgctttttttttttttgaaacaaatgttaaactattaatttaggttgtttttgattgggggtaatgaaatagaatggaaagtgttcattttttttctcttttgtgtttgcatttaaaagtattggaatgttatttcagtgaaataatttttccacaattatagtagaatgacgattctattttaaaatttgaaggattcaccattccaattccaatgcgagttgaaaaaacttttataatatttttaacttataaattatatattttatttcattctatttttctttttgtgttttggatactcccaaccaaacgaactcttttgttactagtgctagttttagttcacttcaataacatgtttatgtttaagctgttgatcttgtgtgaccctttgcttgatttgatgcagttgtccaatatgaggcacgctgaaaaaagatgagatgcggttgaactacaaactctctatgcataggaaatgttagacttctttcattttcagtagttgttaaaagtcatgatgtttatgggtaatgtaattaatgtgacttgtttagaccagaacagtgaaattgagtgatggcacaattttcatttttttgggtggagaaatttataaatatttt

SEQ ID NO: 314009 - DNA, 1216 bp, Cannabis indica
tttattttttttgttaaaactgaaaaaagcccaaatttatttgaaaatgtcttaatgaatcttaaaaaataaattaagttttaaattataaaaacaaaaaacagccaccaaataaagcacaaacagccaccaaaaatgatactattaacccgcaatcaaaatacaaattagacaccaaaaatagttaaacaaaagctaaacaaaataatctattatgcaaatcttacccataaatattaaattattaaagggaagaaataaccttgatatctgtaccactaccacatgtgttttagttgacatttattaattaaaatgaccttttgcaaccaaatagtaacttaaaggtgttatcattaataatttaatttggggttaagtgtaatatttgcccccaaataggaaattttgtctgaattttttattttattttatattgtataaccaaaccaattgttgaatcacaataaaactatttttacaaacttcaaaattattggaaccccataagcaagagaaagacaggaaattacaattattcaaagatagaaagacattttagttactaactaaattaataagaacaaatgcacatgtattggaagacaaatgccttagaaagaagagaattggtggtcaaacaaacactggtcctttccaatccaactacaaaaacaataaataatagaatgtaacatgctatacgcatctatttctgggtaacaaacacatgactttaatattgtcaatttatgagtgtccaatattacagtaagcgataaaacataaaagagacatacacactttcacccacttctttagatatcatgagtatataagttatcctttataccatttcaaatagatataaatttgttaacaagtgatattacaaaagtccacttgaataataataatatatttttaaaaaattatattaatttttttccacacttcactttccacgtctcaaatgtaatattatgttttgttaactaaacgtaaactaatctactaaagttagtttagtgataagggagagatgaaaaaaaaaaactaaacgtaaacaaaatttcttttctaaatagggatattggcggctaaaccacctgaactttacggtttgtaacacttaaccaccaaaactgaatttttggcggctaaactacctaaactccacttccgttttgttctgcacacctccgtccaaaaatca

SEQ ID NO: 314010 - DNA, 1158 bp, Cannabis indica
  modified_base (583)..(583): a, c, t, g, unknown or other
cccaaccacgtaaaaaatctccctcttaatttcttacagctctctaaattattattattttattggttgccgaaaacctcggtcaactttcggcatccacaagattatttaggagtgctatctgtaaattttcatgaaatttcgaacagattccaatgtcaaaaataaggtttaaatattttgttgcacgcacgactattttttttttatacgtgtggtataagtaattgtttgaatcttattttcgacactttcaactattggcaattttttaaaaaaattaaaagtggtccttactagctacaaagtacgcaattattaaaaaaattgactaatttttttttttcatgatgtcaaaatagatagagaatctagaagaacatccctttaaagcggtgtactacgcaaatgtctaaaattaaaatggctaacttaaagtgggtacaaatttggcatatgtaacaaatgttgtgccatatttagtagaatatttgttatgatgtaatatttgcatcaccataaatacactattttgttatttatttttatgcaatttttattatttcattagtatatttaaccntatcaatattaattaactatttatattttggaaaattactttctatatatttctatatatcaatttttttttaattttttttctaaatttacggattgagttactctgatagtttttttgtaggttgctatgtgaatttcagttgcgatttaagttgctttgttggttgctatgtgggttgatatgtgtatttctgtacgaatataaaattaaataaaaaaactactttaaagtgtaaaaatgattaaactctttatataattatatactaataaaattaatgataaaattacattttttaataaatattaactaaatatctaatttttaccattgtaaatccatatacagtgcaaaaaattgttacaaagatataataaattcataatttattaaaatatagtgttaatgttattttttaggtaatattattatttttaattaacataagtaatttttttttcgtggatatcatgtcatgtcattgcacagatatattgtatgtatgctagatagatattacatgccgtcacgtatgttaattttattttaatttttttaaatatcataatttt

SEQ ID NO: 314011 - DNA, 1534 bp, Cannabis indica
taatgaaagggtgatagagggaaccatatgaaacctaacttggttattttgaatcatcatgtatatgtataggctactaaaataatgaaagatgggcatactttaaacctggtgtaagaaagtgagaaagaaagaaaaaaaatacaaatattagggtttttttacatacatttggaatctcttaattaataaaatacggagaattagagagatattttaaactaaaaacttaaaaaatggaatatacctataaaaagggtattttatatatttaaatttcattcactaaatagtgtactatgactagatacattaggagtatatacaacgaccagatctattaggagtgtgtactacgaccaaatgtattaggattatgtactaagtccatatgcatgacagagtgtgtactacgactaaatacaaggtccttatattatgaccagctacaaggtctttgcatcaagaccagctacaagattcttcttacgaccaactacaaagtccttgtattatgactagctacaaagatctttgtattatgatcagctacaaaatcctcgtattatgacaggcaacaaggtctttgtattacgactaactataagatttttgatattttcttataccaaagcaatagatcgtgcaataggtcaagttaaaaatcatggtctactcattttccaaatgaatatatttttctttgaacaacttgaaaatccttaatttatttttatttatctttcatgaataagtgattaattttattatcttgacttagtatatggataaacaaataaaatatcatatttttgagctgtcctgattaatcattcattcattcatcattttttatgctttatatgttatttccccacccttccgaggcaatacaaattgttcgtttgaaccacataaaaaatttaatatgctaactgtgttatttgagctttcaagtagtatttccttcttgtttagttagttatcataaattatgtttatttaagcgtataagtataatgagttcagaatattacttaaaacttaattaataagtaatttgtcatatacatgttctgaatgacatgtttatttatatgtataaacatgatgggacttggaatatgatgtaaaacttaattataagtaatatgtaatatatttatcataaataatatgtttatttatatgtataaacataatgattttaaagtattacttaaaatttaatttataagtaatttgtaaaatgtatactttgaattacatgtttatttatatgtataaatatgataagcttaaagattacttaaaatttaatttataaataatttgtaatacatatgctcgtttaactttcacattttgtaaaattttcttttctatgtaactaacttaacctttttaaggaccacaaaatgtttattcaatacaaattgcactctccattttcattcaccattcgagtcatatatatatatatagaacactttttaatgagtattacacataaatggttactaaacaatttaac

SEQ ID NO: 314012 - DNA, 723 bp, Cannabis indica
gctcataatgtggctagatgggcttttgctcatcaggtgtttgggaatatcccggtggcctcgttaccagacaatttaatttgtaatgaccgtgaggtctaaccttatttgattctatgttataaacgctttttatcaaaaaaaaataaaaaaaaatagttatataaaatatatatagaagaaaattattatatggtggtgccatttacaggtagcgtcttatgattgattaacgatatattttataaaattattacattaaataaagacctaatacttaatagtgaaattacatctagcaccgctggtgttttttagtattatctcctctttcaattcctccctctttagaagaattaacactatgtttggtagaggggagagaatgatgaagggtggaggtataaggataaagggattggttaaatctcttgtttggtaagaagtaggacttaacatcgggcgggttgattgggtttcgggtttgcgagttgtgggttgaaaaaattgtactcggaccgggcccgttcatgttgcgggttggtgggtttcgaattcacgggttggcgggttaacagggccaacgaattgaccttatcaactcgatcaaactctttttttttaacactcacctaattatctataaacatataactaaatataaacatttatctaattactagcaaaaaactacgtgcgaggcacgtatactaaatttatgct

SEQ ID NO: 314013 - DNA, 1484 bp, Cannabis indica
agatttttttttttttttttaagcatttataatctcacattgtttgttaattaatgtaaacaaacaaagactccccaatattgtatacgttaattttttaaaaaaaattaaaaattaaaaataaacaaacatattttttatattaattaactttgtaatcatattaatatatatacactaatttaacaaaaaaataaaaacaaataaaaacaaattataaaatgacttgagtaccaattactggtgtttgatcttgtggtaccgtgttttttttttttattattttgtatagatgttgacacactaaggtggtgtttggttggaaagaaggaaaacaaaggaatataaatgagaatgagaatagtaataagaatgaaatcaaagtatttaatttttcttatcttgcataggtatggtatttctttccattttaaaatggaatagtcatttcatcaaaatgataaaaaaattatttttttggaatgtgaaattccaatactcaaataaaaattacgatgaaatgaaattctaatactttaaaatacttttctactattttggtgggataactattttatttcgaaatagaatgaaataccattccaatgtaagataaaacaaaattattaattttattttttatcaattttttaatgcattttaattttattctattttccttatttttttttctgtattttctttcctcctaaccaaatgtgctcactagtatttttttgttatacaatgaacaaatttttattgaaaaatatcagtgttgagtacatccaaaagaaaagatggaaaattctccatccaaactagctcaccatccaccttgagtgcatgcacaactaattcataagcaatcttattgaccgattgacgagcatgaatcaggaaaaattggacagtaaactaaaaatatactctaaaagaaaccaagatcattacaaagagaagctctcttagcaaaagcagagaataccgctaaacaatcaaatgagaaatgcaactaaatgaccttatttttaactttatagatagctaatgtcccttttttaaaataataaagcaaatgtcattttttactttttaatacctaaaatacccttcattatataaaatgtattatatgttttatttctttaatagaaattatgaaaaacaatagatgaaaatctctctactgaatttttgtcaactattttttcattatataaaaagtattatatgttttattcttttagattttgctgttgttgttgctgtctaatatgttatttaagcatataattagttttttattaatatatcgtatgatatacaaacaatataccttaaaccaatatacatatatgacaaacttaaactaatatactattaaatgaattgttttccacaatatacagtagcatacaaaaacttataccacaatcataagcagatataccataatcaaaaattaatataccaccagcata

SEQ ID NO: 314014 - DNA, 2543 bp, Cannabis indica
aaatttaaaatagtttacaataccagtttttgatattcaagtttaccagcgcgttcaaaaaacttcaaacgtatttttggcactgtaaactattcaaaaaatttcaaaaatttacagggatgatgttataagcataacgaacacccctgttaaagaaatttgaaaaaaaaaaatattctgacatatgttttcaggcgtagatgttgactaagaggttgtaacatgatgttgacggtagtactactcaaatatttattagtaaccaatatgcttttgacacctattcatacataaaatgaattaattaaggtggcgtttggtaatatttttgttttttattttttaatcacaaaaataaaagtaaaatttgtgtttttaaaaacaaaaacgtgttctataaccacttttattttttaattttaaaaatttttatttttaattttatttaagtcgggtccacgttcgggtctagggttggggctctagtccgagttcgaggctggggttagggccagagtctggaccccaagatccagattggcgtcggagttcaaaatattggttaaaaaataaaaactgtgttaaaaaaaaattgaaagtaattattttgttttcaaaatttttaaaattttgattctcaattaaaaaataaaaaaataaaaacaattttatattatattttcatttttttaattgaaaaaaaaactaattaaaaaaatattaccaaacacactctaaatttattgatacataaaaagaattaattaaatctattgatacataaaaggaattaattaaatattagtattaaatatgagagtgacacataatggaaaaaaatatttatatgtacagacgtttttcatgactctacctaagcattttttaatattattttagattttgtgttgtataaaaattatcgattgaaccacatattttgttaaatgataatttagattctgtattttttaaaatgatacaaaatagatcctaaactcaattttcgtctttttttttttaatatatggagtcaatttttagtacgaacacatcaaaaaaaaaaatgtaatcagttttatcataacacattcaggttaggttattattaagttttaatttaataaaaattaaattgaaggtctattttgtactaatttaaaaaaatacaaagttcaaattattatttaacaaaataaaaaatttaatcattaatttttacaaaatataacatcataatagtatttaactatttatccatagtaatatgacgtgaggctactctattgcgagtacttctaagtttatgtacgtgttgtacttaattttttgttgcaattcctaatttttaatcgtgcagcataaataaatacttaaatttatgtaactattacacttaaatatctaatttttagattataaataaacaaaaattaaaatttatatttatgcaatcaaaattaattatttataagctaagctaaagttataagaaaaaccttgaattctcctattcattaaggacataggttttccccttgaacatatttcatggtacattagaactaaacgtaaaatatatatgggagaaattatatttacaccccataaaactataattacaccccattactaaatttaccttagtttttaattaaaatattatttttttataattacaccccactttgtgtactaaaaaggtatctttaaatacaccccaaaactttaatttacgattgaaaaaaaaaaacactcagaagtcattaatggcttctacacatcaattgtccaagtaaatctaaaaaaataaataataataaaaaattaaagtcattgatttgtgaaaaaaattaaatggtttgttaagaaaaatcagaaaatagtaacagttttggaattgttttgaggaaaaaaaaataaagtaactgaatattttttaatttttttctgctggtctaatatttctaagtgttgtatatcactaaattcatcaaatgtatatgtatttgtttttcatgagaaacgaaaacacatacatatattcagaaatttgttttgtatcgattcttccattgatgaatctcaaaaataaatctttatgttttccattaataattttggagtgaaaaatattcatatcgatctgtttataaatttataattatatagaaatttaaatagtgtagtatttataagaaaaaatagtggggtgtacttattaaagtttaaattaataaactaaatataaatgtgaagatatttattttagtcatttcacaaaaggacaaatatgtaattataatttgggggtgtttatatcattttatgaggtgtaaatataatgcccctatatataatgcatttattggatttttttaattatttaaaatagaaatcattcatttaaacaaactaaccaacattacaaagaaatagcaagtctaatgttaaagcttgacggaaccctaatctatataacactaacattgggtgcgttcggtaacacttttttaatacgttttttgtttttaaaatagaaa

SEQ ID NO: 314015 - DNA, 1399 bp, Cannabis indica
atcctggtaaaacaataatccaacagcacaagccctctttgagctagttggcatggtcatggcgccacatagaacatggggtggtgttgccgcttcatcattacttcctaggcatcacagcctactttgggatgtgcctaacacagctcatgccgaagagcattaaatatctgtcagcgatgtttgtcttgtacagggatcttggttggcctccgcctaccccttatgagattgggtactatttttagttgaagtctgggccgaagcagagcagaaccaactatttttatttcagccagcttggccaccaatggctgggtgacaccaactgcacactactacagaaactcctttaatgtcccttttccatgtccagcaaaattattgttggacatgaaaaggttataaggagttttctagtctaacattgttggactagatttttttttttatcacgtccaacaatgttggactagaaaactagtagtggacatgatatatattttctattttttaaaattcggtttattctcacgtccaattgtattggactagaaaatattcttgggagttttctagtctagtttaacttaaaaaaaaaagaacaaaaaaaaataaaaagattagaattgaccaaaatttaaaggtactttttttaaccaaaaaaaattaaaatccaattgatggtacataaattacagtattccattagaaaataaagttattaaaagttattattattattattattattgacaaattttctttctctcacaattgaaaacctacacaaaacctagcgaacacattatctttagtctcaaaataacatagtcgcaccaaaaacaaaaacaacacagccacaactcttcttagacccgatctccttccctcgttcgctccatcccaatcactctccatctctctttctctctcggtgtctccagcatcggagtctctctcggtgtctccagcatcggagtctctctcgggatgggtctcgaccgatggtagacctctttctcttatctctgtctgtttctgcagtgtgggagatgaaagctcattgttcttattttttttctctctcaataatgtgcatgttgtcggcgtgcaggttctcagcaacctttgttggcgtttgtggcaagttctcggcaactacatcgatgaagctttaatctgggatctatgtaattttgatgcttagatctgagatattttctgttatgatttcttatcatatttgttataagattttgtagttttggtttttagatgtcctttgtttgaatctaaagcttgtatttttctttcttttcctttttgaatatgggattatattatggattactttgacattgttgttataatgttggatttgttatattaatttagt

SEQ ID NO: 314016 - DNA, 2158 bp, Cannabis indica
atggtatttttaagtttgaccaacttatatgacatttttttaaatttatttttaggtaattttatggtatttaatataacatatatatgtaaatcaggtttccgaaatccacatttaatgttttaatttgtttttagcagttttgtaggataatttttagtaatttttcaaacacctctattttactataatggagttgcttcatcttttttattttattgtattgtctcttttattttctgagcaccattttttttttacttttatataatcaaaatcagtttcctgatgaagaaagtagtttcttaatttaaaaacaagtttctttatgaagaaaccaatttcttgatgaaggatctttagtgattgattttgatcgtgtgacaaattaagcaatttgaatcgcatgaaagagaaaaaaatcttgtgttgctagagagagtagtttgatttttgtgttttttccaacacctctattttacggtaatgggattgctttgtttttttttttttttgttctttattttttaaattataagtttgtcagattatatctttatagggtcaaaacttgatttataagtttttttttttaatataaattttacttttatacaatccaaactgtggaagataatccattttaaactaaacctgttttttctccaaatatagtttgtcaagctgttattttcagttgcaaacttccttgttttagaaagtcggttagttagttaataaccgacttgtcatgagtttttaggtgctggacatgttagctactaacaatataaaaagggctcttcattgtattcaatttaaggcaagaaagaaagagagaggctgagttagaatgctacaagaagatcaagttcagagttggctaagattgctctagtgttgagtgttgtagagtcaaatctgactgtgattgttcttgagtgcattgtactataatcggagcttgtaattactaattcatagtggagaaatcaccttgggggagagtgtgagtaggactaaaatttgagatccgaactaggataaattcttgtatttttctttctgttttttcatagtttatttatcttgtttatttttctagtttgctggtttaattacatgtcgatgaattgatcattaataggtttgagtttgtgttgtttgattacaacagtggtatcagagcaccgggaagaatccaagaaattctagaactcaaatcttgtgatatcaaactagaaaagccgctgcaatgggctcatcatcagcaaggttcaatttggaaagattcgatggtacgggtgatttcagtttgtggaaagagaagatgctagctatactgatctatcagaagttagattcaaccttagatgaagatcttggttctgatgatatcaagaagaaggacatggatgaatccaagaagaaggaatcagacactgttatgaagcaagctagatctgccattgtcatgaatcttgcagacaatgtactgaggcaggtgattggtgagaagagagctcttagaatttggagtaaactcaatcaattatacatggctcgatctactgcaaccaagattttcttgaaaggaaagttttatggatttaaaatgagtgctactgttacattggatcaaaatcttgatgaacttaacaaaattgtattggctcttactaatatgggtgaaactataaaagaagaggatcaagcagtgattttgctcaatgctttacctgaccaattcaaagaaatgagaactgccatcatgtatagcagggatactttaacattagaagacgttatgagtacactcagatcaagggatgttgagttgaactggcaaagagctgctaaacaggaatcaagatctgatgatgctctaatggttcggggcagaataccaagaagaggaaattcaaaatttagagaaaactcaaggtctaattcaagatcaaaatcaagacctagggaaacaaggaagtgtcatcattgtggtaaagttggacacttgattaggaactgttgggatttaagagataaaagaaagaagaagaaggacaaagaagaagaggacaacaacaatgactcaaatgcagtaattgaagattctgatggagatgttcttacaatcatcaataatgaaactaaggat

SEQ ID NO: 314017 - DNA, 915 bp, Cannabis indica
ttccacatccacggacagaaccaccactgcaacacgagaatacctagaaaataaccattaagtctggtgagatggagcaaaagcagtgaaaccggcgttaaataaataaattatggtaaaacaactgtaaaacaacactaaataaataaaaaaaaataaaacaaaaattgattaaaaaaaaaactaatcatcttttgcacaacttcaacaccagatgcaatagaggatatttgcaaatccagtcctcgaaaatcagaacaaaaaaatcacttttatcttcccaaaaaacgtgattgaaaattttaaaaactaaaagaaaaaaaaaagaagattaagaagaagaaaaaaaaaaccttatatgttaatggagagatagaacttaacagatgagaatgagaatgaaaaaaatatacatcatcaatacacaatgaggatgagaggagagagaatgggaaatgagatgaaaagttcaacacacatgcattataaattatatgagcttttcatcgttaaaaattaaaattatatttttctcaaaaaaaaaaaaattatacttcttacaaaactttaaaaatgataaaatgtattaatacacatgagctgccacgatcttaataaaatgataaaaaaaaattatttaaaatcagtgtacaatataataatttggacaaaaggtaaaaaaatgcatgtgacaataaaattgaaaataaaatagaatattggcgactaaattacttgaactttacggtttgtaacagtcaactacaaaaactgaaattttggcggcataactatttaaacctggttccgttttactctgtatccctccatccaaaaatcacagttaagtgtcacggtggattgttcacttggcaaatttttagtagtccacgtaatattagttttaaaaaataa

SEQ ID NO: 314018 - DNA, 1688 bp, Cannabis indica
aattgtatttttctgtgtgaaacaaagtgtcaaaaatcaaaaattgaggggctggccaagatgttgaattttgaaggtgtttttgttgttgaagctctgggtcaagctgggggactcgcccttctttggaaagaaaaggaagaagccactttacttgggttctcaaataaccacattgatgtagttgtttcctctactaccgttagggaatggcgactcactggtctttatggtgaaccagaccgaagtagacgtcaacacacatggaacctccttcgaaccttgtccaaccactcatgattgccttggtgtgttattggtgacatgaacaacactgttcgacatgaagacaagcggggaggaagaaggtatccgctttggcttatcaacggtttcaacacggccctccaacaatgtgggctcacggatttagagctccatggacaccctttcacgtgggagaagggtcggggcaccgatgcttgggtggaggtgagattagatcgtgctttagtctctcaatcttggagccatgcattccctgaagctagacttaccaacctagagtactctacgttagatcattctcctctttttcttgaacctaaggtatcaagtagtttctctcatgtttctcgtttttgttttgagaatacttggttgaaggatcccttgtgctttgaaattgtgaaagattgctggtcacaaaatcatctccatgagtttggtgacaagttgtctctgtgcgctgagaaattggctctgtggggaaaagaaattactggttcgttaaatcatcgaataaaacgatacaaagcttatttaaaagttttacatccaagaagagatagtgtttctgtgcagcaatatcaggatacaaaaaagaaactctatgaggctctcgatcgtcgggaaagctattggaaacacaaactaaacaacattggttaaaagagggggattcgaacagtaattattttcacaaggctgctacaactagaaaatgcaacaaccaaatcactcaacttcgagatgacggaggaaactgggtctcatgggatacggcgctaacttatatgatttccaattattttcatgagttgtttcagacatctggaacgtcttgccgtgaggtaattgattgtgttgatcctattgtgcctgattatgttaacttggagatgtgtcaactagttacggaggaagaggttaagaaagcactttttcaaatgcaccctaagcaagagcccaggtctagatggtatgactccggctttctaccagaagtgttgaaatattgtggcggtgatgtcatcgaatgtgtacgtaagttctttgaaaatggtacttttgagaatgattgtgatgctgctaacgtcattttgatcccggaaaaaaaagaagaatccagaccgtatgactgatctctgacccatagctttatgcagtgtcatgtataaaatcatcaccaaggttatggtgaatagaatgaagcctttcatggacactattgttttggccaatcaaagtgcttttattcctggccgcctaatctcaaataacattcttgtttcatttgagatcttgcattatcatgttatccacgggtagcatgaaataggtcctattgtcccttcaagaggtattcgtcagggtgatcccttgtcgccttatttgtttattctttg

SEQ ID NO: 314019 - DNA, 1111 bp, Cannabis indica
cgttgttggggtttttattggggatcttacgaatttcagacctggttctgtcgctataagcttcctaatccttgttgttggtcctgtgctttgttgtgttcttggattcttgatctctgattgagttcgggcagactctttgtctatggccttgagtatgattagttctcttagaccactaattagaagctttatgggtattgtaatgccctactagccaaagcatgttgcgatgttttcttaattattatgctaaccttagctaatcaaaggatttttacataaagcgtgtttagtaaaatttttattataattcgaactttaataaacataaacacatgtacttctaagattcatcccatttcaagaagtctcattctcgggccctaatgagtgggtcagcccactaagggagttgatctgtaactcagtgtttagtaacatattaaactcatccattataaggtcagactgtaatgccctaacaattaagcatgctacccaaggtgattaagaaatcctaatctcctaaacgggaatactagaaagataaggacgggtaatttaaactttaatcgaaaaaaaatgaaaataaaacttgtaataagcttaacaatcaaaaattacatgtttcgggattccaaaaatattacaagccttttcactagctgacctaggcagcaaaatcagagttttaaaagtacatcactggtagactccgacccgcttgctctagtgtggctcgaacatgtacatacattgcccagctctcagactcatggctgatcagagacagatttaccctttcctgcacagtagagcacccgtgagccaagctcagcaagacaatataaaatatcaatagttataataacacatcacataaatattaatgccacttcacatttgtctgcatgacacaaacccgcatgttacgctcacacgcctatttatgtctatgtggcatagacctacgtgttatgctcacacgtctaaatacaataaggccttagaacggttcatctcagttctaattaaccagtccaacccgattatgccttgaacgcataacccttaatctcaatatgcatatacatcatggcataacaat

SEQ ID NO: 314020 - DNA, 974 bp, Cannabis indica
atacttgtgagtagatctaagttcctggtaaaataacttccaacagtttgacccctttagtatagcctacttcccttagattgtattaactcgagaacaaagaatgcagtgtttcctctctcaaagctctcacaatgaaatctctgagtattttctcttagatctctttgaagtaattatttcgaccccttttacagtgaggatggatcactatttatagggctaaatgcatgatggaaggtttcccttttgcctacaatatctataattggtaagaacataaattacatatttagaatacataaattgagggattcagacagcttgccatacccctttgatatgatcccatgattgtagggattgctcgagagcttcacgacatcaatcttgaagttgctaagtcttgatagattactcagagaaatgacctcctttgttgttcggatcatttgcccttgccctacttgatcagacagactttgtccgtacaaatgtatgactgaggtcttttcggaatatctcttcaactagatgtagaaaatagcagccatgtgtcaccaatatgtgttgccacgtcatagtgcgaaaaatgggataacaactatctctttccagaaactgtcatcctaaagccatgatctgattgtctcactggctcccaaaattcttgttgtagtgtttggtcaaggttccatatgaatgcgggtgcttccttgcccttgcacccgtggtttatatcaatagaaaatttctttggattttgtcccttccaccaattcagcccatttatagaaactataaccaaaattaattcctgaatttaccataaagagcattatatacccatgtccttccatcaagacatattacatttcaaaaggttggccctttcaaaaaacttgctccactaatggacatgaatgttgggttttatgccctaaataaaactctttacaatctgattagttatc

SEQ ID NO: 314021 - DNA, 739 bp, Cannabis indica
taatattcaagcatatatcaaaatattcaattatttattaataattaaaaatgtctttactgactttttaggacataaaccctagcacacgagccacacagaatagtctttattgaattagaaaaccccaaagacaaacatggaaaacaaaatgaatacacattacaactaatttagatagttgtagccttttcattattttataaatgaggatgagaaaaaggttgagaacaaagtttcatataaacgctaacaacatcattgacatagagatgaacagcattccaaggccaatcttcaacttgtactgtaatgtagtgagtctttcaatccttaaattgtttgaagtgagaatataggagaaagctaatgttgatatgcatgagaaaaataatgctatttcttctaagaaatttttttttggttttttaatatcattataaaaagataatgatgttgtgatcataattccgataaaaacaaggatagaaatcataaggcataatttagttgtgcgtttcatccttcttctagcactttcgagaaaagggtaatgcattttgatgaatacatcttcaggcgttaagccatttgaatttttcatgtgtgcaaatgaaggcagcatattcctttgcacttcctgcagtggtgaatgtgaaaggaaaattaagtaactaagctaccgtttggtaatacttttactttttaattttttaatcacaaaataaaagtaaaattt

SEQ ID NO: 314022 - DNA, 830 bp, Cannabis indica
tggtaaagataaattccaaaaagaggcccatttccaagcttcgcacttttaacttatttttgggctagacccaacttaaaggcccacctttgaggcaacttaaaggcccaccttgataatgaggaaattacacaacaaaaaaaaaaaaaaaaaaaaaaacttttgaataaagctggaaatatgggtaggaatcctaaagaaaaagataaatatgggattaagctattttatgccttattatataattttcaaataatgttatgttggttatacgaaagtaacttacattctgattgtttagagtattaggcaaatagtgaaggcttgataaatttcaaaagcatgtttttgagaggagaatgtaaagaattttatccaaacttttttttttgtttcttgtaacttttatcattgagtttgtaatctttttttcttttgaaatcatctttcatattttatcaaatgtagcattaagctattcttggtatgtgtttttcatttttgaaaatgaattatcttttttattgaagtttagtattttgaatataaaagagtctgaagatcaaatagagtattatgctcaagaatactacgactagaattatatgaaaatatctaattatttaatttgttgatcatctaagaaaaaataattgaatatattgttgagaaaaaaataaattttacaattattaataactaggaaacaataccgcgctttgcgcggattttataacatttgagaattaaattttatattttgtttgtaaattttatatattttttttaaaatatttttcaatttttattttaaaagaaacatatattat

SEQ ID NO: 314023 - DNA, 973 bp, Cannabis indica
aaggtaagtttggtattcttttctctttaagttgtgaagcttttagtttagtttttatatgtgaaatttatgattctattttgtccaagtttgagagatttagaaacttactagaagttaattttttgattgttggagctggtttggttggcttatgttggctgtagcatgtgttaagcaagtttgggtttaagaactcaaacttggctcaacgatggtgggttttgattcatgtgatttttgatgtgtttaattgttaaaatatgttctttatggtccatttagatgttttggaatttggtggtgattgaggaagatttgagtaggttttgggggctttaagtttgagaatttttgagcaatttttgcccgaacaattggaattttggttggttcagggttgtaccaactagaattctggttggacagtatcgggaaaggctaagtttttgtattttggtcataattttttactcagggtgttcgttttagatgtataacatacattttaaagcttgtgatgagctctacaatattgtatataaatcagagctaaattgtgtattttattttagggtgtcttcaccacgtagtttggtaaaaaaccctaaattttatatataggcattagaaagtgttctagattagacatactagttttacgtaaatgtgacatagggcatccgttcaacaagtgacattttcatttagattgatcgacatacttgaatttagaaacgaggtaagattagtataaaatatgtatatgtatatgtatatgtatatgtatatgtatatgtgtgtatgtaaattgcatgttgtgttatgtgattagtatactaccaactaggggtgtacgtcggtcggtttggtcgggttatagcatatttttattaacccaatataaatatcaggttgcaaatatttgatcgtaacccgtccaatgatttttttcggtttggtcgggttaacc

SEQ ID NO: 314024 - DNA, 772 bp, Cannabis indica
tagggcacaaaacccaacactatcagcatacctgctgtcatcattcatcattttaggtgtagctatgagagttgagtattgcttgtcttgagcagcttcattgttgggttgttgtcccataaaaatttcatcatatctattataacaaatttcagtcgaatgaccatgtttcccattaacaagtggtttggagccattccctctacctcctcgacctcaaccaccactgtaaccaccacctcttgtgttccctgaatgaggatttccatgattactctattggtaaggcctgggagatgtgttgtttgtgtgttggtttccagatctagatggcttcttagcaaagtcggcagatggattatttagaatttttctattagaagtaacaacatacaatcattccaaatgaccatcaaatctaagtaacatgtttgacagtttttgccaagtggtgtgttctctagcttcatttaacataacgatggacaagtattttgtatcaagtccagaccgaacattagcaaccaaatgtttttcgcgataaggatcacatgctaatgcgagagagttagcccacatgtgtttttgcttgagatatcttgtaacgccctaaataattaggcacgctacccaaaaatgcttatgaaaccctaatcccctaaccgggattactaattaaaatagcgcagaatttaaacttttatattaaacagactgaaaaatgaacttgtaatatgtttaaacttttcaaacatagttgggatcccaaaaa

SEQ ID NO: 314025 - DNA, 1516 bp, Cannabis indica
gtaaggacgcgtaatactaaaattgtttgctttactcaaaaacaaaacatggacctatgttcgtttacctccaaacaagaaagccattggatgtcgctgggtgtacaagatcaagctgaatagcgacggttctatagaaagacataaagcccgtcttgttgctcaagggtatactcaacaagaaggcttagacttcttcgacactttctctcccgttgcaaaaatggttacttttaaactcttattggccatttccactattaagaattggcacactttgcaacttgacgtaaataatgcattcctcaatggagacctcaatgaagaagtctatatgcaacttccaaaaggactggtcctacctccagaaatagcacaagaatccaacatggtgtgcaaattgaataagtctatctacggtcttaaacaatcatcgagacaatggtacaaaaaattgtctgatgctctcattcaagaaggttttatccaatcccaagccgactacactctattcactagaggttcacaagatgatttcattgctattttagtttacgtggatgacataattctcacgggtccaaacttatcacttctgaccaacatccaatccacattacatgcaaaattttctctcaaagctctcggcaacctcaaatactttcttggctttgagattgctcgggccaaagagggcctagtattatctcaaagaaaatacaccttgcaacttttggaagacaatggcttcattggcagcaaacctgccaaagcacctatggacccaagaatcaaattggatgatcaacaaggagaactacttgaagatccctcaccatatcggcaacttgtaggaaaattactatatctcactttatcgagacctgacatcacttttgctgtcaacttacttagtcaattcatgtcatcccctcgaacgccacacttacaagctgcacatcatcttctccgatatctgaaaggaagtccgggtcaaggtttgatgtattctgctgcctcttctctcaatcttagaggctattccgactctgactgggcctcctgccccattactcgtcgatcaaccacaggtttctgcatcttcatcggagactgcctgatctcatggcgcactaaaaaacaacctactgtatcacgcagttctgcagaagcagaatatagagcccttgctgcaacaggcagcgaactcacttggctgcaatacttgcttcaagaccttcaaattccccaagatcaaccggctttcatctattgtgataatcaatcagctattcatatagccaacaacccaacttttcatgagcgaaccaaacatatcgaactcgattgtcattttatccgagacaaaatcaacaaatccaaaatacgactcagccccatcaacagcaatcagcaattagccgatgtcttcaccaagccccttgcttccacaattctccactcgcacatcagcaaaatggctgtatacgatgtataccgtccatcttgagggggg

SEQ ID NO: 314026 - DNA, 883 bp, Cannabis indica
caaaataaacaaagtcataaaaattcaacaaaacataaataataaaaaaagatataaagtgaaccacttaagcatataaagcatataaacagagtaagtcaatacaaaatacatttaaaccgattaagagatattcttttttctcgagacatgaatataattcaaggtgtctaaaagagatacataacctagttgctataaggtgtatttataatcaatatacaccttattgacagctcatatatggtctgaacaagaccacaactcactagaaaaatacctaagaaaatatcttcaatcagcttaggaattttcatttctgtacctacagaattgtgagcagtaagtacgacttttattttatagaaaagaaaagtcttgctttgattttctttacaaaaaatctaatcaaacatttgaggaaactcacaaaagattagatttacaccgttggataaatagaagaataacgagtcatcaaacttaacctttatgccttattttctgtaaatagagcaactagacatattttctttcatatataatccaatcaatataaaaatatggaaaccaaataaacacctcaatcgaaattaatattcaacttatgaaatatttttatcaaattaaagatgccaaaaataaaattacatatgtaaatatataatatttaaatgatataaaggaaaataaaataaagttgatgtatgatgtaatataaatgtgttaaaataaaataaaaaaaaaagttttaataaagtattttaaaacataaagcaaaaaagctgttgaaagtgcccttataccatagctgctttgatgtgccatagataggcataaatatagggaaatttacaaaaatactggaatttgggttaacttt

SEQ ID NO: 314027 - DNA, 1137 bp, Cannabis indica
agttctctattttcgatgtgtttctcaaggaagtacaaattccttactcttggtctctccatcacccaaattctgttttcttgtaatataaaattcacaataactactatgccagtttctttctctctctaaaataaaaagttcttatattcttgtgtaaatcctaactaaactaatgttattgatgctcttgtctacataaatcacaagaattttatggctattattatgtaagttgtttattcatctaggtttcaaatatattttgttggatgaatatttttgaattaagaaatttggatttaattgtttataaaatcatatcactgtcactattgattttttttgttttgcccaaggctttatcactgttatttgtttattaaaattttgaagccccaaatttgtttttattataatttctcaattatgaatagcaaattttatatactcaatataaatggcaaattgtgcaatcataactactttttaacacagtgcatatcttgacaagagatttactttcatgtatatatgattttattttgtgcaattttgtattatatatttagattttatgctttgatgggtatatatgtgaatgttaggtagatttatttgttatttctcttttttatgtgttatcttattcaaaaaagaaatttaaaagtattgaaggggtataaaagatcaattacagatttgatttcttgttacttttattataaattttgtgtgctttagcattgaaaataaaaaagtcataaaatttccctaaatgatcatttcttgttctgatattaagttatttttgtcactccttatatttgtactaccgatttaaggattagcagtaatactcaaaatatgtcactgttattgttcatttcttgagttctctctccagctctcaatctctttttgttgttcttcaaagggtgggttctttaatattttacttttctattttgttgttttagtgcgatttatttgttttgctaattttttttttcctacacctttcactgtatactgggtgagtgcatatacattatatatttactaggaaacgtaaccgcgcgttgcgcagtcctttcaataattgacaaaaaaaatatataattttattaatttata

SEQ ID NO: 314028 - DNA, 823 bp, Cannabis indica
gaagttgaattaatggatatgatatgatgagagtgaatggtaagaagctaaaccacatggttgcctaaccacccaaccaagatagcgatgggatgaacccaatctcccacaaatgttactcatatgctctcctcctcttcttcttcttcctttcgtttgtactagtgaaagttacacgtgatactacggatgtagagcaaaatatcataaccatataaatatggggaaaaatattatttatattcaacattactataagataatatatcgttattattataattaagtattaactctcactgttaattatttgtaagacgaaaactatccccactcaaaaatatataaatataaaaaagttaagaatacaccttaaaaaataattatacaatatacatctctatcatattttgtttttaacacataaatagttattattctcttatttttataaaataaagcacacttacaaattacagtgattagccttccatgtgttagttagtaattagttttaattaaattactgttttactattctaattacttctctatcttttagtactattaattcactagtaaaagtataatttagatctcatttaaatttgtgcaaaatatttcaattctaaaattaacacttgaagtgaaccagtatttgatccattagaaaaattaagattccataattataaatcatgttctcagtcatccacattattaacttcccaaaacagaagttgtaagaatcatcttctctcaaaaattttaacaagtgaatcaaagaaactaataacatgaaaagagttcatgattactcagg

SEQ ID NO: 314029 - DNA, 1111 bp, Cannabis indica
aaatataataaatatatattattttttttataatataaataattttttaacatatataaatgtaattggattttgagattgatatccaataactgatccattccaattagaattcaacttttagcatccaatccaatctaattgtaattaaatatccaactttttgtaattagattggattggattggttctgttaaattggattagattagatgatgcccacccctaaagtgcatattaaaggagagaataagaagtaaatagagattaaaaggctttttaaaaatagaaatgctaaaaaaattttaatggtgtatagtatcctcttatatgttattattgctattggttcaattaagtattgggtctcatatatgttcaaaaaaaaagtattggtcccgtataatttaatataataacttttatggaatatcgctagctaatcgtaaggcgacatgtctataggtgctaaacaccactggtgcccaataacatgctcttttagaagtattagggatgtatttgttggcatcaatcattattttggttaagggtttgaatgaggaaattatattgtatacccactttatttactttacttgttttaatttttacctctattttacattctttaagatatactcacttttatagatgatgtctcaattagatcccttaagttaatgtaaattatatgctagacttagagaatgaagatatattgtataacccactcaaaaaaatagatatatttaataaaatataatatgagagtatttttgattagtggatacaaaaaaaaatatttgtcaacctatcctgttcgaatcctaccacatctttttatagaaagatttatgtttggccctttaagggattactgggctgacataccgtgataatgtcactcttaatgggatgagaatctttgaggtacacatgtgacctaattaagagaggatgagatatattcatttcatgagttataaagtataaatttgtaaatatatgactttttctcaacaaatttattttatgagaaaactagggaatagattcgcgcttcgcgcggttttaataatttttttaaaattttacatgaaagaaatta

SEQ ID NO: 314030 - DNA, 569 bp, Cannabis indica
taagttgtaatatctttttaagaaaaataaaaataagtaaataagttgtagtactcaaattacaaaactgaatcgaaaatagaccatttcaaatgatctctctatctaagtctgatgatttcctaactaggttgtgtgctaaaacattatcatccttgaaatgtagtttaaggaaacattaggaaatgaagataaatagttttgcaacaattgaacaagattcaaaaggaaagattggtccttccatttatgcttgatcttgttaactaaagcttgacagtctgattccactgcttttaatgggaagtgcataactacgccccaggagagggttgcctgcagggccttagctttagcatagatgggagttgaggctcctacaaaatgagaacacagccctgccacaatagctccaacacctgttttcaaagcttgaacatcaagggaagcatccactttcagcttaaacatcccagcagaaggtaatctcgccctactaaatgttgggaatattttaccaggatctagatttactaataagtatgttgaattaacatcctaaatatgaa

SEQ ID NO: 314031 - DNA, 1494 bp, Cannabis indica
taaatctgattatattaaaatggattatttagggcacaaaacccaacagtaatgtgctatataaggctgctaccaaacttttttgcacacgacttaaaatgatgctaccagagttggtcgcacagaatcaaggaggttttgttcatggaagattcattggacacaatatcatgatttgccaagatctcatcagacactatggaagaaagacaaagaaagcaaactgcatgataaagctggatttacagaaggcatacgataccattgaatgggatttcatgaaagagatgttatatagattccttttcccaccaaagttcattaacttggtaatgacttgtgttagaactcctcggttctctttgatgataaatggatcattacatggcttttttgaggccaagcgaggtttgaggtagggagatccaatgttttcgctcttattttttctgggaatggaatacctttctcgaataatgaggaagattggtaaaaggctagattttatattccatgaaagatgtgggggtcttgagttgaatcacttaagcttcgctgatgatgttgtattatttttcaatggggactacaagagcatatattacatgttgtagggattgaagctcttctctcacacatcaggcttgtttcctaatccctttaagtcagctgtttattgtagcaacatgtatgatacagatgtgcaaagaattctggatgtatcaggtttccaaaagcaagacatgccattcaagtatttgggagtgcctatatgcccaaagagaatctcttcagcagattgcaaaatattggtggagaaaatgatggctcggatcaaaacttggagcacgagaaatctttcctttgatgggcgtatagtactcattaactcagtactcatggccatacactcttactggtgccaagtgatgatgctgccaaagaaaattgaaagtgaaatagaatccatctgccgtagtttcttatggaatggacaatacacattaacaggtgttcccgcagttgtctgggcttcgatttgtcaatcaaaaagttcaggagggctgggattcagatgtatttcagattggaacaaggctgcgttgttcaaatatgtttgggctattgctaagaaggaagacaacctatgggttcacaatgtctacattaaggataaggattggtggacctataaaccttcagctcaagcaagttggtatcagaagaaattggtgatgataaaagatcaattgaagagtttgggttccttaaataaggtataaggcaattacttagtggttgttggctatagagaaatacatacacaggcgactaaagttgtaaagcccgcttagtttaatttggaaattagcagttaatcatgattaattatgaaattatttatagctatttaaataatttattatactgttattattgaattcagtgatgcatttttatgtcatgtagtagtttgcataattttgcattccg

SEQ ID NO: 314032 - DNA, 1695 bp, Cannabis indica
tttagtcacaacaaaatgttacgaatgactaaaatatagtctttaggtacaaattgtcattaatttagttttagtcacaacaagttttgtgacttaaaatacatttagtcacaacaaattataatttttgtgattaattattttgtcacggatcttttagtcacaatatagaaataatgatttataattaattacaactttttcacttttagtcacatgttttgttgtgagtaaaagtaaatttttttgtagtgacaattcaatccaacacaatactatatattatacaatacagtacaatacactatagcaaatgagttaaaatggtatgtgttgatagagtttcaatatttataatgttgactatgatttattattatcaatgaatggataaaattttatatataaaaaaaaatgatatttttagttgcataattaaatgcaattttacattacaagagaattaagtttcattatttgtaatgttgactgttgagcttaattgattttgatattttcaagtgtgaatgaattttatttatatgaacatacgttacaactcaattttctatatttgtttcttggatgttgcaagtcaattaaatattaattatataattttgcaaaaaaacaaatatatattaattatattctattttccaagaatattattagctttgcaattaattattttacgatacaaagttgtctttataattggaagttttttcaaacaatatttaactagtacatcatatctatgacacttatatatatatatatatattaaatatatatatatatttatatattttcataattttccattgacatcagtaaccatgaaatattagaaattaaagttactattaggatattttccaaaaacaattctttagagaaatttattgtacaatacacctcttaacaaaaaaaaaaaaagtgtttcgatagactcactatctttttcgactttcaaaatattttaatccttcttttttaattcgtgttgtgaatatttacaaaatttcagaaaattttaaataatttaccgtgacaaatttaaattcaaatatttaattacggctgattttttatacgaatgatgtgctactttatttatttattttgtaatttttttcaatgagagttaaatgatacttattatttacttcatagtcttcacttctcgtattaacaattttgtaatgatggttcttcctaagatagtttagacatatatcacaaaggtaaaattttattactttggttaaaacaacttctttcttatgttactcagtcatgcacttgtgagtataatatttaaaatgtacccattttttggttcaacttttttttacaatcaagtctatcaaaagtaaaaataatgacatttattttttctcatgaaaaagataatttggtggtaatacaatataaagaaatcatctaggaccaggaccaccatatatcatgatatgtccaaagtcaccatgaaatcccaaatctttaactaaataaaagtcaatatcaatagaagaaatttttgtatttttagcaacttcttgtatgtgtgcctcatttatagttgttaattgtctacaatatgcatcataacgagtatcttgttttagaagtaaaccagaacccattggaggaccaatttgaccaagtggactgtaagtttctcctccc

SEQ ID NO: 314033 - DNA, 1089 bp, Cannabis indica
aaatgggaagttcatgtaattaatggactaaatttgtacaaattataaaggggtataaattttgatataggttgtattattagggtcaaaaattgaaatttcccttttactattaaaagaaaaaatttagtacatctaaaaatttggtaacaaagtttagtatgtatgaaaatttagtgttcaatattgaacataagtctccaatttggtaacaaagtttagtatgtattaaaatttagtgttcaatattgaccataagtctttaaatttttgataagtgagaaattaaaaagtatattttagtatatgttaaaacttatgctaaaaaatttaattagtattttttaaattaaaagttgaaaaagggagaaataattattaaaagaaaagtaagaaaaaaaaaagtgagtgagtgagatgtggcaaggtggggttggctttaagcaacaatttaataaaaagaaaaagactagagacgtagggtgaggatgtggtcatgtgactcatcactcatatatgccttatttcggttttgtttggctgagtttttgttttttgttttttgttttaatttttagagttaaaaatttaaaatttaataattgctcaatcaacaacaaaagtggtttaagagcttcataagtttaaaaacacggccaatctccattagttttgctagaactaaaacattcgatagactccattcatttcaaattaagtttaaattattgattaaattcgaactaatttaaaagatatatataaaatatatttaatagaatcaatcagtttaatctaacattcaatatataaccaagtctaaaaaaattttaaaacattagatttagtttaataaacatccatagtgcaacgttgacttggttaattagtaattttttcccttgaattttgacatgtaccaaatcatgatccctgaactttttttgccgttaaaaattccccctgaactattgagattgttagatttaaggacttttgtctaattttagtaaaaaaaattaacatggatgaaaattcaaggggcatgatttagtacatatcgaagtttgaggggcatgatttggtaga

SEQ ID NO: 314034 - DNA, 1322 bp, Cannabis indica
agcataaattagatcattttacatataaacatgaccctcttaggtagaagagctcatgaaagtgttaatatgctggattttttttttaaactactttgccatggaattgcttttctctgttgtgtttaatgtctagttatagttctaaaatatattgaagaacatttaaatagaatgggatatggcttttcactctcggaaatttcacatcaacttttacttttttgaggatattcattatccactatgagggaatagtcacatctcctctccatccatatccccataccactttaatattcttataatatcatcattcaagttttttacctaccaaaaaagagcttatttacacaaaatgggtcatctctgaaaatccaccatgtgaaaaaaaaaagttttggatgaatgatccattgaccctgccttgtagtgtttggagaaggaagtggaaaaaaaaatatatatagtaaatgaaaaataatatttgcacaaacaaattttgtaatttgatgtacttaaaaatagaaatagaatattgttattagatattagccactagttatgtttaatgctagtgattttttataataattattaaattaaaatatataaaactcgatacacgttatgatattactcggtacgtttttccttaaaaaatattcacaattgaggttaattatatattataatgatagtgtgtatttttttttttttttagaatttatgaacagaataattgtttctttgttctaattagtatatttatcattgttaacatagaaacattcctgctggcattaacacattaaactcataatttattccatgtcttaatgctataagattatatattgtaattaaaatctcattaaaagttagtaggtaagaaacactcttttattattattaaatctagcttacttcattaaaatttaatgttaaacatatttttttcttgctattttcaaatagaagtgatcttattctatttattttaaaatttgtctatttcatcactattttcactcctaattttaaaataaacaaatatatgatttaaatctttgtgtatttaacaatgttttatctaaagctaaaataagctacacttttttcatgtatagatgacatgtcagcttgagggaatttattataataataacagttgctattaattataatatatattgactatagtggaaaatctgagtttttgaaattatataaatgcttcaattgaaagaatatgaaaaactgtttcaaaaaaaaaaaaacaaaaaaaaaaaacgaaaaaagaaaaaaaagaaaagaaacaa

SEQ ID NO: 314035 - DNA, 1335 bp, Cannabis indica
agtgcccacacacatcaagtggtatctcaattatagtgtggaagattgtgaagaatctaaccaacttcagatcttgataatgctcttctacagaaaggaatcaaaggctagagatctgaacggaaggagtcattatattctcctgcacccaatgtaaagtttcttaaactttatatgtgtttatttgattgttttataaattcatattagaatgttaatgaaacatacttgttagtaaatctagatcctggtaaaataattccaacaggaagtccattaatgttttttcccaccaattggcgtcgattgagaagtagcttccatgatgtcccctacaagttaataaatcataaccaagaattaaagataaaataaaaaataaaataatattttaacgaacattaacatatatattgatcaacctaaaataattcatcataaataataaattatcaattacaactctttataaaaaatttagaagcatttaataaataagttttaattagtaataaaacttaaaactatagaaattggatttataaacgttggtttccttgccattgctcaaacatttctctagctaagttatccctccaagcaatccaagcatctgatgtctcaatatatgtgtaacaattattatctacatattcaccatcttcgtcactatcattgtcattatcatgatttgcgtgctctaatgggtccatatgctttcctcttctgatcaagttgtgaagaagacaacaagctagaatgatgacactgaattttaacaggatagtatgatcgacctctaagaattgcccatcttcccttcaataacccaaatgctctttcaactacattcctagcagatgaatgcctcatgttaaaaaattcttgaggactatttggcgggtgtgtccaatcacttaaatgatagcgttgtcctctataaggtgtgaagaaaccttcaccattaggatacccagcatcatataggtaatagtatcctacaattaatgaaacagaattttgagaaattttatttaagaatgaatatcattaaataacaatattaaaaaatgagaaaataatttcaccttgtggaacttataattcgttcctatgtatagcatctcgtaaaactctacagtcggcagctgaaccctccaatccaggcaaaacataaataaattgcatatcgtgtgaaaccactcctaatacattagtagcactttcgttctttctggttcaatatctaggcctatttgaagctaagacattcactttaatatatgtcccatctagtgctcctaagcaaatgttaaaccatttccacctttcatc

SEQ ID NO: 314036 - DNA, 1599 bp, Cannabis indica
aaccatgcaacataaaatgttatttcggatctttattaataagtaaatctgattatattgaaatgggttttaattaggagacaaaacccaacaagaacatccagatcccagaaactaagggctttcggggggggggggggcaggccagggatccctggcttaactgcaacctccactgtacaaccacttgccagccagccatcaacaggggtacccatggtcggctagggcacaacacttcctccccttgtggagcgaggtgcacagagatagatcatcgactgacgaggattgagagtgggtggaaacacccaaaatggtgatttgagaattgaaacagatcactttaggcatctagatccaccaaattctaacaactggtatgatctacccctaatcaacacacaacctacaccagtcgactgaggagtcaaaggcagccaaaccctgcccagcacaagtctgaccggccacgaagacatcacgggtggccaaaccctgacctttgcaggtcttgccgaccatggaagagtactgggtggcaagaccctacccaatgcaggcctggccagccaagcacaacaaccgagcataagcctgggcagcctaggccaactctcttacttgggaatggctgaccagggtctgcagggcatggctaatcttcaccgtacactctcccaaggtatggctagccagcccctggctcttcagaattagcaacctccccaaggagggtcagtcaatcaagtccccatcgcaacagatccttctgtgcaataacagttggaccaacttagggacatgattcagggcatagctggcccaaagccttcagacctcaaacttaatcgatcgaagggatcaccattctcagcatatataaatgccatacctctctcgaagttcaaaatgccagtatggaagatgtataccggacgggaggaccccctggctcacatcaaaaactttaagatgcagctcgacctccagaaggtcactagtgatgtccgctatcgcatattctcagccaaaatgtcggagatagcttaagagtggtactttaaactcacatcgtggaaattcaactcctgggctgagttctcacgagaattctacacacatttctcatcctcaagacttgtactatcgtagctcgaagaccttatcgaagtaaaacagtgaaatgggaacctctaaaagattatattcaaagatttatggctgaggctaccaaattcaaaggccttactgaagaaggtcgatatacatccatacaagggggcatactcccactaagcgacttctggaaagatatctagaggatatccaccaacaacattaaggggttcctcgatagagcagacggttttatcaaacttgaataagccatacaacaggcgcaggcagggcatgtcaatagtaggcagtcacgaggcacccagcagcctcatgacccactagcggcacatgtaagaaatagaactaatgcgcaaacctctagtggcaaaaacactagaaacaaggacaacaccaacaacattgggaggaacaatggcgaaaatgggaagtttaacacttctcccacgccacaaaaga

SEQ ID NO: 314037 - DNA, 995 bp, Cannabis indica
ttaattccgctgcatcaatgtaaggttttcttaactttatatgtttttaatttatcgttttagaaagttcatatttagggtgtttaaacaacatacttgtgagtagatctaagatcctggtaaaataaatatccaacagggccagccagggatctcaggctcaacaatagcccccatcattaacctttggctggctagccatctggatgagttcccttggccggccagagaggagcacttcctccccaagagaagcaaggtaccaaaggtcaatcttcaaccgacaaggaatgggagcgggtggaaacacccaaaacgatgatttgagaagtgaaatcgatcactttagacacctagatccactaaattccaacaactggtgcgatctacttcctatcaacacactgccaaattcaatcaatcgaggagtcacaggtgaccagacctttctctatgcaggtctggctagccatggagcagttatgggcagctagcctctacccaatgcacgtgtggccagccatggacagctgcccagtgcaggcctggccggccaaagccagcacccatacttgggagtggccgaccagggattataaaatacataggtctggccaatctccaccatacactctctcaaagtatggtcggccagaccctgtcgcaccacaatctgcaacccgtccaaggagggccagtcagtcaagtccctacagcaacagatccttctgtgcaagcacagttagactaactaagggacatgattcaaggcatagctggtccaaaaccttcgaatcttaaactagaccggtcaaggggatcaccattctcggcatacataaatgccttgcccttgcccaaattcaagatgttggtatggaagatggataccggacgagaaaacttgttgccgcactcaaatacttcgagatgcaactcgatctccagaaggttactagtgatgtgtgatgtcgcatatgttgggttttatgccc

SEQ ID NO: 314038 - DNA, 1786 bp, Cannabis indica
ccaagaggcaagttcgagctactacgaaacatgattggagttacagaaatgtgtaccaaggaggagtattagaaattgatacacatttctacaatactaaattaagtctagaattttctacacatttgtagaaaaacatactctaaacttttagataattgtagaataatttagaattttctagacatgtagaaatccaatagaacataggcatttctagaaaactttagtctagaagtttctagttatgcatgcttaagaaatatgtagaaatgtatggataaaatccttgaactagaaagatctagaagaaataattctagccataaagtgtaaggggtgagcaactataaataccccatcaaacttccaaattgtaaccaagcttgagtagccaaagcaagtcttttactactagcctactaccttgtctcctctcttactacacacataaaaattaaaacactacataactcttccttatcccaccaatcatccaacttatcaacatcatcaaactattaactacatatccacctattctaaacaaaaccaatacaaatttattctcaaaccatcacataataagaatatttgcggagaaaatactaaagttattagatgtgtagcacttaaatatcaaagttattttttaggagcgaaaatacttaaattatttcgtttgtaacatttaagtacctaagttattttcttagcggcaaaaagcacttaggtacccaagtcatacttttggtgcttaagtctaactacataacttaagcaccaaaataatagtttggttgggtactttctttataaattgggtactttccttgtagaaaaacaataacttaagtatttgagcgttacaaacttaatttcttaggcacttttaccactaaaaagtaactcaactatttaagtgctacaaacttaacaagttaggtacttttgccgcaaaataaaataatataggtagttaggcttttgaaacttaattacttttagtttgaacttcattataagaaagttcgtggaagctggatgctatttggaaggaagttccaggaaggtcaatttgtctactctggatggaagcttcagggaagctagtcttcttccaagaaagggagtcctggaaggctagctgttctaggatggaggcttcagggaagttagtcatttgccaaaaaagggagtcctagaaggctagcttttctcgggaggcttcaggaaagttagttgttctccacgaaagggagtcctggaagactagctgttcccaaatgtaagcttcaaggaagcttcttctcatccttccacgcttagtccaggaagtgtgttccacatccggagagtatctttgtaagtgttgacgtggagatctctgttaaaggagttcgtcaaggcgtaacaaacttaactatttttcagttacaagcaccgacttaagttttcatcttcaccatctataaataccctcacgaacacaaggcaaacaagagaaagagtactcttcaatggagcaagagttctcctcaagttagagtgagaagctcaagagtgttagagagaaagagagaaataagcaagaaagttagagcttgtttggctgtgttttcagttttcagtttttaaaattgtgtttttaaaagtgagaatagaaaacaattttttgttattttaaaaatttaaatgtgtttggcacaaatttttaaaaactattttttagatttttttcttaggaaaaaaatcaatattttcacaccataccatgacattaacc

SEQ ID NO: 314039 - DNA, 735 bp, Cannabis indica
aacaaaatgttgttttctgttttaaaaaccaattcacttttagtcaatattgtttttaaaaaaacagtgaccaaacatgacttgtttttaaaaacttcaaaaactattttttattctcatttctaaaaacaattttttgaaaataaaaaacagaaaacaatatcaaatatgctcagatattttcccttttcaaaaaatttcttaattatacgaagcaaattaagcaattatcttatcggagaggagaggagaactggattccaaaccaaatagaagaacttgaaaattgaattagtacaattatgaaagttctcaatcaaacttgttaattcgatcgatcttcaagttcttctacttggttcggaatcaagttctctacttctgtaatatactttgcataattagattcgtataattaaaaaatttctttgaaaacagaacactatgtctgcaacatttacaacttttatgagaatttcataattctggtttgaagtatttcatctagtcaagaaatatatattcttctttattggataagattttttcaaactttagtgttataataagctacttacaaaaattaaggtagcgtttggttggaggtaatgaaatagaatagaatggaaacgaaacaatttttattccattcttttgtttggttgcattttaaagtattggaatgacattctaatagaatgctcattccactattttggtgaaataactattcca

SEQ ID NO: 314040 - DNA, 2242 bp, Cannabis indica
acagcagtgtcaaatgcatcactccaatatttgagtggcatttgagcttgagcaagcaaggtaaggcccatttcaacaatgtgcctatgcttacgctcagcacgaccattttgggcagaatcatggggacatggatgttgaaattcaatgccatgttgatgaaccaaatcagtaaagggttggtattcaccaccccaatcagttctaagacttttaattcttttatcaaacttattttctaccaagttcttaaactgtatgaatgcattaagtgcttcggatttggccttgaggggatacaaccaagcaaacctactgtgatcatctaggaaatgtatgtagtatttgtggtttatgttggatgcaatgggagctggcccccataggtcagtatgaacaagttcaagcaaggtgttagcacgattagatgacaatttatgagggagaacatgtgatttaccgtactgacatgcatcacagaatttttgcatttcatttttaaagtttcttacatttgttgactctagaacaagctttaaaatcctaggtgatgggtggcctaaacgtctatgccacacatctaatttggacagagagttttcatcagcttcaagctgatttacattggcagagaaacaagtagaaacataagacgactttgactggtgtttatttttgaagtgtggttgagttgaacctgttgatgatgggtgagatgagggtgtttccagcctgtataatccatctttaagcattcctcgaagcaccaccttctgtgttgccttgtccttcaccaaacacacattagaatgaaactcaattagtacattgttgtcattagtgagttttgaaacactaattaagtttttagcaatttgagggacaagtaacatttcttttagttgtaaatgtttcccatcattggtatcaagaacaccactaccaatatgggaaattctgattttgtttccatcacccacagtgacagattccttaccaacatatggctgtttctggtttagagctgcactgtcggaggtgatgtggttgctggctccactgtcggcaaaccacacatcactctcaaggatttcaggactagcaacaaaggcattatgattgttctgaggtggtttatttcctccactggtttgattcggatcagatcccatgaagttttcatcaaacctgttgtagcatattgcagcagaatgaccgtatttgccacagacttggcatgttggtcgatttgtgttgatcgtcctcttccacgaaaccttccagggctcccacgagtaccagagaaccggcctccagtgccagaatactggttgttgttgctgttgttgtttgaacctcgaccacgtccagtgttgtgagatgcagagttattcttggcagcaatattagcttgaggatttgttgagttggttggtttgctgcctatggtaagattctgcagcctttcgattttactatcgaagctcaagagaatatcctgcagttcttgccaagttgtgcttgttctagcttcgatttgtaccacaatcgataagtaatcagcatccagacctgacagtacgtttgcaacaagatgtgcttctggatatggatcacctgcaagagcaagaatatcagaccagtttttcttttgtcttaagtactcacccatcggtgtggaaccttttcgtacagtctggattaaggttcttgtatcatccatttttgatttagagtaggctccataaagactttccaaagctctccataggcctgcagcagaggtggatcccatgacttcagtggcaatcccttcggtcatggaactgtaaagccatcccatgagtagttgatcattgataatccaatgttcatactcagggttagtctccatttctccttcgtattttgcttctccagtgactggaagaaattctggtggacacaactttgtgccatttaagaatccatgcaacctgtgacctcgaacaatggtggaaaccattgttttccatagtgtaaaattgtttcggtctaatttgagtgaaaagggttgattgagtgtagttggttgctggttaaaggtgtttgggagctgagatgccgaggcaccatttttgtttgtgctgacagctgaaggagtctgagaaccttcctcgataggttgctgttcttgaggtgtagccattgacaggggtcaatgattggctctgataccaacttgaaattcagagaatatagg

SEQ ID NO: 314041 - DNA, 521 bp, Cannabis indica
atatatagatttatatttatatacacattgtatataccaatttaaaacctaaaactatataatatcaaatgtaaaattaaaaatcaatacgtaccaaaaatggagaacaatggccggtggtggtggtcagctgctcaagaggtggacggtggtggaccgtcggctgctccgagtgtgggggtcgaggtggtggtgcgtcaacggggccggggtgttgggcaaccaagggggtcgggtggtggagaaatggggggaaaatgaatttgaaatttaaagagaagaagcagaaaatgggggaaatggggctgatggagtatatatagagggtgtagcagcggactattagcgacggaattctgccgctaatagtcattaattaaattttttattttttaacagccgctataaatattcgaactgaatgggtgggatttatcccgcccattcattagcggttgaacaattgcagtgggcattagcggcggacagcccgccgctaataatttttataaaaaaaataa

SEQ ID NO: 314042 - DNA, 767 bp, Cannabis indica
ttttttttctaacattgctatattattatacttcttagaattaacttcctcaagctatagttagaagttttatctagtaattttaaaaaaatgtaagtataagtaaaataatttggtcaccatatgacttgactacatgtacataaggtattagaactagtataaacaaaaataaagcgatattatggattgatattattaatacaatggctttaggtctttatatacacaacataatagtgtataatagtaataaccaatctaactgtctaatagtaaaaataactaacttcttaacagatttaatatgccccctcaagatgaagtgtaaaattttttaatactcatcttgaaaacttaagtatgaaaatgtgttggaaacagcggtttggtaaagaggtcagctatgtttgatttggaggagacgtggttggttatgatcttgccactattttatcttttcatgtatgaggtgacaattgatttttacgtgctttgttcactcgtgataaattggattttcagagatgtgtagagctgcactgttgtcacaaaagaaggtcaaaggaagcttgatgttgatgttgaagtcatggatgattggatgtagccatgtgagttcccatgtggcattagtcattgctctgcattcaacttcaactgatgatcgagagacagtgtattgcttctttgatttctggttgatcagagagttgccaaggaaaacacaatatcttgagatggagcgtcgagtgtccaagcaggct

SEQ ID NO: 314043 - DNA, 2781 bp, Cannabis indica
agttggctcattgcttggcaagagactcttgtttctctacaggtcgtgtgcttcagttagaggaatgttcctctaaagtgcgttctattgttttgaaagaatttattaattaatatatcgtatgatttttattcaaaaaaatcccatgatttgagggaataattgctgtaaaaattacagtcaatttttgtaatttactgcccactatgtaattataaatagtggcagacaagatcaaaaggggggacgaaaaaactcatacaagagaggccttgaaaaacaatcagaaatctgaataagatggactcgtggactatgcagaattttaactgcaaaaccacgtaaaaaaaccctgtgttcatacttttttttctatagcttttatttatctgtgcgaaatcaccactgtgaggttcaaatttatttaacgaaaatctgcgttaacaattattataatatgtataaaattttaattgtatacaagcagtcctatcgtaagagtatataccttagatcataataaccacatgatctaaaattaatggtcaaaaaagttcactaccgataggaaacttttgctaggtcttgcccaatatatatatactaggtagatgttacgtgccgagccacgtaaataatagttctatttaaggttttgatgtttttttttttaaaatttcagtgactaaataaagtatgattatatgagcagtttgttttatcagattaaactaataaaatattgttgtgtatataaatttatgatatgtacattgttattaataataaaaaataaattgttcccaatttttacatactcatatagtacttatccttaatgtgaagaaatagtttatgataattgataaatcataatagcatatgactttaacatttattatttgtttctgaaaaatttaaaggaacaatatattatatgtgttctaaaatttaaagcaaacattatgtagcgaaaactaaagaaaaaataccatcgtaaaatagagggaaaaaattattaaataaaatcttaagaaataacacatttcaacacaaaaacttggtgtatgcacatttgagaagtaaggagatagagagtagtgcagggttaaatttatttagttggaaagagaacaatttgaggttaacaatttgctcagattcttaattaaattacctttcatctttctcctctataaatagagaacatgacatattcccatcacccaacacaatcaatcccccctaaccaatcaaataaataaaaagtaaaccataaattaaactcagcctagaattgatctcttgtgttcttcaaagttcaaacagtggttgcagttggcttgaaacaatcaatattgcataatctaacagatctgaccatgctgccaaagctaccaacataagtcaaccactcaggataaccaaatttaaatgcaagatatatattatatgccacattggccaagtttgcattgaacaaagggaaaacatatagataatccatagaaagaaatttaaaattgaagtattaatcagtataagttgctaaccggtcaatgatgttccttgtcttctctggttgatccaagctatttgctttctcagatcgatcaatgctttttcttgatctctctctcttattagtgctgacacttgacttctcactgcggcctgtactaaatctaggcttttctctctggtcaagactcggtttagaattctctctccaatctgtgcttgatctagatctttctcgaaaatatgtgctctttcgagcactttctaattgcactgtaaattttccgaactcttgagatgttttatgttctccgagtaaagttctaaaatcacactgattccctcctttcacccacaatggctcatatttctccttacaaagttccgccagtcacttaccgtgggagcaatccactacatcatcaacaattccctgtctaatggcggagacaattaaaaagttgcatggaatattttcttcctaatagttactcagttattacacaaatcattaataaaagttgatatgacattcaatttttgaaggaattccatttaccaattactaaatgcgaatgccaactacattacagatatggctatttacacttgaatcattctattacctctagagtgtacatgaaacagaaattccaaaaaaagacaaaaaaaaaaaataaaataaataaataaataactttcttaacaatcaccaattgtaatagaggtccagcaatgttgttcataatgatcattatgtgcaaagtcaatcgggttcagggccacatccacttaatattctaaaataaaattatcatctttaaatcttgtgttactcagacatcaaaaatagcaagcacttcaataccatccacaaatgtccagtcaaatatcaaacataagtgagttaaatttggtgcaattaaccattaaacatggtctaacataatttccttttgtaataaataatccaaaaaaaaagaaaatgtaagacagataacatagaaagattccttaaaagaaaatatagaaaacattcactttaaagagtcggattgggatacttacatgaattaccagaactggacaattaacaaggggtatttgtttatgttctactataatttctgtagaaaatacatggaagaatcattaccaactttatattttatccaagcattttgtgcgaagcgtgtataaattcttgtaaatgtcaaaccagtaggtcgtttgatagaatacatgactcggagaccagac

SEQ ID NO: 314044 - DNA, 928 bp, Cannabis indica
tgtaattttgtattttgtacttttcattctaatcggatccgcatataactggattgtccattttttcattatagtcgggtccgcatattttttttcacaataacatgacagcagatagactctttatattgtcatcaataatactcattagatatatagatatatagattctttgtattgtgttgccatcaaaaaaggaagtcacaattcgtgtaccttaccaccaaacaaagatcttaaataattatttaacaagtaacacattactataattattaataaagatctctttattaattcattaatccaagtggaaggtttcaagcctctattaatgtattatatgtccaacaacatataatcaattagaacatataatcatctcttaacaagaaaacttatacgaagaaaaaaaattcaataatcaattctttcatatcactaagtaaacaaccaacaacattcttttaatacatatatcctgtttttcaactggtttaactactattacagaattctataacattttaacctttatcacatactaaaattattactttcactaactatagtacttaaaattattagctatcaaattttagccaaaaaataataccttttcgaaacacgtagatctataatgtttctctaattgttgatgtctatgcaattcaatctttttctattatcattacatttgagcttttatagccaattctgcaaaattactttatcacattttgaaatattaattttgtctaggctctttaaacacttaagctttgaaattaaatcataaaggattaattttcacacaactcagggccagtttagcacagctgtgctgtgagaaaaaacagctgtagctgtgctgtgagaaaaagtaactgtagctgtgctgtgagaaaaagctgctgagtgtttggta

SEQ ID NO: 314045 - DNA, 1541 bp, Cannabis indica
ttaaaaattaatttaaatataacttataagaaacaacatgacacttaatattaagtacttatgaaagttctaaatatatagcttaagtatttatatataacttttagttaaattttaatatttacaccacaaatttcaatatttacaccacaaattactcataaataaaattctaacacatttattatattttttttgaaaaattacaataaatttgaaccaagaagggtaatatatagagaaaccaaattttaaatagtttagcaacaccattataattaccatgctcatcattacacagcagagtgagatcatcatatcccacatcttttatatactaatactgatcatgtggagggagtttataaagaaattactggttgaactctattcatagaattacttgccatataaattagtgaatggaaaagttgaaagaaaaacttgtgggtttaattttggtttaattgtaaaagtagtgaatagtctcctttgagtaatttactctagcattatatatacacttgaaaggctttgatttcgacaacagtctccttaatgaacagcctattcgtaattgcgcttatttcaacaacaaagtaaatatggtgaacagtctccttgaacaatttactctagcatcaatcatggtcataaaccacacatttattttttatatacactaggaagaatttgatttattttttaaaaaaaattataataatatatcttttaaaattcaattaacataaataaattaaaaacaaaactgatttatcttgtacatcataacacgataatgtacttaagttaaataattacataaattttaaaaatatcattccaataatctaagtgccagtttggcacaacttttgaaaaagttaaaaactactttttgaaaaaaactgtgataaaaatgtatttggtaaacagtcaaaaaacagtttcttgaaaaatttatagaaaagctacaggctatagctaaaagctgaaattagtacaacccgacttttagaaaaaactattttgactaaaagaatataattaatttatttatactgaaattatatttacttatttattatacattagaaaaataaaaaatatttaaaataaattaatcataataaaataaataataattaaacctctttttttttaaaaaaatatattttatattttatttttatattaagaaaccatatcaacttaagttttttcttatatatttgagcttcgaatttcttttttatttatatttgataaaatataacataaaaatattataaattattttttatcaaatatatataaatttaaaattaaaaaaaatattgacggctaaaccacttgaactttaaattttttaacacttaaccacaaaaatcaattttttgggagcaaaactacctaaactcccattccgttttgctctgtacccctccgtccaaaaatctcagttaagtgccacagtggactacccacgtgtacacacttgaacacgtgacaaatttttagtggcccacgtaatattaatt

SEQ ID NO: 314046 - DNA, 1207 bp, Cannabis indica
aaactctaatcttgtagagagaaagtgaagtgtgaaaaatgagttaggaaaactctccttttataatgaatgaggtctaattacaataaaataatagaaaaattggcacaaaatttactaggaaatcctacactagctctcgaattaattttaaggtccaaaagtttagaattgtcgtggggtgtgagacacatttagatccaccttgaaaatagatttaaattgaccacattatttgaaaaaaaatatgagaaagttatggacattttagtgagctgtgtgcactatagaaaagtgactgcgaaattagtgtgacttttgggtccctaggttgacataaacgttaactcgggcgcacaaaatttggtttcgtgggctttaggaacattttgagatgcatgaataatgtgatatctatccttcagttcattctttgacattgggaaagttctctttgaacttttacttaataggcatgggtgattcccgatgatccaatagtgatgactaggtgacgccctggtgatcactagtgcacatgggtgtcggtggacttacgcgtgacatatgtacatgagatattgaattgtgaaagtgttccgattttgtttttggagaaaagtaagaagaatgttcgagacggaatcgcaatcagatcaacagaaccaccaacggggtggctatgtcaacttgggcgcctagtgactggggtgatgtcaacctggacacttgtctttccaattggggcctagatggatttgtttgcttctcaaaagcacatttatcttcatcatggataaaaataagggaaatgcgcaaacaacttcttagaaaagaagtcttggagtgcccctggttgagatacgttaacctgggtacccactatggccttagggcatgcactaggcgcccaggtggggtttaacatcttcaaaatttgtttcgttgatcctcaatcttctttttgttgaaaagtgatccatggattttagtttcgtcaaatttgcatgggcattacttagtaaaacaaaattggtgcccaagttaaaatgtcaaccgtagcgcccatagttatgtatgggctcgttttctatgttgttgatgaaatatcatgtccttgcaatgttccttgagggatttgaggaatccaagtccaagtatgtacctaaaaacctaaaccctagccacgtgtgtgcctaaatcatct

SEQ ID NO: 314047 - DNA, 825 bp, Cannabis indica
aaaaaaaaaatatactatatttttaaaacataaatattaatgagtaagtataactcgacttgagacttaggaagtatatgaagttagatttcaatgtgctaaatttgttatatattgctaaaatataatttattttagatagattttactcaaataatatgctaaaaattgtgctaaattttgtatcattataaatactactttctttttttttttccaagaaaaaatactcttgatttacttttaggaaataatttaaaaaaatacaaaaataaacaaaaaaaaattacaaaaatatggttgtatggaattttaaacaattttacggttttaagattttatttacataaaatacattattttgataaatttttacgttgtactcttgttatttttttgttaatttttagttatttgtatattattttttatattattttgttgttattttgttgttgttttttttattactttcatgtggtttattttttagaataacataaaaatatatataaaaaaaaaaatttgaacataaaatagtataaattctacaaaaaaaaaaaataatttatgcaatttttccttatttttatgtcatgttttgttatattattattgcaattagtaattactaataaaatacataaatatacaattattattatttttttatactaaatagtaataaacattcataaaaaataaatcttgcatgaatttttcctattttgcattgaagcatcgtaatgctaaattatatctttatatattaaaagtgcctatttaacgacatttcttggtttaacattcttggtttaacagaat

SEQ ID NO: 314048 - DNA, 2451 bp, Cannabis indica
acaaaattgaatgggccaattccaactgtattgggaaaccttaaacttttgtaccagcttaatctcagcaataatcatctatgaaacttgagtgggttaaagcatcttgatttgtcaacaaacaatttagtaggtgagataccaaattggcttggtaactttgaaagtttacttagcttaagcctcagtcacaatattctatcaagtgaaataccatcagagcttggaaacttggtttctctgcaatatgagcttgatctcagtagcaattcactctttggaaaaataccctcaagcctctcgaagcttacaaagttggaaattctcaacatctctcataaccacaaagctacaagacttaaaccctgtagaaggcaaagaaataaaataagaaatggtcttatattattcattggtcttgtttgtggcctagtattatttgttactgtcattgttatcactctcatattgtgtcataaactcaaagtgttggataagaacaaaagagattccaaaaaaaatggtgcgcatgagtcattgatttgggagaaggaagcaaaattcacgtttggagaaattgtagaggcaactgaagactttgatgacaagtactgcattgggaaaggaggtttcggtaccgtttacaaggccatattgagagcacatgagttagttcttgcagttaagcggttgcacatgtcagattcaagtgacatttcagaagttagtcgcatcagtttcgagaatgagatccaaactctgaccgaagtccgacatcggaacattgtaaagctttatgggttttgttcaagaaataatggtttgtacttggtgtataagtatgcaaacagggggagtcttctaaagtattatatgactcaacagatcttgattgggattcaagagtgaagattgttcaaggattagcccatgcaatctcatacttgcaccacgattgttctccaccaatcgttcatcgcgacgtgtccttaaacaatgtactacttggctctgattttgctccaatattgtcagactttggcacggctcggttgttgactccagacttgtccatttggacaaatgttgctggatcctacggctacatggccccaggtaattactatttcacctattattaattagtgcttacatgaaatttttttaagtgttcttgttttttagaacttgttttgttgtgcagagctggctttgactatgcgtgtgactgaaaagtgtgatgtgtatagttttggagtggtagctttagaaattatgatgggaaagcacccgggagaactgttggaatctttatcatcagctcgattggatacattatcagataatatgttattaaaagatgtgttagatcaacgattgttacttcctactgggagattatcaatggttgtggtgtttacggtgagcttagcattgtcatgtactagaactagaccagattcgcgacccactatgcattttgtggcacaagaactatcaacaaggagtcgagtttctatgatcttcgagccattgaggacgattacaattgagaagcttgctggacttcaatatgagtagtagaaaaaataaatatttgtttaattaaaactggtacttatgtatgcaattgattgaaactcattctatacttattataagtcaaatgtttttaattacaagtacttgtttaacaagttcatattgcaaactgcaatatttcttatagattaaaataaacaaaacaggggtttgatttttctgtccttaatgttgtcctgcactattgtggacaatgtcccagatggaataaatagtagagaattgagccatatataagaacatgggttactccactcatagccaattggttttgagatagaacctcatgattctcaatatggtatcagagccatataggttttgagatggaatcccatgattctcaacatgcaccaaacctcctatcactcgatacaagtatcgagacacactcttcgagtcagtaccaaactctaataagatttccttccttctccatttgtgaaatagcattacatatttatactagctaagtaatactaacaatttactaattagtccctataccactttcaagtaacaactactattcaaccaacctagtagcactagcaaagagctctagctcaatagtttagaggggtagtagtctagtctagactagtgtatcagtaaataatttttggtatgtgagtgagcttgtgtatacatgtttttgctcatattttctccttctaaacatcttccttccttataattaaggggttagaatgcagtaataacaaagtgtttgctccctccaactggaaaattatcagctatggtagtgttagtagtgagcttaaccttgtcttgaaccagaacctgtcccgagtcacgacccaccatgcgttatgtggctcaggagct

SEQ ID NO: 314049 - DNA, 2193 bp, Cannabis indica
taaaataatttccaacaccatgcccaaacactgaattggacaaagtagtctgtctaatccaatccagttctgcgtactactaatatattctaacctcctccaattaattaatcttttctagcatctttctttctctatctttcacacattgatcaccacttcctcaaaatgctcccctttcagttcggacatccacattctccctctcgataaccttttccacactaaacctcaaaccatcattaccacaaagcagagccatgacattgagggaaacgaagctgacattactgattttaaaagtgccacaacctgtcgaatccagacccaaaaacctcttgcaacccaattaatagatttttgattaagcttgccgcagcgcctgagatcccggttgccaagaacgatgtgaagaggaagattcaaaaaaggacccaacagctagtcaaactggtggagcactaactaccatttttggcctattcaattcccaacctatggctgaaacatctcccaaaaccaccagcatattgggcgccaaactttgataagaattctatactaagtaacaaataaaatactaaaaaataagataagaagaagatgaaaaaaagtgactttaccttgaaaaaattggatatgtaataatgtaatattctgaaaacctaattatgaatatttaagatttattatatattatgggttaattaagtagtaatgagtaggattatgatcttgctaacttaattcagcataaattataaaatttgctataagtgaataaatgagcgtaattaattaattacggagatttaaatgaaatatgtagatataatgtaagttatttgtgaaataaaaatatttttaggttcggggaccctgaagacccaataagtggataaataagcataatttgttaattacggagatttatttaaaatacgtggatataatatgagttatctgtgaaataaaaatatctttaagttcggcgaccctagagacccgatttgaggctaaacatgtcataacggttttagttagaaatattgatggaattattgaaattagtttattttagaaatatcagagtattttggggtactcgaagttgaccaaataccctagaattaaagatttcttagtggctaaaaaataataagataactacttaataataaagtttttattaatattaatattatattattaacatgttattattattgttataatataattataatacttattttattataaaaacttatcattatacaataagcttatatatatgttttaagtttataaacttaacattacaaaatgaaaccctcattccatcgtacgaacaaaactcactttcttctttatccattttcttttatttttaactcaaaacttagcaatctaagcttcggtagtagcaggataacaaattcttgaagaaagaaagtgtaaggtatggtttaatttcgttttaagctaaaaacgattggttttatatagtggctttatgaattagagtggttatggagattctaacttcgtagaattgttctttggtagctatgtgactagtttcgatgtttactttttgaattttatgtgattttgagttataaatagagtttgaaactttttaaagcttagtccaaacattaatgacatttttcatttaagcactcaattttaaattctgttacgcaaggatggtagtatttatggtatataatgtcctgtgaagtttggaatgatttggataggtttcaagagtgtttcaatgagtgtaaaatttggcatttttgtgttctaccatttttgaaaattcctaggtgttatcttattttttgcactatgacgtggcagcacatactggtgacacgtggctcttatttcctacatttggttgaagagatattccgaacaaagcttagcatacatctgcacggaaagagtctgcctgaccgagcagggtaagggtagatgatccgaacaacgtatcaagacttagcagttcaaagacttgcatcgtggagcacaaaagcaatccctacaatccagggatcgtatcaaagggatatggaaagctgtctgaatccctcaatttatgtattctaaatatgtaatttatgttcttaccaattatagatattgtaagtaaaagggaaaccttccctcatgcatttagtc

SEQ ID NO: 314050 - DNA, 1815 bp, Cannabis indica
agttctatattcaactcgagttgggttttatttacaattcacgtgtagtcaatttttatacgaatgtatactatcgactaaaatacgtaaacaaatactagtatgaattagtcaatttgggttctctagtatttatagttataacttatacattagtccttttttttctattgtttttttttattaattaaaaagactcataaatgatagaccacatcataattaatctagtagtactctctacttacaaagagagataccgacttcaattttccttcctcaaagtaattaggtaactatttttttttttttcaaaaaataacctaagaaaaaaccaccaaagagcaaagaacttaaagaggttgaagactacaatgtgaatatccagactaccagactttatttacagttactgataaagcgaacttagaaagtgtattgacaacagtatttacagttctagggcaaaaaataaaattcacaataaaaaaagattataaaaggctttaatatcataaaagactaaccccattgaagaatctaaattggaagaaatgttattaagcttgtcaacgagacctttgcaatcatattcaaacgaatgttgtgaaaactaaaaagattacattgagttactgcatgtagcaaagcaagagcttctactattttgggttgaaaatttccttctagcttccaaataacggtagccaaaaccacaccatggaagtcacgagccaccatgcctaaaccacaagtcatttgcgagatcaatggaaacattgatattgactttatatgattccctcactaggacgtttccatcgcagtgattgagcggtcgagacggcagagacagaatgggaatcaaatacctcgtattgcttcgacatttagactagtaagaagcaaaaatacctaaagcccacgatcctatcaactccggtgaaataatggtattttcatggatttgtttgtttcgatagatacaaatacaccactaagtactaaggatgaactcgaaatcaatgataggaagaggttgaatgatattgcagatgaacccaaagacatcactaacaataccactcgaattttcaagcttaaacttgtaaagtttcctcacatgatcaagattgcggcattcccagagagcatgataagtggtctccaagtcaatagaacaaataggacaaatgttgtcattgagaagcccatgttttggaagattgattatgtagaattccaaattgaagaaaacctccaaacaaaactcttgacattcgaacgaagatttgttagattatttagatatgaaaagaagcatatatgatcgatatgaaaaaatagaataaactataaacatattaaaattgtatatgcgatgaaatgaccgaaatatctccagtcaatgatatttgagcttcaatccccagtgatagcttcagattgggaaatcagatttccaagctctctcaactctctttagatgaaatttgttgttttcacagaatgagtattaagctcgggaactaagaccatatatttatattggtgagacctttcatcaaagtctctcccacaattaattgtcagaatattttgacaattaattgaagaaattaaatcaaaaaaaccaaatatttggtaaattgtaatctgaccatatatagaacatcaaccaattaattttaattcaatgaatataaaataggctaattagcaattttttcccccgaactttgacatgtacttaatcgtgccccctgaactttttggtcgttaaaaattcccctaaactattaagattgttagatt

SEQ ID NO: 314051 - DNA, 555 bp, Cannabis indica
gttcatttcagaaagaaaccatatcctcaaaatttcatcacgaaatcgaacctaaatcctcaaaatcaaaaacgaaaattgtgtacgtactaaaaactaatcgattttgtccatatcgaccctatttgatcttcattcctaagctaaatccctaaaggttgaagggagagcagtagaggtgcccagaaactaatcgtataatggaggacgacaatggtggaggtacaatcctttttctcttttccttgattatttatagtttattttgtaatttgagtggataaaaataattattactatattttttctctctgttttacagaaaaaattgtttttaagttttaccgtctctttcttttttcatttttcatccactatatgaaaacagtttctctagatggagtttgatatttatattgggttgaatatattatgttaggtgtacacatttattgagatttttacacaaaatgactattttgaccaatttttaacatttatattatcctttctaatttttaacattttacttttttaaaattttctttaatactt

SEQ ID NO: 314052 - DNA, 2325 bp, Cannabis indica
atacatttaaatttttaaaataaataatagaacagctgctaacaagagataaaatcagcagaattatgcctattcctactgatgtgtgtcttgtttgctgcactgtgatggaaacacacagtcatttattcactagctgctgcttcactcagaaaatcattcaggaggtcatgccctgtgcggtaacttctgttggttgagtaacatcaaaacttggttgtctaggccctcgaaaaatctgagggacaaagtattgaacgctgtagttttagctacaatgtactcggtgtggaaaaatcgtaatggttgcatcttcgagcttaattgcaaggctgttgtggctttaagcagagaaatcaaaatggcagtaaaactaaggattttaagttgtaacagtaggaggaaggaggctttagacaatcacatttttaatgtaatagaaagctggtagtgttgtgaggcattgtttgcttgttttgtactttgtatttctgattccccgcccgttccaaatggagaataagcggagatggaatttaaaatccttaatgggagtgaggatgggaagagcgtactccccgctattttctccacctcgtgtgcatccctaatttcacatgatttactcttgaaataaaataaaaagaatgaaaataagaaaataatgtcaaataaaattattattattattatcaaagaaatcaattaaatcccttttaagttttaattagtatacactttactttttgttatttatttttggcggcaaaactccaaaatttaacttgggtttgtaaatccaatatacaattaaattttaatatgttaactgccaacttaaattatcattgtgtgtatatatacacatataattttatttataaataactttcaaaattatttacaaatgttcataaataaataaaattaaaaggaaacattttttttgataaaatttaattttttttataaaaataaataaaaagttaaaaaataaactaaaaaataaaaccctaaatttaaaaaggcttatttctaccgcaagttcccaaactatttaggttttggtaagttggtccccaaactttattttttcgcaaatcagtcgccaaattatatacgttttggcaagtttatcctcatacttaattttctggcgaattggtccccaaaattttattttattagcaacatctaagtctctactttaagatattgatatttttattatttattttacttactttaatttattttttcgtgttaaattcaaaataatattaaaaaaacatgttagagtaactagttatttcttagaaaagtataagaaaattagttttaaccttttttttcttttcattttatagtttgggttactctgataatttctatgtgagttgctatgtggatttagattgcgatttagattgctccttattgctatgtagattttaataaaaatgacaaaaaaaaaaaaaaaaaaaaaaactaaattttgaattgtaaaattgaaaaaatcctaaaaatatatcatttattttacatcacctattagtacaaagataatttattcgataatttattattaaaaaaaatatatagaatttgaaagatatgactgatcatgacaaacaagcaaatagtaataatacattagatgaatgacaagtcacctcacttaaagcaaacttaaaatataactaatccaaaatgtaaagatactacaattttaatttattttctaaactcttaaaaaaataattataaacttaggtatctcagtctcagtctctcttcattcttcaattctataaatattttcttttaataatgcttgggatagatttaagtaaattctttcatctttctttgtcactttacaatttgtcttttacttgtaagtgtagattgtgccattgccttatctttcttccaggtcttcttgaggatattctttgggatcttcctccgggtcttcttcctctgggtctttttcgggatcttcttcaggatccttttctcttgggtcttcatcttcagaatcctcttcttctaggtcttcttcttcagaatcctcttcttctaggtcttcttcttcggaatcctcttcttctgggtcttcttctttgaaatcctcttctttcgttttcatagaaaatggatgatccaacaacatctgagcagaaggtctttgattggggtctctagtgaaacacttgagtaagaaaatctttagcaatgggagtaaggtaagatggtataaaagacgtttcagtagaaatcttgttgaacaagtcttcttcccccaaattctcatcccacggc

SEQ ID NO: 314053 - DNA, 2608 bp, Cannabis indica
ctacttgcaagtgttataacacatcatcatcacttgccaagaagacctcttttattgctactgctattgaggggacgaataagacctcccttgttgccacaacaccaaggggacgagcaaagcctctcccacaaaggtcagagatacaacaaaggcctccagagattcaactatggagaagacagagaccacacctaaagacacttgaaggtgcacccaagacagggacgaaattgaccccgatcttgcggaaatcaacttggcagttggtctaactgaggaactcagagaatttcccctcaacacatttgactcgaccaaggttgtcaaacttggaacaaaccttacaaaggtcttgagtaagatgctcatggctttcctcgggagaaatcaagacatcttcacttggtcgcatgaggacatgatcgggatcaaccccccaagtcatttttcatgccgtaaacatagacaaagttaacttcaagcttgtacaatagaaacacaagctccttgataaggagcattccaaagctctcaaggaagaagttgaaagactacgggagaaaaatttcattagggaagttttttacccggtttgggtatccaaccttctagtacctaaacctaatggaaagtggaagacatgcgttgaattcaccgacctcaacaaatcatgccctaaagattgtttcccactgccaagaatcgatcaactagtggacgcgatacccaccatgaactcctcacattcatggatgaatattccgattacaaccagatcaacatgcacacaccgaatgaagagcatacaagtttccaaactaacattgagctttattgctacaaaataatgcttttttactcaagaatgcagttgcaacttatcaaagactagtcaaccatatgttccataaccaaattggaaataatatggaagtttacatcgatgatatgctagttaagtcaaatagatccaaagaccacatcaaagatttagaggagtgtttcaacatcctacaggaatatcgaatgaagctcaaccctctaaaatgtgccttcgtcgtccaatcaggtcactgtcacaaataaaagacatgcaaagcctaacaggacgaattgctgcacttagcaggtttgtttccaagtcaacagacaactctgttccattctttaatccacttaaaggaagaaacaagggatttgaatcgatcgatgaatacgatcaagccttccaagctctcaaacatcatcctgccaagcctcatatcctatccaagtcgatggatagtgaagaactatacatctacttggcaatcactgagcatgcagccagtgttggtgcatgaggaagaaggagtacaaaaccctatctactacattagcaagcatttcattgggcctgagtcatggtatccccccattgagaagctagcctactgcttggtttttccctctaagaaactaaggccatacttctaagctcatatggtgaaggtgttaactgaccaatcacttaggcaagttttaatgaagccagaagcatcagggcatctactcaagtgcagttgaactaggccagtttgagatcacctaccaaccttgagcaacaaccaaaggacatgtattagtagacttcattactgagtgtactggccacatcaaagacgatcccatgatatgtgaagaccaggtccacatgcctgagactgcaactcaaggggacactagaccttcttggaaactatatgtagatggctctttcagtgagcacggttctggtgttggactcatcttaattactctagagggatttcaaactcaatgtgctttgccatttgagttcaccacaaccaacaacgaagcagtgtatgaggcactcctagcagtactatgattagcactagcaaacaaaaccaagtcacttgagttctacaatgatcacatctagttgttaatcagattctcagcaaatatcaagcccatgggttaaacaagatctattagcctagctcaagcactactccatcatggatgaacctgattgcatagtgttggaatatcttttaccagaatctagatttactaacaagtatgtttttaacatcctatatatgaatccctaaaacgatgaaaataaacacataatgagctaagagattgatgagaaaagtaactcgcttcatcatcatggatggattaatgtacagaaggagcttctcaatgccacttctaaggtgtgttacgagggaagaaatcaaactcctcatggtcgaggtacatgagggcttttatggaaaccatgctagaggcaaagcctctaaaaaaaatcttgagacatgggcacttttggccgataatgacagaagactcgatggacaatgtcagaaagtgtgacaaatgctagatgttctccaaaattcccagagctgccctaaatgaactcaagagtgtgcaaacaccctggccattttctatctggggaattggtttcataggctcattgcctaaggggaaaggcgaagttcaatatgtcgcggtggtagtcaactgttggaaatattttaccaggatctagatttactaccaagtatgtttgattaacatccta

SEQ ID NO: 314054 - DNA, 1068 bp, Cannabis indica
ggttgttgtctaacacaacaaattgtctcactcagcaataattagttattatattaaaaaaataaatcataggatgacatttctaaccaattatatggcacagtctctcgtactagacccttaaatgtttggttggaagtaatgaaaacataaaaatgagaatgagaataaaaataaaaatgaaataaaatttaaaatacattgaataaaaaaaattattaaattttatctcatcatcatttagttttttttttttttttttgtttgtttgtcttgccagctggcatgggtcaaggttttttctaaaaatatcgtacgttcttctacgtcttcggctggattttctctggtttgttattctattccgataactgcgtcgtcatcggtggagcacggcggcaagaaggttctgatcgttgagtcgtcatcggcggagcacggcgtcaagaaggttcccttgctgcgactgggtcgattggatctacgcctgggttctttctgtcccgattgttgagtgttcgactggttgagttctcgttgcattatcggcattgttgagttatcggcggagcacggcgtcaaaggttctgatcgttgtgactggttttattctgtgcctggttttgatcattgagttatcgtcctcgtggagttatcttcatcgttgagttattggtggatattgcgcctgggtttttattttctattccgattgttgcgtttgttgagttatcgtggatattgcatcaggtttgtggtttggattttttctcagtttctatcgtggggttttgttggtttgatggcatcaactagcacagccatggatgacatggagttccagtatgggcatatagagttggatgatgaggaagaatgtggttttgagattgaggatgatgtggagtcggcggttctggtggatgatcgttggtgtttggtggggcggtttttgaatgcgagatcgatagattttgaagctatgaaacacacattggcggggttatggaaaccgggcaaaggcttgtttgtcaaggaattggggccgaaccttttcttatttcagtt

SEQ ID NO: 314055 - DNA, 860 bp, Cannabis indica
taaaaatatgccacttgaaggtgctaacagagctttactgtccaaacttgtatggcatgttgctagtaaccaagatagaccatgggtcatgtgtttactggcgaagtattgcaggaaaaagaccttttgggccatggagctagggagtaatgactcgccaatttggagagggattctatatactagaggaatcttacgggcgggtagcatggctctaaatggaaatgggaacaacatagatgtgtggaaatagtcgtggatcccatggctcaactatcaagaattcaaaagcttaatgaactcagttttgcctcaaaaccctggattgaggagtgtggttgatctctccctacaggggaataaataaatggaatatggaggctctccatcacctctttggtagaacattgggggacaggataggagggattcggagactccctacccctgctcaagatagtttggtctagaaaaatgctagagatggtgaattttcgatcaagaaggcatattgggagtgcttgaagccttcgatggatcgtcacactaggatttggaagactatttggcacagtaggatccactgtcggctctcgactatgatttggagagtgactattagatggctacctacaaaagataagctggtgtttatccatgataagggatgccatctgtgtgaggccgaagtggaatcccatgaacgtctcttttgggaatgcccctttgcaaaggccttgtggttcagtgggccgtttcccctaagaacttcttctcaagatggaaggtggagaaaagaaatcattagtgatatttgttggaagttattttaccaggaacttagatctactcacaagtat

SEQ ID NO: 314056 - DNA, 539 bp, Cannabis indica
taataaattccacaagaaaaaaaaattaacaaggctataatataaattaggaaaatttgtgtcaaaaatacttaaaaagtttactataatgcagattaatctctaatctcaaaaaataacgataataatgctcaaggttacgtattttgtaagtcttatagtcctaaatttgacggatccgttaagttattcataactgacacatgttgagtcattattggtctaaataataattttaataaaaaataattaaaattaaaaatatattttaaaatataacctttttttctccttcttctactacctctagccacacccgacccctcttcttcacttttttttttcttaaactcaatcctctcatagccatagaagaagtgtggaaagataaaccttttaagcctcgaccccaactccaaagctgtaacgtccccgcgtcaagcttccattgggcccttacacccacggactaatggctcttatacacgagtacgccactctggctgctttctggacttgatgactgaccctatagacca

SEQ ID NO: 314057 - DNA, 1703 bp, Cannabis indica
atgaattgattgatagaaaatgaaaaaagagagggaagagagtatgatttgattgatgatggatggaatgatgaataagtggtaaatgtgtaataaaaacaactttgtaagtaaaaatgtagtaatagacgtgtgtgagtaattttgtaataaattgtgtaaaatagatttttcatgtaaaaatttctaaaataaatggtctaatatataattttttcaaaatagagaatctaaagtgatacttacattataattttcaaaatatatgtaataatatttatatctatatttataggaggatgtgggaattatgaaggagatgaatttggatgcgtatagattttcaatctcatggtcaagattgttaccaagtacgtacgtattacgtttacgtgtattattaattaattaattataattaatggatatatgtatgattaattataattaaatgaatttgattaattagatggtaaagtgagtggtggtgtgaacaagaaagggataaagtattacaatgatctcatcgatgaactcatagccaaaggattgaagccctttgttactctcttccattgggatactccacaagctttagaagaagagtatggttggttttttaagtcctcacattgtgtaagtcatctcatataacatttatttttttaataataataaaataatatacggcgtaaatatatatctaagcaagtacttccaattaccgataaattaaaaagttttatttttattgtaataatactaaagttatatttttttaacttctgtaagcacttcgaaattaagtgtcaagtcaatattcacgtgttgtttttctattggtatatttaaataaaaaattaaaaaatttaataatctatatctattatggactgccatgtggccattaacttgtcacttaacggctagaaacttacgaaaattccaaaaacataacttaagtattattaccataaaaaattagacttagtactatttatctgtaaccaggagttaaacttaggtatatttacgccgtaaactctaataattaatattattataccgtaaaaaattataattaagtatttaactaaaagttaaagttaagtatatttacgctgtaaactctaataattaatttaataatacattgatgaatcaatagtttcattcgagtgggagcagaataaaacattaaaatagtaaaatatacataaataatgtgaatatatattttatgtattttcagtgagcattttaaagagtatgcagaactttgctttaaagaatttggggacagagtgaagcattggataacactaaacgagccatggtcatacgctgttgggggttatgcatctgggtatgcagccccaggtcgatgctctgtctggcaaaagctcaattgcacgggcggagactcgggaactgagccatatttggtgattcatcatcaacttatatctcatgctatcgcagtcaaattatatcgagataaatatcaagtaagtcttttctattttcttaattactcattttttagattttattttttcaaatgataagattattaactataacctatagctaattttattatagactaattaggatttttgcccctaaactttgacatgtaccaaatcatactccctcaacttttaaggctattgaaaatgcccctgaactattgagattgt

SEQ ID NO: 314058 - DNA, 1448 bp, Cannabis indica
cttgctctatctaaggtcaaaaaaggaaattacttccggccagagttcagagaaggggaaaagcattgcccaataggaattcacccaaagtggggacgaagacatggatccccaacttggggaaataaatgcaaatattgagccaatagaagaattagaagaagtggagattgatctagccattctaaccaggaagctcaaaattggtaaaggtttgttgcttgaaataaaattagccttaaaaaaatttttaagagcaaacctagacatttttgcctagtcacatgaggatttgatcagaattgaccccactgtcatatctcatgccctaaatattgatccagacttccatcccatctagcaaaaaaggaggttgctagataaagagcgtgcacaagcactgaaagaagaggtagaaaggctccgcacaaataagcttatcattgaagctttgtacttggcttgggtagctaaccccgtactagtacccaagccaaataacaaatgtcaagtatgtatcgaattcatcgcccttaataaggcgtgtcccaatgactgttttgcactctcaagaattgatcaacttgtggatgcaacagtcggacatgaattcctaagctttatggatgtctatttagggtacaaccggataagaatggatccacctaaccatgaacacacaagctttcgaacagaaaggataatgcgggaaccatgtaagagggtaatcaatgtcaaggaaagtattgaagcagggatactattggcctagcttggaaaaagatgcgacggtgtttgcaaaaaagtgtgacaaatgccaaaggcatgctagatatagcaggtgccccatgctgaactcacgagcatgcccagcccgtggcctttccccatgtggggaatcgacttaattagggccttaccaacaggtagatttgggtcaaaatacattgtggtggcaatagactattacaccaaatgggtagaggctgaggcattggttagcatcaccgtttaacaagtggtatgcgtcatcaataagttcttgatatgcagatttggagtgccttacaaaatcatcactgacaacaggacccaatttgaaggatattgttgagttcttactgctctgagagaagcattgtgaggggattctcagcgatagtgcaccctcaggctaacgggcaagttgaagcagaaaacaaggtaattaagaagaacctcaaaacaaatttggaaaatcttaaaggaagatgggtggatgaactaccaaatgtaccctgggcatacaggaccatgccccgctccactacaggcaaaactcctttttccttgacgtacgggtgtgacgctgtacttcccgtcgagatgaattgttgggttttatgccctaaataaaactccatttcagtgtaatccattttattcaatatcaataaagaaacagatgt

SEQ ID NO: 314059 - DNA, 761 bp, Cannabis indica
ttctttgaataatatgagaagttggtgtacaaacgggtcagcttgacatataattaccaaaaaaaaagaaattataatggaagctcgacatagttcatataacatttttttgtatatcttgattatttaaaattgttctcatcattatacatcacctgttgttattactgtatctcattaactcgttatcattttggcttactaaaaataaatcatgagttaatattaactttttatacaatttttctttgaataatatgctaagttaggtgtgaaaaaaaaaagtttaaaaaattgtttaaaaaagtttaaaagtagatattttttgtagtgtaaatatttgtgagtggctagtatattattagctaaaaaagtaaaactaaaaatctcctattctattctattaagaaaggaagcaagagggaagaaaactaaaaaaaaaaagtaattaattttaaagcttgtgatgcatgcatgttgtttattatttataatgatgtgaaagtttagagaagttagagatataatatcttttaaaattattattggaaaaaatgagaaataggtaattgatagttagagtttatccgaggagaaaaaatcaatttaattattttttgtttattttgttttatcttaattcttagagaaataaaaagagaaaattagtgcatgtttggcatcataactaaaaaattgttttttgtttttaaaaacagaaaattatttttaaaaacaatttggtttgtttgaccttgttt

SEQ ID NO: 314060 - DNA, 777 bp, Cannabis indica
gatatataagatatatctctaaaaaaaattaactcatcttccctggttggtgcatacgagctacctacttgatggaagctggtcggatgtcttcgggtactcttctcggatgccacgactcttatttatgaccttgagttttaaatctccctatacgacttattatgagagaaattattcatccaggttatgaaatgtgctccacgtgtcacctagatagatgccacatcatcttgtgtaaaatttggataacatgtgcccccaagtttgagtgggatcttcttggtcccatgtgggcttactcgaccacaaagatgataggatgggtgacacatgtaaagtcctactgattagacacactatagtgactttttagttgcagtgcacacctttgctaatcaaaggtttttctcaaaaatcatgataaattaaaattttgatttaactttaaacttttataaaaatatacatatatttatatatacaaaactaggatcccgttttcaaaatttacatcccaaatagcttttatagacatgtcacacaacaaccacaaagtgaagctcaagtcgtcccgagaccgaactttccaggtcgcaccgtctcgacatgtaaaatcatcgtcaagctcaaaactcactattgttcagctttgccttccctttacctacacatggaagcaatatctgtgagtcaacagacttagtaagaaaagcatataacatacaatatattaccgacttgtatttaggcacccatacacctatccacaaggct

SEQ ID NO: 314061 - DNA, 1487 bp, Cannabis indica
tgagcaaagcctatgatcgtatcaaatgggagttttttcaagtaattttgaccaagtgggtttttatcggcattgggtgaagttgattatgggatgtgtttcaactgttcgttggccatggtggtcaaagtattggtcctattatccctacacatggtattcaataaggagatcatttctctctgcaactttttatattgtgtgctgaagatttttttgggcttatcaggaagtatgaaacaaataagtggcttcatgggtgtaagatggcttggggagctcctgttgtttctcatatgttgtttgtgggtgacagttatctttattattgagccaatggaagagaagcgaccaagattatgaagctcctgacaaagtttgaacaagctttgggacaacatgtgaatatcgctaaatcttctatatttttttagcactaatacctcggagataaaccgttctcaagtttaggaaattttagagatgcaggttgcaggtgaacaaagtttgtatttggatcttcctaatactacgagtatgaataagaatgttactttgggtttcctcaaagataaaatgcacaagcaagtggaaagttgggacagaatgtggctctctaagtcgagaaaggaagtccttttgaaatctatcgctaaatttctccctagttatgctatgagtgtatttctgcttccgcctaagctttattttgaaatggaaaaaatcatgtgtaagtattggtggcgggcaagaagtaatggccaaggtattcattggttgtcgtggaagaagctggcggttcataacgataatggcaagatggggttttagaagttacatgattttattctagctatgttagggaggcaagggtggctgcttttaactcattttggttcacttattggtcgtatatttcaagcgcagtattatcctcgttgatctttttgtttgtggagttggggtcaaatcctagttatgtttggagaagtatttttgcttctcaagagttatttaaagatggttccaggcggcgtgttgttgatggttcttctattaacattctggggcggccgtggcttctttgtgaggatcagtccgagattacttctttgcatcctagtttggagggggtgaaggttaatcagattatggtgggaggggcccagatgtgggatgatgaaattcttgatgatttgttcaatgcttttaaccaacagttaattaagagtattgtgttgaatgataatcttgggtcggatcattgatattggtttaaagagacttcaagggtttattcgtgaagagtgcttacaagctttttgtaatatctaggttaaaatagtatttaatttttttgggatattaatggtgtgaggataattatctcatttatttgtattgttagtgagtagagactattgcttagagtagttgtaccaattttctaaagagagttaaagttgtattaactacgaaagtaaaat

SEQ ID NO: 314062 - DNA, 1949 bp, Cannabis indica
cccccaggttctcacttatgttcaatggcacaatgcatggatactttgaagctcaaagaggactgagggaaggggatccgatgtcaccccttctttttgttctaggaatggagtatctttcctgaatattgcaacgaattggagctaaaccagatttcaagttttttgataggtgtgcaactttgaaaataaatcatttgagttttgcatatgatgttatttcattctgtcatggagattacaaaagcatctattatattctccaaggcttgaagctattctctcgttccttcggcttacaaccaaattcggccaaatcagccatatattgttgtaatatgcaagattgagaagtgcaacgtattgtagatgcatcgggttttagcaaaaaagatatgtcattcaggtaccttggtattcccatttgcgccaaaagaatttcaagcaaggagtgctcgatccttgcggaaaaaatgacagctagaatcaagacttggagtacttgaaatttatcctttgcaggtagagtcgtgctcattaattcagtgctgctagctatacactcttattggagtcagattatgatcttgcctaagaaaattatcaaagaaatagaagctatttgctgagctttcttatggaaaggtcaatatatgctacaaggagccgggctgattgcttgagaatccgtttgtcaatctaaggcgaatggaggggctggttttaagaagatagttgaatggaatgttgcagcactattcaaatatgtttgggcaattgctaacaaagaagacaatctttgggtgcgttgggtacatagtgtatatgtcaaagatgaagagtggtggtcttatgaaccacctttgaatgcaagttggtactggcggagattagtggttgttaaagatcaatttaaacaggttgatttgcaacagatttcaggtgtcaaatatcacatatctcatggctataagttctatgtccttcccaaaacaaagttcgatggagcaatgaagtatgggggagattcaacataccgaagcatagttttgattgtggattgcgatacaaaacagattaaaaactaggaaatgttgctgaaatttcgtatggtgactgaagcaaaattgtgttttttaacacaaacattgagtcagctgaccatcttttcttcctttgttctttgcgtcttaaatgtcttcagcaggtgaaaacatggctctcttggagggctgaatcgaaccagttgagcaatctcattcggtggattgggaaaggcaaatgcaccgaattccgcaagcaagtttatttagctgctatggcagctcttgtgtatcaaatatggcgtgctataaatgacatagtgtggaattcgaagggagaaaatgaatcattgatcataaggaagataaaaaaatgatgttaaatgtagaattacttgtttttggcctaagaaaactaatgttatagatactaattggttctccaagttgtaaaaaagaaagaagagaatagagggggagaattgaatacttgtatagtgattgtatgttttcataggcctctattgtaggtgttgtttgttgtaaagttgtttttggagtaatgaaaaacttggtgattcatcaaaaattaattaatttttttattgttttaatatttttagtttatttatttacaaacaataaatatatatttggtactttatgtttatcaaaatataaatttagtaccttatgtttctaaaaataattacttggtaccctttatttacaaatcctacgcacttagtacgtatacactatctttgactttagtagacctaattttcgagtatgactagattacacatctctttaattaatattaattttatttaattttaatataatatgaattaatatttttttaagagaaaaacctcactaaaaaaactgctacttttagtg

SEQ ID NO: 314063 - DNA, 1545 bp, Cannabis indica
atttttccattttgtacctaatgtgagactttagttgcacaccacaatgttcatttagttacgatatggtgttgatctggtcgttcgtcgtggcattgacataagttaacaaccacttaatgttattcatatggtgtgatcatctctaattagagatgtaaatattatatttggcaaaaaaataaatttataatatatttgtattaatttttggtattctgttccaatacataattacaaaatttgatgtaaaatttaatatttttataaaaaatataataataataataataactttattataaatttttattaataaaacaataaaaaaataatactataattaaatatactaataaaataataaaattatatatttatggtaatataaattttactatgtgtcaaatttatcatattttaacacactattgaacaaattttttattaagtgatttacattttaattttgcatgcacaagcatttttttaattattatttttattcttataagacaatagtcatatttatgatcaataattatttgaatatatatcttactagaaaattggcccatggcaagtcatgaaggtagtatctagtataggtacatcacatagggaaaaataaaattgcaagaattatagaataatataatttaaagaatgaaaatagagaagactgttaggttatttttagtattaatgttagattaaatttagtatatttttaatttaattttactcgtattaggagcaattttacgcttattattttctattttgcagacttaaaaatagcagaatattagtaaaatatcaatgaaaaaagataaaagattgcaaaaatatatatgtgaaaaaaattggaatcctgcttagaaataaaaaaaaaattatacacgttgaaaacgtgagcaagggagacacgggccgcggccaggaatgggcatgccacgacccgcatatggaaaatcaagtccccacatgtgaaaaccacacacgggtcgccagtgacggacccagaatttttattttgtgggggctaaattatcaatgaaaaatatttatacctatattataatcattcttattatatttatttaattttatgggagcttttctactattttaacctataattattaaattaaaaaaattatatttaatattttaaaagataatatttttgttagtgggggctatagcctccacattcatacacgtgcatccgtcactgcgggtcgcaacccaagaaggagggcgtcgcggcctgcccctatgctgaagcaaaaaattctatctttcgcgcacgtggggttggtggcttcctaattcgaagctgaataggattttgagcatgtgcgtttttctatctttttagtccctcaatgactatataaggagtgaacttcagttgatttggggaggcggtttggaaggaaataaacagcagaaaaaggagtacgaaatttagagaccgaagtcaatactggaggcattcttcagagggttttcaacattctcttcttctttattttcttc

SEQ ID NO: 314064 - DNA, 2908 bp, Cannabis indica
tgagactccgtccaaggagaagacgccagttgacgaggtcattgatctttccgaggagcgacacgtggtggatcgtctagctgagaaggtcttgaaatccaagaggtccagaggagggagctcggatggatctgaacaagttaagaccccttcaacaattgtggcactgtgcacaaaggttgggaaaggcaaagacatgcttcaacactacctgactcggtcacttcctgaagtgagcgatcagctgtccagaggggacaacgagttatccttggaactggtcttaggaggagttttgaaggaagttactcaggtaactctctttcttttttatttcgttctcttttaggtagctcggacattaatacatttgccatgtaggtcggggtgaaaatggcttacgcttactcctgagccaaatcagctgctatgaagaaccttgccaccaccaaaacaatgcagagggatgtggattgaagaaggaaactaaggatacgcgaagccaactcaaggtcatgaggaaagaacttagggaggtaaacaagaagctttttgctgccaacaccaaggttgatgagctgaccaaagagcttcaagatatgccttcgaccacacaactggaggctgacaatgtttctttatcccaagaggtcaatagtctcaaggatgagagggagagtctccgaattcttctcaccaaactagaggaggatgttaagaacaaacagaccagggaggaggaacttgtgaaggaggtcggagacaagaagtccagggtggaggagctcgagaaggaggtggacgtcctggagacggctgcacttgaggttttctatgaattctagaaggccaatcctgaaggaaactttgattaccttggtgatgttaaggactgtatcttaatttctatgcggctcaagtggccagaggaaaccccaaggcgactacctctacagcttctaccgaccagagcactaaagttcctatcgtccagactgttgaccctcaagctccttcagacaaaattgatacatataaagagcctaggactcctgctgtctgaatgtctttcttttctctttttatatgtttgttcgactcataggccttctattgagataaaatgaccggccaagcaatttttaaacatggaatataatttttacttttaagacaactagcggaccgtgcagcctttaatctcgggtttacgtgctttgttatctttaatgaatatcgttccttattatgatcattatttgtgcaactgtgtttgttttgttttttcgtgcttgtcatttatttttaccaatgctttgtacaggtttagttgccccccaggtgaccgagcagacttttgactcttggtcacttgcatttcacaagtatgatttttgtttgttcaaatctttgagttcgagcagacctttaacatttccatctccttatccctccattcaacgaacggacgcctctactcttcgaacgtaaggttcactgcagcacggagctcttcctgatcacgatgcaaggtattagcatgaccttccatgagtccaagagcattgtggagaatctggatctcggtatcatctcctatggtcgtctgaacattggttgcgtgtttggttggtcatgattggtaactggtgggacccttgtattcgcaggagtctgtaatgtaggatctgtaaatagtgggtcaatctaatcaaccacgcctctacgagtttgcaccaccattttgtatgtctgataaaacttaaggcaaaaagcaaacttggataatcgctctcaatgaaagcaccaatatgttgacctcgcttttagccaacgacaatgagtcaattaataagccataaaaatgtaattaagataaggtaagaaccagtaaacagtaaataacacaggatttaaagaggttttcctcctttagttcggtaataggctattccccttagattgtattaactcgagaacaaagaatacagtgtttcctctattaaagctctcacaatgaaatctctgagtgttttctcttagatctctctctgaagtaattctttcgaccactattacagtgaggatggatcactatttatagggctagatgcatgagggaaggtttcccttttgcttacaatatctataataggtaagaaaatatattgcatacttagaatacatagattgtgggattcggatagcttgccatatccctttgacacgatttcatgattatagggattgtatgtgtgcttgaggttcacgatataagtcttgatgcattgctcggatcgtctacccttgccctgcttggtcaagtagtctctatctgtgcagatgtatactgagctttgttcagaatatttcttcatccagatgtaggaaataacagccacatgtcaccagtatgtgttgccacgtcatagtgtgaaaaatacgataacaatatatgcactgaaaatagggttcacattgaaagaggtggtggtgcctaaaaattaaaatttaaaattatacactactacaataatgagctttaaaggtccttatttttgctagaaactgaataagggacgacatagggttattactcagctgaaggaaattctatgactcttatggcatcgattttagcttattttttttcgaaatcttctattttctatacctaaaactatatacccgaaaaagatcacatttttcctcatttttaggataaactgaaggtagaggtagtggttgtggttgttatacctctagccaccatttttagttgagaaaatattgaatctcaaagtccattaaagtataaattaaatttctactaattttagtaatgtacattactttattttttattttgtaaattttttgagaaattttctatattattaagattgtg

SEQ ID NO: 314065 - DNA, 2624 bp, Cannabis indica
gatttttgaaaaaaaaaaatagactaaaaatagattttacgaaatgaactgaggctaaaccattaaccattataacttcaaagaatgtcttagattttgttgttagaaacatcatctgtcaatatggtctctcagacaagattgtatcaggcaatggtaaacaatttgatagtaatatgttcaccgacttctacaatcggcatgatattattaaaagattctttgcagttgctcacccccaagcaaacgggtaagtagaagctgtaaataaaaacctcaaagacacattgaagaagcgtcttaaagagggaaagggaaattggcccgaacaactaccaaaagtactttggtcttataggaccaccaagaggacgaccactgggcagacaccttttgcattagtttatggctatgaagcaatgcttcccgttgaattggaaccactgtctcacagaagggtaattgtatggccaaagaagtaaaccacgtactctcttaacaggatcccttgacaaaatcaaagaaaaaagagattaggccaacttgaagttgtaagtttaccaacaaaaggtggccaaatattttaacaagcaggtcgaggatagaaaattctttgtaggagacatggtactttgaagagtatttctgaacaccaaaaaccctgcagtaggggtacttggcccaaactggtaagggtcataccaagttacatacgtcacaagttcgggcgcatacaaactcggctagtacaatgagaaaatggaagtaatcttattaccaagatattggaacagagaacatctcagaaagtactatcaatgagctaatttatgaaaatcacctctcttaagtagtagttcttgggcggtatgccgcataggaatttgttaattatttataacacagcactcttagtatgttgtgcaaaagtgtttgaatacttaagtttttcaaagcagccttgaggcatttaagcttttattttaatatatgtacgttgtccaacaaaaacacatttgtaagaccaatgagtgaataaaaatgattctttcactcagattgtgttaaaaaaaacttgctaataattgaattattaaagttaatatatgtctaacatgcatgcaaataggtccgcccaagaaatcggacagacaaaggctcaagaacttggttaattacaagtgaccaagagaccgtaagtctactcaatcacttgggggcacctacacctacacagcataagataagcacagtgaaaatacttaagaagaaaaatttaaagcaaagttaatgcaaaaaaatgaaagttgagcatgtgaaaagtggctttgttaaacataaatagaaattagtccaggattaaaggctgcccgaccaaccatatgtcttaacaaaaaataaagccaagattaatagtcgcctgaccgactatgtaatgccctgactctcaggaacgccatgtgtgtgctttcacaatcctattattactaatctattagtaaggaaaagtgtggtttaattaaaaattttaatcaaattaaaataaaaactttcattctaaatactgtcgtaatatgaggatcctctgctaataaaattcttttccaactaattacaaaactgttattacaaaagtaagttacatttccaatcattgaaaaaggattaatcctgcttcacggaagccaagacaccacgagtgatatgtacattgttgggagacctctgactcatggctgaacacaacagctattcattttacctacaccataaagcactcgtcagtcacagtgactcaacaagaaaagctactagacagaaagcatagaaagtgttatcattcacaacataatgtacataccagtgggtcattacataatcagcaagcttatatatcttagcgtctatgtgatcacattcatttcacataataagaaaaatcatagcatctcataattaacaatttcaccttttcactaaataaacatacatccaatccatggctacataatccgagtgctttgtaaagcactcaagtcatatattaccataaacacacaattccagtgcttcataaagcaccctaatcacacattaccataatcacataatctcttcataaagcacccttaccactcgttatctacgagctatgtatgtcactatcgttgcccgataaagcgaacgacaagtaagaaacctatctgcggtttcaacgagtaattactcataatggtaatgaccgtatcttttactcgatcataatcgagtcacaaacgataataatcattccttatcattacctcaatcataatcaagtcacaaatgataataatctttccttatcattacctcgatcctaatcgagtcacaaacaataataattgttcctcaacattacctcaatcaaaatcgagtcacaacaaaaacatagcggaatctcaatcataatcgagactataacaatcatatcattaaccataaaatggtgcttaacacttttcttaccttagtccaatagtcaagtatgcaggccgacctgagtagaaatacgctcgacgatcctgggtcctatgtcacgataacaaagctcaataaacaacttattccaaactttggaataa

SEQ ID NO: 314066 - DNA, 1976 bp, Cannabis indica
aaacgcagtagagaagaaacaatgattttagatcgaatggacaacattgaagaagtgacactggttgacaacgatcccatgacaaatgacattcttgatttttcctcagagagcgataactcagaagaagatgatgatccgggattagtagaagatgaaggagaagagcaggaggaaattatgaaggatatcaaggctttttggaatgatagtaaaaagtctagagagtgcccagtgagttatgaattgtgtatggaagtaggtgatgtggtggtagaagcttctgcaaagggcgagataggggctgttcaagaaaaaaatttggtgagagccttggaggaattgggtctgaacttgataatgaatgagggtgaagaaaaacaaacagcacaacaatcaaaggcttggaggaggagcatcagagaactcaaaaatctggcctttaacatcgactatgagcaaggtcagaaaaaagagggatcccaaaagagatcattatgagaatcctaacgttgaatgtaagaggtagtggagacaaggcaaaaagaaaagcaattaaggcatctatcaacaaagtcaatccgaatttaattatattacaagaagtgaagaaagcatctgtagataggaactttatttgcagcatttggcgctcccgatttaaagcttggatcttgattccagccaatggaagttcgggagggacattgttagtttgggatgccagaattattaatgtgttggactccttggtgggcgagttctctatttcagtattagtagaagcagaaggtagaagcccgtggtggttttcttggatatatggaccgtgttcgtacaaatcaagacatgatttctgggatgagttggttggtcttagcgcaatttgtggtgatttatggtgtttaggaggggatttcaacgtagtcagaacggtacaagaaaaactaaatagcacttcttggactaagagtatgaagatgtttgaacaaatagttcggtatttgaagctaattgatccaaaattaaaaaatggatgcttcacttggtcaaattttcgagacaaacctatttgttgtagattggaccgattccttttcaccagtaattggagcaacattttcccgtatgcgagacaagaaatgttggtgaggattgtctcggaccacagtcctgttattctagactcaaaccctcctaaatggggtcctagccctttccgatttgataaccagtggttggaacataaattcttccccaataacttctggaactggtggaaagaggcagtcgggttagggtgggcaggtacgaaattcatgagcaaattaaaagcagtaagaggaaacattcggaagtggggcaaagaaacttatggcctcaaactcgaggctaagattgccatggaaagaagattgatgatcctggatcgactggaagcctctgaagagtggaatcaatccttaatggacgaaaggaaggccatcaaaaaagattggcagcaacttgcttttgaagaggaaagaagtgtgtggctaaaatcaaagtgcaaatgggctaaagagggtgatgcaaacccaagattcttccacaatctcttgaatgcaagaaaagctaggattacaatatcaagacttgaaagggaagatggttcaatcattgatagagaagaagaaatagtgtcagagatagtgtctttctattcaaacatgtataaggctgaaagaagatggggcacaagtgtagaaggtattgattagcaaaagatcccacttgactccgccatggatctggagaggccctttaagatagaggaagtgaaggaggcagtgtttagcggcgaaggaagtaaggccctaggaccagatggtttcagtttggctgtctttcaatctcactaggaggtaattaaggaagaccttatgttagttgttaagtcatttgagaaagaaggaatcatccaaggcagcatgaac

SEQ ID NO: 314067 - DNA, 1436 bp, Cannabis indica
ttttcatatataattagattaaaaacgatggcatcagataataagcggagttgtatcatcacaattcatctgtaattgcatatcattgtatcatcacatgccattaatcatcttcaaaagaataaaagtttgtaaaaaatcagaaaacaagctcagaagatattcccatacaaattcataaacgaatttcatatgtccagacatataaggaagcaaacctcatcatagaaagtgaataaaaatgtaaacaaaaaagctaattcaaaacaactcaaaagaagcaaaaacctaaagctaatttacaaaacaggattagaaataaaggctcagaaattccaaaatttggaagacgcagacaatcaacatggcatcagttcagaccgcccgtctgcttattctcatcattgaaaatcaacaactaacaaaaatggattttaaaaacaaaaactaaaaaaagataaaagaacataaaaacataggcatcagaaattagagagaatttgttatctacatttgaatattcagtgtgtagtataagtgattgtattttttttcatcacatgcctgcctctatataaaaaaaaaaaaatagttacaaatttcaagtaaaataaattaaagttagaaattagtgattggcatcagattataagcaaaaatgtatcaacacaaacaatcagaatatcaataagcggtttgttaatgatcatcaactgccattaaataattaaagtaaagaaaacaaaactaagtagaaatatcggaagagtcatttgacaccaaagcaactgaataaaaaagatgcaatgggctggtaagcaaacctttagatctttgcatccgatatatctcctacagctttaggatttgctgggaaaggagaaggtaaagcagatgcattttcatacaaatactgaaccaaaatcaaaacaattgaagaaaaacaagaaagagcaaattatgtcaatcatagaaatttaactgatagaacaaccaaacctatggataagcggcgaagtaaagtgttaagctgagtgtgtcagggtaagtgaacgaggcttctggtttatatataggaggcttcacagaaattagggttttgtgggtcaacttggatttactattttgccctgctctcgactctattgtcgtttcagttaaaaaggaaaagagaaattgtcgtttcttaccaaacgacatgtagtgtgttcattttgaaagaatccaaccaaaccccctagggctgtacaaaaaaatttgtaaaccgcccaaaccgaaccgaaaaaaccgataaaaattacaaaccgaaataatcggaaaaaattacaaaccgcccaatctgttaattgggcgggttgaaaataggttcaacccacccaattaaaccaaccaacccaaccaactcgattttgcacctttaattttttttttaactt

SEQ ID NO: 314068 - DNA, 1276 bp, Cannabis indica
acccgccccatttaagtttttttggaaaatgccatcttcttgctctagcatatttctatcctccacctcagcaacagtactactttggcccacattaacattctcagtattcggcccaattaatccttcacactcaaatctcctcctttttaaatcaataatatttactacagcatcctcctccatatcgccccccataaaactctcattaatagtttttccttttttagctacccccaattgactctccttactaccatcaatctccctcctgatttcctccgcaaaaatctctctatcaccatcagatattatagaattttccccatgatttcctccaattacagatccttgattgccagccatagatggtcggagcacactggtcggaattccaacgtacggtgctggattctcctctcgcttcgccattgttggtttcaaccatttcgcaccaatagtatgattccgtctacgaggcgccgctttcaactctatgttatatggcttggttagaagatgtggtggcgtgtcaaaagctttttcacaaaaccgttccgaatggccaagaacgccacaaacgaaacagaacgtggttaagtcttcatacttaaacttaacattgcaaatcggtccattcttcatctgtaacctcatacgtttcttcaacggggcatccacacaaacagacactctgactctaagataatccctccacacacctttgaaatcattaggatcagttttttgaaactttcctatgtaattgccaatgtctttcaccaccgtaactgatttaaatcccgaagtcatctcgtgcaactgaacccagaaatccaggtgattaagcaccaccatccttgggttatctccgctttttaacctctcaaacactaatggaactctatcaaacgtccaggggctgccttcaattaccctctcaatgtccatttcatgataaaattggaacaaaaaacgatttgggtcaagctctttcacaaataaacccctcaccggtctccataaagaggccattttatgttgcattgcttgaaaatctattgttctctctgtgagaaatctgcccactaaacaccagcgatcatcaaattcctccaagtcctccgtctcaccttcatacatgagaaaaccatcctcatcttcacccatattcatattctgatactctgtttccatctcattctcgccatattgattagaagccatcaccccaatacggcacaattaccaccaataagacacaatcaccaccttc

SEQ ID NO: 314069 - DNA, 3690 bp, Cannabis indica
ggtgcattctgtttagtcgctcgcgaagatcgggttgtctatgattcaagtgctcgtaaagatcttgttgtcttcgctcgtaattactcatagacctcatctctaagtaactctcagattagtagtttttcatattcctcatgctttcttggtcaacataacgtcaaggtctacttccctctcatgtttgcctacccgatcgactgtttccttgagaccttgagtgtttcgaactagaacttccttcgtcttgtatcagccttctccttcggaagaggttagatacatgccctttatttagatacatgtatacatttcccctctttgatcgagaaaggcgttgagggtgtcttggaggtagcccacttgttctaggttagtttctagggtttctctcgttgccacgagggtttccttgatccctaggttgaggctgtctcgcatcctcattcatgcgagaagcttctggtacaatagtctgttcattcccttggttaataaatccttaggattcttgaggaacgtctcaccgttgctcttaattatttgtttgcttatccactagaacatccctagtgcccccaagttgttcttcctgggtgttttggggatatccctattttgcttcatgtctcctggttttagaacctcgtggtctgctttgtggtcttctttgaaagtaggggtgtagaggtagaatcgctccctgcttcatataatgctctgactaggccatccacctaaatgctatacaatgtgctagctagtctttagtgggcctatcacatcaaacttctcctatcgcctcctcagtcttttgtacaaagcctgctcgatagagtttatacttgacaaagttagcgtcagtgcctaggagagagatgtttcgttcgtctgaagggagttgaagaattgcctgagccctcttcctaagttctagtgtgaacagaggatgatagtaggacagaatgtgttggaaactggtatgattggtgtccatccccttgacaaaatagtagtcctcaacgaagccacatatttttatcaccttagtatcggtgatgcccatcagccatgactccttgatctgagagaagtagaaacaccctgacctatttttcttggggcttgaattcaggtcaacaaccagttggtatcatgaggaaaaatggttcaccccatccttgcgaggcctctaacacgaacaaggcataatgatacttgaggcccttgggagtgaattgtgttgggctgatgtggtaatcgttggccatcttcttgaagtatggaagcaaaggaagcattacaccttgcttgtgatgagctcccgacaaagcacaataaccctctctagggtcgatagccagtttaccaagggagggaaggaagcatgtcctcgaaaagattagtcaatcttttaatggtcaggatagatggcagagaaatctattaatctccttttgaaactctccttcacatgggatgagcctcggtgtactcctccttgacgtactcccaaccagcttccaggacatcacttgctttaaaaacaagttctcattccccattagaaccgccaaaaaatagcacctaagctaccccctcttcctcatcttattcagcatcagaaggagtagcgggatagatctcaccatggtcctccacttcttggacttcaacatctccagcagtttcttcttcctcgatggcaggacgagcctattctgctctagccagagtgctagacgggcaatattggggttagtagatgaaggtttcctaacagtctatttggttcgtgtcatcatcgtatttttggatggagctttatcagaggtatgctctgcaatattcaaaacaaaaatagcaataggttttccctcagcggctggggccgggcggccctcgcgcaatttatcaaccatgcttggatggaccctaacgtccaactagcaggaagataatgcctccaacctttcttaagttcccaaatgaaatgatcgtatccctcaccacgaatctgaccgggataggaatgatgttgcacctcgggctccagggaaggtgtacgattgctacttatttcccaatctttgaagctaaaatttgaaagatcatcactagatgaggatgggctaacactgagatggggatgatcttggtaaaagagttaaagaaaatcctggtagatatgatgcttgcttccccaaaactctctaggattcatctacaaaaggtgggagacatgagattaagagtttgttggagtaacaaatgaaaaatagattgtgtataccgaccatggctgattgagaatcaaaagaaaaggtttcacccaaaaatagaatctttgatcctaaaagtttgaaacatcgaattggaatctgattttcactaaaaaattatggacgagtgaaaatgaacgttgtaaggttaaaattgaagcgcagttagataatcagatgttatggttagtcatgaatgaaatttccaaatcctaaacctagttattctatggttaatttataatagttcaagaacatgcaaaattcatagcaaaaaatttcagaaaccatacatgcatttcagtgcaaatgtgtaaaagaaaggaatgaagaacttactcactaatttgaagctttcttgcccttcttggatagttttgtcaagagttttcatatgaattactcaaagaatttgggagaaaacttggttgaaaatcttttgctctgattatttagaattaaaatggctaaaagttataccaagggttcctagctctatttataagcaatctgaaaaaggaattaatcttttcaaaattcaaatttttgggtttcccccccaaaagtagacgttaagcactcattgtagggagtacaactatcaatcgtgctcaagtatcgaaccctaattcgaggtgtacccgtcaataagcatcaaatggtcagatatcaaagaacccgtagtcagagtcacattgaatcaacatccatcatcaaagacatgcgtcacccatccagacaagactccaggctgagtgaagtccacgtgcgatcaggaaggtctcatgcagacttgggggcaaatgttatcctatttttagcaccttgacgtggtaacaagaatggatgatacatgtcccacatttttgataccttgaaaaaggaaagtattcctagcagcccattaatggttatttaacatttgtaacacttggatacccgaataggatggtcgagacgatgtccgaccaagatgcaaacattcttatgccgagcgactcctgtaagatggaaatttcagagatgaatctcattgtttcgaagacataaagataatccctataattgtgggattgagtcagagaatagaggcaacacactttagtttcctattctttacattgtaattataaaattaatattgtttcctattttatttattatagacaaagggaaatcattcttcatgtattaaggccctataaatattgtcataatctcaatttgaaggggatgggaaaaattgattcagaaatacacttaagagagagaagtaatataaaattttgaggaaatagaggtggttgttgttggattatattttaccaggatctagatttactaccatgtatgttatttaacatcttaaatatgaatctccaaaataatgttatttaaacacata

SEQ ID NO: 314070 - DNA, 666 bp, Cannabis indica
tagtttagggggaatttttaacggccaaaaaagtttaatgggcacaattttgtacatatcaaagttcagggagaaaaattactaattaaccttaaaaaaaacctcaaaatattagaacccctcaagtttttgatattttgagtgaaccacacacaaaacaaaagtcattttcttaaccataaaatctaatactcaaaattattttaagcataattatgacaaaaaataattaaaatggcgactttatttaattaaaacttaaaacacattattatcaactgcaaaagataaataataactccatcaccatataacataaatctaaacgataacataatttactcttgtcgccatttggtaaaatcatagcattaacacttaatttttaatattattgtcattaacaatgacattagtcttcacatcttcatcatcctcattcattgcagaaacctcaaccttagccgcaatcgccacttgagacgtcgagctggtgttattattctcggcatcaatagtctctatcctcttattaatttcttccaaattcttgtcaatgatacaaacgagatcattcaaatctgtagcagataagccaacgagattagccttaccatatagattggagtacatgagttgggttaactccttctcacgattctcttt

SEQ ID NO: 314071 - DNA, 497 bp, Cannabis indica
taattagagagattttagagtgacatgttactcactcaacactctcattattgtatcttatttatagtcgctgttacattcaaagttgttgtcatcaccatatttttatgtttagtggtcactatctttatatacacaaaacaaatcaaacaataaattaactatattcactttcgtacctaagtaaatcttcaatttctttcaaagaaatcttttttttaataaaaattatcatacaattttcactaaaaaaacaaataaaaagatatctttaaatgctatagtgaagaaaattttagaaattgaagaatcctcatataaaatagcaatataataaggaaaaaagataattgataaatcttaagaaaattctgatttcaaaaccagtgtgattaccatatctcagttgtagtcgttattactgttaaacacatgaattgtacatatactgaaacccaacaatactaaagcattatcttaattttttactgtcatca

SEQ ID NO: 314072 - DNA, 2867 bp, Cannabis indica
ttactttgttttatttttatttgaaattcttaaaatttctcttagttggttttgcattatttagtaaaaggtccctgtggagacgaactttgattacttatcattgtattacttgtttgtgattgtgtacacttgggcaattataaatcaatataaattttcacaacatcatccattggaggcaagggcctactatttagattcaccgagatgtttgtatcagtttcaccagctattgtggctatacttatggtgcctattgtggtgataggattgaccacatctgtagtgttcataggaattctagttgtggttggaacctgagcatccaaatttgcagtctgtgggtcttgagagaggcccaaagatgtagatggtgcgactggcgttcttctcgtgttaaccatggcattgattagatacgatatcctcgctctcaatgaaagcactaaactgttaacctcaaaaattgattaaccaacatcggtgttatatagaaatgatgtttgccacatgttacataattagaatgagaaattaaagaacacacaaaattgttatagaggttcaaccccctttgatagcagataatgacctactttccttttcgttaaattgataccgaggtttaatattatccagatcattataggtggaggatttgatatagtacccttaaggaaaatcaagtggaaatcaaggttgaaaaatctcaagtgttgagatagcttgtatgggcatgtgagagagagtgatgaagagagttattagacttagagtgtttttggcctagttatgacttagcttttctaggttagagttaaggcctttatataggaagactaaaccttaatttacaatttaaaccctaggatatttatatattaaactagttaattacaaaacaccaaaatgtccttaaacatagatattttccagctattttattgggcttttaggacctaatttgcaacccaattagcagtccacatgtagaattgtataggttatcctgtcaggccttcacttagccggccagacacctgcagggagcagactagctagccatggtgttgttcagaggctggctgaccatagagccagccaggggtggccgaccaacttttgtgaggaagttggtctgtcatttgatgtcccatttgagtgtcagggtcctgtttactaagatactaacttggccttctttttggtgagttttagtgccacgtagccttgattttgtccacgtaagcactgccacgtcaggtggacaaaaattaggataacaagtttcctattttggtaggtcacgggtaaatcaccgagattggttctgtaattaaaaaaataaaaagtaaaaccatctcaaacccaaaaagaaagcaaaaaaatccattccactaaccaaatcacccactgctcttagcctctcctctcctccagaccatgcatggcttccactgcccaccatttttgctcctctcgctccaccaaagcttcaatctttaacatatattcctcctcctctaacttctttcttcatctttaaacccctaacttcatctcacttttctcatcctccatttccccaagttcaattgagttaacttgtggtgtgaacttagctttgccaatgttatgtgctagatcaacccaggttatggatcagtctttgggtttgaaagcacccgccattattgaggtcaattttggtaatcaaagttatcgaatttatattggcgctgttcttcttaatcaaccagagcttctttagaggtttgtgattatcaaaatttccatcttttggattttagaaattacctgtgttggaattgggaatttttatttaattttattatggttgagattttcttgagaatcatatatttcataaagctaaaactttaattcacgaattgttttgtttggagcttagagaattttagcctacttttggaactatagggaaaaaaaatcaaatcttcatatttaatatgaattttttattgaattaagtgtttttccatataatttttatttctccaccaaaataaacttctaatatagtatttccaatacaatatatgaattttaattctattgtgaataacatactttgattcttgatgttttaaagatgtattatatatcaattaggaaaaatacgatagtttcaactattttgtttggagttcgagtaatattatacaaaccatatatttactttaggattttgttcgatttatgtaaacaatcaccaaataaagattgaactgaactaaaatgaacacagatgaacaatatggcataaactaatgagaattaaactttaaaactataaacaacactagcaattttaagtggttcaaccatgacttttcaactcgagtccaagattcattacattaaactcaaaagtttttgtagcaaaataacagctcaaacctctccaagttctctctctctctctatatatctaaattcgctataagacattaagtagattttacacaatattgagtgtatttatagatgttgaccttaaaaactgatcaaccaatagcaaggtcgtgcagatctgatgtttgccacgtgtgtgcacaaataagtgtaagaagctacagacaacgagatttgttatagaggttcgatcccattgtgatagtgagtaataacatactccctttttagttgtattgatgctgagggaatcactaaccatatcgctataggtgggatctactatattgcccttaggattgcaatgtatgaatcgaggtttggcacaactcaagtataagacaacctagagggttgtatagcctaggcttgggcgtgtgagagaatgaaggagagagagagagaga

SEQ ID NO: 314073 - DNA, 884 bp, Cannabis indica
taaaataatttccaacatctttgtattctgctttattcagaactttattttgtatttgggttatgcatgagcagtaaaagataagcatatatatgcgtgtatgtgtgtatatatagtgactaattaaatacacgcgtatgcgtgtatgtgtgtatgtatatatgattgtctttgtgcggttcaggccatccgaagctctttagacatgatttctacttttggtttgattgtaaaagactgtaaaagcttgcttgcttctcttacaaatatttctatttcttttgttaaacgatctgctaacttagtgacccataactttgctaaagctgctattttatttcctgatcgtcgtttcagtttggagcatgttccaactgatttgttaccttgtttggtagcagaagtttctggttaataaagatttcttctattcaaaaaaaaaaaattaaatgaattaaaagtgactaatcattcaaattttgtgcagtgatttctaccaaagagcatgacacatgattgttgcaaaaagagtcaagattgttgctaggagcttgggtctcttggagattgaggatttagttttaggagatacatgtatcaaaatttattagtttctttcacgaatattttgtttcttatactaccatggatgtaaacttgtaatggcactctttattactttgaataagaatattttttattgtaataataatttttattaatagaaagaaaaatattattgtaaatcatgtaaaaagtagtattatgaaaattaaaagtaataatgacgatttaatacttatgaactagataaaatagatacacaaaaagagagtataatagtaatatatttaataatgcttacattgtaagtgacaaacata

SEQ ID NO: 314074 - DNA, 2202 bp, Cannabis indica
ttaaaatgcatgcagtcaaccaatacattgattaagctagctaaataacaataatactactaagatcaacacaataacaagtaaatctcacatcaaaatcttttttaccaaacatttcaaacaaaacagagaacatctttcttaaacaaagcaaaaattccacattaattaagatctctcaatgacacccaactcttcaaaggtcctggacactcaaacctacataagaaaaaaaaaacaagcaaaaactgtcaaaattaaccataaaaagaaaaacatcacacaactaaaacaagcatttggtagttaaattaaccccatttcaacctaaaagaacaaactttgaatttgagatattttaaaccgtaaacacataacctaaaacagctgttgttgttcattttgtagggtaatttacatcaagaagaaaaacatcactcaactaaaaaaaacaaacaattgaccctcatttccaattggatttgccattttaacctaaaggaactaccttttagcttgagatattttaagccctaaacacataacctaaaacagctgttgttgtggtttaagaagaaaagtaaagaaattgaggacgtttttttacctgggggaagagattgcttcaacttatcggccttctcggaatcaaagacacaaagagtgtagaggtactttgagcaacgaaccttgaacttgaccacatctttgcttctcttaatcttcaccgaacgagcatccttcctccgagctgtcagaaggaaatccttgatctcgtgaatttgcttcggctgttcggatttcaattccacaataacacaaatcaatcaatcaatcaatcaaattcaaaaacactttctttatcaatcaattaacacagaaaataataagagcgagtgaaggtgagctaccattgttgttcgcgaatgagatctctccttcttccagggaccaaagaaatatggggcagagacagtctctcgcctttatattccacgaaacaaaaccctagctagggtttgggtgagctgggctgggctgggctgtacactctttcttatttgggcttttgagttaatgggcctagccataactacttctttttcttcatctttaacgtaaatactacggtttgtttcaaaaatatacaaaaacaacaaaacaaattataaaaatacaattgtacgattaacacgaacaccacacgattaaataatgtgtcaaaaattgtaattaaacactaacattacatagttataaataggttaacccattatgtaaggaagatgatgcttttcttgacagctcaaagtcgacttattagatctatatggaaccgaaaacagtgctccagctcacaccctactcatagctaattaactaaataactaactcgtacttattttgttacaagttaagtagtcttttgtatagtggattggataatttcttttgattacttaattgttgtattttttttctaatatttcaattcagtgaagttaataaggatgtttcaattcagtgatatttcatcaatgtttttacatgatttatagttttagaattctggttctctggtttactctcattgttgttaaacttatttggacaagtgatctttagtgttgatcatcttgatatgagtaaaggaattcaataaatgaaggaaaatatattcctacttaattagctttgcagtgattagtgtctgttatgccaattttttttaggtcatttgaacccctgtatataggtatattttgatagataatagcactaataagtgccccttttatctgtagtttatctggtaatgttttttcgaatttggttcatagtttgattcatattttgatccttaatttattcttgtgtgttgaaagaagagtaagagaacccctcaagaatcacaacaattcaagaaagatgtggaggaaggaagaagcacaatgattgcaccattataaatcaaaataggaataaagctcatggtaaattccacactcatgctactgttattggtgtacattaaattcaagtatgctaactttcaaaacttgttattctaacatatatattatatattcttctaatagcactaatatagtgccttgttaaactccatatagaccatctattcattagtgctcaattaaattggatgtggccactataccaataaagacatatgaaaagtct

SEQ ID NO: 314075 - DNA, 1086 bp, Cannabis indica
ttaatgtttcataatagttgcacaaatattttgctaacgattattttatctgattgtaacattcgcctgatggaaccttcgatcaaccacccagcaactttcgtctgatgcaacctttggccaactacctagaaaccttcgtctaatgcaaccttcgaccaacactataagaaatatcacttttaccaacacagttcactactgcgctggtaaaagtaacttttactggcgcatttcgcaaactgcgctggcaaaaggttatagttttactagcgcacatttgcagtggctaaaatctaacttttaccagtacatttacgcactgagaaaagttatttttgccagcgcttttcattttgtgctggaaaaagttttaataccaacgttgatttatcaaccccttttgccaacacatcagaagtaaattttattttaccaacgcaataccaaacttttgccagcacaaaaaagtgttggcaaaagtgacatttcttgtagtgcaaccaccctgtaaccattgtctgattgtgtaagtgatagtgtaagaggtattttcgcaattaaaagtacataaaaggtataaatattgtccacaccttatggagatttttttgtaaataaaatatcaatttatatttttcatgtaataattcctatttttttttgtcattttaaagttaataattgaatgtttaaaatttttaatttatgttagtttaattaggtcgtcatattgtaattatatgtatgtttgtgtccatattaataaattgtttccaaaaaataagaagtgaattagattttttttttttaaatcaaacaagcaaattacaaaggattaggcatgtcacactcaatagtgcgacttacgcaagggtgattaactccaattcacatagtactagctttgttcaacaaagcataattggctaaaccatgagcgacactattcgcttccctatatacaaagaaaatacccacaacaacatcattcaacattaaagctctaatacaatctaatatcccatcaacatccctgcacccatcctcctttttttggattaattggatggcatgaagacaatc

SEQ ID NO: 314076 - DNA, 1481 bp, Cannabis indica
attctcctccctaatctctcatcttgattaatattcatttgttattttaattttctgattttactgaattcacaaaaatattgctttcccagatagaatcataagtatagtttagtagtatttagtccaattccctgtggttcgacctcccttgcgtgagctactacttgattgcgtatacttgcgtagtgatcataatttttgtaatagtgttcagaaatacaatacatctaatatctaatctaactattaatatttttatttagtttaggtaaacaattataatttatattgttatacttaaatatatacgtatacatgaaagttaaaattaaattttgacattttcttgttgaattggatggttcctatttgatctaaaatattagatggatccgatcagatccaaaaaattgcatgcctaaaatatgtgataaagttgaactaattcaataaatgtacatgtaatacatccaatggatagaaccgatccaatccaacatccattgaatgttggatcaatcgtgtttaccaagatttcaataagtaagagccttaagaaattaaatagtgattaagtaaaagagatgatggatttttatgtggttctagcattaattattactagtccacgagtcggtagtggccttttaggcttttaaatgtattataaatgagttttacaataagaaaccctaaccctgactataagatggtttctcaagatttctcttggagaagaagaaagcttagagtaaaactagcaaagcttcagctaaaactctatcccccttgcatgaagggataatggggtttatataggctagagttcgagtccgggcatacccatgacccattcaattttcatcgtaaaagcaagcccactgatgggttaaatacacaaatacatgactatgaggcccattaagaatatccagctcgtggggcgacagtttcatactgatgacgggaccatttttatagggcacgtgttgcacggaggtcattcttggcagacaaaggtgtcaggggagctattggacaaaaggggtgtatgaaaatgtagtggtggtgcgcccactaccatgatctgacactggggatagtatctgatcttgtgtcaaagaggtgaacatgtcaataaaggggagatatccacctcttgtcttatggtagacatccggtactcaccttgcggtagacatccaactttggtccatggtaggctttcgagagtcatcccgccgtagacatctaggagtatctcgcgtagtctgcctccttgtgtgcccttatcctcattcaaaagtcttcataccttctgttaacgcagattttcgttaaccaaatttgagcctcgcgatgataattcaacacagaaaaaataaaagttatagaaaaataaaatatgaacacggggttttttacgtagttttgtagttaaaactctgcatagtccacgagtcaatcttattcaaatt

SEQ ID NO: 314077 - DNA, 955 bp, Cannabis indica
aagcgatagaacctaaaagacaaaaaaaaaaaaaaaaacaatacaaatctcaatcaaacgaggagtttgattcttcccctttctacaaacagtagaacactatcaagaagaaaataactcaacttaaagaagaaaaaaaaaatcaaaattggagatgtcttctttcgtgaaggcatttcatcaaaataagttagttgaacctttatatacatatatacacaaaaatccaacttataaaagaagataaaatatgaaaaactgattccaaattattaaaataacaaataacagcaacatccataaaagagttaacaagcaaaaaaactgattctaaagttgagaaaccaaaagaaaccctaaaaccaactaatgagcaatacaaatgaacctaaaacaatcaaaacaacaagccaaacctaaaaaatactaagaaacaacgtaaataaaaacacattaacaacatccaaaagtgatagaactaaaattagagcaaaaactaaaaaaaacttgaaacaaacctcattcaaacgagcaactttgtttctttcccttttttcctttagaaatcaaacgcttttagattttttattatcaaaatccttcttctgtttaggtaagggcgcaacaaaattatctttatctaactttcttttctcttttccttttttttccagccgatttcacacccatatcatgagcttttggatgtttaacagttttttttttttttttgtcaacaggggatggagaagatgatgagggagtattgccatttatagaaaattgtacaagaagaacaaaacaaagaagaaattatggtggagaaattgagatgatggaacgatcaaggttgaaatcgtgtggagaaattaagggagagaaactgaatatgattatgggtatctaatttaaaatcaaaactgaaaaataaaaaaaaataaaaaaggaaagaaag

SEQ ID NO: 314078 - DNA, 724 bp, Cannabis indica
tttttcatttggacacaactccttaaaaatgttagcataataagactattctttgattatctcaggacataaaagttttaccttaattttgggaagagtttcatgggctcctctttcttggattttttaaatctacttggaaaaggtggaggagtgacataagttgatataattagtttgtatgacttttttagtgatggtggaccaacaaaagtaggagatttaacctttgcttgagatgatccttcaagggatgactatttgactccatgacttggaattgaatcattaacttcttggtgtggtggcaattcaagttgtgtactactttggatagtaatgccactgaaattctcttttgggttactctccatttgtgaaggcatagtgtttgaatattaaatttcatattcatcactcatagatatttctatttgctccacaagattctttatactttgtaaagatttttgggcgctctgcataattttctgaaagttttgctgaaattgcacagtattttgttcaatctgcaagttattagctgttaacattttaatcagctcagccgtagttggtttttcactatatggtgcagtatgagtaggttgttgaaattgtgcattattttgttctatttgaataatagaagccaccaaaatattgagcagtaaaagaatgatcttgatcttgtggtgttctaggaggatagtaagaagttggt

SEQ ID NO: 314079 - DNA, 1357 bp, Cannabis indica
ctgggtttgagttcaagtttggggctgggtctaggattggagtttggggtccgaggtcaagtctaggttgaggtccggggtctaggatcgaggtttgggatccggggtctgaggtttgggggttgtggttcaagtccaagtctaggtccaggatctacggtccggggccgacgtccgaagtccgagccagggttacgttgagttcatgtcgaagcatgaaatatttaaatttttttagtaaaaaaaattaaaaacagtttttaaaaatattaagtaaactcaccttgtaatcgttttacgttgggtaaatagcggcataagtacccaaagttttatgtttgtaagcggcataaacccaatgtttatttttagcggtataagtacccaatgtttgtaaaactgtaatttttctctaatattgtgaatacagactctattattgtcttaaggtgggcatatataagacctaaattcttgatcattaggtctagatagaaatatgtagtatcagttacttcaaaatgttcttttaataaattcaaaacagagtgtactcacaaatctggaagaaaattacagttttacaaacattgagtacttatgccactaaaaataaacattgtatttatgtcgcttacaaacataaaattttaagtacttatgctactatttaccttttatgttctcaattttaaaaatagaaaacttaaaacaatgtgaaacaccgcttaagccatcgttatctctataagcattaaatatggcaacttgaaaagtgcctatactctaagcatggaaattgacaaaagaaaatgaaataaaatttgtttgactagggtggaacctatatatatatataaataatatctaatctattgctatctaattaatatccataggcatagccaatagttatgacacatgagctatgtatatatctacaaattttttggtgccctatcattcatttcataattcatatagctgaatttggatggttttggtctttctcagagggtcaatcatggtggctaaggctaaccttgcctatgggacttcatggcataaacccaataattatagcttagtgttaatcactcgtgattaatttattcaaatcggacttgtataaatctcgctgtacaaaattcaataaaagtacttgttctaagacttgatttaattacactaaacataattcttatctaattactaaaacttcattaagagattaaaacttggatgctactaaggtaacatttagttggaaggaatgaaaacatatataagaaaaagaataagaatagaaataatagaatgaaataaaatttaaaatgcatcaaaaaattgataaaaa

SEQ ID NO: 314080 - DNA, 1868 bp, Cannabis indica
actatcttgactatccaaaggagcatccggggtcaaccatgtctgatcaacaatgtcaaggcattcatcatcctttagccaatgagtttcaaaacgaaatcgtcgttggttaccctgatgcttgagtcggaccacattttcaagagaagccaccaccgggcggtgatcggagtgaatcagatccccattaatcactttaaaagaaggatacaaactatgccattcctggttgcaaaaataacgatcaagccgctcttgcacatgtgccacaccttgccgtttgttaagccatgtaaagcactgcccttcaaaccccatatccaccaaggaacatttatccagcgcttgttggaattcagccatagcagacaagctacgatcagcaccaccttttttctcatttatagatagaatttcattaaaatcaccaccacaaatccatggaagcgtaaataggtccttaagtcgacacagtaatctccatgagtctgctctacaactagccttaggattcccataaaacccagtgaatctccacaaattcctaccaggacattgaaccaacgcatcaatgtgcccaactgaaaaagactttatagacacctcccaatcatcattccacattaacaacaaaccaccacttttacccacacaatcaacatgaaaactatttgaaaaattaacatgtctccgtactccttccgcccacccaccataaagtttagtctccgataagaaaactaaacttggggaaaacttacgaacaatcgttcgcaaggccgtcaacgcaccagggttccccaatccccgggcgttccaacataatagactcatggctcctggcgagcctgctccacaggcttcgccaataaagtattctcacatgtgggaggcacgacacactgctcctccaatcgtccttttttcacactatcccgctcaacttccttctccatttttcgcttcccaccacccccaaccttcgggctagttttcaatgtagcattagcaactaggatatgggataatttaggactaatgggcatggccggcaccttatacatccctttagagccacggccatatgaggaattaagccgtttccatgttttcgacttctgcgctttaatgagaggttcaaaagtatgttgaagtgcatggctgaatgtaatttcatcatgatccgaatgacccataacacccttccctttacgatctttaatcagttgttgcttcctttgatcacttatgactcccccatcttccataatcacatcaacactagatgaatcaatatccctacccaatgaacattcaccacccaatacaaccttccctttatcactatcgggtaacatcactccaatctccacattatcattatcatgcataggacccccatcactcttaccattacaaagagaagtagatttcaacacccctttatcattcgccccatcaatacccagctgcccatccaccacggcaccatccatagccaagtgattctcagatgccaccacagaattcttttcggcagtagcatgagaaagcaactcctcatcacgttcacgagcttctaaaacagatgtaggagccaactgctcagctgtaggaccagaataacgagcccgactcctctctacagcagatacaattcgtgacgcttctcccatggtcattatcggtctattcgagggagaattctcgcgtttattctgaaaccgaggacgatcacgaatcggcgatcccggagcacacatccaagacccatatctcccattatcaaagcgaggattatcccccgcaaagtcccgcaaaggacaatccaatgccttatggccaattattccacaatcataacaaaa

SEQ ID NO: 314081 - DNA, 999 bp, Cannabis indica
aaaaaaaatagtaaaaataagtatattcatacaatttttcagtgcaaaactgcaaataaaactcttatacaaatatcacatttttttatggggaaaatcatatcacaatacatactatataattttattttatttttaaataaataattaatcatcaattattccttttctttttgtctcttttttttcaaattccaatattaaccctaaacctcaattttttttatttatttttttttttttgtgggcattgtcattcactattattgtcacttttctcccattcaaatggaaccttaaaaatacaaactcaagttccaaggacaaggaaagttgaaatttttaattttaaggttttttttctttcttttttgttatatatctatgaaccaaagccaatcaaaaaaaaaaaacccaatagaaaaaggcaaacgacaaaacacttgtcaaatcaaataacggctaagaattttatataatataatcatcaaatcattacctttctcttcttccttcccttcttccaatctccatcatccctctgtaaattttttatctttttctaaacattgactgaaaaacctatatgggattatagcatttggatcattccacaaattaaaggtacacaacaatatattctctttttcttttttgatattggtaaagttaggatttttttttaagaagaaatactaattctttgatgggtttttgatgatctttatattgtgattgaatttgatgtcagggaaagaggaaaagaaagatttgttttttattattattcttgttgctttggatgattgggtgtgagaaaatggcatcactttttatgaggaaagcatcaacagctgaattagagattttttacccaattagaacagaatgccaagaagatgtacccaagacccgttttaagctcagggtatgcattttaatctcagatatagactttatatttaatctcagctgaatttgatgattgggttttatata

SEQ ID NO: 314082 - DNA, 821 bp, Cannabis indica
tttatttacgttgggtctaggtccggggtcggatttgggttcaagtcagaggtcgggttcagtagaccaaggaccgtggggggatttaggtccgggtacatgatcgacgtccaaaatagttgattaagaaaaaaaactatttaaaaaaatattgaaagtgattttttttgtttttaaaattttgattatcaattaaaaaattaaaaagtaaaaacagttttatagaatatgtttttgaaaaatattttcactttttcaatttaaaaaacagaaaactgattaaaaaagtgttaccaaacggcaccaaaatttgtggaagtacatcatttattaaaaattctttttttttttgaaatcattcaaaattctgtttgtatatctacatctagtagtaataagttcattcttgtcgtgttggctcggtataaacggattagatttgaatttaacatgtgtttgcaatacataagggttatgaacacgacccatgtatatgaattgtcactctgctcacccatacatttcaaaagtattgaaccctagccaaccataacgccagcgacaccccgacccccttgtgcggcgtcggagccaccaacgaacctcctcctctccctaatctctcgacccaaaataccgagactcaaaaccccgaaattcaaaaccctgcaacccaaaacccctaagcctcgcccaaaaccccgacctcctcctctccccaatctctcgaccaacctccgctccagcgcccaccatgaagagagagacaaagacaaagagagagagagagagagagagaatagacgagaaagaagaagaag

SEQ ID NO: 314083 - DNA, 1313 bp, Cannabis indica
aaaatcataaaaatatttaaaattcgtgtacatctgtatttttgaaatttttttttattattttggtgtatttgtgaaataatcccttaaattaaatgtttctaagctaaataatttttgcacaaaataaataatttaattcttagagcaacttgcccttgggtaaacatccatgccagtagaaaagttgcccttgtatcatgaaatgatataaataaattagatatcaatggaaaaatagttaaaatatttataacttactatgaaatattattttttaattttaatatatttaaggataaaaaaaaattgatcataaatttagttatattttcttttaaatggacagccaaaatcacaaattctatttagtgatttgaaaaattatgctgtcgtttgggcgtagaaagtgtgggtataacgaacgatctttaagagaccacatggtcgaacgtgatatttgatagaattccacaaggccaaatatcgagaaatttgtgggtgtacacatcgagaaatatgtgaattttaaaataggtcaaagaccccaaccctagaaactggcacacattggccgaaagattcctttttaaacgggagatagcagaagtatcttttttgactagtagcactttggcttacaacgaatcacaaacgactatttggaccccgtgacatttgggcttacaacaaatcacaagtagctctgataccgtattagaatttgaggataagatgaatgatgttccatctcaaaactaattggcaatgaaaggagtagctcattcatcttatatatagcaatttatttctatacattagcaatgtgggactaactttaatataatgctccacctccatattacgaggatcaccctcgtcatctccctcatgacaccaagaattcggacctccgggaccatttgaaccaaagaagatagtccgacttaagagaccacctgaacaggggggacatgcacgaagagaagctactcatcaggcaccgtatgacgaccctcctcagcaagaattgtatgcacctcatgtaaatatggcagctcctcttccaaagttctatcccatttaatgtaggtatatttaattttatgtggcatgattaattttttaatttcttgctatatttttatatcctgaagtaaaataaactacatactaatctaaatatttaagaaattttttgaacaatacttacctattattgaggtgaatgtgtataattctttttgatgatgaggttcgaccgtccactgagataggtcgagagataaggagcagagagagagagagagaga

SEQ ID NO: 314084 - DNA, 1168 bp, Cannabis indica
tagctgcctcggatcaaaaaaggacagttttttttaaaaaaacacactagagaaaagttattaaaagcaaagaaaagatacatatgatgtattgtagttgtatatgtacttgaatgatttgtgttccaactccaccagagcctcctagtataagaatggatttaccagcagaaaaatcagcccttttgaggccttcataggcagtttcaatagctactggaagacttgcagcttcaacaaaactcagattctttggttttaaagccaaaagtttctcctctgcagcagtgtactctgccaaagtaccaaaattctttggtttgtcaatagacatttcgtttatatcaccatacacttcatctccaacctttaacttctttacttggcttccaacttttaccacaataccagccacatcataccctacaactgtctttttttggaaaagaaaacaaaaacattcatttatcattaaatgattttgagttagaactcatattatttagtgagtgtaataaaaatggtaactactattttgaaccagtgatttataaaaattatagagcacatatttgttaaatgacaatatgaattcagtatatttttttaaataatacaaaatattcactttttccttctatccgtttttgctagaaactcacttccaattgattatatttaaagaaaaggttgtcaaaaaatttaaactcatggtaatattttgaactattttaaaaaatacaaaatccaatctcttatttaacaaaataaagagtccaatgttagaattattataatggactaatacaatcataggtttaattccataatactcaatcattaactatgtgcctaatgttactcataaccataatgggatggttagcaacttaattatatgttagaggcacatgagagcacccttaatactatagttggcccattaaattatagtataccgtaaaagacctcaaaagccctattagttaataaccccttagggttataagggtaataacatgtgtatatatatatatatatgtatgttatgtgtggtgagaggtaattagagtttgtatggtaaaggcaaaggggttagctccacaagtgttctctctagtttttgctcaaggattggtggtgagtctcattaaagacattgaaggat

SEQ ID NO: 314085 - DNA, 1092 bp, Cannabis indica
ctcgtgttggattaaaaggaggaattatgttgttgtggaaagatgatgtaaatgtaacccttctttcaatgaatacaaatcactttgattgttacttgttgtttgacaatggaccaagatggcatttttctgcggtttatggttttcctgaatctgaaaataaaaaactgacttgggctcttattaagagacttgcggatgtcgctccacaagatccttggttgttggttggagatctcaatgaaattttttcaaatgagcataaaaatggtggaccgttgaggaatgaagctcatatgagagactttcgtacaacaatggacagatgttttttaaatgaattaccatatactggggaggattatacatgggccaaaaacaagaaaaacaatgctgctttaaaggagagactcgattggtgtctaattaataatgtgtggaaggatcatcttccacttccaactattactcatttagactactttgggtcagaccacagagctatctcagtggatgttatcctcaatgatcagtactcaacacaggacacaaataggagaagatcaaggtttagatttgaacaaatatggttgaatgaacccgactgcactgacatcatttctgctaattggtttgtagctgatggaatggatccttctcaaaatctaaagacttgtttagatcaatgtgctgttaatcttcaacaatggcatgttaagaagtttggtagcatgaagaaggacataaaaaaagcaaaaaaacagtaacaatattgaataattcggctgcaactgactctgctcactgtcaaaaggtagtctcggctgagatgatattggatgagttattagcaactgaggagcaatattggaagcagcgatcaaggattgattggatgaaatctggtgatcgaaatacaaagttttttcatgcaaaagcatcagccaggaagtccaacaactcaattaaacaattgcaagatgctaatggaactatggtttcaaataaggatggcatttgtaatattgttacatcatattttcaagaacttttcactgctgccgatgaagaccactgggcactttctcatgt

SEQ ID NO: 314086 - DNA, 856 bp, Cannabis indica
ttcatcttattgttattctattgatatctcatattttcctaacaacccatatattgcataaccgcatcacttaatcaggtgaacccgtgccaaaacttggcacctatatatcgcataactgcatcacctaatcaggtgaacctgtgtcataatctggcacccatatatcgcataatcgcataacctaattaggtgagcctgtaccaaaacatggcaccaacatatattgcataaacgcatcacctaattaggtgagccatgccagaacctggcacccatatattgcataatcatatcacctaatcagatgagcccgtgccaaaacccaacaccaacatatcgcatcgcctaatcaaacgagctcgtaccatagcttggcactcacatatcactgccgcccatgcctaatcaggcatcgccaacaggttgaaacctaacaacggttttagtttatagtcatgacttattacggttgtctcccaggaacaacctgaatacctctcggtatacatacattgtctcttatgggttcaacttcgtacttacatgaacattatattccgaaacaattcatgcacttgcaagtataaatattacaataccctattttggatacaacagtagctatctcaatgaacttcttatactattatatttattttcttaaattttgtgtttttttaatttattttaagactttgtaatgatatgactcttttgtcacattttaaaagtctcacattactaaaaaaaaatatttatggtgtatgatataaataaataatttattttactacttgtaggtggcgtttggttggaggtaatgaaatggaatggaatggaaaggaaacaattt

SEQ ID NO: 314087 - DNA, 3334 bp, Cannabis indica
atgggaattaaacttttgaacatataatcatgattatattccactgtgttgacaacactataatcttgaacaaagatatacatatttatatatgttctggacttaatataatttatacattaaatataatcatgaaataaatcatatgaaccatgcaacataaaaaaatttctaatctttattaattagtaaatctgattatattgaaatgggttttatttagggcacaaaacccaacaccttgaccaacataaaacaactaccaacaaagaccttgaagaattttataaagaggttcaaagaggaggcttcaaaaactaaaaaggtcgacgacggacaatagttagctttactctaagttggaattcggactggaactcctttttggaatgaactacaatgggaaggagctggtagcctccaagactttcaaaatagggtccagaagtatattaacttggaagaagcacaaataatggcgtatagagggtattacccgacgggattgtcaggatatgcaacaggagcacaacttcctggagctgcactccctgccgccccacaaacaagcagaatacagttttctgccactccgggatacacttcaaagtttgccctggctccagcactgtcgcacctgggggccccgtaagtaatcctactgtagtgaacgcggaactaccaaatcaattcgcactagccacaagcatggcaggagtgcctcaaagttatcggagtaagaggtcttctaaatgtagtacgcgatctgaggataaaagacaaaagaaagagtatacgccccaatatacgcaatacaccaagctaacaaactctcaagaacacgtgtattttgcgactcagcaaaatacgcattaccggaaacctcctcctttgtacagagatagttctcgaagagaccccagcaaaaggtgtgactatcacaacgacattggtcacaccacgaatgaaagcaaaaatttgaaggatgaaattgagggtttaatctgattaggccactagtacaagtggctaaaaaataggtttccacacctcaatctgacataagccagagtcccagtgcctgaaagaggacccgcgatagcactggagggccaggtaccttctggagggatgccccatccacagccacctggattgccaccccggactaacagaacagtcactatgatctctggaggtccatatattcgaggaatcactagaaatgaattgaagcgttaagttagggccctaaaacatgataaggaaatatgggaagttactcaacttccggcacaaaggcccaggctcatagatcaacccattatcttcactgaggaagatgcaaggcagtgcactttctgcatcatgaccccttggtcatcgagactcccattgcaaataaagttgtggccagaatattggtggacaatggaagctccgtgaacttgctattcaaagacgctttcacaaccattgggctcattaacagagatctctcccccagcgattcacaactcacaggattcaacgagacgaccctcgtccctatggaaaaggttaggctcctgattaccttgtgtctaaacaccccctaaagcacattcaaatattgcacctttgtagtagtggactgtcccattgcctataatgccattcttgggaggctagccttagttgacttcagagcaatcccagccatccgacacctgtgccttaagtttcctacccaagaggtaggagtgggaacggttaggggtaaccagggagaagcaagacagtgttataacgctgtagtacattatcggtcctaacaatacaagggtcgggaccgacgttggcaataaacaggacaaattagaccctcgtgttagctttgaagcagcgttagaacccatggaagataatgaggatgtaagggtatgtgacctcgacccatctaaagttatctgcctaggtaagaacctaaaaccagaggagcggagtaaaatcattgataccataaaggcatcaacggacgtgtttgcatggtgccatggggacatgaccgggataagtccccacgtgattactcatgtcctaaatgttaacctggatatacccccaatgcaacaaaaaagacgtccgctagacccaatgaaagctgacgccctggaaaaggaggtagacaaattgttgtccaacatttttatccatgacgtatactacccggagtggttggccaactcggttctggtacccaaaccaaataaaatatggcgagtctgtatagacttcactgatcttaacaaagcttgcccaaaggattatttattgttgcccagaatcgaccaaatggtagatgataccttaggttttaagctattatcttttatggatgcttacttcgggtacaatcagatcaaaatgcatgtcgccgatcaggagtgtactagctttaggaccgataagggggtatactgttatctatcagcgcatggtcaattggatgttcaagggtctcctgggacgtaatatggaagtatacgtagacgacatgctggtcaaatccaaaacatgcatgggccatgcagatgacctcacaaagtgttttgaagtagtctagaggtatgggatgaaactcaatcccaagaaatgtactttcagagtcaaattaggaaaatttttgggatttatagtgagtcaacgtgagatagaggcaaacccagaaaaaatacaagccttgccgccctgagtcgcttcatctatcgctcaaccgataagtgcatcccattcttcaacatcttgaagaaatgtcagaagtttgaatagattgaagaatgcgaggaagcattcaggaagttgaaagaacacatgcctaagccaccagtgctatcaaaacccattcacgaagaagacttatatttatatctagccgtttctgagaacgcggttagcgtatctttggtccgagaggagggaaaagtttaacactcggtgtattatgtcaacaaatgcatgatagaagctgaaattcagtatccccttatcaaaaaattagctttttgtctcttgatttcatcaagaaggctcaggccctacttccaagctcactcgatcaaggtatttacaaaccacccacttcggcaagtcttatagaagcctgaggcctcagggggactccttaagtgggccatggagctaagccagttcgacatacaatacatctcgcgcatctcgaataaagcccaggcactggcatactttattgtagaatgcaacgaggcagaggccagcacaagtttgttggctcaggatgtgcctgttgggttttatgccctaaataaaactcttt

SEQ ID NO: 314088 - DNA, 1213 bp, Cannabis indica
aactgttggtcggtttacaagttttttttttaaattgggcgagttgcacttaaattttatcaacccgaactttagattgggttaaaaaatttataggataaaccacccaaattgaccgatgtacaaccctacttcccaagggcttactttcagccttggaagtgacaaaagcttccccagatgccaacaacatgttgtcttgtgcacgcaggtaggtcacaagctccgatttgtgggaactcagctcagccaaatccacttctccccaagaaataaccataggagaagtagaaggcctctcttcaatatctatgaccttctcttttttcttacatgaatccctcactaaagaggaattgtaagtcacgatagcattgtcctttttctagacttcttcagaggagttgaagaagtcgtaggaatgacttgcacgacctctcgaataggaggttcatcagtcccggttgccgattttttcctctaggagcaagaagccatagcagcaaggaaacacatcttatctgggaaataaaagaaaagggttagtacgtaagaaaaatacaaaaaaacaaaaaataaggttagggatgactatggcgcatcaacaacctactgattcataaactccctcaggcacacaagcttcattgtgccctgaaggtttagttttggccttatcaccagagccaactccaatatctaccaacatcactttgaacccaatgatagtggcactttgcccactctcttcatcctcaagaggcattgtgaaagaatgatcaacaaagcaagcatcaacatacactcgctggcaagttggtatgagacctacgtgatggaggttgtcatcgatgaataatatctttcactctcgttcccataagtcgatattagttaacatggcatctgctctctacttcatgtcgatcaatggagcaggccttttgaaagggccaacctttttaaaggtgagatttcttgaagaaatagtgagggtatagaaatactctttatgggtgatataaatagtagaagactaaactgatactgtccatgtacacactaaactgatactgtccatgtacacactaaactgatataaatagtagaagactttctctttgtgggtggaacttttttagatcacacagaaaattgatctcatgaggagtcaaaataggccaattctacagacgatagaagaaaaagaatg

SEQ ID NO: 314089 - DNA, 753 bp, Cannabis indica
ccaccagagtttcctctggcttcaccccaatcccgaatacaaactgtgtggtttgtgatagtgaagctgagagccaccaccatttatttttttgttgcaacttgtctcaacaggtgctaaattctctctttcaatggctggggtttgaaggttggtccaagaactttgctagctggagtgtgtggctgggcaacactaggccgaacatcatagacagaattagagtccttatattgcctgcatcgatctaccacatatggaaaaactgaaacaattgcttgttctcatttttttctaatactataaattgtatatagtgaacaaaattaaaagtgatgtgaaatataggctcatcttgataaaagataggaaaggttctagagaggagaagaatttacttcaaagattgatatgtaattattaggagtttgctttgttgcttctctttggagaagtgtattgtggttgtattcggttggttgattaatgaagttctcttcttcttgataaaaaaaagtcacatttagtcacaaaataattaggttgtgactaaacagttgtcaccaaaagtaacagttttttgtagtgagatgaaggttcaagagatacaatttagtacatgtcaaagtttgggaatacaatttggtacatattgttaggctaaaattagtctaagtttcaggccatattttcggttagttttcactctttgtttctagttttagggctgttttacgcttgattcttttgttt

SEQ ID NO: 314090 - DNA, 1051 bp, Cannabis indica
acctatcacataatacatgcttaatcaatttctcaacattgtaatcacaaaatctcggtacttcataaagtacccttaccactctgtaaacacgagctatgtatttcactatcgttgccccatgtggctcaattaattagagataacctgactgtgcctaagtctaagaccttatacaagccatgtggtgggaaggtgatggaaactgaactcctcaaagctgccactgagagtgaagaccctagagatcggagtttcaagtagagacctttggtatttagtaacaaaactgaacacaaaacacaattgattagagatgatgatctccttcgagaaactattgtctagaatccacgatctgagggtcctactggctcccaaaattattgttgtagtgcctagttgaggttgcatatgaatgcgggtgcttattttccttcgcacccgtggtttatttcaattgcagatttccttagagtttgtccctaccaaataaatccaaatggctataggatccttgccaccttcttcttcttttaccacttgagaaattggcctatcccaacccctcatgaaataaacttcctttgtgactttaatagaagtccaactcgaaaggaggaaggattctatcacttccatcattttaacccatacatagagaacattaccgaaagtaattgtggcctttaataccaggaatacttctgcaccttgattgacatgaagaagagagcaaacaccatgctttttgagattgatgcacaggaaagagatgggagtgttggaaattattttaccaggatcttagatctactcacaagtatgttgattaacagcctaaatatgaacttctaaaacgattataaaataaacacatataaagtatgagaaaccttacattgggtgccgcggaatattatgtctccttccattcagatctctaacccttgtatcctttctgtcgcagagtattatcaagatctgaaccttgatctctttctctcctttctttagtgctgaaactccttcttgttgaatatctttcttc

SEQ ID NO: 314091 - DNA, 3715 bp, Cannabis indica
catagtgagtaagacggtggtaaccaaactcgaacgagagaaagagatccaggttcatatcttgataatgctctgctacagaaaggaatcaagggctagagatcttgaacgaaaggagtcacattattccgctgcaattaatgtaaggttttcttaaacctttatgtatttatttcattgttttagagaatttatatttaggatgttaattcaacatacttgttagtaaatctagatcctggtaaaatattaccaacagtatccacattatttgtcgtctgtttgttctggacatataggagttatccactggataggtctattatgccgtcttgtcatttgattgtaaatggtaaacgattcacacaaaaagtaaagttagcatataaatttaaatataaacacgcttacatattgtgatgttggatatagaacttacgtaaaaataataaatttcaaatcatctggtacgtcaccattgttggaatctaagtacgccaccgtctgcgtacttagttggattagtataagcatccaatgaacatttgtctacacacaaaaatatgtgtaaaattgttagtacataataatatatattatgaagagttataaattatgaaatcattcattctaattctacttacggattattataagggacaataacccatttatccggattggtcattttggtcatacgcgtgactagtgcttgacaatagatactatcaactttggcttcaatggcaatggcactagaattcaaaaattcatatattctgtttaatccattgatacccaggaatcgctctttcatgtgcatgatataaagacataattaataaccgtcactgtcaaaagaaaattattaagtttattaagagttagaaatcatacttgcaccaaactgctataggttggactcctaagtattgcatggtgtagaatttatgaatgtcttttttagaaggaaaatcgagttatcttcgacccccaaaataatcttctgtaactcagaattggattattctctacaacgaccactttttcaccgagtttcaaaagttagtgattgagatagtttgtcatgattggacataacgaccatgacttgttggcttactcaacctcttagggtgttttcgaggttgtgtttaaggactgagtaaaccttcagaggcttgtctgcttctcctcacaggttgcttctgaagttgcttggtgggtggctatgtatatggaaaaaaaaaaacataaagttagaaatttcattaatcaacaaacacaataagttaagtaaaaaaattaaaacataccaagtatttttaacagttgtaacatagtctttgggccatgctaggtaactttttatagcttgacctacttttgtgaatgcatcttgggtaataggacacggaagcagtgcattctctacattgacttcttcaatgaatacccaacgataatctgtgtataggtattcattattgtgaatcgagaactttccatatttcaaacatttctccttcacaatgtgccccaaagcaacctttaataccatcccactaggctccaaccgacagtgcatccaacatagaaaagtctacatatccaaatcagacaagcaataatttagtttgtaaaattgaccatatttataattttacattagatcaattcgtaaaataatattaagattacctcttttgatctaccaccagtaggtggcaatgttgctggtcgagcagaaaccttttgggaatgtggtggtggtgatggagtagagacattggcagcacttgatggttgtgctatgggatctggtagagtagagacatttacagtacttgattgttgtgctacgggatcggagttaaggtcaacatgggcttgttcattcgatgctcccccaacaccagaaccatacacatgggatgtactcgcaacgctgctatgctgggaacgaactagacaaaggagctcatccatttactcttgtagttgtctgttgctctcctctgtctcacaaatgcatctttccaaatctgatgattcctggtttgacccattcttgtttttctttttagggcgtggagtgttgaaatatttggtttgggtgatgacataacccatggctcgatcctgaccaccatgctcatatatcccagcaccatgctcaacacgtccctcttcccttccacatgcaaaactccgtcttccacttgcttacgaaagtcgtcctacaaatatagcaaatagagatagaattaaattgtgaaacataacaatataaataaaattatactttaaacttacaatccatttgacgatttttgcagctgggccctccacctcacctttcgtgttaatgtgaagtttcacatctatcaaaatcggtaatttggcggcttgcctctttttccatttattttgaaccatccttacaccacctcgtctggtgcaatggttgtaaatatatttttccgtgctccgttgtgccttttttctcctcgccccaaatttagaacttaatctcgtagccacaaactctctccattattacaaatcaattatgctttcatacagtttcagtggcttatcgagaagttagggagccacatctttgaatgtaaaaatactttttattaggatatttttccaatccttccatctctctctaccttttgaaatggttgatttcttgtccatcttcggtacatcgaacatagcctaaaaaaattaacaatcatagttttaagtacaaattataatcaatagttaaaaacacgaataataaaattaatattacctttatgccattccataattggtttttaatgtcttcactaactttaggccacgatatatctcgaagtcgaacattaactacccatgctccaattcgggtaacttttgtcgtccctcccttttcccagtgttgtccgttattattttactcaacctccaactttttccctctcctgccattttggatatatcgctctgtttgcttctctagcgagtatttttctacggtggttgttcaagatcaacactatattcatcttccatggatgattgttcaagatcaacactatatccttttggcacggatggaccatcatcaccatcataatctaaccaagcactccactcatcttccccacctggttccatgatgaataatcctacaaatttgaaagcatacattagaatatacaaaattctgtattgataccaatacgtgttcgatgactcatgtattgataaattctttcacccataatccttcaccatcatcacgagatgatatgatattgtccctaacagtgacatcaataggtggtggagtgatttaatgaatttggtctctaagcatgagatcatcgtcattagactcttgattagcataatcttttgattgcagtgtcaagacaattgactagcgtgcatctaatagatcgttcatgtaaaacacttgattggcttggaacaccattataaacctattagacttgtgtccaatttgattcaagtccactaacttgaatgtaaatttatcgtctttaaccctattatcactcttaacccaatcataaataaaaatatggatctaaaaactactataatctaattcctaaaattcttgaattacaccgtgaaaagacatgtcacattcaataggatttttgtcttttgaactagatatttagaa

SEQ ID NO: 314092 - DNA, 1555 bp, Cannabis indica
ccctttctcgtttcttccaaatcccagtaagtcgtatccctcattccctcgtcgaccctcatctcctctctctttctcagttgccggcgagttcatcacagcaggcggctcaatccgacgagttcttcttctccttgtttcttgctttgatggttgtaattgtaaaaggtttttatttctttcattaaaacttttaatgaaattttcttctaaaaaaagattttatatgcattgtatatatatactgaaagtttaaaagggccaaaacttattttcaaggtggtcttcctgggcaatttttcccattttattatgagccaattttatttagtaggtcttttgatgttctattatcatcacacaactttaatttttgtgtatttaatttcaggtaaatcctaatggaatgaaattaaatggtatttttaaaaacaaaatattatttgggtccaaaaattcttcaatcggatctggtccattaaaatccgaacccgccctacaaaacccggtgcacccgacccgtaacccgtatgaacccaaaaaccgagaaaccgggttcggttaggcattttaaacacccgatacccgaaaacccgaacccgaccacccgaaaacctgacccgtgtgcagccctactggtaactccagtttttcggtggtcgagattcgatactaggatactgagttggagaatgtcgagtgcggaaatgtcgagtgcagtgctgtgggagggaatcgaatctcaggttccatcggcccgattgacgatgacccatctatgggcacgatcggtggacagagatcatggctggacgtagtcgtctcgatgggcgccttaccagtagctacaaatcgagtcatttgtgccatcaacagctccagtaacctctggatctctgcccgtatctcggaaacttccttgcccagctgcgacttcacctctgcgatttctttctgaacttccaggcgcaaggtctccataatttcatccatctgctccattgtagtgtcctttttaggccccatgtcttggatcgtaaatgtttgataccactttgataggatcttcaatgtgatctcaactgcaaaaccagacaagaaaaaaaaaagatagagttgcagaagaagaaaagaataacagtagagtattggatgataaaaatggcaacatccttgtattgatacccaggaattcgagagcctggttctctcccataattagttacaagctaaacaaaattctcatgccttcacaaagcaaaaccagctaacttttattcaaacttacaggtgtagcaaaaactcaccacaccagaacaaaactcatttaagaaactgccagctcaactttaattccctacagcattgcccaatccctttttcatacaccttcgagcataaacatatgtgataggtggttgataaaagcctaaatttgtatattttaagcctttaattgtgtatgtaaaattaatttaattaaatatctttatggttttaattatataaatatttaattaaaatatttaatttattttaattttatgctattttt

SEQ ID NO: 314093 - DNA, 643 bp, Cannabis indica
aaaaaaaaaaataataaaataagatgaatatgttttggagaaaaataagttctagctggtagattagcttagaggactctcactctcatcaggtgctttataatagctaaaagctaagaaaaaaaataactaaaagcaatctcattaatgtaacaaaaatagcttatttttaaattttcagctaaaaaataataaaatagtgctacatcaagtgagctaaatatttctttattttagctcaaatactattattcatgctcatatacagataattttttaggtttttgggcttcttcaattttttattctttttttatttttatctcaacactaattattttttttttctttcttactttttttcgtattttaattaataaaaaagtattcaataaataatattgtaaaagaaaatataaaaaaaaaatgatatatgatataatataaaagtgtgtacgaaaatagataaaattaagtttcgatgagttattttaaaaaatagaatagagaactgagcactcacattagatgctttgaatagagaatttttaaaatatttaaagagctaaactaaaaatatgctacatctgatgttctaaattctctctattttaaagtttctttaaaatttactattcatgtt

SEQ ID NO: 314094 - DNA, 1054 bp, Cannabis indica
tttacaaaccgaactttacgttgggttagaaaatatagtaccatactatattattatttatgattgtctgtttaaagaacaacactaatacaatcagggtgaccatgccaccaacataattattaaacaaagtgagagctaattttactaaaaaaatgtgcaaaactattagcaatcctgtgatgatattaaaaagaaaaaccattaaaattattacaatgaacaaaggtgtccctaacaatacaaaataagtaagactgataatcttattattattaagagcatgaataacaataagccaattagacaccaactccaccttcagatgaccaagacgaatagcaagcatgagaccagaataaatactcaaagcttgaacaacaatagaagagaaacaaccattccaagtccaagtactaaaaacaagaacagaacctcaatcatcacaaataatcacctcagcaccaattttatcaaagtcactatataaactcatgtcacaattgattttaaccaccccagaagatagtttttggaccatttaataaatggcttgttgtcaacaatatttttctcatgagcattagaccaacaattagcccaacttgaaaggttacaaatagcccatgctccaatcaaataggtggttatcatctaaacaaactttgtcactcacccatttattttgtctatacgagattctccaaagacaaacaataaacttttcaaataaaacatataatatattatccaaataaaaatagaagaatccataaatgtcccacataaaaacataagaacctgcaagtaattggtaatagtgttacgaaccaaagtaagattgatgcatccccaaatagcatgaagtgatgtttcggccccaaagaataaaaaatataatataatagaacctctatttaagaatactctattcaagaataacctctaatttgttataaaaaaatcaagtcccgatttaggacagttataaataaaaataacctttaaattgtaattaattatacattttttaagtcccgtattaacaaagtat

SEQ ID NO: 314095 - DNA, 2118 bp, Cannabis indica
tataataaattaattaatattatattaggcatgggcaaatggtagattacactgtgcaactcacagagtaatgatgaaaggaaatgaggcaaggtactcagcaggattgttttcgatgccaaaagcaggttacatggtaaaagccccagaagagcttgttgatgaagaccatcctttgttgttcaaaccctttgactattaccgattccttgactttttttattccaatatggctactcgaacaggcccaaacgatcttcactcctattgtggtctctcaatctcatccagtgattcacaataatccctttatataaattaatatttatgtactgtcgttttgcttttgtcttagttatcttctccacaacatgtgctatgtataatagtacatacatatatattacccatatatgtacttttatgttagatttcaatatatcttattatgttatctccaaattagtgtgttctatctgttctgtcaattattttagtacatattatttatatcaatttgatatataataaattcgttaacaaactataaactaaattatgacatgaaaaatagatataaataatgtgttctaaaacaattaataagaacaagaagagcacatcaattttgagacagcaagttttttagatttatggcaaaaattaggtacaacattagtttagctataatggtggatttacagaatcaaatcaactattaatttcaagcaaatccattcttagcgttacccatagatccaaaaacgtcagccccaaatcaactatttatctgtactaattttattcatagtctattaataaattcaaaatatctaaaaggaaatgactttttttttgggtttttttattcttctatgtttacaaaaatgtttagaaaataaataaaagtgcttaatttaagaaaataatttttttaaatggaatttatatttagaaaatgaattaggagatattgacgaagaaaacttattattattacttttttgtattgttaaaatctgagtgacaggtcataatttacttactagtttttttaccgttgttgttgttgttgtttgtaattaaaattaattaaaacgagtaaaagaaaaagaaaaccgtcaaaaattaaaaaaaaaaaataaaaaaaaaaaagaacgaagaaaaaataatttacgtggtggagatggcctaagcattatagtgtatatacttgattatttatatttgtgtgttctttttaattaatttaactaaggttttgagtgttgtaaaacaaaatatgaaatcaaaaacataacactaaaatgcaactacgtacacagactacctttatgatgatatgcaaaaaggaaagaatcacgacctgtaacaacaaatactgttctgattttcaactttatttcaaatgcttgaaacaaagtcatatatataggctatgaaatacaccaaatgtaaaaactataatagagaacttataactaccatcagatacaagtggtaaattagttagtagagttggtgttataattaagtactctctaatataatagaactactatatatataggacggccactatatatgcatatataattcatatgattgagattttatttgatgagcactacatatcgtacatacctcaatgataatgtatatatttgaagtagtaattaaatatgataaattcgtacacattacatcgatgagtatatatgtataaactactataatttgatttttttagatttttatatcttcaagtgggcgcaataataagattaaggctaataatagtgtacgaaaatatagatattttaatttaaaataatttttattttattcatatatatacacatgaaaatgatctaatagcaattataatatatgctatgtagtgccaaatgagttttaaaatctttttttgtttgtcacgtaagataaaaactaacagtgtgtcaaaaaactcaatactcaataactggatagtacagtaatttaaaacaatagtaattactacaactaaaatttagacatttatttttaattttttcaataaaaaataaagataaaaagaaaaataaactattttatctaaatattaaaagtcgaata

SEQ ID NO: 314096 - DNA, 2440 bp, Cannabis indica
caactcaccaacctaaacaaagcatgtacaaaagactactagtagatgccatagctggtcattaaatcttgaatttcatggacgcgtattcaagttacaatcagataaagatgcatccactagattaggagcacactatcttcatgacggacatatgcctatactgctacaaggtcatgccttttaggctcaaaaatgcaagggtcacatattaaaagttggtgaacatgatgatcacaaatcttatcggctgcaacatggaggtgtatgtggacgacatgcttgtcaagtccaaaatgggtgggggcacgtggaagacctatgcaagtgcttcaaaatccttcttatgtatagcatgaagctcaaccccctcatacgctcttttggagtaagctccggaaaattccttggctttactgtcaacgctaagggaatagaagcaaatctagacaagatccaagaccttttggacatgaagtcacccacaacattcaaggaagtacagatcctaacaggaagtattgctacattaagtagatttgtgtctaagtttataaataaatgtgtacccttcttcaacattcttagatgcaacaaaacaattgagtggacagaggaatgtgaaaatgcattccaggagctgaagaaacaattggctaaacaagtagttctatctaagccgtagacaatgaagagctaggtgtatagctggcagtcacagagcatgatgtgagtgctatcctcacaagaaaaaaagacagtgtacagcaccctgtatactacatcagcaaaaggctaatcgacactgaaagtcgatacccattcatggagaagcttacttataccttgctcttagcttctagaaagttaaggctttacttctaggcacaacccataatggtgtaaaatgatcaaccactgcaaaaggttttacagaaacctaaagcattaggttgactactcaaataggccattgaccttggccagtttgagatcacatacctaccaaggacagccataaagggtcaagcccttgtagacttcatggctaagtgtaccaactcaactcttgagataagactcaggagaagagaaagagctagagaagaagcgaaagcaagagcagtaacaaagttcctcaatactagcatggaaaatcaatgttgacagaagctctgttgaccaattgtctggtgtagtcatcacccttacaacacatatgggtagcaactacacgtagcaataaaatttagcttcaaagcctcgaacaatgaggctaaatacaaagccttgatagatggcctcaagctggcacatgaagtatgggctagccacgtggacatattaagtaattctcaactagttgtgaatcacgtcctaggtgaatatacagctcggggtgaaaaaattgttgcttaggcaaaatctaagacttgctaaatcatctcaaaggctacacaatcaagcagatcataagagaacagaacgtcaccgtagatgcacttgcccatctggcaagcatcaccattgatgacaaagcaaacttggtgcccaaatagttctaagaggaacccaacattgttatcttagaagaagtcaacatgttggataacactccaacatggatgacgcctgttgcaacttatctcaagctcagagccttactagaagacaaaaatgaaacaagaaaactgagaagaaaatctagtaggtacatgatcttagacgagataatgtaatgatgaagtttttccatgcctctcttgaggtgtgtcaccaaagtcgaagctgaacggctaatgatagaagtgcatgaggcttctacgacaatcatgccgaggatcaaagcctatccaagaacatactctgacagggatactttaagccaacaattatcaaacactcgatagactatgttcgaaatgtgacaagttctagatgtttttgagaataccaagagctgcactcaatgagctcatgatgatgcagtctcctttgccctttaaagtgtgggggatatacctaattcgttagctcctaaagggaaaaagaggagtatagtttgttgtcgtcgtagtagactgcttcaccaaatggacaaaagctgaaccccttgcagcaattaccttgaagaaggtccttgaattttttgtcaagaacattatgtgctgattcaaacttccccaaaagattgtgtcagacaaagacaaatagtttgatagtgacatgttcactaatttctgcaatagacatggcatcatcaagagcataactttcgtggcccatcctcaagaaaatggccaggtggaagctgtcaacaaaacaatcaaggacaccctaaagaagcaccttgaggaaggaaaaggcaactagcctgaattgctcctagaggtcctatagttagataggactaccgagaagatggtgttgggttttatgc

SEQ ID NO: 314097 - DNA, 2151 bp, Cannabis indica
ttagtaacaactttgtatctaaatattatgttttagtcacatgtaactttttgttgttagactaaaagtcacatttagtcataaaaaaattatagttgtgactaaaaatttttttttttggaaaatcagcaagtgtatttaaaaaaaccaaacaacaattcatacaacctaagagcatcctcaagaagaggacctccaactctaaaatctataatcattacaatggacttacaatgaattaaaccaacactactctctatttgttacatcttttggccatatacaaactattctaagtttaatgacagctttaactttgtatacaattctatgacaattttctatctccccattctaaaaaccattatttcggttgctccaaatcaagtatatcagcgctgcaatggcagcagcaaatactttccttctgaagttgttacattttgccttttttaaccacttgctaatgcttttcaaggttgctgccgaagtcctccattgaagccattgcttgatttgtgtcaagcaatccttcgaaaactggcagccaaaaaagaggtgttctattgtctcgctgcaattattacacagaaggcagtcatcactatcaattaccccaaatctctttaatctttccttcgtcttcattttcccaagcatagttaaccatacagtaaagctatgcttcggaatattaaaacaactccatacaaacttgctccaatccactttagacggctgtgtatgtacttctccatagccaacaaccactatgtaattgccttgtaccttgtttaatgaacccaaactcttcattagatcttttatcatcaccaatttcctccaataccaacttgcttgagttgaaggttaataggtccaccaatcctcatccttgttgtatacattgtgaacccatttaatccataggttgtcttccatcttagcaatagcccatacatatttgtacaacgcagccttgttccaatccgagatacatctgaatctcagtcctcctgaactttttgattgacaaaccgaagcctaggcaaccgtagggacacctggtaatgtgtactgtccattccataagaaactacgacaaatagattctatttcacttacaattttctttggcagcatcatcacttgataccagtaagagtgtatggccatgagcactgaattaatgagaacaacacgcccagcaaaagaaaggtttctcgtgctcaaagttttgatctaagccatcattttttccaccaatagcttgcaatctgctgaagagatcctctatgggcaaataggcactcccaaatacttgaatggcaggtcttgcttttggaaacctaatacctccagaattctttgcacatctgcatcagacatgttactacagtatacaaccgatttagagggattagaaaacaagcctgatgtgtgagagaaaagcttcaatccctgtaacatgtaatatatgctcttgaaatccccattgcaaaacaatagaacatcatcaacaaagcttaagtgattcaactcaagaccccacatctttcatgaaaaataaaatcctgctttttaccaatcttcctcattattcgagaaagttattccattccgagaacaaataatagcggcgacattggatctccatgcctcaaacctcacttcgcctcaaagaagccacgtaatgatccatttatcatcaaagagaaccgaggagttcgaacacaagtcattaccaagttaataaactttggtggaaaatggaacccatataacatctcttctatgaaatcccattcaatgatatcatatgccttttgtaagtcccgctttatctttttcttccttccatagtgtccgatgagatcttggcaaatgatgatattgtgtccaatgaattttccatgaacaaatcctccttgattctgaaaaaccaagtttttgtaaatatcaacaataaatacgtatatataaaactgtatacgtctgcagaagcagaatgtaattttgttactgcagagaccagtttttcagtgacaaaactgaacagacagaatttaaaaatagttgcagaaaattaaatcacttaacacaagagatttgtacgtggtatcagtgttcttttgaacactcctagtccac

SEQ ID NO: 314098 - DNA, 983 bp, Cannabis indica
aaatatattcaatattaaaatatctaattttataattaaataataattaaataccaacaaattaacaaatttttaaaatctcaccataaatcattttttttttatgaatcaagtgtttgcatttctcactaaattgttttgtacaaacaaatagcatcctcataacataggacctatagaaatatgtgtaataatatgtagacaattacatacatctcactatacaatcactttcctctatatcttacaaattcgaaaaccaatcattgtcttccctactgatctttttcggccaaagcactgtcactcttgtcttgagagtctccttaattttctacataatctcttgtaatctaaccatcttcatgttacatatgtgatcatttcttgacctgcaaatgttataaatcaaacatgctagtgtggactgaaaatacttttttcctgaaattggacaacttggcttttccaatccatctcaccagctaccgcaattataataatctattaaaattaaatattattaatttaaaaattgatatttaagtttaaatatattaaaaaaatattttattttgaaataatggtttgaaaattggaaaaattcaaaatttgtggaaaaatcccacaaaaattggattttggtgcaagatgcacctgctgcccacaaaacaagtgctggtagggtgcatgagcgggatttctcggcgagatgcagggtttggcatgcagatgcacagggtgcatcatgtctgaatcctaggcgagccacggcttcagacagagtttgtcccttatccacgcgcgcacgagcaccttgtctgagtgctcctgtacgtgcgattgagcatgtgcatcccgaattttcaaaacttcataactttctcaatttttatcgaaatcgagttctgtaaaaactaaaattgcttaatttttcacaaggaatccaaataaaatattttcagaatgaaaataaaattatt

SEQ ID NO: 314099 - DNA, 1230 bp, Cannabis indica
gaacctgcggacgccatggaagttagctcagagagctgaagattgaccagtgaaaaaccaagctagctaactggcggtttttactagattttaaagcctttaactttctcttttatttatttattttaataataaaaaaatataataatatttttcaattcatgtacttttatttttatatgtaacagtttaaaatattattattattattattattttgctaaataatattttttttaagacgacaaaataataatattaatattaaaattatataaacaccgaatcaattcacttatctcagtctcaggtcgtcttgacgttttttttttcttcccaaagggaacaaacgtttggactccattttcttttctagttaaattatattatattttattttaatgattacttttatttaattcataattatttttattattaattcaagataatatcatgtttatttttaataataaaaaaatatcatgtaaactgatagtactttgtggtagttagaaatattaaataaaattattacattaaattataagtagttaattgcactaatactctttttagcatttccaaatcttttttctaatatataaaatcaatcatgaatcacaatttttgtgtactttgtctccttgaatgagtagtcgttgactataacatgccacttggcagtgtattataaagagaaaaggaattaactgatctttgttccaaaaaaaatatatatatataaataatacaataataaatattaaaattagttttaaatcaatataaaaaatgatagaattctaacataattttttttatatttcaatcacaataccaaaactttgtgtatattattctatttcaatcaatataatttttttattatattattttataaaattacaaataaacacaaattttatgtatataaaaaaaactcaacttataaatatattatttaaacattaaaaactaataaaaaatatttagtatagtttatagtgtcacactaaaactatatttggtaggatggaaaatagagaagattgaaagctgataaaggatgtagtgtaaaatgggagaggggaagagaaataacaatcattttaagctatttaatagaaataatagagtggtgaaaggagaatatttatttatgaaactattatattgtctttataaatatttttttataatatattattaagagagtataattgtaat

SEQ ID NO: 314100 - DNA, 1637 bp, Cannabis indica
tgtttggtttctttattagaacttgaatgcccattccaaaggaattacaattcacctaaactaaggatttacttttccactataaaatcacttgaaagctaattccatactaacaaaagtctattttaccctatcaatcctcctccacttctcacttttttttggatgttaccatcatattactaattatttaatatttatatgcaattttattattttattttttaataattaagtttgagaatgtgcacatttccctcacatgataaatatatttttttgctaagaatattatttatttgttcaattcataaaataatggtaatttaataaaataaatataatttttgaagagtaaagggtaatttagtcaaaataataaaagttctattccattccatacaataccaaacatgataattcttattccgttgttgattccataggctttaccaaacaaaagaataaaaattccattcctttccattcttattcctattcccattcccattcccattccattttcacttagtaaccaaacgccacctaagtcttccgaaaacctctccatctcaatagcagcttttaacttctttttcattgctacgatttttttttccaatatcagctactctccattgaggccttataggcccaccaataaacattctcaagatacacacagtttaccatttcacgtagagattatctttcttagtagaaaaattttccaaacgtattaccctatatattgtggtagcattaattccatttcaccacagttttaaagaaagctctacaaaaaatgacattaatttcacaaaatcttctttggaaaattcattatttgagctcattaagaatagaaattacaaaaaagcccatagtcaatgtggctctccctgcaaaagataaattttttgtaatatatgttgtgattcgataatcataatcataatataactacttatgttcaatatgtaaaatttgatacattttgatgcaaatttgatgaaaccctacccagtttcgataaagtttgcacttaaattctaaaatacagtaccagattgcagaatataggaataaatagcttctaactataataaaaataaataaatagaaaaataatattttaaaacttatttatcaaaataaaatttaataataactcaatttagaggtagtagttgccttttctatgtctatttttattaagaattattttaaagttggtgatattacaaaaatatgtaaaattgagctcagtatcttattaatttatactattttaaaatataaaatttattttattatttaacaaaataaattgtcaaatccataattttttgcagcaaaacacaaaatttcagcaagttatatattcagctttgtatatatttctagtacgtagattttatgttaataaacatgcatgaaacatgaagaagtttctccacgtaaactaaatatctgaactatatgcggcttgtcgtttcaggaggtgagaagatttaggtgtttagatgttgggctgggctgggctctttttccttttattttgtgaaaaatatgggatttaataaaaaagttagaaaaatatggcatttataagtttaccactcttctatggtatt

SEQ ID NO: 314101 - DNA, 701 bp, Cannabis indica
aagggagctaagggcgccccattaagtaaaaccgagaaactgacagtagtgacacattgcattatcaaattacacacctttgtactgaaaccgtttgccaccagaacatgaagaatgaaatcccactcaagtggatcatacgccttgctcatgtctgtcttgatcgccatgacccctacttttcctttcttattcttaatcgaatgaagcacttcttgtgcaagaatagaggcttcagcaatccaccgccccggcataaaagtcgattgacatggcgagatcagtcgatcaatgaccactttcaaccgatccgttagaatacgagatataaccttataactgaagttgcataagctaatgggacggaaatgatcaaattgtgatgcctgcgctgtcttgggaatgagacaaataaaggaatggttaatctttttatcgagaaccctagtaacaaagaaatctctaaccatttcgcagagttggggaccaactgtgtgccagtattttctgtaaaatattccaggaaatccatctggtccaggcgccttcaacgggtgcagtttaaacaccacctccttaatctcttcaacatccggctgtctccccatgaaatcattatctgcttctgcaattctttccacaaacaacggggcaaactcatcatcaatagaaaagtagtatttgtttgaacaaacactttc

SEQ ID NO: 314102 - DNA, 1502 bp, Cannabis indica
gactattaggattgtaacaatggataatcataacatatctatatcgtggtacatatagagcgttctatataactgagagtgctattcaattccaaatctatagtggcgctaggcaaaattaataagttgagaatttacttggtgaattctagatttatttattgaaagctcggttatataggcctatggtcccctctatgaccattttgccccttgcccacacttaaaacataaaaatcacttaagggtaaattggtcacttataaaattccgaccattcccgacatcccaatgtctaactatatagtcctgctatactataaaatactaggatgtgattctaatagcaaaacaccacgttccaatgttgccgggcacaaaacatgcaaaactataaaatttctatatatgacatataaaatgcattctgaattcaaataaatcattgcaaactaataattcaaaattaataaataatttccataattaaaccctaattatctgctaatttctaaattaaagctaagcggtctttacaatcctggaccactcataacttctggtccttctttgagttttattaataagaatctcaaagtcatttttgcccttcctaacagggagagcctccaggtaacttttaggatataataccttccgtgacgctgaggcgcggagggtatatactaaccatgcataatctgatgtggcgcccttccgtgattggcacgtacacttcattcaagaatacgaataaaatttaccccaagctctcgggattcacatgagtgttgggagcttgtagctttctcccagatgcttgtcttattttttcagatttattgaccaagtgttggaatgtagaagaagtctttcgcattgccttggccatccaaagggttagcattaactgtggtattgttgtcaatttgttgaagtgtggtgcttgcttagtggagtcgtgatgcccttgctctgagtttaaacgtgtttcttgtgggaagtgagtgacaactagaattgaaaagacgacaggtttctggtgcattagagatgcaaccacgaattgatgagtaataaatactttattctctttctttagatgcattaaaggaaaaccttttgaatccccagctgttggatggggtagacttggacggaatcagtctagatcgtttatttcaaaaatgtttgaatcattgccacccatataaatgaaaaccttggcgattgaaatcacttttccttcctcaccttaagcagcactcccttgcccaaagaactctctcagacgaatcccttgaccagaaaccttcgccctatttacctctctaaaccaaaagttagccctctcttctcaacttctctatcgtgcttcccgtcattcatcacttacccaaacaactagcttactattggagcaaaacgcagcctggtcaccaagcagcctgtagagtttcagacgaaaatgaacaacctgttggatatatattttaccagga

SEQ ID NO: 314103 - DNA, 2306 bp, Cannabis indica
attagatatttttgaccgtagataatgatctaatagtgaaattgactctgaaggtcagtcttcaatttctaaagcttgggttgtgtccgtaggaccacttcgggtaagttgtagcttaaattcttaactctcttgagggtaaaatttggagttgataacttcaaaatttcaattggattgtgctacataacttgatagggaattgaaatagcttcaaaactcaagttgaattgcataaattagatcaatattgagtgagttatggtcatttactgaaggttcttctactcttagctcccaggttggcattcagcgccgaagttgacaacccacacccaggttgacatgtgacatcaacttagacgttgggccaagggaaaatagtgtctagggtgtattttttgaagtctaagtgatatattgaaatcactcatgcagttttttgtgttctggtgaagctagtactagttctcgaagatattgttgttctgcagaaacgggagactcaaaagtaccaaatttccatctaagtccctttgcaagaaaagtgaaaatatgaagttatgaattcgactcttctgacttcatagctcccagatactatgaaaaactagatgaatggttgagacaaaattagaatcgaataagtagaagccagtgcaccaggcatatgttcctaggcgttgggtgctcttttcggagcttccaagttgtcgttttaatacttctaaggttcttgaaatcgtggtcaaggtctcctaccatgtttaagtatttcagagagaatgcttagagtagaatttacagttgagtgatcgaaaccagcgcatcaggttgaatttcaacatggcactgggctcagttttgatgcccctaaattttttttttctccttgagtttacttgtatcttcgttatatatgatgacagaaaaaatttccaaaacaccagttttagaaaactgactgaaaattgctcaagttgacaatcaacttgggtgttgggtaatgggtccaatttcagacctttaaaaagttttgtttgctccctgaaaatatttgaatcataatctttgacgaaatgtcaacctgggcattgggccaccactaggtgttaacctgggcgctggtctcttattttggcctctatgttggtctatttcatcctcagaagcacatgtttctcggtattttatgaagacaaagaaaattcccgagacagaattttaatttgatgcttggaagtggcccacgttgataataagtcaacctgggcgttgggtgcctggggcacctggttctccgagtgatcaaaaacgaaaaattttccaaattagattttagtgcctcaaatatgtttgtgacatgtctagttaatgtctaagtataaaatttgacctatttgcaataagacagtcctaaaaacttaaaccctagttgggttgtcaacttggccgttgtgtgagaccctaagcatccgggttgatttcccttatgttgtttcatgtatttcagctctcgggcgttggacatggatgcttcatgtcagaataataaaagatagtgagttggaaacaacttgaaaaaatccaaacacccattctaaagttgtcgtagtcaacttgggcgtacggctagggacccctcctaggtcgacttactatgacttgggactactcaactccaagatgtttcctttctttccacgtgtcaaacattgatttccacgtcatcaagactacttttggaacaaacaaaacccatttggtcacaatatccagttttattgtcataaaagaaatcacgccaagaaaatggcctcctgcccttggctagatgtttcacctgatattagggtgacgagaatgtcgttgcgctagagaaacttagaccactagagggagagagatgggttgacaatagagagagagtctctaagtttgtgcgtgcgatttgagataggagaggaaaagagacatgagagaggagggtagcaatttagggtttctgtaacaccctaactagagtaggcgtattacgtgatttttaaacgtactgtgcagctcgttgctaatcaacgaggtttacggaaatcgtgattaattaaaatttggctttttaattaaaacttatataatacatacaaaatattcgggatcccgattacaaaatactttacaaaagtttactaattctttacaaaatatttgtcgcccagcgactaactacaaaagcactgttgtcccgaggatcgtacgctccaggcctaaccgcctcgacatgtacaatcttatcggctcgtcctcac

SEQ ID NO: 314104 - DNA, 2339 bp, Cannabis indica
tgcttgattagtgagctgttatgttacttttttttttaagataaatataattcattaagataaatactcttataggagaatttaaaaattgtgtacaagttcaaacacaatcccttaaaattagtaatagatattaccagtgtgtaagcaatatcattcgcggatcgcagaatgatgttgcaaaaccaccaccaacaacagctaataaagaataaatatttaataaaatagactgaaaactaaaattaatgtgaagcttattaatccaaccaattgccacagtagaatcactattaattatggatatactaaaaccaaattaatgcgcaagagtcaagcccagacaaatggcaagcagctccgccacattagtagaaaaatcacctaacatatctgatgactacgccaaccaaaccacatccgctgcatctcgcatcactccccctatctaacaaagcccttctccagaaccaccaaagcatccgtcgctagagcaaataattcaggaggaggtgacatccatcgagtaggtcagtttgcaactgagtttgcaaggctcactcccaaatgaaggcctcgccgaccatactccttaaactccggcagatggttatgggctaaatctggaacaacatccaatcttaactgcttgttgccaaataatattgagtttctattataccacagccaccaaggattgtcatcattaattcaaaagcctcacgggatagcctattaaagagaaataggagaatttcctacattagtccatatacacatcgacggagcaccgaccacaccctcaactgatgccacactagaatcaaaccataacagaaaaatagggcatgctcaggagtttcagattcttctccgcatcgtgaacaacaaagagacacctgaactttttgggagatcagttgtgttgctactggtaaagccatatagaacatacgccaaacaaaaactttcacctttggtggcatattaagattccatactccattccaccaacgagttaacctatatgaatctatgactctctcctcaacctggagcgaccacgccaatgagtagccactcttgacattataaactttgtctcgatcatttttttccatttaaggaaaacatatagaacttcatctttgtgtcgcatagtgtatacctaaacatatatagagaaatcatcaataaaagtcacaaagcatcttttacctctaagtgaagcattcttggaaggtcccctgacatctgtgtggatataatttagagttcccttagtgcaatgaacaacagtgtcaaacttgaccctcgtttgttttcccactacacaatgctctcaaaaatcaaactttccaatcttggcacctttcagtagaccttgcttcactaagcctatcaaatccttctctctggcatgccctaagcgcatgtgccaaaggcaggaagaatcaggtgtcttttcttcagaactgctagagacaactgctcttcctataactgtactaccatctaggaagtataaattcacctttcgagtacctttcaccgctacaaatgcaccttgtacaactttcaagtttctatcttctaatgttatcatgtaaccatcagaatcaagaacacctaaagaaataagatttttctttagaccaggaatgtacctcacattcgtaagtcttttgattgtaccatcatgcatctttagtcatattgttctaatctcttttgtctgacagacattgtcatttcccattaggacaactccaccatcaagttcttcaaaacttgagaaccaatgtttgtttggacacatatgataggtacattcgaaatcaagaattcatctgtctacatatatacctgatgaaactagaaaggttgaatcttctttgatgtcagccttctgtgcaacctttgcatttgacatgtccttgtttggacagtctttcttccagtgccctttctgatgacaataggcacacttgtctttcgcaagatttcttcttgatgactctcctctagactttgatctagattgcccctattattcaatccacctgatttcttgttattcgatctgcctctggttgcagccaatgcttctggcgttgagtctatgtgatcatgttgatccttctttcggtacttattatttaccaaagcattagaaacatctataaacttaacctcatctttaccatataacagagttgtggttaaatgttcataactttcaggtaatgaatttagcaacaacaaagctttatcttcatcactaattttaacatctaaattttgcaaatctgccaaaattttgttaaaattatctaaat

SEQ ID NO: 314105 - DNA, 1606 bp, Cannabis indica
tcttaataacattatcctcaaacacaaaataacactaaaataaaagataccccacaaaataaaaagtcataacttagctgcatgtgtcttaacccacaataatcacgggtttaagctttccaatgttggtgaaatcgacccttttaaattttgatttggtaatgaaaaaaaggagaacaaagaaagacaatccaatcacacaaatggtgatggcaagagcattggaaagtgacaacactgcataggtaccagtcacaaatgctatcaccatgaatcccaaggcaaatattgctaaattcatagacatgatatagttagatacaaactcctcctttgcatcttcaccaaaagatgctatagtcaagaaaagattgacaaagacagatgtagtggagagaaccatagctattgtgtctgttatgatgaacacttgaaacgctgtgttatttctaagaaccgcgctaccttgttgttgttgttttccatgtccaaccttatcgtcgcttatgtaacctcccggtaatgtaaatcctgctgtgaatgttactgttgcaatcaatgcagccgcaactagagtagactctctaaaattcgcgattctagcccttattttttcttttcgctcaatctttctcttcttggcattgctcaatatttgttctctactattgtattcattgtaatcaagatcataggccatggtatccactttttgtggataccatgttgaagtcgcatgcatatgaggcaatggggtatttccttcattatcctttctatttaaaaggtaattacttataagtggaaaatgatctgaaatgagtttgaatgaggaaagattttgtgtccttgcaacatggtgtagcaaatttcggcctttatcatcaacaacttcatagctatctggacacttggaaagaatttccttcactactttataacctttgaaagtgttagaagctgcaatgtgaagagctgtggtgccatttttatctttaaaataggcactgctttcatctttttctaacaacatcttcacaatctccaaagtgttactggaagtggacatcacagcatgatgcagaggaattaaaccatccttatctgcttgttttgttaaatctaataacttttccaaaatctttcttgttaggcctgaagaattgttatttttacagaaaaagaaatataatattaattagcagtacaatactaaatgagcaagcgaaaattgcggcaaaaattaatatgtagttcactttgtcgcacttaaatacttatgtaaattttttagcgggaaaaattcttatgtattcattttgttacaatattagtccttttgttgcaacaaattgcgggactaatgttacatcaaatgtgttaagatttttgctgtcaaatatgttctatatgaactaaaatatttacacaaagatagtatttaagtatttaagtgtaacaaaatgaactacataagaatttttttcgcaaatatctttaattataattttgtttggtaaataaaatatgaaagaaacttaggtggcgtttggtaacacttttttaatagttttctgtttttaaaagtagaaaagtgaaaatattt

SEQ ID NO: 314106 - DNA, 3423 bp, Cannabis indica
ttttctttcctctccccctatcaaagacaagactaattacaatagtgaaaatcgaatcgcaataacaaaacataaccctgaccaagccgcacctatgcccaggggaggccggtgggcctggccaaagaaaaatcacaacctcttgtagttataaatttagaaacgaaaaaccctgatttttaatttaattgatgataaagaaaagaatttttatttggccaagaacaacaaactataatatatattattattaaattagctctacatgcataattgttacccttcaaagttgaagaatatagaaaatttcataatgtactattgatatggtttttcgtcaacagatctaagaaaattataatcgagtaagatgaacacaagcaatcgttaatcaaagtaaatcaatttgtgaaaaaatttaacaaagatgaacaaggattttatagcggttcatcccctttaggcagtattaggctagtccgcttggagtgttattgatctctatgtttgagaagagttttctagagttatgttctgagtttaatcctcaattaagtttttacaatgagagagtgggagcttaagagaatgattttgtgagaatcaaaatcgaagtccctttacaagtgactttactccccttatataggtttgcatctagggtttaaaatatcttaatctcaggagcacctacccgtaactatgatcgggttaggtttaaaatacaaaaatcacatttcaaaataactatctaaaaaaataataaaagattaaaatatcttctaacttcacgtgttgacatatttcactcacgaggaacacatgcgaaggccatgttattagtaggtcacgagaagattgtgagatactcttcattttaggtcgagatgacaagcacaatgaggctcatcttgggctgaggtgatgagagtgtgaggccccatttaggccaagatgatgatgaggctaagatgaccatttttgtccgaggtaatggaggcataaggacccccatttggtcaaagatgatggaggtgtgagcccccctttaatttaggcagaaatgatgatgaggccaaggtgacataatggcgagcctccacttttggtccgagacgatatatatgttgaggcccctaaaattgagatgattcgtgttgaggctcctagggccaaggtgatgcctattgaggcccccgggactgaggtgatgcatgtagagacccctagggccgatatgatgcattttgggcctctagggccaaggtgatatgtgctaggcccctagggccgagtagatatgtgctagggctgaggtctgcttcgacctctctcagtaaaacatacaaaactttctcattcaaactccaaactagttaattcaagatgcattttagaaaccgagaaaaacttttatgttttgacttttttaaaaatctgaatagaacgttgtatttaggtttaaattttggtccgagctgatgaggaagtatcgtgaggagacacctcctttttggtcctaagtgaggagatgccttctttttttgtcctatgtgaggagattagacatgaagtcaccacctaggtgtctaggtgattagagatggtactagatagtctcttggcaatttaagttgttcaaagcaatatggagagatgctctaatttgaccatgttattgttgggtcactacctcatcacattaactctcacattagtatgatattgtccgctttgggctagactctcgagatcttatttttagacacttttttaaaagatctcatattaataaagtagtgaccattcttatatatccatgattttttttatttctaattaatgtgagactttgattacacacccaatagttattaatgagtgcaaggagttgttaagttttatgagatatatttttattacattttgttaaacattctacaaattaagctagacatgctattgctaaacaatctcaatattatggtacgttctctagggagaatgccccttttgaacttttatttgttattttgagcgattatacacttattaatgaagtttgaaatttattaaagcgtcatcctaattaatgataatatatatatatatatatatataatggatggaccataatatagtactatacattgttcaaatgcccaattaatcaacacatttaaatttccacgtaatatttaaggtccatacacaaatgatttaacaaatctctcttgtggttggtttcatattagtggtagagtatttcacttttgtttgccatttggaaacaaaatcagatttttttatttaaaaaaaaaaacaccctaaaacaatgaattaaaagggtattattacactaaaataataaaattttattgtttagttttattatggttcactataaaaactgttacagtgataattttttaatcaaaatataattttttgtgattaaatgtgacttttagtcacaacaaaatgttacttatgattgaaacatagtatttagatacaaaatatcactaatttaattttagccacaacaaatattgtgactaaaaatatatttagtcacaacaaattgtaatttttgtgactaataccttaagccacggacattttagtcataacataagaatggtaatttataattagtcagaacttttttcacttttagttacaaattttgttgtgattacaagtaagatttttttgtagtggttcttatattagtggcaactttaatatttcttatagattattgactaagcatattcatacgatagacaataaactttctactcttcaatttttgtataacttttgttgcatttatattattttaatctttatcggttaccctaggaatgtgtacatttttttcatgggaatataggaccccacggggactttcttctaatgggaggggggattctctgtctaaatagagaatggagtggggacggagatgatactccccacctcgagagggatccatttagtatttgattttatagctctaattttgatattttataatttataatttgtgtttgtatttagtatgttagcatcatttttatgaattttaagttgtgttttgaataataattagtgtattgaaaaataattaatctgtaatattttaatttttatatagtttaatatttttacatatttaaattttcattataaattttatttttttattagggaattttcttctcccattaggagattctctgcaccattctcgatgaaaaataaacgggaatgagaattaaaacggcgataaaaatagaaaaatactctccgccaattttcatttcgtgtgcatccctagttaccctacaaaaaaataggaaaattctacaatacacccccttaaaatggatatattgatgcacccctatctgtttt

SEQ ID NO: 314107 - DNA, 2975 bp, Cannabis indica
atgcctttgcaaatgaactttacccaaaattcggctaaaggacacgtctcaagataatgggaatgtgaatcgaggcaatatctttttatggaataactcattaattacgtaagtatcagagtatatttacaactcgctgattgtaaggtcttaggcgaggaatcaatgtacaaactgacacttagtgtattagcgagaaaccatatgtcactaaatacgaatagcgaggcaccggagaaagcgtcgcatatcaatcgtgaaagcccttagtgtgtaatgaacaaactaagtgtaagagtcagatcggctcaagaacgagtaagcgaggtgaccatctcgctatgggaagacttcctatagcttcatccagctaacaggagtgaggcttacaacccttgtgagtcagaagaattctttgtaaataaccacaatcgacacaagatatacatcgtcgacctcgaaagaaagaatggccccagctcgctattgggatcgttgtaaccaagtttctgtcgagacatctccagatacagcaattaaagacgtgtttactacacaatagttttgacccagtaaaagtgggaaaatcacaactatatgattttcaaatcctaaaccgcatttacactacgtgatgtgtaatcaaatcccacgattttagggatgattgttgtaaacacatttcggtcaattttgtaattcattgtccactatataattataaatagtgataaagaagatcaaaaaagggacaaaaaaactcatatgaaagaggccctaaaaaatactcagaaatcagaataagattgactcgtgaactacgcaaaattttaactgcaaaaccacgtaaaaaaccccatgttcatatcctttattttgatagctttttatttttctatgtgaaatcaatattatgaggctcaaatttggttaacgaaaatatgcgttaacaaactctatagcgtgaaattgtcccctggtaagagcattaattcacagttaatcatgatgtacctgaagttccagaaagcaaatcttctgggaattgatttatcaaaagagcaatggattcaattcattctcaacagccttccacctgattatcatggatttattatatcatacatgatcaacaattttaactcatccaacgtagacaagctatatgcagaattgcatgcttatgaatggactttgctacctgcaaggaggcctccctccagttttgtagacttgcgcaaaagaaaagttgaaatgattgagaataatgcttctaacaatgctgcttcttcaagttcaattttgaaagccagaatcaaaattgaaccaggaaatgaaacaattagagaaaaaatgagtaaaagtattcttctatgttcatactatggagagaagggacattcggaagaaagatgtcgcagacttctaaaccattggaacaaagcttagctataattttttcccaccaaatgtcttgtcttagttctaatgaactgagccacatggggatcatattcatcagacaatcttctgcttctgttcatctgaggcatagtgacttcaaaaatcaattgcctacaacaagaaaagtcttttggttttgaaaagagaaacccaaggtaattttaaaagaggaaattctcatctcacaagggtagtgtcttcgaattttgaaagtctcaaataaggaattcaaggacattttgggagttcaataacccttgaaacaaactcaacaaaggaagagaagaagaaaatttttgaaaaaagaaatctaccttgatggatgaaaagcatctaaagaactgatgaagatgaaaatcgaaggctctttgaaaaggcttgagcgtgggaagctagaagggaagtgaggaaaatttgattgaaagctctcttatttatttgtgaggtcaatctcctaatcataaagcaattgggagtcttttacatttaaagcttaaaaggaaaagataaatgataagaaaaagatgaaagtcatttctctcctccttctagcttagaatttcaaaattcctatgagaataggaatatgaattctaatttaaaaggtaacaacaatttgtagtaatattaagaatattgtaaatctaatgtttaaaaagaaaaagataaataataatcaaaagatcaaagatcatttctctttatcttttctactctaaatttcgaatgtcatttcaacaaggattaaaattgtaattcaattaatcctaatgccatgagaaatacatgaaaattttaagtttacaaagacaaatataaaagataattgaaaaaataatgagatttttatctttttctttgctttaaaattttcaaaaataccctaacaaaagagcaatggaattcaaagttctaattctataataatgcttgaagaatagaaacaattatctaagattgttcaaatttgtaagaaccattattttctgtagtgacaaattatgtctagttgcattcaagttgcgtctgggactcgtagtgttttgtctggagttcgtactattagtgttagtccacgtcagcaaagatattttaggttttaattgttcagatggtaacagctgtctatttcgggtttcttagtttagctgggtataaatacgatttctgagtattttgttgatgaactttttgatcggagattagggattacgtttctttcttcttgtttcttctttatgttccgtggcaggtgatctttgagcttagaggtattactccatagttgcagaacaaagcttgaagatgttgagttcagactgaagggatttcagtatcatcttcatcaccagatcggaagggagttcagattgaagaagtgttgaagagagctcatcattcacacaaggggatcttgtgtctccaatcaagggtcttggtcggtatgggtatagatgttaggttttatgccctaaaaaaaactccatttcaatgtaatctattttattcaa

SEQ ID NO: 314108 - DNA, 919 bp, Cannabis indica
tctcttcatcttctttttctttcttttcattatattattttataacaaaaataacattaaaacaataatttctagtaaatagtatattttatatataaaaatatgtgaatgtgtattgattaatttgcttatgctagagttagtaattatttgtaaggatgtgtctagtctgtttattcttattcattttatttgaaaacattgttccacatgaattaaatataaaagtttgagcaaaatatattcatcaccaattaattttgaaatagaactctacaattttcaacacattttatatatgtcatgaaaaattaatttttgcatggttacaaaaaatatagtgttggattacaaacaaactttagacatatttaagcattaatattgaattatttgacttatgttagataatttaataattggtaaacaatttgcgtacaagggatattttaaaaaatataaattatttagttgaaataaattttattttttatttaatgataattaagtcttaaaattgtataaaatttttaacattactaattttttataaaacccatagaaggggtcacatcatcactctatgtttcatcctttatataggtatatagatatggattactaaaattaacaccatttgatattgatggtaatttttttattagttatatgttttgtggttttttagttttatataaaatgttgagttttagtataaaaatctagttaaatgataaaaattgagcaaaataattataacaaaagtactcacataaattgtgttttgctttatagatgtatagacatttgtaaattattgttcgtatttatatttttaattattttaaacattatcaagaattttagatatttattaaataaaaaaaagttttatttgcaccccataaaataataagta

SEQ ID NO: 314109 - DNA, 2023 bp, Cannabis indica
aaaaataaaaaagtattaaaataattatcacagactcgtagagtttagccatgtgagcccgccaagccaaagactctctttctctctctctcttacacacacacacacactctctttctatctctcaatgtacattgtctcacttccacgcagtataaatatggacataaaacacaagctttttccaccaccactgctgtttctctcttcttagacaagtgttttggtttttttggggtccaaagtccaaaatggggctgcgggtccaacaagccctgtttcttctgtttcttctcaaggttatggtattgtttgtggaagaagcaaaagcagagcatgttttctacaacgtgagtagatataatggaagaaagcaattgaatggttgtaatttgtttcaaggaaaatgggtttttgacccttcttatcctctctacgattcctcttgtccctttatagatcctgagtttgattgccaaaagtatggtagaccagataaacagtatcttaagtacgcctggaaacctgactcttgtgacttgcccaggtattttattttatatatccttatataaacacacacacacacacacactaagcatattttgttgcaaaaacaggggaacatgtttttgaattgaatgtatctttagataatgacagcatttgatttgttcatgttccttaaaattttgtcacctttatcaaaacacatatctttttaagctcatcaaattaaacatacaaaccaggtgtagttagactagatgagatcagctctgtattatatgttttgtatataatgtatttggtgttgaaatattggtaggtttgatggggtaaattttctaacgaagtggagaggtaagaagataatgtttgtgggtgactcactgagtttgaacatgtgggaatcgttggtgtgtattattcactcgtcggtgccgaatgtaaagacaaatttcgtgagaaggactcctctatcgtatgtgaccttccaggtactcttagctctacccaccactacacttttttttttcttctcttctgttcattgcatgactatgtctgtagggtttgtctctttaatttttattattataaaatttgtttttctttttggaagcttttaccttcttcaaagaaaaagaaaaatgtgaaagaagagccacatgttctttccgagcccacattcccgagaccccttcaaaaggaatacaatgataattaaaatactagtaatagtattataaacaatatatacatatatagatgtcgggcaattctgaatagttaccaaaatcaatttatatgtccttttcatagtagcctaaaaatatatgaaaattgaattatcaccaatttgattggttaaatattacgtattgtgtgatataaattaaatgaacgaaaaaactatctctgtttcctttttatctttttttcttctttttaaagtttcgagttcataatacttatgtttctgccctaaagaaattgatggaagctagttgaaaggttctttttactaggtcagaagaataatattgtaactgtcaaaagtaataaacaatgtgacaatgatgtaggaggaaaattaaaagttcaattaattagataagcatatatatattatctttcctttttcattcgaattctcgaccatcgtctaaattttatactgaatttagttctgactccatattttataattatactccaataggataaaataaattttattttaataaaaaactgtaaaacatcaatacaaatatatagaaaaaaatatgaaaagtatataaaaattaaattaaatatataaataaaaatataaaaacttattaattatattaatgaatggcaaaaaaaaaataaaaaaaataatatttatgtagtgtaaaattttactcatattatattttgtattaaatttgacaatttgacacaatttttaatatgtgtcaaatttaaaccacattatatactatttttaatgaaaaatataaaaattatactatat

SEQ ID NO: 314110 - DNA, 1686 bp, Cannabis indica
tggtaaaataattttcaacacatgtaccttgaaccgattcttattgtctgtaatcaattcagttactgtctctggatttgtcatttttagcatatgaaagtatattggtagttgctggtatgagtcttcatggcttccccttgccaaatttagagcattttctctttttctccaagccttttgatatcccatcgaaacaccaaactcgtgtagcaagtacttcattatgtcattcgatgcatgtttcctattgattgagttgtattttatctttactatttgagcaacaatattgtaacttgctttcctatgatcttccattatgacatccagtgagcaggtgtagttgttgacatattttctaaccttgaaaatttgtgtttgtttcaattttgaagcatgcagaaaccagttacatttttcatccacacaagtaaccatgtactccttgggttcagatctcttagttctgatttggaagttctttatcattgcataaaaattgattgttgtttttagtatgttcttctcactatatatttgtccttctttaatctcaaggaccatgtaatttgtgatgatctccttttcttcatcctttcttttttagttgcttcatttgttttctctctaataaaatctgcaacttctccagctagttaaaatatgtttggaaagcttgctatctggttatactcagttgaatccttccttcattattagatttctagttgtatggttcactgtgtatttatagaaccagttcttccactgccttgctttgcacttgcattggttattccaaagaaggatttttcactatttgtatagctgtctcttttatagttgtgatgcatagtggagactcaattactccagcctgtatctttctgagcttaatgtagaacatgagggaattgtcattcagtagcttcattggtgttgttcccagtgatatctgatatgatatgtctatgtttttcatgttgtattttatctcgatttttatcagctcaaccaaatttactagtgaagaattagttggaattagtattcctatcattgtgtagtcatcaaaacttgttctgtctgtctattggcctccatatttgatcacacacatgatatgttccattcctgcatttcaaaatgaaaagtaatattacaatatcagtatcagttgataattggaaccgtttctttaaaattctgtattgttgtttaatttcagtgtttgaacgagttttgtagtgtaatctgttttctatacatattggttttttttcttttagaactggttatacttagtattttgattatatttatatatttgtttattatatttatcacattatatcaaattttatttatatcattaataactggtttgacaattatgtatatatgaaagcatatcagtttgtattcaagtatgtgctttagtttctgtctttatttgcttagttcatctaatcagtttcattttgtttttattttacagagaatttataaatgttcatttgtatttattgaaattgaaatttttaattttgattgaactttcggatgatatacatatatttttatatatcctaggttcataatataatattttatgaaaataaattttctatttatgtaaataaatttttatttaaagaaatgattttctatttaaggaaataa

SEQ ID NO: 314111 - DNA, 512 bp, Cannabis indica
gatgatgtgtacttacacttgaatagtggaattcaaaatgttaagttgatgactccttgagtgatttcctttgatttgagatactgtgaaatcatgctgacattggaatatcaacatttactctgatctttgactattgtcttagcattgactatcttgtcacactctctatatatgcaaatattaatgtaatctttgtcttctcttaggttgtagtctttaagttctttaacattccctcaattgtgtttcagctaaggtgttcttgttcatcttctcagtttgatagcagaggaggccttcatcaactccttagctttatagtgtaagaggccttaaacatccccttgtctttgcaatggaggagtccttcagcatcccctcagctttgcaccggaggaggtcttcatcatctcttcaactttacagcagaggaggtcttcatcatctccttggctttacaacagaggaggtctccatcatctcctcatctttacagtggaggaggtctt

SEQ ID NO: 314112 - DNA, 1204 bp, Cannabis indica
taagtccttataaatagtgacctcgcctcactatgagggggatcgagagaattgctgcagaaatatactctagagagaaaagagtgatttaagagagaaagttactcaaagatcaattgtaagagctttcaagaggaagaacacttcattccttctctcaagtcataatacaaggggagtaggctattgccacacttacggggccaaacctctttgaaattaggtgttcactttattttacagttttttcttttatttttatttatcttacctagttgctttattttgactaactttcattggctagaagcgaggttaatattttggtgctttcattgagagaaaaaacagaagcctttgtcttacattttgataggtaaacaggatggttgtctaagctcgtaagggaggccttgccgataagggcaacccaattatgatagagcccaacctgaaaactcctggaaacacgagaggaccaccagggacaaaccccaagtaggttaatacacaacctcctactataggccacggagtgacttcccctctagtcgggatcacaccaggcctacaagagattggaaaaaccagtttggcagccgattattccactcccagcattgatgttccatccactactaatactcaaaggccagttggagatgacactgaactccaaaatctgcgagaggcacttaggctcatgcaaggtcataagaacactttacatcctcatcaggaagacatccgaatagccataaacctgacattcgatgtacaaagtcatcaattcatagaatgaaggaggagggagatgaaaattatgaggacacattaggcagccattgatgatcgtactaggcaggtcaccgcacggataagaagggcctaccaagtcaccaatcaacaaccggctactgcatccagtattcccctaaatggattagtagggtatgtatttgggtaaaccacacaaattcataatgatcatgtaaagaccgcttagcattaatttggaattagcagataattagggcttaattatgaaaattattattagcattgaattaattatttatgatgatttacttgaattcagaattcattttttatgtcatacatagaaatttcataatttttgcatgttttgtgcccagcaacgttggtacacggtgtttggctattagaatcacatcctagtatt

SEQ ID NO: 314113 - DNA, 1043 bp, Cannabis indica
aatgggcacaatcagtcaaacttattatttgtgaacgtgagaaattcggatacatcactggtgatctccttacaccatctccaacagacaccacacacaaggtatggcaagctaaaaattatattgctcgtgtggttaattaattcgatggaaccaaaaataagtcccatatatttattttttaagactgtctaggaagtatgggatgctgccaagaaaatgtactctaatcttggtaacgtttctcagatttttgaaattcgcacaagcttaaagagattaagcaaggtaatcaaattgttactcaatatttttcgaactttcaagatctgtggtaggagctggatttgtatctagatactacacctctctctgcaaactataacaccattcaacgacaacaattggaaaaagagcaggtctttgagtttcttattgggttaaacaacaatcttgatgaagtaagaggtcgtttggttggtcattctccatttctcgatactgaagaagcattcttttaggttagacatgaaaaagaacgtcgttgtgttatgctcacaactcctgatgtgtcacccattgaaagtttttctcttgtctcaaagtctagaccactaccatctgacaaatccaatcctgacccgcggcctaatcgtgagggtgatcattgctagcgtcatggtcatactcgatccacttgttgggaaattcatggaaaaccactaaactggactcctcgccgccaacgttacacaaaaaggtctaccacactcagactaaaagtagcacaaatcaaagcagtactaatgccccttcattcagtaaggaacaacttatttatacacactcctcaatcaattttctatgacatccaaatatggttcgagtctcatagtgcctcagatatacactttggtaatttctcttatgtttgccaaacaccatgggtcatagattctggcgcaactgatcacataacagatttacctcatttgtttgattcttattgtccatgttctactacatctagtgtcaagattgca

SEQ ID NO: 314114 - DNA, 1384 bp, Cannabis indica
gggtagacaccacgagcttctgccttttccttgcagaagagctactgcctaccgtctcagaaggggcggtgagatctggagtagacataatgtacatgtcaaaagtcgacacaatagaaaaaagaaaagggtcattctttgaccctaaaactcccaagagtgacaccactgaaactggtatcccagaagcgggtgcaccattcatgattccctaaaaaactctcaaataaacgaagaacttaccggttgaagagaggaggttggaattgaagatttcggtgtagtgtccacgacgggaggatcggtgttcgacgatagtaacaataaaatgcgactaggaaggagagaactcaaaggttttgacttgatgggcaagaagagtgaaaatggaatggccgctgaaggtatttatgggatgcatgggaggggcacctttcataagaagccaacgcttcaattcgccctaagagatgtccgatgattggatgtgaaaagttgaaagggtacctcacctcccaacggatagctcccataattgcatgcatcgtaaagaacactcaccaaatgagaaaaatgcctaagtccaatcgctgttgttttaagctacccagggacacgcgcccgacacgtgcgcgaaaatccaaaagtcagcatttaacactctgacaagaaaacgggagaaatcatgcctcccacataatgacactttggtttgacggctgataatgtaatatattaaaggactcatcataaatgcaacgtgtgcaaaaactttttaagaaaagacgctgcaagctcccagaacatggtatgtcctgaaagcctggagggtcaatgttatccgcatttcttccagggcgacacatggatactaataaaagagggcaaaggaatcattaagctgcctaagtgcctcactttccgtcccggaaagataacagcgtgaacctcgctgaacaggtccccgcgagaagagcattcccggagtaggccatgaaagagatgtcctgtaacgccctaatacttaagcacgatacagtgatttttcaattatagtgtcatctttgctaatcaaataaaatttcttaaaaatcgtgtcaaattaaaactttagatttaaattactaaaatttataaacttttatacattatttacaaaagtcgggatcccgtatttaaacatttacaaaaaattcaaaatttatttagttaggttgcacagcgactacaaaataaaacccccgatgtcccgagatcgaacactccaggttgcaccgccttgacatgtacaacatcaccctagctcgaagctcactcttgttcaaccttcgcctttcctttacctacacatgaaagtagaactatgagtcgacaaactcaataa

SEQ ID NO: 314115 - DNA, 1725 bp, Cannabis indica
aatatcaactcactaacaacacaaagaaataagataattatcctcgcacaattaatatcccaaggaaaaaaaagttaaatactattttaatctggatattataggactcttgtcccacgcactgccgacatgcgtgttgtggataaccgatggatccttcgagtcaaacgcaactatgatggaagtgttaatcgctataaagcacgccttgttgctaaaggcttccaacaataacctggggttgacttctttgagacctttagtcctgttgtcaagagctccaccattcgtgtcatccttactcttcctgccaccaatcattgggatattcaacaagtggacattggcaatgcgtttttaaatggacttctcaccgaaacagtctatatgacccaacctacgggctatgtcagcaccactcatcctcaacacgtttgcaaactccacaaggccttgtatggccttcgccaagcgcctcgtgcatggtttactcagctgaaacaagttttatcatctctcagattcatcaactctgtatccgactcctctctattctttataaacaaggtggggccgaaatgtatatccttgtttatgtcaatgatattcttctaacaggaagcaatgactccattgttcgcagcatcatcaacaaactacaacaagttttctctctgaagaaacttggatctatgaattatttccttggctttgaaatcactcgaagcacacatggcattcaaatatctcaaggaaactacactcttgatttgctaaaaaaaaccaacatgatgcattgtaagtcaagccccactcctattagtcaaggagacaaattaactcagctcaaatgacagcaaaccatttgatcagccaacattctttcaaagtgtcatgggaggactacaatacttgactctaagtaggccagacattgccttcacagtaaataaactcagtcaattcatgcataatcctactcaacgtcattagaacacttgcaagcgcttactgcgctatctagaaggaacagtgggacaaggaatcatattcaaaccatcaaaaaatagaggtgtcgaatgcttcagcgatgcggattgggcaggatccatcgatgatcggaagtcgacaacagggtactgtgtctacttgggaggcaatctcatcacttggtgctcaaaaaaacaaaagccagtggcaaaatcgtcgattgaggcagaatattgtgcgctctctcagacagcaactgaagtggcctggctcttctctctatttactgaacttggtattaaacatcacactcatgctgttatctggtgtgacaatgcaggtgcgaataacaactctcatccaatccagtttttcacagccgcacgaaacacattgaagtcgatgttcattacatttgagatctaatcaaaagaggattgatcgaagtgagacacatccccaccaaagaacaaacaactgatatattcaccaaggctgctccatcagccaattcatttatctcaaagacaagcttgtcgtggtgtctcaaccagccgagcttgagggagcgtgttgaaaatattgaattgtcacatgtttatcactttgtaattatgagctggcagtaggtgatattaggtcattctagaattaccaattgcattggattctcttttctgtagccaattagaataggaaagaatataccttattattcctgatattctttagggt

SEQ ID NO: 314116 - DNA, 906 bp, Cannabis indica
  modified_base (875)..(875): a, c, t, g, unknown or other
agagagagagttctgagactctcgaaggttcgaagagaggaaatgagctagggttagctctgattcctcgagttttattcaaagaagaacgacagatcgttttgagatcaaacgatctgtcgtgttggtgagaacgacaagttcctttgtcgtgcaagtgaaaacgaccaatttttggttgtcgtgtgaattgattatattaattgattttaaaggacaattttgtccttgtcgttttaactgtgaacattgagttggtgtaggttaaacttggaatttcaccaagtaaattcctacacttttcatgagctcaatgatatttagagctggttttactggatgctcttagtatacgagtaaatattttagcttgtttactatttatttcagttttttattttgtatgtaattcttattgtatagtgcttgataagtgtcagataaaattcctcgctgaacattgtaataatttggtaattttcaaatggctggttgattttgtgctttcataattttattcttacagatatgcatgcttttatgatttatgtcaaactacaatagtaattgggtgaagtggagaatagcaaataaaatggctaatggcatattgtatgtgggtgtacttgagttgggataggatagtataggtgggcaaatgagttagtggggtttttcatgtattgaggtttctttatgttttactttaccttttgagaaataaaattaaaggccatgggtgccatgtcttgagttcgttatggatgtgttcttatttcttgtgtattgttctattgcaatttgtctcttggtttggttttctaattaaggagaggatcatgtcacattaatttcatgatttttatttttgtatntatgataatgatattacgataatgatgattt

SEQ ID NO: 314117 - DNA, 2180 bp, Cannabis indica
ggacctagatccctacctggaactagacccggaccccaactctcctggacctgggacgcgaatccccggccctgccccaaaccccaactcggacctgaattcctgaccctggacccagaccccgacacagacccaaaactagatttgggtctggggtccaagtttgtgtcggggtctggggtccaagttcgtgttggggtccggggcagggtccgggtctgaggtttgcgtcttgggtctagggactgggtccggggtccaggccaattacgtttcttaggtccgggtccaaatccgggttcggggtccaggacgaggtcaagggtctgggtcggggtccaaggcttggggtctgagttctaggttgaggtttggggtctaggtcggggttcggggtttggggtctgggtcgaggtcaaaggttcggggtctaggtttgagtctagttctaggttcgggtctcgagtccggttcctggtttgtgttgggtctgggtttgggatctaggtccatgtcgggatctgggcatgggtccgagtccagggtccacgtcccaagtccggggtctgggtctagtgtccaaaatctagatctggggtccggggttcgggtctgattccaagttcgggtctgggtctgaggtctaggattcgagtcagggtccggggtctagatccgggtctgggtccgagtttgggctaggtgcgggtttgggtctgaggttcgatccagagtaggagtggttcatgttatggtacggtgtataatatttatatatatataaaaaaaatctaacaatagttttaaaaattatgagtcaaataccaaaaattaaaaaatatttctattccaattttaaaaactgaaaaataaaattatcaccaaacaactccataggatcaaagaaagaaagaaaaaaaataactaccccacttcatcaaatcatattcatgtattaataggggcaaaaaagttctatgaacaagtcatgatttgattctatttttctagcaatattagaatacaagtttatatgatagagtacacgtacttaattaacacatcttttaaagttttgaaaattttggtataatttacaatttaaagagtaggattaaaatatttattttgctagtgtataaaataataataaaatatttgatttttattttgagtgtgctaataattttttttaaaaagaacaacaagtttattaaatagaaagatagatgagaatcacataggaaattccctctccttagacaacatcaacaccactgctcagactctagcaatttttgccaaaccatcaacaaaagacaacttactacgattaacataaaagaaatcataacagtaaaagtgcttagttaagtctaaaatagatagtgataagtttaggaaattccaattaaggatacatctcctgtaatccaaagtttgagtaaccaccttagagtacatgaacctcctgccaaccttcctggaaagcccagttaagagccaactgaacagcttttgcctatgcttccatagttgaagtggcagtggtacgttctagcatgaaaccccacactgccacttcatgctagaacgtaccactacattcctatgtgtggggtttcatgctagaacgtaccactgccacttcagctatggaagcaaacattcctacccacacaccaaaagaaggattaaccactacagctactaaaccagcaactccctcaacccacgacgcatctgtcatcaaaacaaatttagctgaaacagttcttccattagccaccataggcatcttcaaatttagtgtgctaaattattcttcaaaatttgcatatgtcttaaatgattaaaatttgtaatataaatacagagatataggtaaatttaataacactttaattttttgtttcttaaaattaaaacagtaaaaaaaaaaaaataagatgattattctataaaactgttttcacttttaaaattttaattaaaaattaaaattttagaaaaaaaaaaatcacttttaaattttttttaaacttttttaattaatattttaaactatgactctaatatagactttggaattcgaacaacccagactccagcgccagactcggaccctaactccagcgccggatgcagacccaacgtcagtcctaacctcaatcctagat

SEQ ID NO: 314118 - DNA, 842 bp, Cannabis indica
atagtctacctattagtaacctgctattgcaggtcaaagaaaaatgtaaccatatggttacaataaaaatgtaaccattgaatagtcacccataaatatattcccatattattaatattattatttggttttttctttcaaatttttgctaccacaaaaaatcttagtagtgttagtcacttttgttttctccttttataaaagaggattgagaaagaacttctaataataataatagcccaatatgatgatataatatagatatgatgatttttatagccttgtcaagcaagccaataatccatattattattatgtgatcttgttattatttccttgtccatgaacaacactacaaaagccaattttctttgtaagtatgtttgaaaaaaagtaactattccctttgccaaaaaataaatatataatagcaataactacctcaatgtgcaatattccaattctttttaagctcaaccatttcgctttaaaggacctaaccaccaaccaaccactgtgaagacatatttaaatatggttttttatatatatatttttttcgaaaatcaacataatataatattcacatagcaaccagcgaaactatctaattaaatcacaatcgaaaaaaggttaaaaatagtaatttccctataaatattgaaaataattgtgagatatttaaattatacatgtgattatgtgaatttttttgtatatttatattctaattttctagtaacacttattacaggtgcttttaggttgcattgcaattttttttgggaattaccctatatattatttttttaattttttttttcaaatttacagtttggatt

SEQ ID NO: 314119 - DNA, 1641 bp, Cannabis indica
tgtttaaacaacatacttgtgagtagatctaagatcctggtaaaataaattccaacaatggtatgtatcggcatagcttgaataatggccttgattagcacttctttacaagcgactgaaaatagcgacctcttccaccctctaactttatcttaaaccttgtttttaatctcatgaaataactcttctttccgtctccctgcaatagttggtaacccaagatacttcccatgactcgcaaccactctcacatctaacatttcagcaattctgagtctcaacgaatccttcaatgttcttctgtagcataattcagatttgtgaaagttaaccgcttgaccggatgcgattgtatatgtaacgccctgaccaatagggacaccacgtgtgtgtgtgtttgtataaaatttcctttcctttaggttatatgattacaccaaaagtgtggttaattaaatttgataactttaaaataaacatataaaatttctttttataaaagataaataatattaatctcaaagtccccctatttccaaatatttacaatctagtttaaaagtgcttttacaacataaactttatatttccaaaatacaaccaaaaggaacaccctgaacactaggacgtggcattgcagttgatatgtacattgctgttacaacctcaactcatgactgctcaaccttagcctttcctttacttgcaccatatagcacccgtgagtcacagagacccagcaacaaaagtgaataaacaataatcaatttaacatttatttattcattctcatattatcaagcttaaacaattacataatatcgtaatcacacaatcttggtacttcctaaagtacccttaccactcattaaccacgagctgaatatgtcactattgttgcctggtaaaacaagcgataagtaagaaacctatcaacggtttcaagagtaattactcttaacagtaatgaccgtttccaacccttggtcataaccgatgctcaataaacatttaaccagatgctcaatactaattaaagctataatcattcaactgttaacatttaaccacatacagtgcttactacttttcttacctcaattcagaactcaagcatgcgggccgacctgagtggaaaacaagctgggtgatcccggtccttgagagttggacaacaactagggtagattttctagcaaaatttgagctaaatttatgaagaaaaggtttgatcccccttggttccttctatagtcgaaagagaagagagagagagagctaaatgactttctctttcttttttttttaattaatctatacctatataattaatatacttagaaaaatactcacccaacattagtgaaaacaatgacacctagccatgcataatgactattttacccctttctctaatactaagctaaacatacactgagggaaaattgataatttctaactaacccaccaaaccgaccacttaaaattctaaactagtccagaataattccaattcaacccatactttattatcgtgacatttctgaccactcgtccagtttccaccgtcgtcgggcccaatgtctaagtaaatagcatattatttttcgggatattacaacaatccccttcttatagaaa

SEQ ID NO: 314120 - DNA, 1247 bp, Cannabis indica
ttttaatattgaattatttttattgttttgctatatcaatttttttcaagtggaatggagaaagaacaataaaaaataaataaatatttatggtgcaattttatgtattaagtacaattatataaattgttatgtgtatggatatgatgatttgtttgtttgtttaactatctaaacatttttttaaataatatgatggaaaaatatttttgctttttttatgtatatggtttatagtgattcttttaatatatatttacgataagaatttatattttgatcttacttttaaaaatgagaaaaaagatttttgatcctatttgggtaaatatattagaaaaaaaaattagaaggtagataaagagactatgagagattttagcttaattactacacaatttcgtatcagttgcttgctccaatccaaattcgaaagagttttcctcaagtgttcttgctccaatcaattagtatttcttggagaaatagttattgtaaagttattttactaagatttgaatttaccaatatgtatgtggattatatgacaataatctaaatcctaaataaaaaaattctaaaacaataaataaatacataagggattaaaaaatccttactgtgttgcagcagaataacatgacttattccgttcagatctctaattcttgattcttcctgttacaaagtataatcaagatctgaacttggattctctttctaaagaaaattgaactatagtagtcttcctctcactatgatgagtattgctttgatatgtgtgggcaatctctaaacaccaatcagcgtaaattttaagagagaaaacacgttctgaattttaaaaattaaaaaaaaaaatagagctttttagggttaattagctacgaaaataataatatgataaagctctcttatctttctatttatagatttcacttagggttaggattagatgagttgggcttaaaataaagaattgagctgaattaacacttagggccaaattgcttcactacaagaaaacctagttttaccggcgcaattcgtccattgcgccggcaaaagttgtcagaataaatgaaatgctgaagttccaattcgattcagcaataacttttacctgcgcaattttgcaccggcaaaaggtactcaatatcggcgtattattacatatgcgccgatgaaagatcaacaatgaaccgccaaatgcgcgaatacatttccacttctgtaaggcttttgcc

SEQ ID NO: 314121 - DNA, 2067 bp, Cannabis indica
ttcaactttaatttaactttcaaacaataatttcaaaaaatatatttataaataattataaaattttgaaataattataaataattttcagtgttctactggatacagtgaatgtagctgagggtaatcaagcatgtacagaaaaacaaaaagaacaagagaataaagaggaacaattgaactcaacaagaggagggggagatcctcctctatcaaatggataagatcctcagttggaacgtccgaggaattaatagccagcaaaaacaaagtttagttaagtatgttattgctcactagaaagttagtttagttggtcttcttgagacaagagttaaggctccaaagcttggagccttataagtagatacgttctcaagttagtgctttactactaataatgcatggaataaaagaggttgaatcattgtagcttggaatcctttgaggttcaatgtaagtatccttagttgttctagccaacttatccatatctttatttcaactgttgacaataagaacaatttttacgtctcttttgtatatggttttaatgatgtggatggaaggaattttctttggaaagaattgcaagggttcaatacattagagccttggattgttttgggagatttcgacgaaatctttaaaagagatgaaataattggggacagagaaaagtttgtgccttcaaaattttagagctatattttttatttcatctcaaagatgtgaagtatagtggtaatttttacacgtggagtaacaaacaacagggctctgattgaatcttttcgaagattgatagaattttggcaaaccaagcttggctagataagtatccaaatgcaaaggctgtcttttttaatgaaggtctttttgatcacacctttcgtattaagtgtataccctaaattctctagaggaaagaagcctttcaagtacttttgaatgtggagttacatcctcagtataatcagagaattaaagaggcttggcagtagaaggtaagaggtactaagatatatcaggtggtagcaaaactcaaggccctgaaaaatatgtttaaagcaataaacaatgaaggattcttggacattcaagctgcaaatttacaagccaggaaaaagttggatgaaagtcaaagaaaagtgcatagtgaccccttaaatttggaatttcaggccatggaattagaagcaagggatgagtatgatgcaacacaaaaaccttttgctcttttatgcatcagaaggcaaagcttaactgttgagaaggggatacaaatacataactttttcattcatctattaggtagaggagaactcaaaataatattctctccattgccaatagtgaaggtattagaatagatgacccaaatggagtgactcaggcattcctagatttttacaaaaaattattgggaactcgattagaaaaaagaaagcaggttttaatggagataatttgaaaaggtcctttgatctcaaaccaacatgttgaactgctggaagttgattttttttaatagaagaggtcagcttcctgtgttcaacatccctggtatgaaagcaccaggtccgaatggatatagtagctacttctttcaagacaactgagatcttattgggaacgatatttatgaagctgttacatctttcttgcattctagacaattgttgaaggagatcaactcaacaatactcactctcattcccaagcttaaatgccctaacactgtgagtgattatcgccctatagcttgttataatgtgttatacaaaattgcaacaaaacttatctgctctaaacttaaagtaattctccctgatctcgtgtctcaaaatcaacgaggtttcattaaaggtagatatatagctcataatataatgatatgccaagacttgattaggcattatgggaggaaattaacaaaggataattgcatgataaagcttgacttgcaaaaagcttatgataccttggaatggagttttttggaggagttcttgcatgcttttaattttccaatcattaggcttattattgttaggttttatgccc

SEQ ID NO: 314122 - DNA, 855 bp, Cannabis indica
ttttataataatatataaaaaaattattagcatcattaaaatttgaatatttacttataaatactcaaatttttatcacaccctataaataaattaatatataatcatagtttttcatgttttaatagttttcattataatattataatattcagtattatatatatgttttattattattctaacttatttataactgataaatgcatattttattattattattattgttaataaattataagattttaatatgttgtgtcatatttttcggacatgtcgtgtgtcgtgcctttcaggccagtctattcgtgcttcttatgttttgtcgtgcttaaggacatattttttttttgttatgtcttgcccaaacccgtatttttcatgtcgtgtcatgcttgtatcttctgagctcgtgctagttttgtgccgtgtcaaaaagttcaatctgtgtttacagcagtacccataaacacgtactatttttttattttttttacaactaataaatattattttggatcttatgttttataaaaattactgattggaaactttgttttgttaaattacaatttagaccttgtatttgttaaaatagtataaaataatactctgagatgattttttgtaaaaataaaatttaataataagttgatcttagagattttattacaatggaacaaaattatgacatttaaattctattgcaatataatacaaggactaaaagaattgattaaaaaatgttacaacaacactacactacactatatgagcattgctattggacacccagtggtgcctaacaccccttaagacgtgtcccccttgcgattggctagcgatactccc

SEQ ID NO: 314123 - DNA, 1016 bp, Cannabis indica
tttttttcaaatttacggttttatttgctctggtagtttttatattggttgctatgtagatttcggttacgatttaagttgctccattagttgttatgtgagttgttatgttgatttctgtaaaaatataaaaaaactgctttaaagtgtaaaaataaaaaaattcttacaaatattatataaataacaaaaaccaacaacaaaacaacaataaaataataagaatacaatagaaaaataacatgaaaacatcgaatacaatctgtacataaaatttaaaaaaccattaaaaatattgaaaattctttacaactcgcatttttataatttgtttgttatttttgtgtaattttgaaataatcccaatgctatatggtacctgccatatcgagttttaccttttttgttttaagctaattaaaaaatagtgggaatttttacactacatatttaaatttttaatttttttacttttatactgtggagcgaatttttttttaaatatactgtattttttttcaaaaatactgtgtattgtgttaagttttcactgctgttccacgattattttttatttgttccattgttgttttaattgttctattttgttattttacggctgttttagaaaaagacagtatttttgtaaaaattatgtgtgacaataaaattgtaaacttttacctaaaatctagtatttttgtaaaacccctaaaattttattcccaaactttgatatgtagcttcctaaacttttagtttattaaaaactttcaactatcaaaattattaaatttaaaaatttcggtccaattttactaatagatgtttgacatgaaaatttatgagatacaatttaatacatgttaaacttaccatttaataactacattggtaaaatactttgaaaaaataatttccccctgtacacatgataatttatttcctccatgagagtttctattctcaattctccattgaagcagccatagtgacgtactcgtgtataagagcca

SEQ ID NO: 314124 - DNA, 1089 bp, Cannabis indica
attttatacttcaaaataatttttttatatatatatttttatagaattttacatagaattctctattgcaactagctctgcaacctaatttacaacaaaaaaaatcgtatagcaacccacatagaaaccaccagagaaaccactttagaaatctaaatcataaatttaaaaaaaaaataaaaaaatagtacatgaagtaatcctcttaaaaatcttattattattatctcctaaattatgtttatgggagaattttgccttttaatttttgtataagttacattcctcaattctttaaacaatttatttatatagcactaacttaattcaatttaaaatttaaacaaaaaataaatatagataacagtttaataataaactataagagtatatatgcattcttaaaactattatatatatatgtttaatattataaattaaattttaattaacttaaagtaattaaataaatacatagactataattatacttgtaattcatagttgtaccaaattatattctaaattttgatatgtaccaaattattttaactcccaaactttgacatataccaaattatgttcttgaaaaattattaaaaatctcttctaaacttttgagattgttgaatgaaagtttaaaagacatgatttggaaatgttaaagttcgaaagacataatttagaaagtattataatttagagaacataatttatacataaacaatcactaaaaataaaattaaatgaaatcaacaaaaattcttaaaataaataatttcattaatttaagcaaaaattttaatcaaaaaagttcaaaaatatagtattcagtgcaaaaattataattatcctattctaatttttatattattaattattattaaataaataaataaataaaaaacagctgcttcgcaacaaccctcactcttaaacacttccactactattacatacaaacactcaaagttcaaaacaaaaaaaagaataatgttaccatgcccatattaacccacgcgccccacgcgcttctccccttcttcttcttcttactttctttctcctcctcctccgccgccgccgcct

SEQ ID NO: 314125 - DNA, 999 bp, Cannabis indica
atatttttgtcaattaaatatgccaaaaatggaattaacacagttatagattaatgttagtggttattaggttcgtaagtctgttacaatccacttgtcttagcaatctactgtatacaaatgcaaccattacatgttgctatgaatcaatgaatcacaatctttctctctctttctgtactttacttctttttttttctgtttctatttttttcacacaagcattcatcaatggcaaacctatgcaacactaattcggtattagagctctaatcaacctttggtggtaattatggctaatcttgggactcagatagggaacagatcacaagggaacatcactggtctcaactgtgagatggaagagcaatgaatccaacgaagactcactggtccacttcactcacaacttggtgatggggatctcaaatttgtggtcgcctcggggagacaaagagaaaatgaagcgaagacgatgaggcagagagaaataaattcaaaccttcaagttttggagccattgaactggtcactagagtcggaagagggtaaggttctaccatatgggttagaaatcacatgtgagggttcgtgtggctggaggaagaagatgaagtggtggtggaggtggtggtgtggctggaggtagaagatgaagtgggtctgggtgtggtatggctaaaggtagaagtcaatagaaaaaaaaaataattttaaaatatagagtaatttgcggcataaatacctaagtttaactttcagttgcaaattaatacttaagtttaatttttggcggtaataatacctaaattataattctggaacttttataggtacctaactgttaattgttaagtaaattgacacgtggcaattcctaattggtccaagtcattaaattttatttttttaaaaaaaattaattaaaatataccaataaaaaaatgacacgtggataatgacataatattttaacggttaggtatctacagagttcca

SEQ ID NO: 314126 - DNA, 911 bp, Cannabis indica
agatccattattcatccattattgagttaagttttctttgtcttatttcaattaagttcaagttttggttttgtaattggttttagttttgatttgtgtttcttgaacattgttactgctgtaacaacttgttttgagggtgaggattcaccacaatatgtttataagttggttagctttgaagaacagattgtcgacttatgatagattttgtcgatttggttataccaaatcttccttgtgtttattgtgcagagttggagtggatagccattctcatctcttctttggttgtgcatacaccagtatgtggttcagcatgtttggctttggattgaaatttctactcaaaaaagagagcttttatgaagttcttgagtggattcaaaaatcaaaaacttcaagaagtaaaataatagttcttttgagtgtcattactgtcataacttactacatttaacatgctaggaatagaattatttggaatcaaaagttacctattgttaagatcacatgtattgttcatagtgtttgttctagattgaattcgttaaataaatgagtagaaaagatagtcagtagatagaaattttaaataaactttccaaataattttaaatatttgtaaattgttgtttgtgagcaatatactattctgacttaaaaaaaaaagtctattttttatctcaattttgttgttctttaactaaaatcgattataaatgcaagtgtaaagtatgaatgaatgaattaaatagtaataacttaatactaaataatagaacaaaattttcaaaatatatattgctttaaataaaatttgtaaaaatgttcattataccataataaataatttaaaatagtataattcttgtgtttttttttttttaaaaaaaaaaagtaatagtata

SEQ ID NO: 314127 - DNA, 1075 bp, Cannabis indica
aacatttttttaattagttttatgtttttaaaattggaaaagtgaaaatagttttcaaaaacatgttttataaatctgttttcacttttcaattttttaattgaaaatcaaaattttaaaaaaaaaaaaaaaaaatcactttcaatatttgtttaaacaatttttttcttaatcaatattttaggctccgatcaaacccggacccaaatcccctcccacaaccttagcgctgaacccggcctctgacccgaacctgaatcttacctttttgtttttcaaaaataaaaattttactttcattttttgattaaaagattagaaaataaaagtgttaacaaacgacacataactaatttatttttggtattgttttttgtttgtcaggtggttaggcccagcacgattcatgaacacaaattgttcgtgtcaggcctatgttctcgtcgtgttttaatgggttgacccgtttttgttgaatttacttgctcattttttgttatatagttcggcaaatttttttaaatggcccgacccgattttcgtttagtttgtttttttattagtttttttttacacatgccatatgataagcttggtactttttttttcttatttttcaaattaaattgaagcataagtaataatattggtgtaattttatattttagaataacttaaattttatttaaaaagtatttatataatttttaaataattcaattgaaaaaatatacatgaattacgaaataaaatttcatatttagtttgtacttttattatatgcttacctttacttttgtgctaatatattcgtacttttgtgtagtacttttcatgcttgttgtatcgtcccttgcataaactcttatcttttgcttcgtgtctaggtccatatttttcgtgttgtatcgtgcctaaatttaaattttcatgtcgtgctcttataccttaacttgtacctattttgtatcgttccgccattaaactcggctcttttatacaaatttagtggtgatactgttggaatttgttttaccaggatcttagatctactcacaagtatgttgtttaaaca

SEQ ID NO: 314128 - DNA, 827 bp, Cannabis indica
cctagcatcacccgccctagagcattcaccgtgcacaaatttagcagttgtcctaaatttacttccctcgtttttgaatttaccagtgctcgtactaacatttttgcctcctcctgcacattaaattaccattgctcaatagaataaggatacgaaaattcttacccttatcaatctcaaatcctaacgttgattattgttttcatatatcaatgcaatatttattccaacattgttattagtatcagtaatgtttaacattaattaaaaataaaatcttctaaatatttattagggaacctcacattgttagtatgtaaaaataaattactgtatataagatgaataagttactcttcctattgtcaatttgttgcaagatcattcactttctcccaaattctaacaatattcaatgatattttgtaataattattaaaataaataaaaaaaatgaagaaaaaactcaaattctaatagcaaaaatatttagattttctatttttttaatttccttaatacccattctagtatatctgttaattattttcatagatatcactactggatctcctccaacccattatatatacaggactcttctatggtggagatttaaaaaaataccttatttataaggatttaaaaataaaatgggtctcattgcattttgtggatataaaaaaaacgttcatgaccactaaaatatagtgtattgtaagagattagattgacttttgacatgaatctcacttatttaatgttattcttttgatattttattacacttatgtcattttaactaatcacttcactatttttttagt

SEQ ID NO: 314129 - DNA, 1720 bp, Cannabis indica
cttaatagaattattactacatagaatagtatattaaattaaaaaaaatagtaattttatactttagtttactatacttaaaataaaaaaaatctacactatttacatcatataagctagagttacagttagacgtaaggtaaaaattaaaaaaaaaaaaaaaagtattcaaatcaagaaagaagtacaaaaaaaaaaattgaacttgggttatctctttttaatatagtgcaaaaaataatatatctttttatatttattttaattaaatagttaaattaaacatacatactcaaaactttttttattatttatcattaaatttttttttaatattttgatatttatagttgatttattttagtacccatcaatattcttatatatattttgagtagtttgtatcattgagttcagtttttattcaaatcttactattttgaatttggattggaccaaaaggccaataatattaacaattagaaaccaagttgacatgcatgttgaataggaatagctctaaagacacacttaggccctacccaacatttatttgagcctaaatagagccactatcataattaggtggtgtttgatttactaatagaaggtaatggtaatagtaatgagaatattattaccatatttgatttattttgtaatgaatattgtaattagaattgaattgacaaaaatattcttactttatttatttatttatattttcaaagtgagaaagatgaagggtaaaactgttatttagttgtcattttaatcctcattcatgaggtgtaagagtataatgagaattcatagaattggtgtaatatctattataatagaatttcattacaaaggttagaaacacaaatcaaacaatgtaatggtgactttgattccattacaatcttgattccaatcaaccaaacatggtcttatgtctaaaccgaggcatttttagaatgcataatgacaacccatctttttagttcataaattcaattattgatctctttcttttttttcttctttctgacatctgtatggtgaagcattgctttttaattgtgcattcattatttaatacataacaaatagtccgtattaggttgtattataatatttacaaaggatttggggtcaacaccaatctctaatctggacttgggacccagatttggaaccggatcccgacccggacactaaacctggactcggccctggccccgaaaataggctcctgacccagatcctagaccccagaccgcggacctcagactccgacccggaccccgaatggacccaggacccaaaacccggcccccagacccgaccctgatccgaacccgacccggacctagaccgcgacccagacccagacctgatcccgaaccccaaatcccgaccccgaccccgactcgaatccaaatctggacttggactagaccccggaccgagacttgaattaaataatactaatacaatataatacaatacaatttgtacatctacgattggattttctttaattatttattgtattcattttcctattacaatttagacattctcattctaatttatataagagctagctgagaaggacttccactctcattaacccaaaacccatttatatctcatctcttctctctcttgtttcatcccagtatatatatatatcagaatattctcatcaatgattatcattatattgaat

SEQ ID NO: 314130 - DNA, 1179 bp, Cannabis indica
gtgcatttttttactgcatgggaattaaactaccaaaaatttcatgactttttccagcgcacttgcttgctggtaaaagtgaaattaaaccgcaaaatatttattaacttttatcggcgcatttactttcgccgacaaaagtgaaattaaatcgccaaagttagctctttttggtggttggtttaccaccttttgccagcaaaactactatacttaaccggcatatgtcacttatgccgacgaagtagttactcgccggtatagaagtttctcaaagtaaaatggggggataattttgccgcctttcgttggcgaggttcacgaactgcgctggcaaaagttaacttttgccaacacagttcatgaattgcgccgacaaaagctctttttcttgtagtgtgggcgcagggctaggatttcctcccatgtcgactgctatgactcgaatctactcaactccgtgatgtcatccctcttatcatgtgtcaaatattgatgtccacgtcatcctgagtagaaccaaagatagtaactccggtctgattccgacgtcgcatgagggagaagggaaactagaaagagatagagaggtatcgccaaaagaagagagcgataaagagattaggattttttgttataatttttttctgtaattttattattttatttattcaaattattttatattttgaaataattttaaaatattgtgggctacttaaattttgccatttgtatatataccaacatttacatattgacatttaataatattattttaatggaagtgtaaaaatcaaaataaaagtgtaattcaagtagtttggtcgctaaaaaatcaatttatgtgattaagtcacaaatgggatagttcaaataattttgtcaccaatacccaaaaatattttctaacttcattaaagtattacagatactaaataaataaatatttatgaaataaaataataatccatagtgtttgataaaaattttataaaaaaaaaaactaattctttttaacttttctttttttttttttttattttttttttttagtttttgaattactactttatttaactttacttaactttacttaattagttaccgtactaggtccgtacggtcgactctacgtcaacttaatttactagtttttttttttttaacgtttttttt

SEQ ID NO: 314131 - DNA, 1719 bp, Cannabis indica
aaatgataaatatcatttcaaaatgtgtatcacaaaagttattatatttgatacttcgttttcttaaatgataattttattttataaattagagggagaatttgaattttttcttttattaaaaaaagaatctaaatattgtttttttaaaaaaaaactacctcaccagtcacaagcacaatttattaaattcagaagctattatttttttaaaaaaacacatgcattttttttgctccaccatttctaatattttttataaaattatcatctttctctatattttaaaaatagcaaattatgtttctaatttcaatactactattttgtttataatatacacattaaaatattatattttagattatatcacttaataagtacattatatacatatatatatatataaaaatattataaaatttaggtaacaccgcgcaaagtgcgtcttagttctctagtttgattgataagacaagaaccaagggcttttagtagacttctttgaagaccgaattagcttatgacaagtttgagaattaatatgagtttattgaccgcgtaagaacaatcaatatttataacgaattccacaataacaaaaaattgaaattaattgtctaatgtctaatgtctattctgtctctcctcttcaattcccagtgaacaacatgaaccataaaatcacattttgctctataattcttaaaaaaatagattttcgtaagataaaatattaaaaattatgtttagctgatgcttcctaattttaaaagaaaaattatcattgatcaaatacccaaaacaagaagtgatattatatgatgaaaattcacacaattttagataatacaaacttagactattggagatctaaaatcaaatttaagtgtggtaaatggagcttataatttgttaaaagaaatagagataatagttgaaagtaaccaattggccaatgaaaagcaactttcagtcacttcccaaattatatggcagtagtgcgttgatgcaatagttgtggagagagatactgttacaatggtacaatgcaccattgttggatttggattcaatatcccttgcactgatcaaggttttgtcaaaacgagctctcaacatcgagaagtacagtttattttaaaggctttgagcatatttagtgtttggaagtacgggccgaattttttgatacaatacgaaaccggcacgagtacgattaggcacgaaaaaatatggacttaaatataacacatcacaatgctacaaattggcacgatacgacacaaaaatatgtccttaaacacgacatgatacgaaaagcacaaagagtacgacacataagctcaaatagactaagcccaaaaagtaccacgcacgaccagttcgaaaaatatgacacgacatattaaaaaactttataatttactattaaaaataataaggtatgaatttataagttataaataaattaaaataataagagatattgtcgataaaactactcaaattttatgttttttaacagttaactacaaaaattgatttttttggagcaaaattacctaaacctcacttctattgtggtcattatactttcgttatattttcacagttaagtgccataatgaacaactgaagtgtatactaatatacacgtgacaaaatttaagtggtccaagtaatattaaaattattttaaattacacaaaataattt

SEQ ID NO: 314132 - DNA, 972 bp, Cannabis indica
ggttgaaccaagatgagatgaataatttttatttgagctttagctttgcaaatattttgattcttagtttatctaaaaagggtgcctagttgtcttgccaagcagcatttttccctgtaaattattttttgtcacgatttgttaacatgctaatagttggcatcatttttctttttatacagtaaatgtgtgtaatttttctcactaatattgacatttattatcataacctacttacttatcatgttaagccttgcacaactgaaacaaagaagatttatgtttggtacaatagatataattaaagcaagacttcaaagtggatgattttctttttctttaatccttagtttatccttaatactgaaaaaaattgttgactattgtctattcaggagctaaccatttggacgtattgcaattaaaaatggcaaaaattcctgtaagtcaagattaaaattcgaaacagagacttatagacaacgttaatgcaactgccaactgatatattataaattataatccgaaaggttcttctactttattgtttctttcttctaatcagaaaggaacatagcaccaaactaatttgtttatttatttatttattttcttttattttttatttttttttgagaaaaaacaaaaccaaaaatgtgtcacttggtccttcgaggctcgaaccttgggttcgatttgggagcttcaattgattaggtagggcatttatgattataataagaagggtaaatgacggcataagtattcaaagttttaagtttgtaagcagcataaactcaatttttacttttagcggcataagtacccaatgtttgtaaaactgtaattttccttcagttttgtcagcacagactccgttttaaatttattaaaggaacattaggaagcaactgatactacatgtttctgtctagacccaatgatcaagaatctaaatcttatatgtggcct

SEQ ID NO: 314133 - DNA, 947 bp, Cannabis indica
aattatgtatagttttagattaggataccaattttaatccctaatatgcatataatttcaaatttcccttcttagaaacttttgccccaattatccctttaataaatgattgtatttcataagggaatccattacagtgaaaaacttatgtaataagaattaaattagaaaagattaaattacactacataactcttttaaattgatgcctttaatttttaccctctctttcaaaatctattatgtttacttttttttaattattctactgattttacccctatgacttcacaataatctccattcttctctaattaaaattttatctgaactttcccacaaacttacacatctatctccaaagaacacaaatctattatgtttgaaattatgtcttagttatgtgagggtataaaaataatttgggtacaatacttataaaaagaggtatatttaaattaaattttatttgaaggtaaatttaattaatgtatataaaaaggtatttttcaacttcttccaaactaaaatgattctaataaaccataatgttactattgattccattttcatgctcatgtattctttcaaatgttagcaataaaccataattttaacacattttgaaaaataccattacatatattatatattttaagggaatttctataaatatccaataagaaacattgaaagaattatcacacaactaatctttgactaaaaaataatcgattgttttgtaaaaaaattattttttatgcaattttttattagcaaaataatttataaatttttattagtaagataatcttgtagcaaaaacgatcataaattatcactacaaaaaatattacttttagttacaacaagatccgtgactaattataaattattattattgtgttgtgactaaaaaatccctaactaaaaatattagtcacaaa

SEQ ID NO: 314134 - DNA, 1017 bp, Cannabis indica
taataacagaggctcgtggactaaggctcattaacgccccaaccacgtaaaaaatctccatctcactttcttacagctcttcattataatcatattttaatagttgccgaaaacctcagtcaacatatataattaataaaaattaatttttttaatacctaaacaataatataatctaaacactaaatatttgttattacctaacaacaaataatctaaataattttttttattacataacaacaaataatctaacctaaatatttttcaaaatacctaataaaaaactaaataattaatctaaaccaaatatttttttgatacctaatctaaaactaattaaaaatttcttctaactatgtataaattaaataaataggtataaattaatataatatatagtataaatagatatatatatatatataaatcaggaggaaggtcgttgagagtggcagatggaggaagaggaggtgaccgttgatggggacaagagagagagagagatcgagagacgaagcgaaacgagcaagagggatagataaagagagatagatcaagagagagagacgacgacagtgagtgattttcgtgggtgagtagaggtgagagagatgagagagatggagatcgagtggatgggggatttaggtgcgccacactagggtttgagagagagataaagtgacgagagttataattagttgggcttatacctaacagtttaaaaccgtcgggtatactataggcgacggtttaaaatcaccgcctatatatagtatatttgacggttttcaaccatcgggtataacctcaactaaaaattttttaacttataattatcgcaaattttcataacgagtgttctaaatcgtctggaataacaatctttttgacgatttaaaatagttatttaaatttattagcgacaattctaaaaaatatttttaggaccatcataaatactcctttttgtaatagtgttagtgatttattttaaatttagtaaacttctat

SEQ ID NO: 314135 - DNA, 1043 bp, Cannabis indica
tgtgcaaaaaatacttccatttggagcatgaaagtattgtttctcttttctccaatattctttaggaagaatatcagggttcattatcgtgtatgacgctcccgtatcgaaaaatgctaccacttttatcggcttggcatattttgttggaagaatttgcacagtgatgttaagagatggttgcattgtgtgaatagtggacatttgataacattctagagcgtccaaatcactccattattcgaatccacaaagagattctgagttaaattcatcattcgttaagaagattgactctgtgtcattttccttaagagacatcctagtcgtttattggatatgtcagagaagcttgactgtttttcctttagggcattgttttgcataatgacctttttcttccacacacatagcaccaataatattttttttgaaactcaagcttcctttgtaaaaattttattttgcgtcctttgtattttaagaacttgaatgtcttgaacttgtttttattctttgggtttttgtaagaacacgaagcttcagaatgacatttgatgagtaaatctcatatgctacaaactttgcctagttttttcggttgcttcataaattcctagagaaatttcttcaggagcatattttttcaagggcttttaagactagttggaaaatttctccaattgtagcatccataaggctttttcctgatccagagagtagcctgaaagtttcttcgccaagtagttctggaatagaggaaaggaagacttgctttagatttggatcatcaatgccacctatttggtagaatcgttgagtcattctcttataatgcttttccaaatctcttttgtccattgaacaacacttgcttgaaaaactctgctctaagtctttcaattacttgtgcatcttggccacataactcgacatagagatagcttagggcatttgtgacagatgggagtttcaagaaagtcatctatctgtattcgcctaagcttgtccaccaatcctgcaaagttcgtatgaatcttgag

SEQ ID NO: 314136 - DNA, 1045 bp, Cannabis indica
aactttaatataattgtgttagtaaaaagtttaaaacaagaaattttcctttttcttttataaaaaaaaaagtatgataaatatgctttggtttataatagtaggggatagaataattcttattgcttgaataatgttatagtatggaggaatgatatcacaagaaccattctcttggcattaaccttatatataaaactaaaacgatataaaaaattatgataccaaacctactcagtactaaagatgaaaggaagggaatatattttatcttcatgatattttttcataaggagctatcatcactttttatcatgccaaggaagaaattaatgtttcccagagaaaaaacagacaaaaaattattaccacatgtgatcgattgtagatgtcgatagtacctaacaaaacattccattactcattagtttatgccgcctagaaaacatgctaaatttgttactttttaactttttttcacattaaccatatggaaataccaaggatactcacaaagtcgcaaccttcatattaaacattaaaaaaaaatgataagaggccctaaggtgccaatcactataagaaattaggggtgtgcattagatcatatttaatgttttcaggtttatccaaatccgatccaattatatattggatgttagattttaccatctgatccactcaaattaatttcaatcatccaatcgatccaacattcattagatgttgggttggatcggttctatccgttgaatgtatttcatataaatatttattggtttaatttagatttattcaatattttagacctaatattttttagatctaagttcagtatgtattggattagattggatctatccaatccaagaaaaaagagaataaaattttaatgttaatttttatatatacattttacgtataacaatataaaatttaattactcattcaaattaaataaaaatactaattagtttgattaaatgttagatgtattaaatttttggacaccccatctaacatccgatccgatccaattggatat

SEQ ID NO: 314137 - DNA, 587 bp, Cannabis indica
aagaactgctttcttacacgagggaagaagatctcgacccagatccaagaactactttcttacacgaggaaattgactattggagctgagacgaagtgagttcgaaggagctcagcccaaatctgatctatcctgacccagatccaaccgaactcatcctaggtttgtttgacccctgcccagatctgaccagccactttccaaattcaaccatcgcctacaagaaggaaagaagatgacgaagaagaaaaggataaagaagaagaaatgtaaaataatttaagggagagatttttttttgataatcgagtgcatatattatttttcacattattttggggagaatttttttttgataatttggtgaagaagaagatcgaaaagttacctaaaagataataatttatggaagagatttttaaaaaataaatattttttaatagttttaataattttagttagttttggattgtttttaatgatatttaaatatgaacgcgaaatctgtatatttgtttaaatgtgggataattcatgctggcacataactacttttatagacgatacctttaatttatcaataaaag

SEQ ID NO: 314138 - DNA, 1279 bp, Cannabis indica
gtaatcagtgacaagttttattttcttagtccgtgatttgatccaaacacgatggcgtgggggatcctaaacctcaaggtcctttttctgcattattttacaaataaatttaatgagtactattacattttgatgcacattgctagaaaatcattatattaattacttaccacatcttctcttacgttcaccattctgctctgaccactttgatgtttggattagttttttaccgatcgttctctttgtactttacttaattcctaccatggaaataaaaatacgtcagctactaggacttgtatttaaaagttttagtacaaatataattagtacttgaaatttaggagttaggcgactttgaacaaatttcaaccagtcatttttgtcgatttcaggatgctttttagggatgtatgccaaccgttgcaaatcattttttttctaatgcaagcataatgatgtccttggtcattctgttcttgaaatctttcattaacttcccactaatgaccatgcaactatgtttgaaatcatcataaactataaaatctgtctagttttaaggtaaataaacatgattggagtcaacatttaaattaatcaaacacaaatcaaaattctagcaaataactgcttacctatatatctttctaaattttatttttaagttcagggttgacctacttccaattttcataggacagcccaatcgtcatacgacttctaactcctaaagttaatacttgattggcatagtttctaccacaatactctcctttatcgttgacaaggagaagaagcctttttccttggtccatcaacttactaacttcgttcatctcaattctatctcgtttaggtatcgcccaaggattctctagtgctaggtccaaatctgaatctgagcctgaacctgcgtttgtcatatctacaccattaacaaataatataaagttagctataacagagcaactacataaaaaaaacagtatcaaaagtaagttataaaaaatagtaactacatatcatctacccccgcttccctaatggatatggatcattaactaagtatttggcatgccaatacgaagtagcataacttctattgaaacttcttaaatacatatgatccttaatcatagtaatattttctttatatctattacaacaatctacacatggataataaatacgtttgggatttttgaaattctttaggaaaaactctattaatgtatcgaattctacttgaaattgcagtgtgtctctctcctca

SEQ ID NO: 314139 - DNA, 574 bp, Cannabis indica
aaaaaaaaaaaaaaacttagcttaatgttttggatttttttttaaaaaatcacaccaatcatagcatttatacggtcgatcttgagttaaaatgagtcataagaaaaaaaaaaaatagttcttattataaaaataaatagtatttttaataattataaaaaaaatatgtatattttaaaagatatttttttatttagatccttgggtgggtgtattaaatcaaagggggcaacaaaactagttgtgcttttattgaaaggtaaagtaaaaaaatttgcaagtttacatccactagaattagaaatgtcatgaggttgcaaattttttaaggttcctttagaagctaaatttttttaacaagactttaaaacatgaccaatgcaagagtgccacaaataaaaactagaagacaaaagagataaacaaaaagaagacaagtcaacattaggagttgcatatactaataatatctatcagttcattcaaaatatataatcccccctgcctacgcctggttgttgctatattttataaacactacgcaagtatacgcaatcaagtagtaaatctcaca

SEQ ID NO: 314140 - DNA, 1238 bp, Cannabis indica
agcaaaaattacaaaaataacatattccacatataagtcaaataatagccctagagtttaataaaatttttggaattgagaaattataactctaatatttatttctaatattggggtccacaaataaatattcataaataattataaaattaacagaaattagtgctaattgcctttactaatccaacttactaaagcggtcattacctcatctttccaattcatcttgagtcgtccaatttcgatatatatcaagagagttatggctaaaatactaagactgctgaattgtgacaacttggtatgcgagcccatgtgctgttgtacgagcccacgactattgtgtgagcccatgggatgttgtgtgaacccatgagccattgggtgagccgggggcattcgggtgagttgtggagcctttatgcaagtggtggagcatctgttcgacccacggtggagcacccatgctattcgatgtttagtactgtagtgatccaatgaagagagcactggcaaaagaaggagaaggccatacatgtgtggatgggtgccatgtgcctgggtgtgcgggggagtgtcagagcgagtgaatgggggctcgcatgcgagccgtgggtgagtggtgtacggtgtgcgagctgtgggaaggggaaggggtgagcttggcatggtgcgaggggatagggggctcacaccgagccgtgtgtgcattgtgtgattgtgttttaggggggttgtgaaggtaaggagagaggtgaatgcgtgacgataagaataacattgggagaggaatcaaaggacaaggcatgaaaaggaagagcgtacaaccacaccttctgaagattaaaagaaaagaggtacaagtagcgacaacaatgaacctgtaaagcctaaagacccgaccaagggtacactgcaaccactctcctatagcctgtacctagggaccacctcacatgcaaccaaggaccacgcgcatgtacccagggaccaccccgcatgcaactggggaccatgcgcatgagcctgaaggccacacactgcgaccaaccatgtcctaacacactaaaagaagctggtataattcatagccaaccatgtcataccgcacatgaaaaaaatggtttagctgaacgtaaacataggcatatagttgaaaatggcctcactttacttgcgcaagcttccatatctttaatgttttcggatgaagcttttaggtgttggaaattatttta

SEQ ID NO: 314141 - DNA, 839 bp, Cannabis indica
ctcagtcgtgagcttaaaaacaacataaacgactatagttatatagatattcatcatcaacagttatgaagtatgtatatgtgtattactggcaaataattaatttgcaagtaacatcactaatatttagacatagagagaaaatcccataaagtttaaattttagttagagaaataaaatacaaaccttgtgtgtttgaaagtaattgtgtaattattaggtaggataattatattatattttaaaatgtaaagtgtgtttggatatgaggtgataattacatatgaattcctaatatcttgtttggcaaatagtaattacataggaaaataatatttttttgtagttaatgtttaatatggaaagtttctagtaattacagtataattacattcaattcttatggggggccatgagaattggatagtgtaattggaacccttcaattactttcattacacagttacagtgtaattacatggtcagactaacatgccaaattgtgtaattatctccaattacacaaaaatccaattacattttggctttccaaacgcaccttaaaaatgcatgtattttacaaaaattactaactaaattctttttttgtttaaaagataaaattgaatttatatattttaaaattgtaaaaaatagtatattgaactcaatatttgttaattatttttgttagtaaatcaactcaaacttatattatgcacaaaagctatttacaaacaccaatcaaataattacattttaaaattttcacccagtctatatcttctttttttttttgtttttaagaaaatcaatatgttatacaaatatatctcta

SEQ ID NO: 314142 - DNA, 968 bp, Cannabis indica
cacctttcctttgctgggttactttcaccaccttgcgatttttaacccatcaacacattcgaaaaattccagacaaatccgactacctcctgttgttgtcaaacaaaatcatatcaccggacgtcgtcaacttcttgcttatcacctttgtgtaagtctttgttcatattttttctgccttttctgcatgttagggcaagataagaatggtgatattgtcatttggttgcgcttaatttctgtgatacggtggttatggcgactgtcatggtgacgcttccccaagggggggacgtttgatgaccactgtcgtaggttgttttatttgcatgcttacagtcatttttcttcgaggctagaaaatgatcttctgtttgtttgccatcgagtatttgaagcgacttccatactcctcttttcttcttcttttctcttaatttttgttttttggatgttttgcatccgatgtttgcctaggagaatatctggattacctatctttggcaggcatttggaaggggcctctttccagcggttaggggacccccattcccctcttctatcttagggttttgtttgtgggctaactactggatttccttttttagataagtgcagttctccacgaccttcacgatcattgtttcttcggattcgaccaagaaatcttagaacttcaccaagtccacgccatgtctacacccacttcaactggagcaaaatcttcaaataaggggccaaagaaactggccactttggaagaagtaatgaagggcccagtggtctataagaagttcacatgtcattccaatggctgggaggcagatgaattgcactcgttctgacctgcgcccatcaattagagaagatcatcactgttgctgggatcaaaccttccactactggggttttccatcaccttctgagagatgaagaaatgcccaaccacaactataatggcttcgggg

SEQ ID NO: 314143 - DNA, 1931 bp, Cannabis indica
aaaacagatttgcattaacttagtatatttttgcaacatggatacactctttaagcatttgtaatagttatagtttagctataagcaaaagtagaaattttagccaaacgagaccttgtctacttcttaattctgatcgaagttcagttatgatttttagtgtgtgcaatggcatgccaactgcaactacattgccaccggttcaagcgacaaaacagttcgactatgggatgtccagactggtgattgtgtcagaatattcattggtcacaggagcatggtgttgtctttggcaatgtcatccgatggtcgctatatggcttctggtgatgaagatggtgcgatcatgatgtgggatctttccagcggccgatgtgttgctcctttgttgggtcacacttcttgtgtgtggagtcttgcttttaggtgagcgtgatctactgatctttttataatgcctctccaaacataactgaaaaacaaataaagaatgtgatttgatcatcattttacagcggtgaaggttcgattcttgcatctgggtcggctgattgcacagtgaaactatgggatgtaacaacaagcacaaaagtttcaaagactgaggaaatgtaagtagaaaagtatttcttttgtgcgtgtttatagatttagttaacaattttacagacatttgtgaaaaaaaaaatgtttacgtgaaaacaacatacaacaatatatatatataaaaaaaagtgcgattttaggtattttgtgtaaattttccttcttgattgaattagcaaatgcgggaatacaagacttcgattgctgaaaactctacctacgaaatcgaccccggtctacagtttgcaggtaaagtttgttacaaatgttcaatcaaagaattctttctaacacatatctaacaatttcttagtctaataattaattctaatttgtgcagttttctcggagaaatcttttattcggagctggggtcctttccaaatcagtataagattatttattattattatcattatttcattttagtgttcaaatttgttgtacaatttcagattaagaaaattcattgatgaaatgcaactcttctaatgatgtgtacattcatttgatatacacatgcattaactaccaactatataaacttctcttctaaacttggaatgcttgcgacaccaccgaaaaattagactgaggatcgagattcagtctatttgcgggccatgagacctacctttcggccacagttttttgattgaaaatttcatttgtatgaaattgtccgaattttgttttcgggacttttttccgataccaactttctctttgtaaagcttcttagctccactaatttttttttttcttatttgagatagataagtagagttatttgattttgaagggtattttattatcacgatgagattttatttatttttaaataatattaagctaaaaaaggtaagaaaataaagagagaaataaaactctgatctgaaacacctctgtatatattgtattaatttttcgacactttgggttacaatttatacgcattcagaatatattctaaaaaggatgagctgtaacgttaatacaattatgatgtttgatttgcaaagtcaatcatggcacataccaaattcaattctggtgtgaaattccaacagaattcgtacaaggaaaaaaatattcaagcattgagttatacttggtgaggtgtgaatacaagctaagtcatcacttcttcaacacagtcacccccttaacttgataactgtgacagttagtagttgcgtgattataagatgaaatatccagtaagctgcataatcctacatcacttggggaatgtcaagtgtaataattctaagactgtgtaggtatgaaattacacagttaaagatgacttaaatagaatgatt

SEQ ID NO: 314144 - DNA, 772 bp, Cannabis indica
taattataatgtacacgaccataaaaagaattagactaaaatcttcttgcggataccaaaataaataaaattgtatcaatatatttttttttaagaagagaaatcgtaaaatttttcatatatattaaaaaattaaaaagagagttggggaagaaaaaaaaagtcaattatcactcctcacactaacttagttaattactataaaaatgttttgtaattaattaattgatttatatattattaagtggtttacttctttaaataatccacaatcaattaacaaagaaaaaagaaaaccaacaaccaattaaacaaagtcttcatgcaatttttaaatcaagtatcaaaatattaggttttaataagattaaaaacaaatttttgtatctacttttgactattaatttacttatatataagttacattttgaaaaatataacagaaaagtacatatattattatattgctgtttttttttcttatgcttatgtataaaaacttttaataaatcacctattattttatatgaaaaattcattgttttagtaacatttctaagttttatttatttttaggataacattttaaagtttgatatatgttgaccgagattttcggcaactaataaaatattataaaattattgagctgtaagaaagtgagagaatgatttttacgtggttggggcgttaatgagccttagtccacgaatctttgttatttatggatgaatttaatgcagatattatacttgggagaatttcaccctta

SEQ ID NO: 314145 - DNA, 1535 bp, Cannabis indica
gtaaggatattttgggtacaatacatataaaaagaggtatgtttcaaataaatataaaattagaggtaaatttgattaattgatgaataaaagaggcatttttcaacttacccctaaaagattacccttctatagagtaatcttttttttctactgtaatgggatttggaactttggtatgccacctaagttaaggtctttttgtagcgaatgttttattcagtcttaccagtagcaacgcgactgatctcctaaaaggtttaagtttcaacttcgtgctcgagatgcgaagaagctggtgaaactctggaacatgcaattctattttgctctattctgcatcctaagtgggttcgcctggggtttgcctttactatgtcgatatggccagggtttttagaggatgttttgattttcatttttgaagagtaatccctggaatgttttgaattggtaatgatggtgatgtggtggtcgtcgtatgacagaaatttaccgttgtttagtggtgctcaatcaagaattgatgttgtgtcggagcttgccgaaaacctttatggaatttcatgaacacccacgctacagtctcttgatggattgttcctcttcaacaccaacggtctgtcgaactgtgcagtagtcaccgccgcctgttggatgtttctcgttgtccacagatgcatcggtaattcctagcaaggggtttgttgggctggggttgatccggggtgatgatggtgttgtttggttggcttgttttgaatttagctgttgttggtggtagtttttataatatcattttgcaatctgtgaatgatgttgcccatatacctgctacttctgttactagtgtaagagaatgcatttagacatatgcttagtcaaaatttataagttttcctgtaacaattgatttattattattattttttaaaaaaagagcattcattactgaaataaaaaattagatctcatggtcattataaataatatttgctgggatatttggcacaacaattatatcagttaagttttgggtaaaaatttactaagctacattgtgagccgcaaaattatcaagtttagagataaatgcaaaattacaactcaacacctatttagagagtctgttacaattcaaaacataattatcaatgctccaaacgaaaactttcctttataaagccgtcataactatctcgaagtcgctctctataatcacaaaattatacttccactttaagcgctagatggcaaggtgccgctttaccaataagggcttaggatcacttgggaactgtattgatttatgatctcacttctctctaaaaaaaacataacaagatgaaagattacatatctcataaaatattattataagggaaatgctaaaagatatcagtggtgcttagtatcctcttacatatcaatattactattggtgcaattaagtattatgtcccatataatttaatataataacttttagaaaatatcgctaactaattacaaagtgacatgtctagaaggtgcta

SEQ ID NO: 314146 - DNA, 798 bp, Cannabis indica
ttctctatattaaagaaaagctcattttgtaatgtgagtcatgttcttagagtatacatttgcttaatgcatttcctcttagataaatgaggaaaggtagattcggaaaattaatcttattttaaactaaagaaacttaacctggtttcttttattttattaaaaaaattatttttttgttctgatttgattaaaaataataaaaaatcttcaagtgggttaagctagcaacattactagttgtctatattgttgatactcttagcatgactatataactaaatatttaatgttacactttttaatttaataactattaaaaaaatactaccaaacaaatgtaatggaaattaatatcaatgctatttttattaagctctggtcattcatttagtttcgatattaattactcttgtcataattgaagtaggcaaattagaagtaaaattgatgcacattaaagttaatactaataataaccacaaagtggggactgaatgcctaatatcaatgcttcaataaacacattttttttttcctttttcattttgaaaaagctgttgaaaatgacttaaagagaaccttcatgtactgatttatttattttctacaaacacaaatttagaactaaaagggtaataataataacaaaaagaaaaggttggtccacaccaaatttccttatttctttctagcaattataacataactccattgcgcaggccatttaaattaaaaggtaccaccacatctaccacccaataggggtgttcacaaagtatccgatccaatccaatc

SEQ ID NO: 314147 - DNA, 1029 bp, Cannabis indica
aaataaacatataaatgatcacatgaaccaaatggcatactaaataagtaccgaaaataattctgtttctttattgataattgaatggtaaagattacattgaaatagagttttatttagggcacaaagtccaacagagaccaccattgttcttgtcaacacaaatccgcttccaactcatccaactaacccctctagaattctttgaattagaatgccaccaatgcttagccattaatttttctaactcaccataggtttcaagtggtaagagaaaaagagacatagcataacttggaagagcttgcgccacagttttaaggagcacttctttgcctgcttgtgataagaatcatccatcccaactattgatcttcttctacattttttccttcaagaaattcaaaattgctgtcttttttctaacgcatgatacaagggagacccaaatagaaactgttcttatccgcttcagacataccaagaaaaccataaatgcgttgccgcgttctcaacgaggtattggtgctaaaaaaatagaggatttgccatagttaactttctaaccagaagcttcctcaaacaatccaagtaaacgaaacacattcaaagcttcacgttcgttggccctacaatatatatagctatcatcagcaaagagcatgtgagaaattatgggagctccattggccactttgcagcctttaatagcactgttatcctaaatttggcactctgacgtggcatcacgagaatggtgacacgtggagtccacttggagtatctgctcggaacgataggccaagcaggacgcctcactggcacatccagaatgaaatattcaacaagccgtgcagcgcgatcaacacttagcgaattcatctttcgcatcatgagtcatcagctcaatccctacaacttatggatcaacttacgtgaatgtggcatacacacgatcccactatcagtgtatttagcctcaatcccacgatccttgcattcaacattgatcacacgatctttctgttt

SEQ ID NO: 314148 - DNA, 1044 bp, Cannabis indica
aggaagaaaggagtaaatcaaaagaaaaagaaaaaaaaaaagaaagagaagaaaaaaacaaaaaaaatttaattttttgtaatttattttatattttaaaattatttttaaattttataatatttaaataattaatattacgtagaccactaaaaatttgacatgtgtacacttgtgtgcattgtggcatgtccaccatggcacttaacataatttcttgacggaaggggtaaatagctaacagaaagggagtttgtgtagttttgccaccaaaattttggtttttatggttaagtgttacaaaatggaaagttcgggtaatttcgccaccaatatcccttattaaaaatataaagatccttacatgcaattgctgtgtgtgttcatcgccccatttgttgtccttgcagtgaaattttaaaaaagtatccacaacactgggaagctcccccgtctggggatcagcctatttttaaacaaaattagaaattagaaaatattattaaaaatttgtttattaacaaaattatagtcatattaaaaatatcataccccgctcacaatgtgaccaactatggtcttagatccccatccaccttgaaccttcatgttagctcggtttttcgtattttgttcagctcttgcaagtaatttaacgtatatctattgttagcaaattgagaaaaaaaatattaagcatatagaaaaaaaatattacaactgtcaattaatatctgttgtttcggctctttccagtgtgcgataatttctgcccatacttccagtgtcactatatctggaggtgatctcctgttcgcttcctcctccccgtatttttcaatattctccttccatgccttcttcgtatctactctccagtcacgtaacccttttgacatagatttggtgacgtaatccatgaacataggattattagttggcaactcaaacttggtccgaaaaaaaatactaaagtcatatatattgtatttttcttatataatgctattatacccaaaattcggctggaggacacatgtcaag

SEQ ID NO: 314149 - DNA, 1587 bp, Cannabis indica
aaataattacaacgtacacgatcattaaaaaaataaattagaaaaatactctaaaatatcgaacaaatagagaaccaacaaaaatataagtgtactatacatacccaattattcttttttgtttgtaaaaaaaaatctttatatttggcccctccttaaagcggtgccaagttccggtactgaatcccattacatcatttttaaaagcatagcaaacattgtaatggataatttgattccattacgattcccattacaacaaaccaaacatgctattaaattacattcattactttctcctcctatccatttttttctcacacattattactttcacaaaatatttatttactttcataatgttttttttttaaacacactttcacaatgtttaatccttctaaatatatttatgttttttgagaaaagaatattttatcaaaaaaaagcacaaagacaaagaagatccaagaatccttctaaatatatttatcatttttctattttcatgcccgaaaataaattttgaaaacaaaaacaaagaattgttgcaaataaaagttagtaatgatagaagagagaagagtagatttcaattcttcatttctttaattctatttaaaaattatcctaaaatattcacttctctttaaagaagaagctttccacaacttttgatagttatttattagtgatggctctccatttgtattcttcaagtcttattttaacaaaaaaataacatgaaactaatttgtttaattaaaagactatataatatagagataattacaccacatattaaaatttttaacttttttacttttatagtttataccgtggggcggaattttttttcttgcaaaaatactgtgttaagttttcactgtagttctacggttgtttttttagttgttctactgttgtttttagttatactgtttcgtgtttcactgttgttttataaaaatacagtatttttgaaaaaaaatttgtgtgacagcatttttataaaagttgactcaaattctaatatttttgtaagtttcttataatatatgtgccaaaacaaatatgagaattaatgttgatactatatataagcccaagacttattagaaaccattcataattttctaaattcaagattatttcatcacttatttaaaaaaaaaaatctataaatgatttggattgaccaaactattgacatcaaattcatttggtacaattttaaatagtgtggtccaaattagttaaaatttgaatatagatgtgctgattgtatgaaaaatcctatttgctaatttagttcctagaaaaaagccaactattccaaactattgtaagtggcatgatatcttaacaatatttatgcaatatctaattatttattgaaatccatataagtccactctactcaattctactcttatattttgtcaaatgtcatgaactagccgcaagttttaacactttttttttagagttaataggcaaataagagaatagtttattattcaaaggagcagtaaaatagacaaattatgttgtttataaaaataggaataaaaactctaataatac

SEQ ID NO: 314150 - DNA, 1101 bp, Cannabis indica
aagtaatttttttgtttttaaaattttgattctcaattaaaaaaattaaaatgtaaaaatagttttatagaacatgtttttaaaaattattttcacttttttaatttcaaaaacagaaaactaattaaaaaagtgttcccaaacgccaccataatctataataatcttttgtgtctaaaaagtaaactttgaaaatctcaggagaagactccataacaagaaatgataacaatgtatgaaaaatgttcgttgatggggcttcaaatgagaatggttcgggagcaggagtgatagttgtgttgcctgaaaaatttcaagtttcactatgcactaagattccaatttgatgcttcgaacaacgaggtagaatacgaagctttattggctgggtgacaaatcgcgaaaatcgtaaaagttaagcctattcagtgttttagtgattcactgctggtcgtaaatcaagttttgggagaataccaggcaaaatacacaaaaatagcaaaatatctaaagaaagtacggaagaacttggaaaaaattgaacaagttctaagagaacgagactctaatcttgatgctttagcaaaatttgcatcacaatttgacttagacaaattgaatctatttctagtggaggtgttaagcaatccaagtatacgtgaaactaaaaagcaagatatagaaatgatagatgcgagcccaacttggatgatctttattgtcaaatacttgctaaatggagagcttccagcagacaaaatcgaggcacgtaaactcttatacacaatcccgagatacactctagttgatggaaaactttatagaagaggaaattccatgcccttactgcgatgtgtgctctctacggaagctaatgatattattagagaaattcacgagggcttctgcggagatcatacaggatgggaaagtctgttcaaaaagataatttgacaaggttattattggccaaccatcaacaaagacacttatgagtttgttaagaaatgtgataagtgccagcttgcatataccaagaatatctcccactgagttatgaatgatgacctttccttacccatttgttatatgggggattga

SEQ ID NO: 314151 - DNA, 1591 bp, Cannabis indica
ggaacctggacctagacctaaactcagaaacagacctaaccttagaccgtaacagagaccgaaacccggacttgaaccacgccccagacccaaatcaggatccaaatctagactcggaccaaaactcgatccaaacctatgccctgtgacttaaaaccggaactaaaactagaagccgatcgggaccctaccataggaccaggaataggactaggacctggaccaagacccaaaactataaccggaccaggacccggactcaaacacagacccaccctaggatagggtcccaaacctgaatccaaacccaaaccgagacttgagacctgaacccagacctaaactcagacccaaacatggaacaggacttgggaccaagaattgggatcgagacccaaaactgcaccctagtcttggtcccggacctagaccgagacatagaccaggacctgggacattaaccgaaaccagactaggactcgtgattgggatccatattttgtcttgggatgcaagaacagcagcttggataagactcatagttggtgacttgatctaggactcagacaaggacacgaagcttgaccaggacctggacccagaccctaacatgggacccaaaactgaaacttgaaccaaaatgtgaccaggaccctagaattggactgggacagagaccagggcacctagaactagacattaaccaagcccgaaaactcgagcttggacctagtcccagacccagactaggactgagactcgaacctgaacctgaactcgagactcgatccttgacccaaaccaagcccctaatcgagattgggattcgcacctagacatggacaagaacccagacccaaaatttaaaactgacccaggccaaaatcacgatcgaaacacgggacctggactcagacccggacacagaccagacccaaacgtaggacccaaactcagacaaggacccagctcgggttcagaaaaccccgtacctagactcaaactattacttggaccccgaccccaacctggacccagaccctgacccggaaccaaactagacctagaataagaattggaatagtgacttggacccaaacctaagaccagaaccgaacccaaaccataacccaaactcgaaccaaaacctgtaccgagacattgactaagactgggacgtgggacctgaacttggaggtcctaaatcatcgtcgagatccagaccgtgactgggacccaaacccgaacccagaccaagactgatattgagacctagacatgtactcgaaccgagacctgggctcaaaccaaggcttgggacacaaacctgaacctgcacccagaccaggatctaggaaccggacttagatgggggacctagaccgagaacttaggccccaaaacccagacctagataagaattcgagactcgaaaccaaactaggacctgaaacctaccccagacccaaacctggacaagaacctggtcacagactaggaccaaacaaaaaccttgaccggaacccaaacccgggaccctaactcagacccagacctagaatcagacccaaaccttgacctagacccggac

SEQ ID NO: 314152 - DNA, 656 bp, Cannabis indica
ttttggtttgattattcatgactctcaacttttgctttcctctacatgatgtcaatttacagtttattaaatgatcgaaaaatagagtaatacatattgtggctagacattctcgatttttctctagttataatattttcgagcataatatttgggctcgttataaaattttttgtattcataatgctaaaattttaataaagttgctattttattttttaaaaaaaaatctttatgccaaaaatatctttctttcacttcaaaccctaactctactggttgtattttgatacatattttatgtacacataaaaagatataacactaactttggataaaaattcattaatttcaatcaagatcttttaataataaaaaaaatatgtgtggaggtggcctaacaatttaaatataaattatgctaataatgatctttatagaccaatacgtactaaactttcacttttatggtaactagtatctttatattcatgattacaaaattcctaaagtctttctttattctcatttatttaattgaaacattctttacaactttattgcataataaaccttctattgcttttctaggcaaaaccttcttttttttttcattgcatatttttattatatagtagtaatttgatacaaggtat

SEQ ID NO: 314153 - DNA, 1496 bp, Cannabis indica
cacataattaatactatttataacaacatggacataattataactttttatatttatatttgtgatagatgcaatgtataatattaaaaaaatagtattttcttttttgctaggaaaaaaaatagtcatgaccacctaaaaaaaaattgaaaaagtgttaggtagagtcactaaaaatgtctctacatcctgacattttttttattaggtgtcactttattatttaatactaataactaattaattcctttagtgacccctaataaggaaagttagctatttattaaaaaaaaaattcaaataaggtgtcttacatgcaattttttttatttaaatacttttgcaatatttttgttttgatatatagtgaaacttagagattaaatattatgaacacagacatataaaattaaggttttaaatatatctaattgtacaattaattaatcaaataatactattttttttaccacaattcctatatgactctattagtatgcctttcaataaatattagcaacttttcttattagaggtcactaaattattcaaaaagagaatataaaaataatataaaaggaattattaattaacacgaataaatgctgaaaatttaactagttttatcataaaacatgtaggttagattattattaagttttattttgacaaaaattagttcagggtcctatttgtaccattttagaaaatacagtgtctattttatcatttaataaaatagatggtctaatatataacttttacaaaacacataatttaaaatagtatttaccctttcaaatatgtttatatgtttggagtgtagttattataagtttgtggggtataaatatagaaaactgctaaaaggtattattagtgtctagtatattctttaatgttatactgctattgctattagtataattaaatatcgatgtcttatataacttgataaaataatttttaaaaaatatcactaattaattgatcatagaacttaaataacaatgcacatacatataactttccatatgttaaataattggacaagcagggacagtaaattgggaagaacagattttttttcaaacataagaggagtgcattatagcacatctaagaaaaacaccaaataaatagggttatgaaaaatatatttcaaatttagcgcatgtgtcaaattatatcaattttggttggaataaatttaacatgcaataaatttacattttctttatttatcacactacataataatttttatgattgattaattattattataatatttattctttaaatttaccatattagaaagaaaaaaaattagtaaatacttctacaatgcacacccttaaaaagaaagaataattacataaggcaccattttttgtaaaatatttacatttttacgttcaaagaatattcttttacatttttacggtttttcaaaaaataacacgaaaacaacataaaatcaacaagaaaacaac

SEQ ID NO: 314154 - DNA, 680 bp, Cannabis indica
aaaaccaacaaacaaaaatgtgtgattattttttaaggatgttaagaaaggaagtaagaagataaggataggggaatttaccgagaggccatgggcgacacttctttcaagcatctcctccaggtccttattgttgattaaatcccattcattggggaggaaggccttgaaatgacaccaacaagctgctccaaattccccagtatactccgagccagtactcgcagcctcgataggcagagtttcgagggcctggctcgaagaagcgaaagcttgattctttttggaattgggctcgtcagtatgtgtgggggctgaaggctgggtcggagcctgagtctcaattttagggatctcaagattaacagtgtgggaggctcacttcttgttcgcagttgtcttcctgggcattttgagaggctccacgttgacatctaatggagtctccgtgatggtcaacctcttcttgcccttcttgcctgatgtatgaaagagatcctcaagattcatttctatgagataaaatagtgtgttagtactcgtttaaaaacaagcaaaaggggaaattggggcataatctcatacctaagggatttaccataatcataagaagatgaagaggaaggactataatatccactaaaacccctacatcctgtgatcttgaatatatcatagga

SEQ ID NO: 314155 - DNA, 1494 bp, Cannabis indica
tttatagtataaaaataaaaaactcctaacatatattcctatagcataaatagattcaataattattatatttggacttcaagatatttaggtggtgtttgctttagtaatgtaatataatgagaatgataattgtaatatgaatagtaatgtaataaaataagaattgtaatatgaataatattatgatatttgatttaacttcgcaatgaatattgtaattaaatgaaataagttgtatattatcaaaaatactcataattttattatttttttttcaaaggagaaggattctcattaatcaacaaacaagttacaaacaaagccccacaaaaatcaaaggctcgggcagcagccaaaaaaaaaaaaatcaaattaacagcctacttttagcctttggctattggagtcaatcattctttgtctatagctatacaatctatacattacaattcttttaatctccttaactatatgactaatcgtgtaagagctattatcatgtgtacatttgtttctatttagccaaatatggtagacaaccgcagcaagcagcataaccaccactttgtccttgaacttgctacctattatggacagaaaagttctccagcttgtgaattgtgtcttccaagcctgaaagcctagccaactgaaaatctcatacacaacctgtttagaaaaccagcattcaaagaaaaaatactgatgagattcagcttccaacccgcacaccagacaattcggagccaaaatgttgatgtgaagaattgcaagctgatctctagttaggagttgggtgtgtaccgtttgtcaaaggataaatttgtgtttggggatgttatatctgttccaaacagctttgtagtacttatcttcctcacaagacatcatgctattataaagaaacgctgcattgaacttgttattccttccagcagccacaatctactattgtttgaagtctttccttaaatggcgaaacttcttccagcttgtatccaggccaagcttgtagttccagatgtcatctccttttaaatagacaacattaacctatttgacccatagaacttcatgcttcttcataatagcccatagaaacttagccaagatagccttgttccaaacttgtagttttattatttttaatatttaaaatttaaataaaattaataaaaaaggcaaaatagatattttctaacaatgtaatcttacattggttttataacgtaataggaattacaatacataggatatgtttggtttatataggaatggccgggaattgtaatggtaatcaatatatccattactttatttgctttccttttttaaattttgtaatctattgtattgtatatggtaatcttcattacaatgaaaaatcattgtaatgttcattacaattacaattcattacaaaattaatataatgttattgttataaaataatataaaataatataaagtagatgagaagaaagaagaaga

SEQ ID NO: 314156 - DNA, 724 bp, Cannabis indica
attgagagcattttcattgatctgaattaattaagtgaataacaaatgaatgtacaagactatatatacagacttacaaccaacctaactaactctgcaaaagaccagtaggagttagttaaactccttaactaactttactaatatgcagtagtaaagaagaaagaaggaaacaacagtaaaaaggaaaataacagaaaataactaatctgcctaaactggaatatacacaaattctaataactactaacaacctctttcgtcgcaaagaacttgttattcctaaccactaacagtgatttgataacgaatcatcgaaaacaaagaagaacaaataacaaaaacaaaacaaaactatatcgtacagacaagattaaaatactcaaaatcatgtcacagaaaaaactaaaactgtcaaaactacgagaatatcgaacactatcaagcaaaaatatttatttttatttttaatgtttgttcgaggtagacattgagtgtcattgagcattatcaagcaccaagaaaaatatttactttattaaacacataatgtatatacatataaataaatttatatagtttttcttttattaaatttatatacttttttttggtgcttaataataaatttagggaaatttacatggtatactaacttttgccatttttttacaaaaatactaccaggcggtattttttacttatttactgtgtttttttataa

SEQ ID NO: 314157 - DNA, 596 bp, Cannabis indica
ttaaactttagacattattagcttactatagtttagaaaaaagaaaattgtgtgtcaatgcaaaagagtcttattccagctcttgtattggggcatgcagttgcatatatttccagaagggatagtttcccaagaagatgcgcctataagacgattgaaatggggaacggccagtctcattgttcgtgcaaaaataaagccaatagttttgccaattttccatcgcgggtttgaacaggttagtatttctttctttttccttaaaagacattattttcccaggccattccttgttcatcagtagcagaaattagattacatttcaacattgtttgatacaaaccattctgaattgtttttagatcaagtgtcaaagtaattagcaagttttactcacattttaccatttgtagtttgtgccattttaccaattaggttcactgttccttgaagttggtttcagtatattatgaatctgttgatgtgagatttattaggagtaggcctagctaaccttaacccaagcccaaccgcgatatatatttagaaagaaagacatgattagaaaagaaaaaataagtaagttattcataatg

SEQ ID NO: 314158 - DNA, 947 bp, Cannabis indica
aaaaatatataattatacaatatataaatacatcaaataatgcaggcaagctattaaatgcaaaagatggatatattaaatcgaaattaaatggtcggaatgcaagccctgacagttgtaaagtactatacttctatggtatatatatagtataaagttcaattgtcatttttattattattattattttgaacaaaaaattgaatataggatattatgaactaattaagttcatttacttataattagcgttaattaagctaaacttgtctgttaattacgttatgtaacacaacatttggtgggtatataattcttactaatgtgattattaattagtttggtgtattctatatacaacaactcttatagtaataatattaatatatattaagatatgaataataataatattttatatacgtatatatataatatttatatatctattatttatctaccacccttcactaacttaaatgttggtaactatattgggtaacctactaactgtgaactataaaatacatccactactcccaaaataacgaaaattataaactttaaaaaataattaagaaagggagcattgctattattaacaataataataatattattatgagaaggtactgttttacacgtgcttaattaattatcatactttgtataatgatgtatataatttaaattaaatataaaaagtttgtaatttgaattgtactaattaataaattgtgattttagctacatttctttagagagaagtcagtattattcaagtaaaattatatatgagtatgataaagaatcggaaacataatatatatattatatatttatttaaggtatacacactactcttcttattaagagatattttaccaaatgtttctcgagctaaatctatgatcaattttagttttaacaccatgtacatgcactta

SEQ ID NO: 314159 - DNA, 1904 bp, Cannabis indica
ttgtactcttgggtgctattgatgctatcatagcggtacgaacatagtgtcggtccctcagtgcgatcataatgctagtagtgggtgatatcatggtcaatagcaccaaccattaagaatgttcttaatcatttggttagtcttgtgaataggtgtatgagcacctagacacaagtcgattttatatgatttgttttatgcatatcttactgagtctgtcgactcatcagtttgctaccttgtgtaggtaagaataaaacttggttggtggagcagtgagttgggactcgacaaggattgtacatattgcggcagtgcatcttggaaggttttggtcttaccgtattttgagtcatattttgttatcgctctgtggattgtaaaaaatatatgtatctatattatgatatatatatttattcaaaaatgactttaaactcgagatcccgactatgaagttttataaatataataaaatatgattagatttcaaattagtaaattttcaagtacgggcgttacagcgagtatgccagtaatcttgagtagaaaaagctgctaaccgatttaaggccttaagtcacaatttatataaaactgataagtgattcgctacttttaagaatttgaactcaaaactaaaagtttcactattgataagtagcatggcaaaatcctaattattgagaaaacatcaaaaatgatattttgggaaaagtccccctaaaaaaactattttttggggttttctacttggaataatggcagatagttttctcaaaaatagtttgcaatttttacagaaaaactggtccaaaacctcataactcctccaaactaaaactaatccatctcaaaatgtccagaacttcaaataatgctaaaacaaacatattccatgaaacaattccaactataaaatcttgaataaaaaactaccattgttgagctaagtttgagctcaaaactcaaacctagctcaaaccttaccaacaacaaacaacatgcccaacaccaacttaaacaaacctaatttaatccccaaaactcaattctaacaataacaaaattcaacagaacctaaaaccaaaaaacactatgaaaaccataattaaaccttacaacttcaaagagaacaagagaagaattagcttaccttaggttatcccttcaataacacttgaatccttgctacaatcactctaaaatttggtctgaattaggagagaagagtttatctcttttgggtttcctaagggagagagagaaagatgaaagtttgtttctaattttctaacctttcagataatgccaatttatttgtaattaaatataatattcagcattagaccttagagataagctagaaattccactaaagacaactattacaacttatagtaaaatgacaatttttcccttttccctcctcatgaagtaaacttatcatcctaggggtatttcgatcaaaaatcactgccctaataattcccaacatactaaatgtctactcatcttgccttgctaattctaagatacttaaccatatccaagtgactctaattgtcaaattatcgcattccactattcctgggcataaaacatgaaaaacatgaagtttcatatgtaatatattatctctacaattcaaatatatttttgtaattaagaaaatattttcctaattaaggcatatttttgtaatgaccacgtgttagattatggattaacaaaggcaattaaggcgttaattattaatattttacaattatgcataattttattttgttgtgggcctcatttttagaaatggacattagagttataatttctcaattctaaatattttatgaaactctaagggctcgtttggaatgtcgtattaggtcgtattgtattttatt

SEQ ID NO: 314160 - DNA, 1056 bp, Cannabis indica
atctcatattagcatttctcgttatataaatatgcatgattgttgtctttgttatcttaatatataaataaatagttgatatatattaattgttcgcgcataacttttaaatatatatatggatggatgaaaatatttatatatataagcaggaattatttatagcagtggtggacaatccgtacagtatagtagaatgggcactctcagaaatgttgaaccagccagaaatgcttgaaaaagcaacacaagaaatagacagagtagtgatgagtagtagtaatggtacttctacagtagtacaactccttcaagagtgtcacattcctcaactcccttaccttgtggcctgtgcgagagaagctctccggctccacccagtgtcggccttcaacctcccacatctctctatggccgattgcaccgtggctggctacttcattcccaaaggcagccacatcctcctcagtcgcctcggcctcggccgtaaccctactgtttgggatgatcagcctttggtgttcaaccctgaccgccatcttcctgagaatcgacgtgacttggtggaaacagatctacggtttgttagcttcacaactgggaggagagggtgcatcggagcggagctggggaccaacatcaccatcatgctcttaggtagattgctgcaatgtttcaattggaagattccacaaggaatggacaacatagatttgagtactgaaaaggatcacaattctttgtttaaggcaaaaccattgtttgcccatgcaatacctcgctttaatcttccttcttaatttctatatctacctcattataattaattaattaaatttattcacaataaataaatctatcttaattataaattaatttagatttaataatgtcattgctttactttaatttagtaagaataaaagttagctattcatttgttttgttaaataataaataagttcttgtactttttaaaatactacaaaataataatttgaactgttgagaatcatgggttccgaactcaaaaccaattggcaatgagtggagtag

SEQ ID NO: 314161 - DNA, 666 bp, Cannabis indica
ctttttctcactattctttcctatatataatactcctatcccattacaattacacatatgccctttttatttatcctaaggcctatcaaccactaagtgaccttgcccccaaatttccttttcgaaaatataacacaaaggaatatggcatcctcttcgtccttcttatgtttatgcatgtgtgtgattagcttttcaacttctcattaaactatttttgttcctccatgcaggatggcaatttcatggttggatgcttaggttatcctcaggttggtgacctagtctatgaatctaatgcacttaatttacaactcaggtggttgataaaatactttatagtttatattggcttcaaggtaatctggttgggaaagtactaaaacactagggaatgaaaagtaaagacttttcccattggcagtatgatatttgcccaccataaagttgaaagatactccacttgttttatttagttggaagaatttattgagataaaaatcaccatctgatccaatccaattaagcttcaaaatctaattggattggtatcttacttggattttaattttcatattagcaaaaaaacattaaggtgacgtttggttggaggaaatggaatgcaatggaaatgaaataatttttattctatttctttgtttagtt

SEQ ID NO: 314162 - DNA, 763 bp, Cannabis indica
aaataataaaaaaaaaaaacgattattgttattattgaagatgtatttttgtaaataaaaaaaattcaaagagtaaaaatgataattttctatatatagacgtatttttataatatttttaaattttttggtctattatgtaattttttctaagaagctaacattaaaattattacaagatataataatatgagcattgcttatggcaccctaaggtgtccaacaccataccaatgtgtcacattctaagtagtcaaccatttttaatattatttattaaatcaaaatatgtgtgactcgatattgatttacatcaataacaatatgatacttcttatggtgcttgacaccttaaagtgtcccttaatatttttctattaatatatatccttaagaatcaaaaccaaagatgaatatgaatacatttatagtttttaaaagcaaataatacattgttatttgtgcttccagaagaagaacacgtgtaattctaagacgttatggcatgtttggtttgttgtaatggaatcgtaatggaatcaatttatccattacacaaacttagcattatagtcattggattagggatgcatatttctcccatggggatgggggccccggggacctgcccctaatagggcggggattccctgtctaaatggggaacaagatggggacgaagattactttttatccccaaatgttaaatgagacgggaacgagaatcacactccccgtcccgacgaggacccgtttagtattt

SEQ ID NO: 314163 - DNA, 688 bp, Cannabis indica
cggtcggttgtaattggatcggtcgatttatgcacacccctacttttaacttcatatgacccttaagcaaaaaaaaacttcatattctctctctttttctctctctaaacttataatatgtatctatcaaactttagtaattaatatgtaaggtctatttatagtaccaaatatttacttaatattggaaagctacagattatataaaaatatattaggacacatggttgcgtatgatgataactcttaatttaattaaagaaatcatttaaaataatactccatgattgagagaacacaaagatttgtgaattaaaaaataatgaagccacgagtctcatatttataggtacataatgggtcgtgaccctttaaccatgtagatgtagttaacacattttaaaccatcgttacaattatagtaaaatatttaaattacaattacaagtagttgctcacttaacatgtgtagctgagcaatgactaatttcaaacataagtaacaattgccacatgcatgcatacattttaggaataacttttactaaattatatggtgtgatcaacacagaaccctgtgaaaactaatcaagattatatgattaaatataattttcttataatttatcaatacacagggtttaactgataggataatctacaatgtaatttacttgcaccttggata

SEQ ID NO: 314164 - DNA, 2659 bp, Cannabis indica
aataaaagtttatttttttttttctaaaaaaaaaaagcataatcatattaattgcaaaggtagaaactttagttaaggggggtgattgatattttagtaaaaatcaaatttttgcatttatgacccgtgaaaaggggcatggactatttttggtactgccagtgctaacgtacgcctggtagtgacctttatatatacaacaactagtacacaccacaccacaaaccccataacacaaaaagctctaaactttatcaaaattgtgggaaaactaaccaaccccacatagcaaatatttcatatttctcttcttcttcttcttcttcttcatctttttcttgagctttttccattgaaatagtcatggatattgagaatgaaataaggctatcaaaattcaaaaaaatatgtgttttttgtggaagtagtcctggaaaaaagactagttataaagaggctgctattgaacttgctgaagaattggtaataataatgtctcttctctaaaaatcactctgtttttcttattacactaaaaatgggatttttactatttttattgtgttataatttctgggtttctcttctctcttagtttttccaacaaaagattctatttttatgcttttttctatattttctctaaagaaaaaaaccccttttttcttgtgatatttctaaaggttgcaaggaacattgatttagtttatggaggaggaagtgttggtttaatgggtttaatttcacaagctgtttatgatggtggtcgtcatgttcttgggtgagaaagttttcaccttttttctttctctttacttaatttttctggaaaattttcaagttagtaacttttcttttttgatatatacaatttgggctttttttcttctttaaactaatttttgtcatgttattgtctatagagtaattcccaagacactcatgcctagagaggtaagcttctcactactactgttatattacttcttctttaatatttttattataatttgaaaatgactaaacaacttataataataataaaaaaatcttcatctactattatatataaacatgaaattgtgtatacctcaccttttgttatctttaaaactcatggtttttatttcttcataattcttctttttcttctcactttttcataactctatttggttggttctgaaattttcttattttttttttctttaacccaattgtgtatatggggttttgaccattttgtccttctttaagtttatacaccccacttgtttgaattggatatcttaaattttgaaacaaactaaaaatatcatctttttttttaatgtataatgtaatcccttgagtttgttcttcttagacaatcccatattaagtgttccttttctcccctgtttttttcttctgacctattctttatgctctcttaagtgttttttgctctacaaaacaatattggccgatttatttgacattttctaattgagcccaccacttcttttgccactcaccatttattttctctctcattcatccttccttctcactcactttctctttcatgtatatatatattggtgtttctacgatgaaccttctaacacagatacacgatatatctcttatttgtttcggtattcaagaaatttttttattttgattttttttataaacgtgtacgttatagttatttaaaatattctataaaattttaaaataatttaaaatatatttacacgtataaaataaaatagtgacgcatgcaatagattgtttgaatattatttttaacgtattaaattcaaaatttaacagaatattttaaataactataacatataaaattataaaaaaaaaatagactaaaagattctagtagatatcgaaatagataagagtgcatcgtacaattttttttaaatttcttaatatacatatatagggattcaattttattctatgaaagtatacattttgtagtctcaatcaatcaaagagtttaaagtgtattctattttaatcaaaatacataaaacaaaacttatagtacataagagaatgcatttcattttttctttcatttatgtataaaaaagataaaattcatttctaatacatctaattagacaaaaataaagcacatttagaatttgttgtttggattattaacttagggttttgatgaatgtttagataacaggagaaacggttggagaagtaaaggcagtagcagatatgcaccaaagaaaagcagaaatggctaaacaatccgatgctttcattgctttacctggttagtaaagcttaacactttcttctcacaaattatattaaaagatatttgaaaatatcgagtttcacatattttaatttaataattattatatatataaaaaaacaatacttgtttacttgtatggtgtataggttgcttaattctctttatccattaaagatttcttttacacctctcaataaatattcctttcattcttcttttttattattcttttctttctttctttaggagtaacaactaacaagtttaaggtttaaacaggtacttgttttcaaaagtcaactatgttgatatgtcatgttctatgttctgcacttaaaaataaatttaaaacaaaaaaaaaatagagaatat

SEQ ID NO: 314165 - DNA, 1678 bp, Cannabis indica
aaaaagcataactgtcactgggcgatccaggttttcatccaaggtagacattctcgatgctttggggcagtcaacgtccacggtaggccttttaagtacccgtccgggtatcatttgggcagactttgagcttgggccactccgagtccacagtggtaataagtcttctgtgtcaaggaagctgaagtagggcaatgtagacctcatcatagctatcagccttggcctgttcccggatcagtgaggcttctccgtgattgagtttgttgaaggattttaattagcaagattatgagactatctctcctttctatgccttgtatcacttgttcgaaaacacggacaacatttacccccaagcttttgcgactgttcgagttatgagagcttgcagtcttcttccagctcgtggagataagtttacaacacgtggtgattgctgggatcacaatgtattccttgagctatcatcaattataggaccaagaactgatagtgccacgacgtggcatgcatgttgcgcttttaatgcgtctgttgataacacacgcgtgtaggaggtgcgtccttcaaacaatgttataatggtggcaggtagattgaaatgacccttatttaatgtgtgcggtactcaaggcgagcaatgatgaaaaatgaatgctggcttttaaatgccatcttttaaacttcctatccctcgatcaaatctttttggagagaggatctggaccattcattttaaattgcgaggatttggccaaagtataaatagactcatcaaacccacttttccttttttcactacttcagactcttcaaaacttccatttttgaatttcaaaccagagcttcttactccagaaaaacttttaccttgcgatgatttccaatggtgaatgcaagaagtttttgatatcctgattcaagatttcttaaaccttcattcaacccgatttctagacacaaagccgttaaaccccctgaactactctagccccagcctgatgaggacttcgacgctcaagccagcttcgatcacattattgattgtgtacacaacttctgggcatattttcacaataaccttccattttccacttatataccaattaagtatcccgacacttgttaaaacttgctattttgtatctaggatagaaatgcttagttcaagctaggtctaggatatttgacatgtgtgaatggtaaaatgatgcccatagagttacatatctaggacaggattatgttgaaatttttttgccaggggagtgttggtattgtctagatggttaaggtatgaccgtctgaactttatagactttttcatgtacttagggttcttaagttaggctttgaactaggctaaatgaactttcgagtgactgttacattcgtccatcttttatatgctatctagagttgttaggactccaaatggacttaattcccaaaattttctttaaatctttgttatcccaaattttgcactctgacgtgacatcacaagaatggtgacacgtggagcccacttggagcatctgctcgggaagatagaccgagcaggatgcctcgctggcacattcagaataagatattcagcgatccgtgcagagcgctcaacacttagcgaattcagcattcacatgatgagtcatcagctcaatccctataactc

SEQ ID NO: 314166 - DNA, 782 bp, Cannabis indica
tgtatataaaggataccattaaattcttattaaaaaaaattcaaaattcttatttctcatttatgatttaattaattagattgttatttctcatattgtattagaagatctgatagttattacttgttggtgcactttattttgatatttatatgattttaacacttagtatatttcacatattctttttggagttttattgaatccttagtttaagtagttattagagttttctaccattttatataagttaatttagaattttatttcttaaattttgacatgtactaaattatgcttctgaatttttttatgttattaattttttttttttgaactattgatattattggatttgaggattttaatttaatttaattcaattctattattatggtaatttactaatttttcatatgttaaattgtgttttccgaactttaatatatttacaaaatcacattttttgaactttaacatgtatcgaattgtgcccttaaatttttattcacgttggattttctttaataaaattagacaaagtattccttaaatcaacaatttcaatagtttgagagaaatttttaacgattttaacgttcaggagtaaaaatttaaattagctttatatactgatatgatgaattttattcgattttttaattaatgattattccattttctctaaaaaaaaaatggagtaaaaattgaaactatttgatctataaaaaaaaagaaaagaaaaaaaaattgaaactatttgtgaatttttattttaatcc

SEQ ID NO: 314167 - DNA, 618 bp, Cannabis indica
tggtgcctaacaccctcctacgtgtcaatatcgctattagtgcaattaagtatcgggtcttatataatttaatataataatttttatggagtatcgctaaccaattgcaaggcgacacatctagaaggtgctaggcatcactggtgcccaatagcaatgctcttaattgtatgtgtttactacacaataattaatgtgtgccattaaaagccatcactatatatggttaaaacaatatcctcatattatagagacaaaacaagtgtttctaccataaaaattataatcactaccatagaattattttattattaatggatgtttaaattactaaattaattatattaattatattttcttttattatattaatttaatttcccattttttttagttttatttttatatacttctatgctaagaaagcttgttttgtccctatctatgtatgtggacattttattatacattgattaaagatccaatgacaattaaggaggaaggagtatgggaataaataatgtggagtttagcacatgttgacatatcccttaattttttaataatattttaataatttttaataattttttaatattgtccgatttcaatgccatg

SEQ ID NO: 314168 - DNA, 679 bp, Cannabis indica
atatatatataaatttattttgtttaatttaattttatttattagggtttttaagaaaaaaaaaatgaagactgataatggagttttcctttgaaacaagtttgaacttctcttatcaaccaatcacaattagggtttttttttttatttttttttacacaagagaaatttccaaaatctcattttgtgatatgccacgtggaatatttctgagataaatagtcaaacataaccaaattagggtttcataagcaaaatcaaaacttaaatttttctttgtaataagaacaagaaaagaaaatataataatatataaaagaagtttcttgatatgacaaaactcatcaaatgaatttttttttaatttggtgtcatttacacccacttaaattttttttcataaattttttaaccctagtttaggaaatttggcgatctgggtaaggattttggttgtgtttgagctatatataaatatatatatatataaatattctttttttcttaagtctttgggtgtagaatctttggtcacgtcacacacgatttttcagttcttgaccactgacaaaaagaggttttttaggtcatgatttcccataatggtttttcttatctaaaaaccctaatatcatactttgaatgcttcaaaattgttttttttttatttattaaaaaa

SEQ ID NO: 314169 - DNA, 611 bp, Cannabis indica
aaaccctaacctatcttccttgtccttcttcatcttctccagaaccaccaccacaccaccacaaccatcactaccgctaccaccgccactacactcaccattgaaccaaaacaaagaagatgtcaaaacaaaatcaaataccacatgctttgaaaatccaaaatcaaaatcaaatacccaacctaaagatcgcccttggtgacctaatcgtaccccctgatgacgaacccaatggtgcagatcctctaaaactaactacagatccgtcggtgacctaatcacacatctttgattcatgaccaaccaaagcacaaaagaatcagggtttttagttttgagacggaacacgatcccatggtcctgttggaccacctatgactgtggacgactgtctggctgtcattccacctggaaaatggaagagagggagaaaaggaaagatggcaaggaggagagagggggtcgggttcttgggattttggaatcaaagagggttttagggtcccctgggaccatcgccgcccgcaacggccagttttcggtcttaccacgtcgtcgagcaagagagcagagagaggaagggagtgatgggtagagagagagagagagag

SEQ ID NO: 314170 - DNA, 1357 bp, Cannabis indica
aaggctttggtcacattcagtctaatgtgaaaatacactgaaaaagaataaaaaaaatttcaatgtcaaatggagtgatgatgaaactaatagtgatgaagatatttctaacaatgttgtattaacctcagtttcttataagttttgtttgtgactcacaggtgaaagaaagattggtgtgcttgaataattccattaaggaggaatctgattctaatgaatctgaaatctgtgaggagtccctggctgagtcttacaaggctatgtatgaaaagttgatacatgttacttttgaaaatagatcattgtcaaaaataaataaataaatatctcatcaaattgaatctcttgaattgaaaattaaagaatgtgagactgatttttgttcaaaagacgaataataattctattaaagaaggaagttaaaaatttcaagaaaaatgttcaaatgcttaacctcagatctttatttttgagaaagttcagaatgctagtcaaaaaggctttgctagtctttgatcaaatggtacagaaaggcctggaaaaaaaaattgtaaaatctagcgtttcagcaaatttacctactgctacaaattcaacgtctgcaactacaaaggcgtcatctgtagaaagtatctagtaagtttaaaaaatttaagatctcaagtaaggaggtttattctaatttttcatttttctggtattaaagggcatttaggcctaaatgtttcaccatgaaaaatatttacaaaacaaattattttggttattaaaaattttttcaaaagaaacatagtgccttgacagaaaaatagatcgaaaatgaaaaatatctatatgatttttttgataaaagtgttgcttcataaatgtggtatttagacagttgttattctagacatatgacatatgacaatagttttttggtgaacatcaagccaattcagtgtggcgagatcacaattggcaatggtttagtaggaaatgtcattggtacgggaactctcaatttttaaggattaccaaggttgaaaattatgatgttagttgagggattaagggctaatttacttagcattagtcagatttgtgatcaaggtatactgtcaattttgacaatgatcattattttgttcttaatagtgataaacaatgtattttacaagggtttagatctaattataattgttataatctcactcattttcttactcttcataatgcatgtgataataccagtgttatacatatttctagaaattcaattcaacactctcgtacaaaacacaattataatagacattattttattagggaactagttgacaaccaaacattgcagttggaatatgttgat

SEQ ID NO: 314171 - DNA, 741 bp, Cannabis indica
ttttgtttagtttccttttttggggtcataaatgtaaatttcatctattttagtctataatagaaaaatctctttatttttatttttatacctttggccgagtatttccttaacaaatgcattgtaatttgagctgtatattaataaggattatataattacattaaagtatggtgtctaatatatttttattcttcataattatcgatgcattcaaaatttattttattatttattggtattgaatctggcactatatatcacgcccatttaataatttagataaaatccctttaattatataatactatttcagactagtattattagtgctgcaataaagtgaataccatgtgcatcatgttttttttgtcaaaatctaaatttaaattgaattcatgaatgcaaatgcaatcattcaatattattttatatgactttgaacattttcaactttcaacttttcctaaatttctacccaaattcatttgtttatcattagttttccatataatcttcttgttctttactttagaaagaaaatttggcatatattcttccttatattacacgggtaatggtaaatgtaaataaaataaggattatttcacaaaaatataaaaataattaaaaaatattacaaaaatacggatttcatgtaattttaaatatatttataattttttttattttatttacaaaaatacagtctttttattattttgttaatttgttgttgat

SEQ ID NO: 314172 - DNA, 514 bp, Cannabis indica
gacaactcgatcataagcggctttttttttgctcactatccctgatcacaagtcttcctatagatatcaagttaaggcgaatgtctggaacatgcctaacatctttgagaatcaatttgctaccaacactagtttccaagcaaatatctccaatacccacaatcttcgatgtactattatttcctattctgacattgccaaaatcaccagtagtgtaagaagtaaagaaatcactacgagcaataacatggtatgaaacgccaaaataaatcacccaactacaatcttaagttgcaagactaacacaccaatcttcacatacaatgaaaacatcacctttagaggaaactgtattagtctttttttttatttttcttcccttgatctgctctctttttaatattctacaatcccttattaagtgacctaacttgttacaatgataacacttgatatctttttcatgacttggatctttttctagaaccatgctaatttctagtctgacttcgtc

SEQ ID NO: 314173 - DNA, 2661 bp, Cannabis indica
ctttttgtttttggtaatgagaattagtatatttagaacttaaatttttttgagtattactaatacacaccataatattttatgatgtgttattctacatgtgtagttttttttaatccatgtggactagtgtcatttaattttttagtcatttttttaataatattttctttaaatttactcatttgaaggacacaattttcatatattctcatctcctcacaaataatatcatcatctatgatcctatatatattcagatttattttgtttttttgaaaaaaacaaaataaaaagctagctagtgttactttttatattattttcttgttaatagtttcaaaatagtgattatttatttttatatactcaagatgtaaaatgtaatattatatatatatatatatttttaaaaaacttgtatggacatagaagaatttaagataccatagttattatgtacttttgatgtctaacacgtttagaaagtgtcttgaaatttgataatctatattaaattttactgaagtgaaatttggttgaagtaataaaaacataaaaataaaaatgtaaacgtgaatgagaatagaaataagaatgaaatgaaataagatttatagtgtataaaagaattattaatttttctttttgttttgtattggaatgatctttccttttattttaaaatagaatagtcattctattaaaataatgaaaaaattattctattggaatgagattccaatactttaaaataaaataaaaaaaaaatatattttctttaactactaaccaaatgtcatcttaatagtagtatgataatttttttttagtaattctaatttatcatatactacttagaatttttaatcatttttttttaaataaaccttaaaatatagttaataaacaataaaaaagatttaagtactgtatttttaatcatttaaaataaagtttgccaagattaaaatgacataagattgaaatatttaaacattgttaataaacactcaatctaacattgcatgccgcgtccgcctaatagattggacccgttttgcattaagtaaagacttttgacaatattcaacttagaagacaactataaaaagctacagagctctaattgaagtatcccaaaaataaaattaaaagtcatattaagaagattgtttttgtatatctataaaattaatgaggattagatctgcattcttatttagtttagtggtattgatccaaggcttagtattccattcaagctcttgctatggaggtaggattcatggacttgttttagtctcccattatgctcatcatccaactccatcattgagtgtggtagtacataaagtaggtgaccgttctccaccaccagctcctaaacgtaatcccccaaagctcttacagacccctcctccaccacagcaacaacaacagccactgccgccgccaccgtcttctttgccgctgccaccaacaaccattccctagcatcacatgggatttacttgatttttgttgacactaaattcagatattgtttaggctttccaaatattatattatacttatttctcctattgaatttggttctttacttttcatttctttgatgaatatattacttatttatgatgtttacttgcgtaaatgctaagcaataagtattttaattatcatacagtaaacaatattcatccaccattcaaccatatagattttgtaaataactacttttttattatattcacactcatactctttaagctgacaaaagtgataatataatggcagaacatattcagatctctttaaattacaaacttgttttcatgggattaatttcatatccccaatgttgttttccttttccaagtgaaattgaaaacataagaaagaaacaaaaactaagcttactcatcagataaccaataaaaataaccatgtggaaaaattaagactaatggtacagaatcaaatcaatgaaaactttaaacaattaaacaattagcaatgaagagattaacaaacaagaacaataatcaaataagaaacaggagcaaacagagggttaaaaccaaaaaacactgagtacagaaaataaaaatatcaacaccaagatataaactgattcaagtctgatagatcgatgcgacctatgattctactctagttctggaacaccactgtaatccttctttattgattgaacaagaatatgtacaatacagtcgagacgagattctctaatgagttctcacaaagtgtttcaactctcacactttcacccatttttttttttcatctccagaagattctttatacaaaacccaaatccaatctctctctttactctttacctctctctgtatcactcaattttttttctctctctacctctcaatctcatttgaacagagtactcaaactcgtaacttaatcatgtctttaaatgttgagtcaaggtggtatttataggcttaggatcaagatcttaaagtcggtggctgctagaaaatgagattaagctagttagaaataactaacttaaccaactactctttttgcaaagtctccacgccagcatatgttggactttgtgccctaaagaagactctaattcaatgtaatctctgttggaatttattttactag

SEQ ID NO: 314174 - DNA, 1829 bp, Cannabis indica
aggaggttccagcgccggtggcagacgtggacgtcgtaaattcataagtgattctaatcactttgtcaaaaaaaaaaattgagatatatgtttatttgataataataaacattattgtttaatcgtcacaaaaaaaattataatttgttatttataaatatttttgtgtatttacaaagaggttttttttaaacactattttctttatttataaaacaattttctttatcgatagagtttttttcttaaacaatttttttatttataaatattttatttttcacgcatttcttttatttataagcagtttttttataaaattttttatttattattattaaatatttaattggaaatctttagttgttaaataaacttatttgtttatttatgcaatataccattatcctcatttgatatatttattaattgaaattaaaataatatatattttcaatatagataaaatgatttgagttttttttttttttttaaaaaaaaataaaagtcttgattattgcaattcgtttaatttaatattttgtgttttagttgtgtaattcttttaaatttgttgtttatgttaattaaatagagccctaaaattaaacctaaaaacaaaaagaattaatttcacatttatcatcattgcctccttttcttctacttcgtaagtttcttgcacaacaaggttaaataattaatagcctaaaaacataataatgaaagaaaattattaatccaagattagcatgaagcacaccttttgaaatagcaaaaactaggtagttatatattcaatgaaatcatttatttctcgtaccaattacaatttcatttttaagaaaaaataataatatatatacaggagccattaaacaatgataattaatataatttatgtgctattgaagctagctagttataaatatgttggccaaatttttggacattgtcgagaaaataatttacattcgcacttttttcagttaataaaatttagacttcaaaaatatatatatatatatacatgtaaaatttatttataaaaaatatatctatctaattttatttttcattgaacaataaaataaagggaaattacgccaaatattatttgtttaatttctttttcaaatttatggttggggtttttaaagtaattccggtagtttctatgtgagtttctatacgatttttagttgggatttaggttgctccgttagtggcaattgagatttttatgtaaaatttcgtaaaaatgtaaaaaacaaaaaaaaaaaaaaaaaaaaactatttttgaagtgtaataaaaaaatcgtttaactaacaatttcagttagatagccacattcaatataagatatatatataagtcatgcccatatatgtggttgtgttttgtaagttaaatttgttgaccttgcttttagctaataatattgagtctttaaaacgatgcagttataaattatagtaataataataataaaataaaataattgtattacttctaagattatcaagatcacaaggagttgatagagttagtttctcaacaatcatatgaaagcttacaagtatctcgataacataagtgctctctcgaaaatatgatgaacttgaatgatcttttgataataaaatgactccattatttataggtaatatagagtgaatattacttaaaagaataaaaaataaatggaaaattaaatactaaatccccaaaatctctcgattgtgcaaaattaatctcataaatgtagggatttaatcatgctgaaaatgataaaatatttaagaaaaatatcttaaagaatctaaat

SEQ ID NO: 314175 - DNA, 4821 bp, Cannabis indica
acattatagttacactattccacacttgaaataggagacaagtgagtactatcgatttctctaactaaatcctcttttaattactttttatacataaaaaataattaaccactatgtctatctcgatgatctctttctaatatatcaattaattaaataatgagttcacatttgcattatcatcaagctactcgagtcaaatttgttcaaattaatccttggtcttttttatgatgatgatgatgatgaagaagcttcttctgatcattaaatgcatatataaatgtcatacatcgatcagaaagtgatgttatacgtacgtacattgaccctaactttaaggtgattaatttaaactacgtacagcttaaggaattattgatcgttgctatgttcatcaagtccaagggaaattcttcggtcgtacgtaacgtgatgtttagggtcaactataaataaaacttaaaaagaaaagtaagtgtttactaggtcaaaaagtatggttaattgtttgttatggtcattaatagctgggcacatacacttgcctgtcatatttgatacgatatttttaatttttaccaagtctaaataaatgaaccttgtctcctaaaataatatttttatgttggggtaaatattattttaacctttttaatttacaaaaattgaattttgtattatacaaaatagtatcttgagtttattttttatcaaaatacaacttaataataacacatctaaagttattatgacaagaataactatgttttgtatttattcttattagaaattgtcttgaagttaattataataataaaaaaattattaaaaatttttttaaaggaaaaattattaaaaattgaactcaaatttttaaaattttagaaaatatacggtcaaatttatcatttaatgatataaagaatttgattagtaatttttgtaaaatatatgatctgaaatagtatcaaaatgtaaaataatgatatgtgcacaaataaataattttaattaattatctttatttgagctgagtttatctatcaaaagtaatttgtcatttggatatgagaacatttgaaatttatatgtgtacatattataactttaaaatatataaggtgaagtccacacaaaaaaaaagtgttgacatatagcttattaagctaaaaaagttgaaactttctactccttactatttactatttgtttatgtgtaatgataagcacacatataattttgacacataaataatttcaatcaattatttttttttggaaaaaattcaattgttattataaatcataaattgtttacagcaacagagaaactaagaggaaaaatttctcctatctaagaaggatctctattcaactctagcgcatattttgccaactcatgggtgacataattagcatttctccatacatgagaaataacaatattaaagaaaaaggataaaagaaaacaaatatttataatcaaatcggagaaacaagataagtcatgagatgtggtgttcaaggctgataagactctcactgcatcagtttaaacttgattgattgtcaaaattagctgggcagcccgattgaggccatgaaagaaggccttagcctccatttcatctgatctaaaatattcctgtactggcttagacaaagcaacaatcacttgaccttcatgaaacctaacaattgtaccaactcccaaaaccttcgtgtcaacaatcaattgtacaacagcatcaacattaattttaaggccatggagatcaaggggtttccacgggataccatccttcgtcctagaagtggaaattggagttgagtgttgtgcaacttgaggttgagagtgattcttggctttgatataattattagttgattgcaaaagtatccaggtatgacccatctcccagaactaccatggaaaactttgttttgctcggtccaaatcacccacatgatgtagattattaattctatcactgcctgagtatgaacagtggagagattagctaaatcatcctcgttaaccatttgttgagctttcccaagatcaatatgaaaatgaaagtatttccacaccgacatggcatgtcgacaactgaacaaagtgtgcccaatcgattttcaagcatggacacatctagagcaagtagccgaatcaataattttttcttgtgtaagttcgtagctattggaagggctctatggatagcttttcacataaagattttgattttggaaggtaatttttaatcccaatttttttttaccaattgctatacgaatttgaagttgcttcctggacaaattcttccaatgtggtggccaagtggaacttcgattttactgtatagatgctagtagtggtgaaattccatataagtctgtcaggattggaaagaaactcaaagggatattaaggatacgatcaacatcaattgaattgaaataatcgtttaagagagtgatattccattctctattatcagtaataaagtacctctatatatgtgatggggtcctgtatatgacaaaggaccgaattcactgtgattcgagatctatggatctttaccaatttcaattcggtagccattcctaactttgaagctgagtccattgagtagcaattctcttttccaacaaatattgctctattatgtaagtaagggagagtgatcaatatatgcttccaaaaaaatgttattagaaaagtacctattaagcgctttcaaaattctgcaagcttgtttaatcaataaaaagctaattatcacataaatttgtatcatgtttatatgtttatatgtgatttatgtatgaaagtattattattataattatgtagcaataaaagttaaatgctttccagctatttgctaatataataaagctataaaaactttgaaattttgaggacataaaatactaattaagcctaaatagagaagactcggcaataaattaataaaagagaatagagacaactcaactataaattaaaacaaataataaagacttgtttcttcccctgtgtcattattatcaaacagttatatataatattatagattttcatttcattaatgattaatggacctaaaagaagataacaacatataaacaagactttacaagtcaagccaccaaaaagaggtagcttatttattttattgtaatttcaaagaaattaaagcagagaaaagtaataataataataacaaaggaaagcaccgaacttatagctgcaaatgcaatttcttaaaggacaaatatgatcttctgtacttgtaaaatcttgttcattaaataagaaaaaaattgataatcaaaactatatattgatcagaaaagtatgagcaaatataaatatttgtaaaaataattaaataagttatactaatattcaaaaaatttattaaagcatcccaattttttttttttagtttaaaagaaaaagtatacttattttctttattattttctaaaaaattatattcattttttatttttttaatttccttgaaataataaaatattttaaataaaaaaaaaaactacattatatgataaagtatttttaagaaatgttgtaacaagagcatgtccaaagacacggtatatattcatatatgttgtgaatatgtgtcgaacgggatcgcatttcttgaaccattttgaagtttattttatatatttaattaatatttatattattgaatttataaaattaaaaattatcttttgagaaattttacaatgcatatatttaaaagtaatgtacgaatctactcctatttgtaaaactaaatactatatcatcaacatatatgtgaacaatgataaaatctacacttcatgattaacaagcacctgcactttatgattatatgtagaaccaaatgctatatatcatcaatatatatttgagcaatgataaaatctgattttatgtgtttgacgaaaagagtcttgtctacactacctctttgataatcatgagaaattaaaaattgagttaacattttatactaggcaaattcgagcttgcatttttgcaaatctttactccaatctggaggagtttgaggtggattttcatatctaccaccctgaaatcatccatggcttatgctgtgtccacgaggattttgacctccccgaccgcctccggtctcgatcctattaccctgactccttgtatttcgctgggcattcatttaatatgacttagcttccgaacccataaatcaggtaggtgagacagtgatcacataaattctatgtaccgcacttatggattttatgtcaatgcattcaaatagataattataaactattatgcttcctaacattctcttctaatcacataattactaaataagtaaaggcttatggaaccgtgagtcaaacttttctctgacgatgattgtacatgtcttgacgatcttcggtagacaatcctagcggttttgataccaaaattataatgtccttatacttaagcgcgctacaataattttctagttaatgtgtcacctttgcaaatcaaagagttttcctaaaaaaccgtgctaaattaaatttttgataaactttaaactttataaactaatatatatttacatcaaacgggatcccatattttaacttttacaaacattatcaaaatacatttacaaacatgtcgcacatcgccaacaaaatacaatccaagatgtctcgagaccgaacactccaggtcgcgtcgtctcgacatgtacaatcgccatccaagctcggtgctcactcctgttcagccttcgc

SEQ ID NO: 314176 - DNA, 937 bp, Cannabis indica
aaaaggttgagagagcatacaatccaactgcaacgagctaacactttgactttaagagttgcccaccttatgtttgacgaaaattctcaatcaaaacccaaagagatcacacaaaagtcccaagaagaaagtaaccttttttatcttcaattttgaggaaaacccaccaatggattagactttagagttgtatggtgagtttgtgtatgaaaaaaccataaaaggtaaataaaaattgattgaaagagggattattagtaggcgtggtcaacaatggcaacaacagagaaagaagagaatagaaaacaaaggaaattgcttagctgtgggatcaatttctctttcattctttctttctctctctcaatcaaaaaataaaaagacaaataaacgccaaggtattaaaataatatagttgtcattatcttcaccaattttttatttaaaatttgtatataataagaaagaaagaaaaaattggagaaaaaaaattaaggagaaaattaaagaaacatatttatggtttttgaataattaaaatatgtataaaggcaatttattaattaaaaaaagataatggcgtttagtaatttttaattttttaatcacaaaaataaaagtaaaatttgtgttttaaataaaaaataaaaatgtgtttaataactatttttataaaagtatcttctatcatttttatttttatttttatattttatttaagtcgagtctatgtctgaatttggagttaagggtcgggactacggttggggtcggagtccagatcccaaggttcaggttagggtcggaatccaaaatattgataaagaaaaaaaaaataaaaatattttgaaagtaattttttttttctaaaatttttgaaattttgattctaaattaaaaaattaaaaagtaaaacagttttataaaatatttttac

SEQ ID NO: 314177 - DNA, 693 bp, Cannabis indica
aagggttttcaccaccttacctctcttcaacgattgtgtctgaatagcttgacgaacctacagtgcttgccagaagaaggactgcccaagaatcttattgctatgaccatcagatattgtccgctgttagttcctcggtgcaaggaaggaacatgagaagattggcccaacattcaacacataccgaacatacacatagaaacagaataacaggtaaccactacaaaaaatcttacttttaatcacaataaaatttgtaattaaaagtgaaaaagttcttactaattataaattatcattcctatattgtgactaaatgtgtttttaatcacaatacttgctgtgactaaaactaaattagtgacaacttgtatctaaatattatgttttagtcacaagtaatttcttgtttgccatatacaatgtactttttcttttttgaacaataaaagtcattagtcttagttctacttgtttcccctaagattttcatgatcatcttgtctttgtactaattatgctatatatatatgcattgtggtatattggttggttatatttccaacttgcttttgtaggtctttagattactccattaaataaaacaatttcttttttatacctttaattgtcatgttctgtaattgtttgaaatttcgtattaaaatattcccagtttgattatttaattaa

SEQ ID NO: 314178 - DNA, 520 bp, Cannabis indica
cacccgtgagtcacaaagacccagcaagaaaagtaagtaactacaaacacatacattaagcattacgagaaaatcatatcaactcatagccacaacttcatcatcataataaatagatctttaccaaatacataattatgctttacaccatcaattaactgtattataagacaacctgactctaatgcttcataaagcactattgttgtccatggccgatccatagttttttcccccttgccacttgttgtccatgagctacgtatgtcactattgttgcccaataaagcaccagacaagtaagaaacatatcagcagtttcaaggtagtagttactcatttttcattaacggtaatgaccatatttttatccattctcaaacaacggtattgactgtatctttccctcaatcataattgagtcaaaaacaataataatcatttctcatcattacttcaatcataattgaatcacaaatgataataatcatttctctcattacatgcttataaggatata

SEQ ID NO: 314179 - DNA, 1444 bp, Cannabis indica
aagcacagatttttgtttaaaagataaatccaagtaaagcgagagtgatcgtccacaagagtaagaaagaatctaaaatttgaatgagaaggaacatggtagggtccccaaatgtcacaatgcactaaatcaaatattttgcaagcaaaattattgttatttaaaaaggaagtttcctttgcttggccatgggacaaacataacaaggagagtctttatgcaaaacattagtcttacaattgagtttgtttctcaacaaattgaggtatttatttgacaagtgtcctaatctagcatgccaagtttctgcatttacagcaagaataggataggcagcaggggtaggatctagcatgtagagaccacccttagattcacctttgccaatcatccccttgttgacaagatcctgcaaaataaactcatcagtatagaattttatgcttagattactgtcacgggtcaaacaatgaaccgagattatgttatacttgaagttgggaacatataaaacatcctgcaatgtaatgtgttctgtgactttaatagtgccactttgatgtacagagacaaaatctccattagggagaagtaacctggtaggggtaatagtacataggcattgaaataaatgtatactagaacaaatgtgtctagttgctcctgaatctacaatccaggagctattattaggcaatttaattatgttggacataacaatatcattgttacctgtaccattaccaagatcagaattggggatgttggtttgttgtccagcaagtagattaagaagctgctggtattgtgcagcagaaagttgtggcagtaaagcttgcttctcactttggtcatcatttatgtccttgttggtttgaacctgatttgcagtagcatcttttgacttgttcttgttgtaaccaggaggatacccgtggattttatagcacctttcgacagtgtggccaagaacattacagtgagtgcagaaaggcctattcttcttgggagggtgagacttgtttccttgagaatctgatttgttcgagttcgatttgtctccttgaaatgcaaaggcaactcttgggttaggatccgagggagtgttcaagttactcttctggttttcttcttgggtgacaaggtgaaacaccctgtttatttcaggcaagggatccatgattaatatactaccacggacttgcgagaaagagtccgaaagacccataagaaacgacattatatgctccatgtggtggtgttcttgaagcttcttgacaccaccacaggtgcaaccattacaaacgcaagcaggcctgtagttagacaattgttcccatattgtcttcaccttcgtatagtacatactgactgtttgatgttcttgttttaaattcattagacttttcctaaggttgtatatgtgaggaccatttcgttgatg

SEQ ID NO: 314180 - DNA, 934 bp, Cannabis indica
ttgaaaaatgcctcttttattaatcaattaaccaaatttacctctaatttatatttatttgaaacataaatacccagacataagagagtcacatggagagtatcttaaaattacaaaaaaaagagataaaaattatagactttaaaaaagaaggtaaaaatgaaagaggacaacataaaaagggtatagagtgtaatttcctctatatattaattacctttttatatttatttatttatttaattaattaattaattttgagaacccttatttgataatttgtacgtaatacattgtaattataataattacttttttacatggtcaaaaagaaattatccttatggcaaaatgaaactttgatattgttacgtcacacctgcaaacgtaagcaagctctatcacgtcatggaatttgtctattattgtctcactttttaattagttttatttttcaattttaactaaaaaaaaaaggaataataatatacaaacagaccaaataaaaaaaatatacaactcaaataaaaaaattacacaaatatcatttacgcacactttcaactcagttgccatgcttcttgagcaactattgggcaaccacgtagcaactcaatgcaatcgaaacaaaaatttaaccagaaagagaaccatcattaattctaacgacttcacttgaaaagatgaccagaatcaatcaaaataggggttgtttcaaattcatggaaaaaaatgtagaaaaactactacgaaactaaagatcaaccagaaatccagtttaatttgcataaaattaatgtcctgacttcaattttcaaatctatgaaatgcatatctcaaaaagctaatctggagttcccaaacaatccaactcaagtataatccaaagaaaattacatcaatactatagtaaaatatttatcctagtgtattt

SEQ ID NO: 314181 - DNA, 1057 bp, Cannabis indica
tttaatgttgatgcttgccacgtttacacaattagaacaataaaataaatagacataggattttatagaggttaggcccccttagttagcgggtaatgacctactccccttatagttgtattgatatcgagagattttactacttagatcacttagcaatgggatctgaagtagctctcttaggattactatgtgggaatcagatttggcaaatctcaagtatgagtataacagtgggcatgtgagagagagagatgagttttcagacttagagcataaggcttaaggtttgagacttcagatttagggttttcgggtttgactaaagctctttatatacgagagcttacatccctaaaattccttaaaaataggtgaatataatttacatattaaattaataaaatacaaatgactaaaatgcccctaaaaatagatatttccctctattttcgtgggttgttaaggcctaattcatggtctagcttgttgtccacatatgaaaactacgcaccgcaatcctatcagaccaaaggttggctggccatgcacctgcagagtgcattagtgccggtcatgcgatgtccagaagctggccggcctatgctggccatagggtcgcccaggggttgctggctagccccctcgaggtggctagtttgtcactttgtcatcccgcttgagtactcaaacccctcgttggttgaagtgctgagtagagggcttagccttcttgttggcaagttgtactgcaacgtggtactgatgttggccacgtagacatgcaatataaggtggacaaaattaagacaacatttgcctctaagtctcttttcaggtatctgtgcggataaggactttctagcttagttgggactgatgtagccttaactgggtgaatcttgcagtatatgtagcctttgaaatatttgctcttgactgtctgatcacactctgtgcagtaagttaactgcattactattctgcacgtctttttagttgcacactacatggcaagtaaaaaagaggtcccacaaaagctatataagcttatggg

SEQ ID NO: 314182 - DNA, 1396 bp, Cannabis indica
caacttctcctgaataatttaggctattctcctccaggcccacaaccctattcaaaagcccattatcatgcagcttagaaccctgacacaaatgggctttgtataaaattttagacagttgataattgttgttgtttgttttaggccaattgagagtttggataggatatttgcaagaaaactagatattttctagaagaaaattcaatgtccattataaaaatcaagaagaaatttcaatgatttttcaagaaggaattcgatgtccatcttaaaaataattatttttcatatgtacatatgcatatcatatgtccatcttaaaaagaaaagtattatattaaatgttgtgatcaaaattagtacttttaatggttttgatgattatgatttgaaggatttgagtaatggggtttagtggatttggcataatggaaatcttatccaatatccatatcttgtttgtttgtttgttttttcatagcatgttgtatcttctaaactaatctatctgtaaagggaaataattttttgagttggtaggtattcacctgaacactgcattttctcttatcttggaaattaagctatttatcttttctagcaaaaactaagatttaatttcacgtggcataaaattactgtgttctttttagcaaattaaagaaagaataataatttgattgggtgaaatgtagggaggataatatattatagtttaggtatcaatgattggaaagtttagtcaacaggagaagggttattatatattggtctcaagtctgaacaattagaattagtgcctcaaacgtggtaacaaagtccaaattgattagattctgccactccaattatatatttagattttcttgatgatataccaactaatcactaatcagggcatgtgtttgaccgtaaattggtgtgtgcactgcacactcagccaaccaacaatttcactctacatattacatgaccaaaaaaataaaatgtactttcattttcttcttttgatatatttttttaagaaaacaaaagaattatctttttatatagtttaaagtacatacattgacttaaaaagaaaatgtaccatgcattaatttttatttattaggtaataattttttttatttatttgtatttatataataatattaattatatatcaatttaatttttatttcttaattgcatatttttttatataaatatatatctcatactttttcacatcttatttatttattaatgtgaattaacgattcttaataaaagtgaattaacgcagaaaagacaatatataatgtacatattatcaattaatttatctttatatttatatacataaagtaaaatattagggagtatcgcatataatttttttttaaaaaaa

SEQ ID NO: 314183 - DNA, 905 bp, Cannabis indica
gttttattttgacaaaaaaaaataatatttaccctatttatacgaaaatataatattattattagattagattattattaagttcaagatcctatttatacgattttaaaaaatataaatagagagtttaattagtaacttttgtaaaacagataagataatatttaccctttaataatctatgttcaaagtttgattaataaatgctattttttatgttttattttcttatctatcaattagaataaatagccaataatttctcctacactttgaccaatgtagatttttgccctagcttaaaccttttttttttttttaaagaattcacttctgtgggcatgagcaagttacatgtttacttgtagtacaacagtctatataacaacattacatctattttatattaaatgtggttatgtaataaatttttttcttattaacattaaatgaatatacgaatactattaactaattttatattattatatatatctaaaaaattaatataaatatttttatataagtaaatttaaatatataaaatatagtacctatttttaacaatttaactaaattatcaagactagacacgctatactttagtgaaaaaaaattgaaaaatttaaattttaaactaccttttctatcattatacaaagctttacattacacataatattcattcctctctcttagttttccattattatataattcataaactataaactttgcattaaatattatattcattcttaatcctacatataaatatatttatttatttatgtattactaaaagtgatagttcttgatttaagtttagtttttctatattcatttaacttaattgaatataagtgttcattttttttttgtttaattaacattatttttttttt

SEQ ID NO: 314184 - DNA, 1664 bp, Cannabis indica
aggaaattacattcagtttttgatttggttattttaagtaactaattttcgtatggtagttttaaatttggttggttcacatgtacgtttttttctgtgtcaaatttttaattggtttgtttaatgtaattggtttctataacttaattttaaaagtcatttgttaaaaatctctctatggtttgtcttatttttttagtaactggtttttgggttcattttatcttttaaatgttttaggtttttttatatttttattctaattttttagttagttgtattaagtaattggttttcatatttaattgttaattttattattttatgtaatagaactctaagttttatgttttagttttttattcagatatttttggtaataaatttttatatattgatttttaatttaattgctttagataaccagttctatattagtttttttttattatttatttatttattgtaataatttttgtaattgctttttgattaatcatgttatattaccattattctatatataattgtgttaaccacaaaaatagaagaaataaaatgtttctataaatataaaacgtagaggtaattagtccaagatattccatacaaacaaaaaaggataaagcttgccccgtcttgtctatattgacatggtttatactgtttgattggttttgatcgtttgacatagagttctggtgtgtttgtggtctgttcgttatggcttcgtcaagcagagatgcagaggagttggaggttcgatgggatgatttgcagatcgatgaggaagaaggaggagtcttatttgataatccttctgaattggaggatgaggttgatgcaagatggtgtctggtggggagattgctcacggatcgtgtgtccgattttgatacagtccgaaatgtcatggcttcactctggcgtccagtaaaaggcatgtttgttaaagaattagagtttaatcgttttctttttcaattctttcatgaactggatattaacagggtgcttgaaggtacaccatggacgtttaacaaaatacctttaattattcaaagattgaaattaggagaaaatcctaggttggtaccactaaacacaatggagatttgggtacaagtttatgatcttagagtgggttttcagtcagaccgagtgttgagggcatgtggcgcttacattggacagtttgtttcatcttgtcccaagaattatgcgggtatttggagggagtacttgagagtccgggtattgatcaatattgaaaaaccattgaagagaagaatgaagatttactacaccaaggaagactatttctgggcaaatttcaaatatgagagggtgcccactttttgtttcatttgtggtatactcgggcataatgaaaggttttgtccccgagtctttgatggaccaatagaaaaggttgttaagccatatggtttattcatgaaagctccagatcggcgttctcaaaaacagattggtgcgagatggctccgtgacaatatggcaagacctttacaaccaaatgccggcgttccaagaagcagtggttctccggtgacagctaccagtgttgggttttatgccctaaataaaactcatttcaatataatcagatttacttatatagatcagaaataacatttaatgtt

SEQ ID NO: 314185 - DNA, 1268 bp, Cannabis indica
ttttaaactgtaaaaccaaacagcctcaaagaatttagttattattattcatcttaattatcataaacaagaattaatttgtcattattgaggttgaggagagaattgatgctattaatattatcatagtgagaaaaatataaattggttcacagactttacattgtatacatatattaattattggattattacaaaagaattatagttaaagtacatgacaatataatataataatgataaaagaatgtatctatcatatatgatagaactgcatatatgaccttgccaactcacatgcatgcatcgaattagaaattaataattttgtactagtaacttgaagaggaacttgcaatcaccagagcaagatatatatatatatataaatatatatatatatatatatatacttgtgaattcatcaaatttcctctgaacgtacttatagatattgaagatacctataatcgagagagatatgaattcacagggaagtaggacactaccactggtgctttggatgccttaatattattccttccaccctctaatttactctgctcggaattttcgacgacactgttggagactcgagaggaagacacgagaaaacagcttaacaagcctgtgaaaatagccatgttttttaagatgctggctagcaatttaagagagaaccttaaaatttgaaagataggttactgtggttggtggtatacttgttgatttatgagaaagttacgacacttgtggtctactatttatatggtgcaaataatatgcttggtgcgcaagtagaagaccaaaatatgggtctacgatggctgctttgatattaattactttctttcttttcttggatagtccttatgttattgtcataatttttgttgtcggtcccactttattcaaccgccattgtattttatattacctcgatcctaaactattctcctctatttttcttacaagaataccaacaaaattttctaaaaatatttttttatatgtttttcaactatttattcaaggtctccatcataaatgaaaaacaaaagaaaatccagcatccacatattgtgatcttttcatgagatttgatctaacaaaaaagaaatataaatatatattagggaaatttataccttatactattttttctattttttttactgttacatggtaatttttattttatactatgtttttattattattgtaattggcctgtagtgtcttgacttgagcatctattaaataatttt

SEQ ID NO: 314186 - DNA, 1738 bp, Cannabis indica
aaagcgatatttgatgtctaattgtctgagtagaccagcctttcgttactgctacagttagacaacccttattgtgacagctttgactacagggttgaatgtctcttgaaatcataacctgcttgctgatgatatccttttgccacgagtctagctttaaacctgtctagacttccatcagcattgagcttcactctgaatatccatttgcagcctattggaactttgttggccggtctaggaaccactatccatgttttattcttttcaaagctacaaattctgtattcatagcattgttccaatgaggctcttgtaatgcagctttcactgtttttggctcacagacagctaataaggcttttggttttcgtattcctgcttttaaccttgttgtcattggatgagttgaggttaaggtggcaggtggcagtgttgaagctgtagctgttgtggtagagggcatggggtgaggtgttgtaggttgctgttggatgacaggtgttatggcagtggtgatacttggtgattgtatattcgaacttgaggagttaagaccacatggctgactcaaggagttgtttatagtgagtgggacagctggaacagtttctggagtacaattgtctatatttggtatatgaaaaagagtagataaaggtggcagacctggtgtactggtttggagatgtgagtcattgcttgtttgaacttttgttgaatgtgtatatgggaaattatgttcatcaaaaatgacatcacgagagatgtaaactctcttgtcttttgccatacatttgtaccctttgtgagacatgctatacccgagaaagacacatggggtggatctatattgcaacttatttttattatagggccttaaatttggataacacaaacaaccaaaaacttttagcatagaatagttgggttgagtgtgaaatagttgctctaatggggtgttattgtgcaagactggtgtgggcatacggttaatgagatatgtggttgttctaaaagcctcatcccagtatttgagtggaagagatgcttgagctaaaagtgttagaccggtttccactatgtgtctatgctttcgttctacaaccccattttgctcatgtgtgtgtgggcaagctagtttgtgaactatccctgaggtctcaagtagatttgtaaatgatctaaactcaccccccaatctgattgtatggcttttatcttagtccctaattgaagttcaatttgtgttttgaacttagtaaaagttggaagtgcctcatcttttgttcttaatagatagatccagttgtaccttgtgtatgcatctacaaagctaatgtagtatctatatccactagaggaattaatgggtgctggcccccatagatcagaatgcaagagctctaatggagcatgatattgagtagtggatctagaaaaaggtagcttatgtgttttgccaagacaacaagctttacacacatctgtaacatttttatttgaatagggtatattacatttggagagggccattgttacaactttggcagcaggatggccaagtctgctatgccacaaagaaaaaattgaattatttctatctgttacatgtgtgtgacattgaacataggtagacttgactggactttggttgcacaggattccttggtaatagatttgggcacattgtagggaggtgtaggttagaaacttgtagagcccttgctcaaggttc

SEQ ID NO: 314187 - DNA, 1040 bp, Cannabis indica
agagagtacaaaagagagtctccttagcactcctcaactgtgaaacatgcttttcctttacattcaccatgatcaggtttcttacagctaggacattttaggaaagtataagggccttcaaagtcacccaactgatttccttgaacatattttcctctagacgtattgtatggtgactttgtccgattatcagcaacaaaccgtcgcgctggaaacattaaggtaggaacaacgggcaccagaggaagaggtgcagcaaaagaatcttactgccacaacctctaaatttcctcactttgcctttgaattttatcttttttgcaaaccttcactcccagcattgcgaattttatggtaaattaacataactttctctaagagccctccaatggcttctaatttgattatgagtgtaagggggaattctaatctctccaaccaccattagccttgaccatggtgtcttgacttcttatattgtgctaggtgtccattctataagacaaacctgccaattcataagttagtctggtcaagcagcggtctaagttataatcgtactaccgcatacatggaattttaggcaatgaactattcaactatcatattactaacatgcttcctatcatgcttttctaatcacataaattactaaacaagtaaagacttactatactgtaagttaagcttgaatctgatgatgattgtacatatcttggcggtctttagtaaacaatttagcagctctgacaccaaattataacgccttacataggcatgctacattgattttgtaattactgtgcacattttgcttatcaaagggtttctaaaaaaacgtgacaaattaaaattttaaaatttaaacttaaactttaataaatacataactgtacataatgtttgggatcccatttaaaagtctaaaacaacgtacaaaatatgtttttacaaaagtgtcgcaccgcgactacaaaatgcaagcccatgttctcccgaaaccaaacactccaagcttatccatcttgatatgtacaatc

SEQ ID NO: 314188 - DNA, 505 bp, Cannabis indica
gtcgaattatctcggtttggtttaggtggactgttcgggttgggcagtttacaaaatttatgtatagccatactagaaatacccctaggcatctcctcctaaaccatatcactatcaaatataccagtgataataatcttccatttccgaccagtcgcactctgatggaaggacccaaattttttatccccaagtttcatctaggaatttttttccttgaagccaaagacttcttatccttgtaaagaaggacatcaagctctttctccttcttttcttttgatactcgacccaagaagaattatccaacgacacatcaagaacaactagctatgaattcttcttcttaatttcccctttagtctgtttataaacttttccattccattcatcaaggactagagacacacgtttaatgttagcttcttaatttcacctttgtctgtaatactttaagtttctaattaaataagcaaattttaattaatcacgttttttcgttaat

SEQ ID NO: 314189 - DNA, 930 bp, Cannabis indica
tattatatagagcattgctataaggcaccagtggtgcctagcaccttctcgacatgtcacattacgattagttagcgatactctctaaaaactactatattaaattatatgggagtcgatacttaattggactaatagcgatactgacacatagaagggtgctagacaccactggtgccctttagcatttctctattatatataatccaatataattaatcaatgtgtatataattaatatttgattgaaaattctgtggttggttttaatcatttcatattgcaaaaattatatgtagatcttcagttaactttttctttttacaggcttttcatctcattataatttcaataatgcatatattcatattttctcaagtattttttttattattaataaaaataaaaattattgacctagatttttgacaactattaaataaatattaatatagataattaggaaagatagataaaaaaaaaattacgtcgttctagtattaatgaactgtagtatacgagtaacttttatttatagtgtgaatgttctcttaattacaaaatatttaagttacagtatgagagctcacttttgtatgtgagtcttaaagtctattttcccattatttataagaaaaagaagagttaagggagaaaaaatgtacatctatcttcggtctctaggtactacttagcctccgtggtaggagtttgatgagcaagatttgtcccatgtgcggttaatgtgaatgggtcgtcaaaacagtataagtttgtaatgatgataatcatgcgtcccagtaatcatgtacaatgatctgttttttaatttgcgtaaaaagaagtctaattttagtaaaacaaaaataaagttgcattgtaaatattataattaaagggcttaactgttaaaatgtgacagtcagtagt

SEQ ID NO: 314190 - DNA, 792 bp, Cannabis indica
caaggttggtgcctcgccttgtactaatacgtggcaaggttggtgcctcgccttgtactaatgatgtcatccatgtgatcatgtctctgacgcgaaatggtttctcgtcaatacgtgaattagtagttcatacatccttgtctctcttacgactttataatcagcgagttgtaaatatactctactagttcagtatttaataagttattctattttaacatctacaaatataattaatattttgctgattcgtattcttccaagttgacacgtgtccttctctgaagtgccagcagaatttcgggtataacagctggattgttgttatgttatgttatcgttgctattttgttatttttgttgcacacatgcattttatttattgtttgtgtttaaatagagttattaatatttggttaataaacgtaatatttttttgaatgttttgtaattctgagttaatctatgaataatatgcatattggaacgaggtggacgtcttattatttttctattgctttgtagttgtcttcttatttttttataattatttttatgttgttgtttatgtgttctatagttatttttatgtgtcattttggttatacagttaatttttacttgccttttaatttaagtgcatttgttatgatatatatttttagttaattcttcacaattgctttgttgtatttattttgttatttttatgttgtgctttagttgtttaaagtggtttttagaatatttttttttatttctacaattatcttttagttttttttttattat

SEQ ID NO: 314191 - DNA, 1117 bp, Cannabis indica
attaatcacgttttttcgttaattttgtttattagcaacgaactgcatagtacgtttaaaatcacgctaacacgcttaaattagttagggtgttacaataacgtatcgtcactgcagtagaatttaatcactaagtttaggatagattagtgtggttcttcaacgcctaagacaccagaatatcaaaccatgaacgagggagtcccactcccttagaacactaactgagatgttaatatagaaaaaattacaaactagtaaaagtgcaaagatagaaatattttaaagtttccaaacagttggacattgtttccttgaaaaagcattcactaacatcagagcatcagtgagcacaacaggatagccttgatctccccctccatagcagagctagcagccttttagagttatgtcgcccattgattgtaggtcatgtccctatcttgttgaaattccaaaaaaaaaacattgatcactttactaacctcctttgcatttgtacaatgaccctcaataagcacttgattttattggtgccaacttccagagattcttccagtcccagaattccaaataagtcatgaaaccaaatgatcttggtgtaagcacattacctgaaaagatgtataggagttctatatcttaatgacatagaaaacaatcattttcctggacaaattgtaaattatctttggttggaagagcttcatgtaaaatctgccaaagcatcatccctatctttagatgaaatgtcgattttcggacaagtttttcttctccaaagcggtgtttttggtaatcaaagtaagctgactttacaaagaaaattccaccttccttactcttcccaacaagactatcctccttgtttagtgataaacgaggtatgttgcttatcctttcacccaaagtttcttcaaaaatgttgcaagagagaaatcaaccactgtcctaatcaaaagagctcttgttcgacaactttccatttgttcacgaaaattggaggtgaatcctttaggattgacctccaaaagtttattatgggcatcacatcgcaagatttgataaccaatcaattaaggttatgtgacatggttttgtttggtttttttttttt

SEQ ID NO: 314192 - DNA, 1291 bp, Cannabis indica
tccaacattgttggactagaaaagtgggagaggaggttatatataatcaattaatattatttgttaaatttttgttttaattagggagttttctagtccaatattattagactagaaaaaatatataatgtccaatttagctaaacttaactcatttttcaataaaataaataaataaataaataaaattgggtcatggaattcggacattacatttacagctgcatatcttaatttttatttatttatttattttttgcttaatattctctctcatttaaaactaaaaaccctaatatttccataaccagccgctcctgtcaaaatctcttcacaggttaaaaaaaaccatcgcagcaataatagatcggacaagagcaagccccaaacgaaaccacgaatctcgtcgtcagcctcgaaaaattccattctcctccattcgtgatggtttctcttccgacggaggttagctacgccggtcgtggactccaaacgaaacctctcacgctctctccgtcattctctcagcccaccctaatgcatctccgccttccattgctttatctccatcggcttcatctagcaaggagtatctcgacgatgacgatggaggcaaatcaaagcacgacaaggaagccaccgtcatccgcccacaccgagaccaacaagatcgtccgctgccaccgtccgccgcccaaagttaattcgtttgaaatcatgctacttatttcttatgtatttattttttgacctattatgacagataactcagattacttgtgaggaagctatttcatgctatattgcttcataagaatttctaaaggaccgcatccttatgcaaattggttaattataccaattaggctctgtaaaaaaactctcaatatgaggagagtttagttttggtgcttctctgggtttcacaaggctgctacaccttgctccctagcatcgagagatgatgttgatcaattgccttccattccaggcaagttttgtgagatagcttgtgttaaagctaggattttcattatggctggattgttgcacttcttcaagacactaatgagacttagatttctgtaactgaaacataaaaagccagaactaatactgtggcttaatggatggagtgacaacaaaaggtttttttttttattattaccgaaatcttttgtcacaactcatcattcatatagaatttgttttgctgtactttcaatttctgcaaattatatgtacatgtagagtaaaaaaaatcttttgcattcttagtgcccttcatttg

SEQ ID NO: 314193 - DNA, 1202 bp, Cannabis indica
agtaaatctagatcctgattaaataattccaacataaacttccatgttacgcccgatctggtccttgaccatcttgttaactaacctctggtaggtagcctgagcattctttaggccaaatggcataactttgttgcagtatagactaacatcttttcaaaaactagtgtgctcttggtcaggtggatgcatttttatctaattatactccaaataggtatccataaagcttaggatttcatgaccgactatattgcatccacgagttgatcgattcctgaaagtggaaaatagtctttagggcatgtcttgttgaggttagtgaaattaatgcatactcaccattttttgttcatcttgggtactagtacggggtaagctacccaagctgggttggaaggcttcaattatgaatctatttatgcgaatcctttctacctcttcttttagtgtttgtgcacgttctttttctgttattcttcgtttctgctagacgggataaaagtttggatcaatgttcagggcatgagacattatagttggattttatcgaccatgtcttcatgcaaccaggccaaaatattgaggtttgctcttacaaattttatcaatgctaattttatttcaagcaatagacctttgccgattttgagcttcctggtcagcatggtgggatcaatttcaactccttctagtttttccactagtccaacatttatgttaggttccccaaggcagggatccatatcttcatccccgccttgggtaaattcctattgggtgatgcttttaccattctctgaactttggccagagctttcttcatttttggccttagatagagcaatattataacattcttacccatttttacgatttccttttaaatagcccactctatttgtcgttggaaattttacacataggtgaactactgaagtgatggccttcaggtcatataaggctagtcggtctagcatggcattaaaggtagaaggcacaacgatcacgaaaatttgagccataaccattgtgcttgtattgtccctgtaagtggtaggcagatctgtctgagtggagcaacgctttgaccatagaatctgtacactagctaagtgtagggaaccaaatctttgaggtgaagctccatctattcatatgttgttttgaacaaaatatttgaggaagctccattatcaacc

SEQ ID NO: 314194 - DNA, 1552 bp, Cannabis indica
tggtctttttcactatgaattcattcactatttataggaagacggtttattacaattggcttcaaaaaagaagtgatcagaaagtaaatatatatccctatattctagggtgcaattacgatctattgaaactcttacaatctcgggtagattagtcggatctgcatttgtaggatataattagaaatatttgtggaagttgttaaagaagaaatcaaggcttgcatgtagctttgtctagcattcttggcatcgtttctcttggccggtatattgaccacccggctagacccttttcgagacttccttcttgtgggattattacttgtgaaacattcttgcagggtgcatcaatctttcctcctttggccggcatgttgatggcccatctagatgcttcttggaaggcaatttacagtccatggacagacacattttttcctggaagtaccttgtcatattaagggtcggctagattatgcaacgtataagtgctacgtcagatgtgcaaactttgggatgatatttgcccccgaagtctccgtgcgaccatctgttcggatagggacttttgatacctgtacagatgctgacatgtacgtgtgctacatgtgatcgatattctggcaattattctatgcagaagtgaacagtcagatttttcagtctcttcgattgcattaggtgtcagctgtcataatggcagtttcaaataacgctttatgtgggatagtgatgacaactgcactcccatataaatgtatgttttgctcctcccactttcccatagcgactttatagggaatgaattttccatttaattttttgggaaaaattaaacatgagagccctatataaagtcctctcttcttctctaatctctttactttcattttttttactcaagaaaaagttttagagagaaaaactcaagaaaactcaaggtttttagccaagctcttcaaaaaacccgacctcctttgtgcagcaagaaaccagtagccttccttcaaccgtccaggccttggctaggctccgtccagtgagtaagctttttaaaactattatttttctttaaaatattctttatttttgtttctacaccattgttagaggtaaaaacccccatgccaagaacttaggaatacgtatccctcataggttgtacgggcatgttagggtagataaatgtaaggattttgccttaaaaaaagctgagttttcctctatttttcatatcttgaatcatgggttttgaagaacacaaagaacttggttttcatggtttctttttgtagaatatgctatttagatctgttaataatcctagtcgacctatgcgagatgtttttactctggtcgactaattagatattgtccatgtggtttttattttgtctagatgttcaccaccctcttcccttttacaaagatgaacccacgcgactactgggaggtgaacactggatggacacaaatttcctcagccttctctacaaggatcagcccatactccgggcaagtagttcatcatctagtgattctccggcca

SEQ ID NO: 314195 - DNA, 972 bp, Cannabis indica
taagtttattttattacacttttaccacttgcacacataatcttgtgggtatgtctggaaattattcatggcggaagtaacccagaagactccaactgctctaccgtgagacccattttcggtgaaatccactgccatcgccgccgtcgcagcatgtgggtcgggaaatccactgccatcgatcgaattctttgacttcttcatctggaccgttctcagtttccgctcccaaattcccaatatttggtcagacaatcgaattggtcagtcctcgccactgcaagggttccagaccattgtcagcttcttctagcaaagatctccccatttctataaagctgagaggattgaattcggccgaaaatgcgcgcgtgaggaatcccggtcctgaaagaaccagatcgatagccttttggaagatggcttgggaaattgttggttggcttaaaatgggtgagaatgatttggagatgaaattgaatgggatcaatgtaagtctaactaatgctttaatcactttgattttgcagttattgaattctgagaaaatttctgctttgcatttttataactggattaaaaattcgaaacctgctcttggtcgtaattatgacgtttgcagtttaatagttgataattgtggaaggttaaactattacgagacaatgacttgtactttgaatgagtttaatgaaaaaggaattcgcttgactcaaaatgcattccggttcataccggagttggcctcagatggggattctctcaagaattacgtgagtgaagttgtaatgatattgaatggagttggtggaatgtgtcgatcatctggagttggagttttgggtggggaaattctttttcttttcttgtagttaagtaatgtactctttctcactccttagctttattataggttgtatacagttgtttagtagttttattatagttttgctacttgcatatgttatttca

SEQ ID NO: 314196 - DNA, 477 bp, Cannabis indica
aattagtcatttaattccgctgcaaccactgtgatttctcataccttttatgtgtttattttcatcattttagaaattcatattagaatgttaaaaacatacttgttagtaaatcttgatcctggtataattccaacatatctcataaaaaattgtcgtgacatttctaaccactgcatcaaatttccatggccgccgaactcgaaaatatttgtattcaaaaattatatatacaataccaacataatttgataaaatctctacaattaataaattacactttatttatccattaactcaattttacactagtcaactcatagttagcttaagtaaggctaatcttactccactatccatataatcacatatttcataaaatatgcccaattaaatattgttatattttttaagttattacaactatcccctccttatagaatttcgtccttgaaatttacctgaacaactccggat

SEQ ID NO: 314197 - DNA, 1098 bp, Cannabis indica
tgacctcctgagaagtttttctaaaaagcatgagagtgagcaaaaagcatgctagaaacactcgtattggtctgtagggtcagtcgtcaatccaagaagcagctagagtggcgtatttgtatataagagcaactatttcgtgggtgtaaggaatcaatagaggcttgaagcgggaacattgtaataattgtgtaatatttttacttttttagtatatacccgaaaaaatctcgtagatcggtaaggtaactaattaatatatggagatttcgaaagattattttcccgtgggcttaatcagacaattgaaaagaattcaaggacctttggtgcaataaacctaaatagaaaaaattattataaaacaacaataataaaaaagaatagtaccatcaaccatgatagaaattaaaatagcacattatgtaaacgtttgagagagtagaaaaggggttggaaacaatggatggttacaaatagttgtcattttgcatcaaaaagggcatcttattgattgtcttttaagaaaataaacaaaaaccaaccacagcccatcccaaaagaatccttatctcttttcattggcttcaatcaataaatatgatatggacacgtgtcactcacacaatatgaaagaatcttacaacaagaatcctagctcgaggtgtgaatttcagggaaattaaaatatgagagaattgacgattgtaaaatgaatgatctaatcacttgccacgtgtctgtttttggttggtgaggataacacatatttgttttttttatatgaaattataaaaaagaaaagcaataaagagtggaaggaagaaatgtaacgaaaccaaatatgtcattgtcattattggatattattattattattatcaatgtaacaaatcaacagttactaacagtgcaccaaaactattgctttcttatcaatggaatctttcacatcacaaacgtaacaaatttgcttttttttttttttttgagtttctattttctataattgtatttttttactaggaataactgcattcttatttatgggagaacattgtcctacaagaacatgggttactccactcattaccaatt

SEQ ID NO: 314198 - DNA, 1728 bp, Cannabis indica
atttattagtgttgttttacaattgttttcccatgattatttatatgaggtcgattttactattttttgctcaacctcaccagaattaatggttattttctagctcttttggtgtatactgtggtggttctggttgtgggtgtcgaagattaaaagctcatattttttttttagtgtttacagtataaaagaaaagaaaaaaaaaagacagtataaatataatttctgtcatacgtacaattaaaatattttatccaaaatgcaccacttttgcaaaaaccactaaaaattaagtcaatttatgtctttagcttaaccttcttttatatttttctttttatttattttattttgtatttgtttctcttctaatataaaagacccaatttttattgaggaaattatattatatatcctctttactttatatgttttaatttttaccttcatttttatattcttcaaaatatacatatttttatagatgatgtctccattatacctttaggttaatgtgaattatgtgttagagttaagtaaatgatgatggtgtattgagcaattcagtcacaaaggtagatatattttaataaaatattgtaacgtccccgcttcaagtctctattgtcccaggccaagcacgcttaaccgtgaagttcttttgtgatgggctaccgaaaaacaagatacaccttgttgatataggtagtaccaatcaatccatttaagtcttcttcaattgtgtagtcccacagtttccctttacggatcagtgactgtcacaaatataatttaaaagtatttttgattaataaataaataaaaacatattcctcaatttatttcatttttatttttatcaataactaaatttcttttctggatagcggaacaaatacgggtgtgtgtcgaaacaacatttaaggtggtgttgtacaaatttttttcaaaaatataaccaaccaatactaatctaatgagaagttggacatttgctacttttggtgaagaaaaaaagtacttaatttcaataaatgcaataatattgtaactataattttcctttaaaaatatgagtatttatagtgagtcaaatgggggaccaaccaaatgatttcataggaaagtcccaatcaattgaatcatgacatgtgtccgtcactgctgatatcataataaactattcaacgtgtaaggtcaaaaagcgaatacagtgtttgagtattttgatacccatacataccatacgcggctaagatacatacacaacacaacacctgcgtgagaagaatcctacgccaactttaagcctattatgttcatacgtcataccatcaatcatttttcttttctacaaaaatgttatttgaagaaatctcaaatttcaaccgacatattatgtttttttttttattaagttttggctttgtataattggtgggtacttatacccactgtgctagcaggttggtaaatacaacttaaatattagtaatttttcacatgctctgaatttttttagtcgttaaaaattctcccgaactattgagattgttaaatttaaggatttttgtctaattttatttaattttactatttcagtgattgtttatgtaccaaatcatgctccccagactttgatatctaccaaatcatacctcccaaattttgatatgtactaaatcatggttcttaaattttcatccatattagaaattttttactaaa

SEQ ID NO: 314199 - DNA, 1294 bp, Cannabis indica
gttagtttggaaccaattttcaatacttaagtattatcaaaagaatcaataggtacctcgattgtttcttccgtagcttgtgtagtattaatatagtcgaggattttgggatccaaattaggtttttccacgtgcggtatctcctcaatactaaaaacttcatgtcaaggaggaggagcttcgagcaaatatataacatttactgatttttttcttttctacgagtttcaatgttgtattataacattccattgagtctgactagactcctcgcactgatcctacacctacgggggcagggaatttcatagtgagatggtaaattgacgtgactatcttcatttctttcaagatggagcaacttataactacattatacgtagaatgttgattgattaccgcaaaattggccatcgatttggcagtaacaggggcaattcctaaagttataggtaatttgatcattcattttaatgcgattgtatctccagtgaaatcatagatacttgaagtcactggtcacaaatttttttcgtgtaaccccatttgtttgaaagcttgatagttaagaaggttgacggagcttccattgtccaccagaacacgatgtacattatcctctccaatgtttgtgactatcagtagtgtatcggcgcggggatgatgtacccatatggcatcactttctatgaaggtgatatcatcgcactcctttttgaacaatttctctggtcattcactcagattgttcacgttggtgaggggtttttcttttgcctccttggcatagcgctcttgtgcttttctagattctccaccaacatgtgggccttcaataatagtcaaaatgttgtgagggagccgagaaccactcgcattatttgtgttgtcgttttcatccgcttggggatgactttctccgttctttttgtatttattaaatttcccttgtctaatcaattcttcaatttcatcttgaaggaaccagcactctagggttgtatggctaatatctgtatgatatttaaaaaacttcttgggatctcttttttaacgatttcctctaattggtggaggttttctaaatacactgttctgttcctcgatcgtataaatgtgatcgcgtggagcaaacagctctatatagttgataaaatactgacccccttttctcttcggcgatgtcttcttcttggagggagacttagcgagttttggactttgtcgcctctgggggctgcctcttctaaggctttgtccttgggcatttcttgttggaatttattttatcagg

SEQ ID NO: 314200 - DNA, 758 bp, Cannabis indica
gggcattgttgtttgacagtcaacgggttggaagaccgtgaaattggacacagaatctaacaacctcaaactcagcaattcgcacctccccttccagcggccagggctttagattcaaaataactccgttcacaatccagggtctattttccatgacaaagttgcaatcttcctcttcctcaaaaaagaaacccatcacgccatcttcgcatttcttcattctccaaggtcccaatctacgccagactccagagaggatttttttgaccaccgatgtcggcatatccttgcatcctatcacctttcccacgcaggccttgtttgaaactacttcttccaacgttatatcctcaaaaagctccaacatttccaactcgagttcactatcacgctgtagagttttattcatttcatcatcaaccgcttcaatgtggatatccctttccatcatggaacagcaaaccaaagaacaaacaagagattcaatagcagtagtagaaaatagtcgtagctaggaatgaaatcctttgtctacttggacaagactctacagaaaggagccatagtgagacagttccaaagcttcatctttttaagtaagttgatctaaaaaaatcagttagggaagtagtactgccaaacaaaaaaattgaagggcttgttgaaacattggaagagcctcttgaaatattaggaaaaagaactaaatggaaaatccaattcttttggtcattgattgtcctgtaattttatcttag

SEQ ID NO: 314201 - DNA, 972 bp, Cannabis indica
ttcgtaattttgacctgagaagggtaaaactgtaaatttaatttaattgcatgcttatgtactatattatcatacagtatacttgttgtgtccttttgtaggtattttctgagaagtttgcacagtacagtcacaatcgagtattttgggtcgaaccgagttcgggccaaaatatatttttgtgattttatattggcattttattattgaataaatattctgaattttttttgagtaaatgtgtggtgtaataatgaaaatttttcccatggatgaattatatgtggtgttatggccctatgggcattttggtttgtttaaccctttaattctatttaaaacaaaatgtgatatttgataattatgaaacatattttctgagttgttttcctctagccctaaactgaacccccctctcctctttcacctatcttctaaaaagtttagactttgttgtttgttcttgaagttggaggtattttggagttgaatctcttgtgggtaggagcttggatttgtggtaagctcctaaagttttcttgctgaactttcttttcagatttgtcgtagtttgaaaagcatgctctattcttaattttgatcttgaatgcatgtgtaaagaatggaagtaaattgataactatttagttgtttgaacttgttaaattaagaattattttttagggttgttttcagagttagaaatctaattttggctctgattattgttgtttggatgttggtaaagtatgttgtggtattcaagttcttgatagtgagattgtgaggaattttgctcaagtgttgggcttatcttgattagtgttatcttgagtttgggatgtatgtttacatgagaatgaagcttgaaattaagtgttttaatgccctgccatgattttgtaggtttaggataatttgacctaagtttgaattgaggtgatgtttggttcattgtaatggtaatcgtaa

SEQ ID NO: 314202 - DNA, 1219 bp, Cannabis indica
cttaaagatccctaaaggtaattttactgaaaaaaaatattttatattttgaaccatcactaatttttaattttctagatcactaaattagtttttcttaatttttttatctataggttattattatctggtggatggtggatatactagtggtgaaggattcttagcaccttatagaggaattgcgtaccatttatctgagtggggtagaaacgtacttagaaatcacgaggagtactgtaatatgaaacatgcatgtgcaagaaatgtcattgagagatgttttgaattgcttaagattagatggtcaatcttgagaagcacgtcatttttcccaataacgacacagtgtcgaataattacaacgtgttgtattttgcataatttgattcagcgagaaatgtctctagatccagcaaaaattgagcttgatagacaagtagatgttgcagaagatactaatcagacaattaatgaaggttatgaaataactgatactgttgaagcttcaactcaatggacggaatggagaaataatttagctatgcagatgtataatgaatggagattgcatagaggactttagtggtagaggttcttagtctttcatgtatggacaaactttgcttacttattgtttgtattagacacattaatttgaatgtattcttacttgcttttttattgtcgtttagctttctttgtattggatgcattgatccgagttattcaactttgttttgtcggataaatgtttggatgatttttattcttaccattgtttgaattagacacattaatttgagatgtacatgcagaatttattaatatcttgacattttaaaatgaggaatacaggtgaatatggatattggaggtagtagtgaccaagtttatagcgataaaagttctaggcgtacgtggagtaaatttgaagaggatgcattgctgaatgttcttgaagaagttctggtgaaaggcggtaatagatgtgataatggaactgttagacccgggacatggaaggagatagaaaaggcattgaatgtcttgattcccagcagtggtataagagctagtccacacattgagaacaaatatcgaatgttgaagaaacaatatagtatagtcttcgacatggtcaacactagtggcttttcttggaacgatgtaaaaaaatgtgtgcaggttgatagtgatgaggcttggttgacttata

SEQ ID NO: 314203 - DNA, 1595 bp, Cannabis indica
tatgtgacaatgacacacaagtcccattactattttattagccacattggataaaacttattagaagtcttatatttgtgacatagttcaaagggaatagtaaataaattcaaaagaggatttgataatcgtattaatttgagggacaaatcctacacatagcctttaaattaatataagaaatagaatacacttatacaacccgtatataataatacacatctatttatgtacattgaggtaaactaaactaactatatttctttaataactaaatttaatttttataaattatatatatattaaaaataattccccaaaatattagggggggccatggccaccccataccataacatagttccgccactgaatattatttatttaacctaagatatatctatcacatcttattttatgaaccccacgtgcattttagattctctcttacctaacttatattgccatgaaaaaagataagtagttaagaattttggagcttttggaaaactatgcacataggattttataggaatttttttatagttgagcatgtttttgatcccaccactaaaagtgtgtttaattttgaatgatttattattatacccaaaataaaatttagaataacttattttataatgtatgtataaaataagatttaatattatctgtttttaggtttttaattggcacatgaattgattattatcctatttgttttttttaagatgatgatgagcaatgtaattatttagatcttctcacaaattttaagaaatgttgaagaatttactttatcataaataaaaaataaattattttgaagtttgttttatatatgtgtgaaataaaatattttaaaatttatttttaaattataaattatttaaaattttataaaaattagagaataaacctaaataactataatatacactcttatatatataaaatgatatgtccatacaatacatgctccaatatgttacacacaatgacgtgccaatatttcttcagtcaatcatatattaaaagacaagatctggctggatagttttatgggtcgagtgcaatcggacatagctaaacaagtgtgtgttagagaggcgttgagttgggttaaggctaacaactgaagttcgtttattttggatatattttgtttgaaagttgttcatgctttgagtaatcccttattggagttttttcattttgactgtaagcatttattaaatttatgttatgtgaagattgtttttgttaaacgataaactaacaaagtgactgtaacgtcacttgcttcaagttttcattgggcacttacgcacacatgaaatgatggctcttttacacgagtatgtcactctggttgcttaccctacaaaccaacatgagtgcttctagcgtgctttgtcctcattcgcatacttcctgggaaaacttcccaggaggtcacccatcgtaaaattatccaagacaagcacgcttaactgtgaaattctttcgtgttggctgggctatcgaaaaacaagatgcaccttgttgatataggtagtaccaatcaatccatttaagctctcttcaactgtgta

SEQ ID NO: 314204 - DNA, 1301 bp, Cannabis indica
aatagaattttatttagggcacaaagcccaaaaatactatggtcacacaagtccaccgagaatatagccactgggaaaacacctgccaccattacaaattccatagaagtatgaaaagtagccctggaaagcccctcgaggagcacctagcgcctaggtcgacatatgacttggtgcgctaagttttgcttatccgatttcagttctatctcgagcttttgattattattctgttgtaaatgagaggtctgacttgtggcaagtcaaattcacacattgatatttcacctttttggcaaagtgaaatattggaaaattagccgcaaatcaaaacttttgagtctacccaattttgaggaaaagtgacattttcgggaactggtgagcgacttcatcactagattgaagaaattgactaagtaatctcaaatatcactaaggcatcaaaaatagaagtctgacatattttcccactcatacagcgtccaggttgacgtcagcatgtcaatctgggcgctaggtgtcaaccttggcattgggtgctgaacaaccttcagtaaaatggccataactcccacaatattgacaggattgacgtgattcaacttttgttttaaagctatttcaaaacccttccaattcatgtttcacactcatatcacaattctaaagatttcaagttgaaatttcatcctcaagtcaagtgcaatttttttcccaaactacccagaaacgatccaatagacacgatttgagctccgaaaattgacaatttttatctatagtgaattatagccattaaattgtcatcagtagccaagatcagtccaaattaattttctcatattttttgtattatataattattatttgaatggacctcctttcctataaacggagagcttcactagctttttttttttatattctgaaaagtccccattattatcaaatttaataattttttatcaattttttttttagaaattattacataaaaaatataaattgacactttatttacaaaaatacctccataaggtgtggacaacatttatacctattatgtaattttaattaccaaaataccacttacactatcacttacacaatcagacgatggttgcagggtagttgctgcatggttgcacggtagttgtatcagacgatagttgcagggtggttggtcgaaggttgcatcaacgaagttttcaatcagacgaaaattcctaagtgattgctggatggttagtcgaaggttgtatcagacgaaataactattagcaaaatatttatgcaac

SEQ ID NO: 314205 - DNA, 1843 bp, Cannabis indica
agactataaattaccttagtaaacctgctattgcataggaattaatattaggaaaataatcatattagaccatattcaataaaaacaattgacatcgacaccctagtttattaactattaattttctcgaattgttgcttccaactactttcttatactttattgtttgtttttctatcttttatttaatcaaatagaagtaaaggtttaatttcaaagtacttaactacactccctgcgggatcgacctcactcctagtgagtatactacttgaaacgatacgtacacttgcgtgtgctaaatatcgcaacaaaatgatatactttaacaacttctaaaaatagttataatgtcaaaaatagaatttaaataacagcttaatataaatataagaaaaaataatcatgcgtgtttagagacgaagttagaaaataaaataaagtgaggcgaatatgctatattaattaaatttgtaaaaatattaataaaaagaattaatttttttttttaaaaaaagcatatatctaatttatagaagagctgctttgattttttcaatggacaaataattttgaattttatattttacaaaagttaccgattaaattactctttttgttaaataacaatttaaattctaatcaaaatagaacataataataccatgaggttgatgtgttataactaaggtggttatattttttgcacacatttgtgttaaaaattgactttaggtatgttatatttagtcatattaagaaaaatttgataaaaattgtgctaaaagaatagaagaagtaattggtaaattttgtaaaatgtgggatctaaaataatatttactcattttatttagtgttataattaaaacagtttcaatagacaatagatataaatttgcataagataaattcatattacccattatatatatgttataaatatttatatgagtaatttacgacataaaacttaagtttaatttctagttgtaaataaatattttcgtttaatttttggcagtaataatacctaagttataattctgaagcttctatatgtacttagctattaagtgttaagtaaattgcatgtagcaatccctgattggttcaggttattaaatttttattttttatttaaaaattaatttaaatatatcaataagaaaatgacacgtggataatggcttgacatttaacggtcaagtacctatgtatgttctagaaatataactcaagtctgattactgtcaaaaaataaacttaagtatttatctacaatcgaaagttgaacttaagtatttacgccgtaaattattctatttatatatgtgtgtatatatatatatatctatatatatatgagtgaagaagaaaaatagttgaggcagaggcaactacctcacctaggctaaagtagcttcgtcaatgtgcgtgcttattttccacgctgtaaagtattcataattttttaaaagtttataagtgatcctaaatcactacaacgtgcacaaatatgaaaaaaaaattagacccaaaaaatctactatctcgaaatagataataagtatcctagaagagtcctttttttcagagtgtaaaatagaattgcccataattagtattctttttttgttttgtaacaatattaataaatattcttgaaaaaatttacaacactctaaatggttattttagtacactttttttttttagatttgatccacatactctgtccacattagcactctcattggtaaggctgagcatcggtcggttttttctatataaaaatccaaaattcaattttcggtttggattggtgcaatccgaaaactga

SEQ ID NO: 314206 - DNA, 955 bp, Cannabis indica
ttgttgttgttgttgttgcagaaagaaattcaacaatagatttgggattacagagttcctcctccaatgagactcctacaaactagggctcttctccttcaaaaactaatttcttaacttagtttaattttgttttatcttttactatttttttctataattagtctttcatttaccgcttataaattataaccacatacattagttaataattattttccaattaatgaaacaaactaactaattgccaattggtcaatgtagattcaattaaataaaattgtatagttaatttttttgttatttttaatgaaaaaaatggtgtaatagtatagcaagctaaagtaaccataataaccatcatgcaattctacctgtttataaggaaaatatcaaatgattttttttagggaaataattacctatatactatttttcaattttttatttttcaaatttacggtttggatttatagagtgttttcagggctagttgcaatacgagtttctataaagaatttcataaaaatacaaaaaaaaaaattattttaaagtgtaaaaatgaaaaaattcatttttttaattacattgttattatattaaccacttatttatctaaaaaaaatcacttataaaattgtgtatttatcttacattacttatataacaagtcataatcccatggtataattttgataattgaatcaatgctatagtgtgtttgaaatttatcaaaaaaaaaaaccacttaaatctttttttttctctaaattaacttattttgctagaaaaaaaaacagactaaagatttgaaacaagaaaaaacagaccgtgaaacagagaaaacatccttattttatttcttttggtaacataggggtgtttggtagtgaggtattcaaaataatttgattataggaatatatgaagagaatatgattatagagaaatgtgt

SEQ ID NO: 314207 - DNA, 550 bp, Cannabis indica
tgtacgtatatttaaaacagtaatatgcgcactcacaaagtcactatctaacattataatagacgaacgtacgtacatttctaattgatcaacagccagttttgcaaccatggcctcatgataaatttgttgtagaacgctaattaacgagccttcactctctttgctgcctataaatatgacaagcccacttgtaaataaatatttaatacgattttctatccatgcccaaataatactaaaatctcaagaaaattcaaacatttcaaattcttacccttattaaataccaataattagagtacgtaggtcttataaatggtcgtaccactataaattaatattgttatatatattttttaaaaaaaccattcactcttattattttacaaaaataataattaattaaatatccaatcaacatattctttacgctacatagatgggtgcatgaagttttcatatttcctaataattaattgtatttctttgaaaattaatgcacctaatatatcacctcggttttttttttttttttttaggggggggg

SEQ ID NO: 314208 - DNA, 843 bp, Cannabis indica
aagtcactcaggtatatttcttctaactaaatttctattagaactgtaatttcttgaattgtaactataatctgtttaaattactttcttaggatcctcttactgaaaagaaaaggaagggtcatcccccaagaagaatccagaccctaaaaatgtgaagagaaacaaacggagaatgaaacaaatggcaagagaagctagttcatcccaacaaccacctaatgtcttgtagtgatcatgctaatacatatgttttatggttgttatgattgttacattttattttggtgaagtacaatgttaagttgggtatggttgcgttggttaaagggcttttgtattggacttttcttttttgaagtacaatgttattttggtgaagtacaatgttaagctgggcatgtgatttcattttttgtacatgatgttgtggtggatgtttagaaatgatgaataaatatatgaatttgtttaagttaaaaaaattgtttattattgatctaaaaaattaagtattgaaatgttattttttaacaggttaaattagaaaacggactcttttgtactggcatggagcagtaaaaccttggatctttaactggtttttgagcaatggaattcttatagcaaagtagttcaaatagaatattaaaacagtagttcatcattgataaattattggttttcaactgtattttgtaacgtccccgcttcaagcctccattgggtccttacacccacggaatgaatgactcttatacacgagtacgtcactttggctgcttcatggactgatgactgaccctacagaccaacacgagtatttccagcgtgctttgtcct

SEQ ID NO: 314209 - DNA, 1571 bp, Cannabis indica
ataatattgaaatgggttttattttagggcataaaatcccaataatagaagccccatgcggcattcttccttgttggaatgaccttgaccgaatagagatactcgatttctactggtgtggggcattcctagttaagaattttatacaaaaccttcaaactagcgagaatcctgtaagagataggattcagttggaatggggaaatcccaaggtgatttatgtaatccttgaagtagtctcgaagagggagtatggccactgcactaatatgctccaggctccaagcgcccatgctagtcgagccactgatactagtctcaccactaggccttggggtactgcttgaaaagcgtgcaggaggaagcaactgaactcaccctttcgtactgacctaacttggcatgatcgctcaagttcaattccacaggtcttcagtatatcgcatgtgtagcctgagatagatcgcacctttgattctattaactcagcttcaaaggtgactctggggtcctgagaagtctttcatgtacgtggcttgggaggcattatttcaaaatccaagtcacctggttcaaaaacaatcatgacttcgggtaaaaacaaaggcttttccaaaagaataaaagataagctgggaggtactggccaggccgcatctcgtaagaattggcgtttgccttgggagatttcttacaagaaatgcttataacgactagcattatcttcctggtgagttcacacttcatattccctaaccctagcatcgttcaactctaatttggaggtggattttaaaggggtgggtttatatgggatggttgattccgtaggaaactcaagttctaaatcttttggacgataaattcctgaaccagagtgggacattgctgcaagcagaaagtggtcccaatccctggagagaattttatcaaacccgaaggtgatgagttggagattctgaaaaaacctacgtattgcttgaaccctagtatcaacctatatacagtttaaccctaaaaaactatcaaaaccaaatgagatggcaacaatacaaacaaattaagcagcaattaaacacaatgcaataagcatgtaaaggaggaaagcaacttactgtttgaagttagggcttggggcagtgaatggttattcggtctgcaaatctgcaagtgtagcaaggatcgctttgagaagatgaagtcggaggaaacttgtggaaaaaatgtcaaggacagggatggcactcaggcaaacttgatggtgattcttaacgaagaagcttaaaaatttctcagacttttgagaatggaggaaataattgaaaggtggttttttttttcttactttatactcatgatatcggcttcatcagatcaggaaaatatttgatcctacggatagaattcaaagtgaaagtagaaaagatggtcatttaatgctgatgtaccttgaaaccacacaatctccaaaattagaggacatgcgtcttttcaaaagggatcatgacaaaataccctttgtaatcattaaaagcactttttattaaaaagaacttttcaaggggcaattg

SEQ ID NO: 314210 - DNA, 2357 bp, Cannabis indica
caccaataccaccccaagaactggcgccactttaggcacttaaaatactggaactaccagtacccagtacactagagagattggtctgggcatcggggagccaccgatcggtgagcctctggtggcaattattgatgatgatactaaattgcacaatttgagaggagtagtatctcaaattcaaaatcatacaaatacgcttcatcacgatcaggcagacacctggttagccatgaacgtaacattcgcgcaacaaaaggggctctttcaggaatggatggatagacagactgaaagtttaggaagcaattgacgattggtctcgtcagaccatcgagctgataagacaatttaattagcaatctgggcgccaatcacgggagaatatcccccttgttagggaccccaacagggtaaaagatccttatagtggacctcaatatgggccggaagttctcccgacgacttacaccaaaaatacctagcaagtcggaccgtcaaattcgaggccacaaaatcctaacgtgggcctcacggaagatggctaggtattgccagggcattaccttgggcaaaatagctagaattttcgtccccagattgatattgcaaaccactctaatgaaggattttgtggacccatagccgtttatgaccaatacggacaaattcaatacttccaatatgttccatgtactccccactaacaaggtcggactacaactcaatgcagtcagtcattttcaagtaacaatgaagatggagcagatagtgcaacatgtgcccaacgacgtcgtgaccatcgagctcacaaagataatccaccaaacaatcctgatgctacaaggaggtcaccaggccagtcagttttcaatagaatggggactcaactaggcaatctcaggaatacttagaatcaaagaagagagcaaagagacagggtgactcccccaatgtttaaccaattaatgtggataattatgtgccagttgataacctaggggaaccacaagtgacaaaccgagccacagacatgtcaagttgatccaggggtgcaagcccaaattgatcatcttaagagcgttgtacaaagcctgacctgtcataactttcagtgatgaagatttcaaatatgtcatctattcgcacaatgatcccctcctagtggatgtacaaatcgcgaacaaaacagtggcacagaccatgattgacaatggagcttcatctaatatcttacaaaaatacttatgaaaaaatggggctttaactcaaagatttggttccttgcacgcagttagtctatggattctttggccaaagcatagcacctcttggaacatgtcgcttgccactcacggtaggaaaatctctagccaccacaacaattaaggctcgattcttggtggtagacgttccttttgcttttaatgttctgataggctgctcggccctatatgatttaaaggcagtaacttttgtatatcatttatgtgtcaaattcccaacgagaaatagagttggttgtatgagaggcaatcaaaggattggacgggaatgctacaaccatgctttgactaaggctaagaaagaagaaacatcctgccagaactcaagaaaaaggataagttattgctgaatagggatccgcccaaggcggggatgaggatgtggatccccgcttttggggaaccaagcacaagcattgggccggtagaagaattagaagaggtcgacatcgatctagatattccaactaggaaaatcaaaatcgatataggtttgttgctcgaaataaaatcaacattgataaaatttctaagagctaacctagatattttttcctagtcacatgaagacatggcaggaattgactcatctataacctcacatgcccttaatatagatcccaatccttgtcccttacagtagaaaagaaggttacttgacaaaaaacgagcacaaacattgaaggaagaggttgaaaagttctgcatgaacagattaatcgtcgaaggcttctttccgacctgggtagcaaaccccgtcctagtacctaaaccgaacaagaaatggcgggtatgcattgacttcacagacctcaataaggcatgtctaaaggattgttttccatttccaagaattgaccagctcgtgatgctgcggtcggtcaagagattctaagctttatggacgcctattcaaggtataatcaaataaggatgcatccacccgattaggaacacacaagcttctttacagatgttggtctgtactactataaagttatgttgttacggattaaaaaatgcaggggctacctactaaaggctagtcaacaagatgtttaaagaacagat

SEQ ID NO: 314211 - DNA, 666 bp, Cannabis indica
attatataaatatatagattgatcctattctggctattaagcttcatataattcattaataacactaattcattaatgaataataaggcgggattatggtatatccgagaaggattgaatgagttagggtttggtgaagaacatagacagttatggaagtcaaaaacttccttggttcagataagtattatcgttgctttgtaaaaggatttttcaagatctccacacttttaatagaattaaaaaaaaaagtcagtcgattatgtggattgattagtgtgaaatcagtcctcaaaagttgaagtagcggctaattacaactccagtgttaactttatcatcagatcaggaaaaagtttgtggtttttaatgatacatccaaatagagtttggagtgtgttccgatgtaagccaacaaggtcattgcttatacttctcgtcaattagaagagtatgagcgatgttactcatcatatgattttaaactcactacagtgatgtttgcactgaagatttgaatatgacgccagacggtggttagagttagtgtaacgccctaaataattaggcacgctaccaaataaacttatgaaacccttatcccctaatcgggattactagtaaaataagcgtggaaattaaactttattaataaacggaatgaaa

SEQ ID NO: 314212 - DNA, 2583 bp, Cannabis indica
tttggtaatgtattttaaagaagttggtgtatgatgtactgtaaaagtgtgttgtaaaatagagaaagcagagttttagtgatgtattttaaaaaatagagtaaaacaattatttggagtactctaatattaaaatttaatctttgttattaagcatgcaccattaatactgttgtcggaaaaattttgacaacactaaaattatgtgagtattcaaataaagttaggatacttaaaagtagatgttcgagtactcaaaatatagactatagttagagcttggtctgctcaatccacttttgataatgattccaacttagtttatttgatttggatcactcttttatataaaggcaaatatcttttaggattacataactaatcggtttaaaaccatttttataatacatgatagtatttaatcgaaatagacgtttaaggaatgaattaacgatttcatccgttcttgaattgtcgcaatgtatgtgacttgtctattcatattccaacacacaagctcacagactctacgtcgttgtactcgcaggattggcctttggacctattttgtttgaatgtctgcgttcatctttgatcgcatagtcgaacattctatgcattgacaacgcggaacatgcgagtccctgacgagtcctctaacacattaatcattcagaccaaagctctgtaaataaattatctttactcgtcgcaggagatgcatatacttggtcatcacatatcatcggtatatatacgtgatactagcactaacgcctcttggtcctacttattattttgactatgcgggacataatatgcaactagaccctgtctcggtcgcatcttctcacaagttcgtgttaagcgaagttagctctactggagctatttattgacacatcatctttttccaccgtgaaccaagtccacgtgtaacctatttatgagactgtactcgtatttttaggcaaaaaaaattcactataacaaatactagtattaggtgacgccttatgtggtttgtgatattttataataattattaaattaaattatgtgagatgagtatgatactttaaaaggtactaagcaacattaatattctttagcatatatatgcgttaaaagagaataataaaattggcaaacatttatattatatctatgttatattaaatgtgaatatataataaatatgttatttttttttcaaaagattacactttaaatttaaactaaatacacatatctctattatctcttatcttatattaaatgtgtctatataacataattattttttaatatagcaatttaaatttaaattcattgtacatattttaaaaataaattctttatattattatgttttttactaaaaaataaaaaaaaagtatatgctattttaaaaacaatgaaaagtattataaaataaaagtattatgatacttaatctaaatttataattaataacaatttttacataatattatatttttttataaataatacttaaattaattattttataataaaaaatattttgttattgaataatacgaaaaaattatttatataattaaaataaaaattaagaatatcataatattaatttaatatataagatattttgagataattaatatagagtatacgaaaatagcctagactaattattggcggattgataatactcttctactaattcttttttctttttaccctaattaataaacaggctgataatgtattgataatactcaactggaccaatttcaaatcttagatgatgatctgatcccaagtgatatcatttgattcttatcattttagtggctctttataatttatttaattatttataatttttaaaaaaatataaatggtatttattacttttattattgcagacaaaccttggttcttgattcttccacttgatgttattccaaccaatagatggactcaatttattgcagcctaaaaaatatatatgtaaggtatattctcaacttgagataatatctcacagtgaagatactcagaatttccattccataccaaccaacttggttagtatagtacacttcctttccctctaaattaatgtccttcatttctttgttttcacatttatcacttttttttttgaaatgtccacatttagcacttatatacaattgtttatattaaataccccactaataagctgactatttgtgtatttttttatatatattatatctttagaaaaaaaaacaaaaaaattatatccatcacttaatagaataatacttgctttttgaaaaatactaaaagatatactttatgatgttactaaataaaaattaataatattttaatcgtaacataaatttttaatgattaaatgtgatcattaattataatataaaattatttatgagtaaaccatagtatttaaatataaattgttattagtttaattttagtcacaacaattattgtgactaaaaacacttttagtcagaataaattgtgatttttgtgactaatacttttagtcacaaactttttaatcacaacataagaatgataatt

SEQ ID NO: 314213 - DNA, 1458 bp, Cannabis indica
gttcacttggctgttcacttaccacatgaggcaaaacttgttggatctgttggctttcgatggacatatccatttgaaaggtttgtatttgatataaattgtaaatggtatttttaatttgcttgaagataatgttattaaacttttttcttatcttttacagatattgggaaaaactcacaaagtatacgaggaaaaattgtcagcctgaaggctcaattgcagaagcttacattgttaaagaagcagttagattttgcaacatatatgaccgtgacattgatacacattctagtaaagaagacgtcaatttaggtcctaaaaaaactcatccatccattcatgtgttctcacatcgtgttcaaccatttggacacgagggttctataaagttgactcgtgaaatgttgcaacatgcccactggtttgtactgctccattgtaacgagttagatccatatattaagtaagtgatatatttgcttctttgtttcctccttgaacttttctttcactagaaaatgatcctaatcaatttgttttcagagagcataagaaggaattggatgcaatatctgatgtcaacgtagaagaaaggcatgatgaagaatttcctgcttggttggcaaatcatgtaagccactattttttcttttcagggcttgaatattcttcttaatattgcttgtaatatatatgtgtgtgtgtgtggactaggtgaaacggttgcgtgtaactgagccaacgaaggtcacgaatgagcttctttcattagctattggacctgattttgaggcaaattcatactctggttgcgtagttgatggagtaagatttcttactgaagagaaagataggcatagaattgctcagaatagtggtttgtattgtttattagaaggtgaagataaggttggggagttctatggtactttatgcaacgtgtgggagttgaaatattcatttggccaccgagttgttttgttcaaatgtaaatggtttaacacaaacccagagacaggaatacctagtaaatgcaatatgactcgtatatgtgccaataatacatgtggtcagaatgctccgtttgtacttgctaaatatgcagagcaaacaatttattacgaagacagattaggttggaagtatgcccaaaaagtgagacacagacttttttgggatgttcatgagatgagtagcaaagtggaagttgatgaggatgacactactgatgataacctcaactcttgtaattttcaatggaatgaacaaattgatgacattgcaatgacaagtcttgttaaccgatatggtgaagctgaagtgatcaatgatgatgttgttccaaatttaagaaaagaagctgttggtctcccagctgaaatgttcgatgatgcatggggcaaggactattttgccccagatgaaagaccatgggttaattacactggtagtgaa

SEQ ID NO: 314214 - DNA, 697 bp, Cannabis indica
cccccctcttggaaacatatcttgggctaacactactttcctttgagataatgtcgcccagatcactatggtagacaaaataaattctaactataactctcaagatgcttacagagaatattcttcaaagaattgttcttagagtcgcgataatgatttcatgtccttttccttgtgaatatgttcactatttataggagatagggagatacaatttaatatttgaaatgtaatagatacataaaaaccctatttattagggaagatacaatctgtttgaaattattttggattcaacatccgaatctgtaactataggatgttgatggagatattcacaaagtttattgaagaagaaatcaaggcatgtgtagtcctgtctgacctttttgggttcatctatcctggctgacatgttgacaacctggccaggctttctttgaaacttatctttttgataagatacaatcttgcaaggcgtgttgatcttcttcctccatggtcgtcatattggtaatctggccaaatgcttcttgaaaggtactgcacatctttttgattgtcaactttaggtggggtttacttagtcttcttttgcccaaaagtcttatgttatgctaagtgtcaactgagttaggctacgtgtaggtgccacgtcaagttgtaaaatttggaataaataaaacccatttcaata

SEQ ID NO: 314215 - DNA, 1126 bp, Cannabis indica
tagtgactctattcaatagaaaatccaaaacttagacaaaagataaagcagggatacattgataacagggaaagtcagcaagaaaatacttacaatgatatttcgaattttgtttgttcgatgaacaactacatttgacagatatgttgatgggtgaaattctttaaaaaagctgtcaacgcagtcactgatactgctaccgggagaaataggcacactacgaaccaatatagtgaactgatgtggttgaggcttggatgaagcaaaataagacaaccttttcaatgatatatatctgtactcctgcacagagtataacattcagtagcaagttaacttttggctctgcttagattgttaagagaaaactgtttatttttgaaatgtttaaatgatcaactagaaaagtggtacaaagctacttacataatagagtaggtagcaaacaaatattgtaactacataaatagcagagaagtgaatccataggctgccaaaagcaaaagaatgttaatatcagcatattttagaactcttaaacaggacatatatatatatatatatatgttcttaagacaatttatagatgaaaattagttctagtttgttcaattcttcagtcattattttgaacaaatttctggtatatcatcatatcgattctcagagaaattcaaagttttcaaatttgaatccatgctagagttaagatttacctttttgagccattgtttacattcgaaatggtaaacacgtccaatgagttattaaacagattagttaagtcaagattgtcaagcttatctccggaacaattcactgggagaataacaaagattccaataaccccagcaaacaaaaaaactttcaaactgcgtgtaaaacaaacaaataccacatcaacattagcaaatatgaaatcaagtaagtacctgataaagaaaaacaagggtaaaataagtaactcttttgcatgttacaaaagactataacattcactttcatatgaaattcaataacactaagaacaacagacacttcaactaaagtacctgaaggtaataacatgcataaaaacgacagcatccaaacccgaggacgataacaattcctcttcagagagcat

SEQ ID NO: 314216 - DNA, 3120 bp, Cannabis indica
tcatagtattagcatgttgttttttaggaatcaaaacaagtaaggtactgttgagggcagagaagtcaatctgaccatttaaacactctaataccacagaaaccagttcatgaccaaaagtgtcccaattcttctgttagaaaaaagcattaagaccatcaaatcaaggagccttatcaccagagaggctaaaaacatcctttttcacttcctgagcagtgaaaggctgagtaaaaaactcataatcagattcctcaaggggggccccaagcaatctaaaatatgattagtagcctcagcatcacagccatcagtggaaaaaaggtttgagaaaaaggaagagatgatatcaaacatagcctcaggatcactggttgaattaccagcatcatcctttaaataccgaatggtattattctttttcctacgggaagcaaatctatgaaaaaacttggtgtttctatccccagccttaagccaggtcacacgagccctttgcttccaataaatctcttctttataaagaagagcatcaagctgagattggagatacttaagatgaagtttagactctctactattagtgcctaaagactgaatcctaacaatctctctttgaacatcctggatacgaggttggaaaactggcatagcagacttatgccaagatttcaaagcagagacacaggaatcttgtttggttaaaaaaatactaagagcatcctgattgtcagaaaggtgggaagaattcttccaagaatcctgagcagtagtgtaaaaactgggattatcaagccaaatgttttcaaattgaaaacactttttaaacccaggaggccgattagagttagtatcaggatgcaggaccaccttaatggctcaatgatctgaaccataaaagggcagatggtacaacatagcatggggaaataaaaccctccaagactcagaactaatagcccaatcaagacgctcacaaacagagctattatgccaagtatatttattaccttcaaaattaagaggagaaagactaaatttatgaagaaattgagcaaattgatccatatcagaaacattataataattactaccagttttatcatcaaagtccaaaaaacttttaaagtctcccataatgagccatggcagattaggggaagtataaaaaagtttgtctaataaatcccaagtaacagaacgagcagaagaggatggagaaccataaaaacaagtgaaatgaaacatatcattatccttaaagtttatattacaatcaaaatggttactagagaacgataaaatatttacaaaaatagttgctttccacaaaagaataagcccccccccccccaaaaaaaacttcctagggacctctaaaccatggtcaaaacccaaagcaactcgaactcgatcaatagccttagcaagcaaccgagtttccatcaaaaaaaccacctcaggatgctgctctttcaccatcagggagagtctctagaatgcacgcgtaactccctaatccacgtgcattccagcttaaaagactcattttttttgggcgggtgtgcatagcatcacccgcctgttcatcttgagcagtatcagcagaagactcatcctccctagcacctgatcgagcacacttaagttgagacctcacagaacttccaactacagcaaagtgaggttggaatgaaggcctcttaacaccagaagcagaggccaaacctttcccacgcacatcaggatcaggttgatcccgagagaggttgatatccatgctagcattatcagcaggggtagaggacaaagcatcctttggactaacatggctagcaatctcctgggaagagaagccagtagacaaggcagcagtaaggatagattggctaacagccacaatacacagagtcaactgagtaagaagtaaaagccgatggtcttaatgaaatatcgaaggtgggcctggtgtagggtgaggcaacatttgagagattaggatttaatggtgtaggcatcatgacaaccgcattagatggttgaggagcaaagggtccagtaaaattatcattgagattcagaaaggatggaaagttgatggcttgactagtaaagttttggggaggtaagttgagattaacccgttggtagttcatcagagtaatggtaggaggatgagggtattggaaagtctgagatttgtcaatgagtttttccttacctttaaggagaatagtgtaagggcacaaaggttcagagaaaagttcatcacatttttgaagaaaagcaatacaatatctcttagtgtgatctagcttcccacagaaaatacagaaatctgaaagtctttcatacttaaaatctaaccatttgacaaactctctgcccatacgaataaatttgatattcattcccctccttataggcagattgacatccagaaggatgtgaatgcgcatataaggaccagtgtcctccttaatgctgtccttatcaatctcaataagatcacccacttccatagcaatgaacctagctaaatcatgagacttgcacataaatgggattccatacacttgaacccaaaatggaacatagtgcatgttatcaggagtaagagggaaagtgctatcagtagcagcaaaaatagttatgctctgagcaaaatgccagggctgaccatccaaaactctacccttatcaccctcacagccaaaagtgacaaggaacatgccatcagcatgctcagagacaacaaccgggaatcgacatagcgatgaccacataccagaaagggtgttcatcagagagggacgattatatggcctaatggtatgaagcttaaggataagactaataagagcaggtgaagagctagatgaaccaacttcacaagtaaagacagtagactcatcaggaggaagagctaaggcactagacatagaatttaagaactcatccatattggcagaagaaaacacttcaaagacaaaggctaagaaaagaaaaataaacacaaagagatgacagaaacaatacctaagttttggatatatatataggaaaaaccataatccacgaaggattttcctcatcaccgccctagtcacttccctagtc

SEQ ID NO: 314217 - DNA, 547 bp, Cannabis indica
aaactaacactacgtacgtggcttggcacgtaacaatcacctagtatatacatatatgcatatatatatatatatacacacacagttctgtctagcattatatagactaatataacatacaaaattatagaattgaaccatcttaacgaccctacgaagcctaagaatcttcaatcatcatttatatatatatatatatttgtatatatatatagtgactatgcggccgcaaccaccggaagacacggcgaggttccggaaaattagtttcaacgtttctcacttatccaagatttttctttcttctcttaaaaataaaaataaaataaaacatggctttgactaaaatgtctttcatgttatcttaaaaattaaaaatcgtcatctcttttactactggaatgaatgacttaatattttaatactgtattttctttttgttgttttttcgttcctgaatttatggttagaggaggttgtatttttcctatgacttgcttgtcagtttttcttttgttagacttttatttgggcttacattaagttt

SEQ ID NO: 314218 - DNA, 1201 bp, Cannabis indica
taatgaatatgtcttgtatatatggtaggtacatgatcacaatctgattaggatatgaatacgtatacaaacaagaaatcaactatatcttagtttggctatattgtctattattttgttatgtatgggaaattacttgttattgttgtacaatctagttttattacacaagatttcatacagttatttatgttcaattaattctcgaataatatatggttagtattgcattcataattgctttaaaagttttttttttcctgaacaattctaaaagttgttaatactaacactaaggagactcaaaattatgtcaacatagtttgttttagtttttttttctttgggtaaatttgaactgtctacataactgaattcctatcttgcaaatgatacttattaagagaaatggtgctcaataatcaataaccagattcaatctcaacatgttgccattctttgctttcggattattttcagaggaaaagagccacgatgacagatagttttagctttaataagagcacacctaaatcagatctccctacaatgcatattcaaacatattacgactagcaaacgaagcaacatcaacattaaaaaatgtgtatttttaaattttgctttagtctccataaaaagttgagacatgtaattttgggtatatttcgtaaggaagttaaataaattgagaaatgttaaagaacatttatagtgcttagcacagttttgaggtgtaatatcactattggtataacttaataaaaaaataataaagggaactcatgctatctaacactcttatacagtgtaatattgttattggtataattcaatatcaagtcagatttattttacttaattaaaaattatacaaaactgctaactaattataagacgtcacctcatagtgatactaggtatcttagtaattcatagcaatgttcagcttaaaatagaatttcacttgatttattttaataaatattataaaaaaatctctaaaacatcttatagtggtgttagacagcatttatagatacctccatatagcaacgctaaaaaaacatgcattaaaaatctttgtatgtaggtactaggcctcataatactcgaaagaataataataagggatttttacactaggtaccaaatttaattacttttttacatttttaatgcttatcaatttattaaacat

SEQ ID NO: 314219 - DNA, 1276 bp, Cannabis indica
gttgcataagttaatctaaagtaaaatttaactataataatatctctattgaagtaatatatatgttagcacttttgtaaaaaaatatatattatgtcaaaaaattttgtcaatttttggtatttatgttgacaattgtataaatttaatgaagacacataataattaataaatatattttttatttaagttataatattattatttattataatattgtcattaactttttaatttataatattctcgttagttattttttctttaaaatatttgatttatttataatatattaaagtaatttctaaaatacaaatatactaaatataatattttttccttataaaatatatgtaatataatatttattctttttttaggtaatttatttatttatttgagaaaacaatctcaacacctccctacttagcagaaaataaaaagatataaatattaaatattatgttcttatcttaaataaataaaaaaaaaataaactctaataacctctacaaatttaagcgagtcactaactatatacatatataagatgattagtaccatacatgttatattaatatatgagttatatttattcaaaaaaaaaatatgagttttgtaggatgataataatatattgatagtaatataataatattgttctcaaaacaatacatgatcaatgctgcattccaagagcatgaaatattgcatttcagtagggtattcattgttcaaacctagtcaaaatcatatgtcatggagccaagaagtgtgggcaagattgaaaattccaaagcatagtgtaattctatggttggctatgttgaataggttaaagacaaaggaaaggctagttaaatttgaaatgcgaatggaggattgctgcaagttgtgtaacacacgaaagagaacacacaacacttattttttaagtgttcctttgctgtccaatgcttacaagcagctaagaattggctggtttggagaacaacatctactgacctgccccaaatccttagatggatagaagagctaaggtgagcaggtttaggaaaaatgttcttgctgcaatgattgctgatttagtgtactgcatttgggagacttggaatagaatgatttggcaaggggaacaagctaactgcaatcgagtgctagagaacttgaaatggagaatcaaaactcgaatcaacatgtttttgccctagaaaattagttgtaaagatagagattggttttatgaattgtaaggatgtaaatacaaagtatgtat

SEQ ID NO: 314220 - DNA, 1135 bp, Cannabis indica
tatatatagattgaattcaaagtaaaaatcaaccactagaaaaaaaaacatgttagtttgaactttatattttttaaatagtcatataaattatatgatatataaatatataacaaaaacatacaaagaaaaaaaaccctcttaatctggtcggtcaggttagttcgggttaaagattgggcgggttatattttcgtcgggtttttcgatttgtattttttgtcgagttacttcggtttggtttagacaggttattcggtttgcgcggtttatgaaaaattatgtagagacctacataaaatgtagagataattgtattgtatacccacttttcattacctcatttaacttttagctttcttttcctattatttaatttatacccacttttattagttaaatcccaataatacccttaggtatgaaacaaacaattcgattatcctcttgagaacgcctctactaccacgacaatcgaccatacctcgccacctttgttcctcctaatccaacacgatcgacgatcggcaccgtgcgtaccttcgtttccattccctccgtccttcatcactacgatcggtgattccagccctcctgtgatcggattgttgagcccgagtttagattctgcccatttttcgattcttctctctgaactttttgtatctggttaattacaacattaaaaagaaaaaaaaaattgactttatataagtgtgtatatctataacacagggagatcctaaatttatcatattagctatatattatatatatatagttacctttaattaaatcatatgtataaaatgtttgtcttttgcacaccttaaaaattgcaaagttgaatcaatggtacagaaaagtaattagctaaacgtgctcatgatttcgccatatgcatgcaaccactacaaacaaattttaaaccaactgaaactaatccagaaatatttaaagctctcactgttgagattgcaactgttgaggtctagtgttgatggtggtgatggaggaggcatagacggacgaaggctgacagtggcggaggaggcagagacaaacgactgctggcagtggcagaggagttaggaaaacgatagcattagtgaactctctgttggaaattatttta

SEQ ID NO: 314221 - DNA, 925 bp, Cannabis indica
attgttttttgttttcgtttgtcgtccttactactaacgagaccgacgaataggaacgtacaaccacctacagatcactctgtaggtatgttattgtatataataatgtactctctctctctctctctctctctctctctctcattaaagaagtgaatttttagtaaagttggaacctttattctattattgcaacttggtaagaacaattttgaagaactgggttttcaagtttttttgtattttctctttaatttaaatttgattatataaatatatatatatatatatgtatatatgtatgagtatagaaatgattttagaataccttgtataatgaagaaaaaagcttcaacctttagctgtttgcaacatcaaatgtgaacttacaaagtttggtttgttgacctttatttatttattttagtcagagatgacataatttagagatataatgtttttcaatagcaatagtaataaaaattcacaaaccgccaaggtgtacaccaaaaaattgggttgtttacatatattttcattttgacttgtatgtataattattctgattatttgttttttttttacatgtagtgagaatattgaattctatttttgataaatggaatataaaggctgatacagaacaatggaataaaagtggagaaccatgcagtggggcagccatagatgactctgatttcaatagtggcactttcaaccctttcatcaaatgtgactgttctgccaacaatggctctctctgtcatattactcaactgtatgtcttcatatatttttatgtatatctatgaaaaaatctatagtacacactccatttgttttggcattctaaagacttttctagtctaatttttttttttttataatcgtgtacgttatagttatttagaattacatataaatt

SEQ ID NO: 314222 - DNA, 739 bp, Cannabis indica
ccaagagactgaattttgtacatgatgagcacttaaattcaaattaccatagaaaaacacatgtaaaggagattgaattgaaaccaaaattaccgtaaggagatcgttcatgttgcagtgatggtaagaacaaagaaaagaaacccaaaaagagagtcaattattaaaactgtaagattttacggattgtattatatgataatatgtttgttaattttgattaagaatagtaatagagagcagagtgtgttgttttagacttttagttggccggcgaaatggcctaaagccgaaacgacagatagacagcccacgtagttgtacattctacaatggccgttaggcacgaattaaacacaaagtttattacttatttaattttttttttttttttttgaattttcttctcttatctctctggttttttgttttgattagtcaaatattctcttccgttattccgttacgtcttaggtaagttacataatgacactttcttcgtattttattttctatgttcaaaataataatttgttccctagcaaaagaaaaattgacattgttcttttttttttttaaattaaattgaaatttgttcaaaagcaatgttttatggggtaagttgaaaaatgcctcttttattaatcaattaaccaaatttgcctctaattttatatttatttgaaacatacctctttttatatgtattgtacccaaaatacctgacataagagagtca

SEQ ID NO: 314223 - DNA, 509 bp, Cannabis indica
atacacgatcataaaaaacaactagactaaaagattctcttgtatgacaaaacagataaagagtataccaaaatgcatctttattaggtgaactatagacttaacctatatttatgtgtgtagtgtacatgtttataggtttaatgtttcaaaaacttgtttatttacaggaaagtttatgcaatggatgttattggtacaattccagaagagctatggaatcttacctccctcttcaatctgtatgagtttattattagacctttttatagttctcatcaactttttcctattaacaattttaaatagcaatgtggtcatgacttaacttggtttcttccatgaactgttgtaggaatttgggccagaatttcttgacaggctctctttctccttcaattggaaacctcactaagatgcaatacttgtaagcctaccaacaatttgagccttgatacatttaatatagactaattatgatttttgctccatgaactttgacatgtacc

SEQ ID NO: 314224 - DNA, 1086 bp, Cannabis indica
ctgtgacttgggctggcccaacagggagaaagttctcgaatagctcctaatatcaatcgaagggtggtcacaagttcagggtctcgaacggagcaatgacgtcggttgtgcagtgggtgtttggctcggggccgactgattgggatcgagctcagaggatgtgaacgatcgaagcttgtgccatgaatggagaagttggaccaagtggtggacggaccacctgggtttggagttcggcgagggtcaaaggtggtgttgggtcttgggatggcttttagggtggtctctgagcagcgataagaaagaagaacaaaaaatgtttagttttttttcattttaaattaaaaatatagtttttaccaataacttattaacatgtgatatttttaattagtaaagggatctattagaaaggaggactaacgaatttactaaaacaatgagcttagagattattactactaatttttgaaataagaaatttattcacctcgaaataaaaattttggggacttactgggcggatgtatttgaatgggtggagtggccctggccccctaatttgtgaaaaattgcctataatatatataaatatatatatatagttaatcacatatattccaatcaaagaaaaggctaataattataaaaatattaacatataaggaaacatttataagacataataaaatcatactattatcattatctttttgtgtcattaatttattagtgtaaatataattatgatgaatatgtttttaaatataattaaaagtagatcatatttaaataatacattcaaattttatggagattataattttattctgtaatttctattataattataattttttttatattttttataattgagtctgttgcactttattaatattatgagtaaattttcaaaaaaactcctaaataatttacaatgacaaaattaaaattcacactactttttaccaagcatagaagaaaaaataattatgactacaacaaactatttatattttatttttggcactatattttttttttgaaaaaaaaaatcaaccggtggtcttaaataactgcaaa

SEQ ID NO: 314225 - DNA, 595 bp, Cannabis indica
agaatataatttacttggtccaagtgtattcttggatagaggttctactgtatatggtattttataataaatgtccgaatcgcaatctacgcaggaatccaaatcgcaacccaactcaattcgcaattcacattacaatccacacagcaatcaaaatcgcaactcaacttaatttacaatccacagcgcactccacgtagcaacccaaatcgtaacccaagttaaaaaaaacgtaagacaaaagtataacttaccgtagatagggtaatttccctgttattaacttattttatatttttaaaatattataaattcattgatttattatttctcatcaaataatggcggaacgtaagaccataaaagatataagagagtaaaagttaaaatattatatattagtactagttgttagaattttttcatcacttataaaatatacagtatcaagattaatttcatacataaaatattacatattattagaattagaagtgtagatctaaagcccttgatgattcaaagaggaaaaagaccatgaataggagaagcgtaccttaattcattgataaagataattaatttagtgatgtca

SEQ ID NO: 314226 - DNA, 1072 bp, Cannabis indica
cttgttcattctcccttaaaaagtctttgtagccatcgataaatgttgtagggactttcttttggagacaaaaggaaactaaagcaaaatgcatctctcttcttgggacaaagtttgtctccccaagaattatggcggcattagttttcaagaaggaaacaaatggaataaagccttaatggctaaatttgtttaggccattttgagtaagcatgacaatctctaggtctggtgggtgaatgctatctatttaaaaggacaagatttttggcatatagcgttcaaatatgatgcgagctagtatttcaagaaacttttacggctaagagacacaattgttattagggatataaccaatccttgtcaaaaaggtatattcaaagctaaatctttttacattttgactacttctatacaaaaagtggattatgctacaagagtttggcataaattgagtgttcctaaacatagatttatatgttggcaagcaacaaataaccagctattgaccagagatcatataagtaagttgttgttgattccttcttatctttccctggtttgtgataattccaaagagactcattctcatctctttatggactcccttgtcaccattaaagtagtttctgaagtaagcaaatagttgggtggtctcgcgtggctaaaaagcttcaaggactggtttgattggttgttaacccctctaaaaaatttacaagataaaatgatcaatgctttcttctcagccatagtgtagaaatatttgtatgtttgaattgagttgtaaaattgttgctagtatcagcttggagattaaaaaaactatcaagtttagagtcttcaactctgctgttagtggtaaaaacaagttagattcttatatctataatgtaatagcaaattggtagggtccttgttggtggttggcttgttatagtaattggctttgtttgatcattgttagttcattttgaataaagacttcttcttgttcaaaaaaagaatatatatatacactcactcacaaccttaagtatagattggtggggatcaccatgacttgaacaag

SEQ ID NO: 314227 - DNA, 1336 bp, Cannabis indica
ggggacgttacatatatatatatatgtgtgtgtgcatattagatagatatatgcgtgtgtgaactcatgacttataaacgtggttatatatatatatatgtatattgacttgactggcctataactatctattctatataaactagctaaccatacagcaaagcaatatgactaattaatatttaataatgcaatgtatatatagatatttacatttcaatatttagagattagggttaggattgctaagctctacaaattagtagtataactggttttgtatgaacggtctcaaactttgttatttgtacttgtttataagttgcaactgatcgaattaatttctgttgtataagtaattgagtcttgtaagttgacgtattattaattaccgaactactcataagggcatttattttcacattgtgttataattaattaggataaataattaaactttgagcaagttagtgtacaacaaagaactatgaaatacgtatcacggtaaactctttatgaagccttataaagcctgttttgctaattaagatgtgagcatcaacattaataattggattgcctagctaggaacatgcatgcatgcatgtctaatatataatagtgaccttattagggaaagtagataaagagttacaaatattagcaataatttagtccagaaaacacagagtaatccttattattacaattcattttactaacaaccttcttaaaatcagaatctacaatatagcaatatgcaacacactagcacaaaacagaatttaaggccaaagcctcaacttgagtacaattagttattcagcatttcttcatatatatcaaatacactttggtaattagaatgtgatcaaacattccacaataaaaatataaaaatatatattaagcagattctcatatttaaacttaagctattttttccaagaaatactcctaaaatcaactaaaatattccttttttaataggtttagaaaaatcattgagaactctcatgcgaaggaaatgatcaaaaacttgaaatatactacaaaaaaaaaagataattttttagtcacaacataaattttttgtgactacatttgacttttagtcacaacaaaaaattacttatgattaaaacatagtatttagatacaattacacatttagttttactcacaacaagtattattaattgtgaataaaaacatttttagtcacaataaattataatttttgtgattaatatttttagcaacgaattttttagtcacaacttttttacttttaatcacaaattttattgtgattaaaagtaaaaaaatttatagt

SEQ ID NO: 314228 - DNA, 1223 bp, Cannabis indica
gtgctctaagttgatgccacgtgtcaccattcttgtgatgccacgttagagtgccaatttttggataacacgctcaaacccggtattctatttattgccactatttatcccaccaagaaaaaggttctagacttacccatgtgatttaaatggccattcatcgcatttttcgtcatcgccgagcaaaaatcataaaaatggcatatttcatatataatacaaataatacatctagagtttaataaaatctcttgaattgaaaaattatcactctaatacccaaatctaaaaatgggacccacaattaaataaattcataaacatttatagaaatatcaataattaacgctaattgcatttactaattatattctaaaataaggtcattacatgttaacccagaaactttcccttgtgacgtggacatcaatgtttgacatgtggaaagaaggatgacgtaacggagttgagtagacatgattcatagcagtcgacctgggaggggactctagcctgcgcctaagttgattttgggagctccaagatggacgttcagacttcaataacttatatccaactcaatatcttttagtattttgtaccatgaagacatggagcaacctaagtaaagcctcgagagctaaaattacacaaacttgcaactcgaaagccaacatgggcacctagggttttgcctagcgcctaagttaacattcctaactagggttttggtttttgggagcgtcttagtgcaaaagggtcaaaacatgcattgggacattaactataaataccacaaacatatttgaggcatcagaatcgaagcaagttcattttttagcaccctagtgtccaggttgacaatctgtcaatctggtcgccttctgaaaattagaccgacagttgattttttgcaacttccttgtcttcataaaaaattgagaaataggtcctttcagggaagaaacaacacttcttgggtgccaaaagcaaggtccggcccctaggttgacacctggggctggcctagcacccacgttgacattttattaacctgggtcgattttgatgatgttttctgagaatcttctctgttttcagaaaatattgagattcaactatttctaaggaccaaacgaaacttttgaagggacataactgttgggttttgtaccctaaagaaaacccatttcaacataatcagatttactaattaataaaag

SEQ ID NO: 314229 - DNA, 781 bp, Cannabis indica
aaagatttagagctagaaaagaaaaataatatggagactatagattttaagtggttgtgcgttaatgaatgttagttcacgagtcagaaatagagaagatgaaattctctatctaaaatttagcagttttttggcttaataccgagagaaaaagagaagagctcctttacatgtgacatcattgctgtatttataagcagtcatagagtttcttttttattcgtctaaatgtttcatttgagagacataaatacatatatattataattataatattaaatattatatttaagttatattattattttaacttatttataatatataaatacacatctattattatttttattgataaattataaggtttattaatatgcagtgtcgtattttttgggtttttcgtgtgccgagcttttcaagttagtttattcgtgcttacgtaccgtgtctttcatacttctcgttccgtgtggtgctaaagcacatattttttatattttgtcatggaatttgtagcatcgtactgtatcgtgccaaagtttatattttgttgtgcttacactacaacaaacaccattaataggggcggaacagtccgctggtaataatcctaaaatccgccggtattgtgcattagcggcggggatccgccggtaataatccgccggtaataacccgtcgctattaatcattaatagcggcggactgacacatccgccggtattaatgattaataccggcggaccaatagcggcggggtccgccggtaaacacgcgt

SEQ ID NO: 314230 - DNA, 4216 bp, Cannabis indica
aagctctatccagaggattttgtgccaaagctcgtaaaggagaaggagaagaagtccaagctgagctgagctgaggatgtcgagcaggggaaagagcttattcaattgaagcgtgaggctaagttgaagggaggtgtcggagccaaatagtatgctcaagaatattcagagcaggagtagaggatgcttaagaatattcagagctggagaggccaagcaagaagacgaagaaagctctcctgaccgagcaagcgccaatagaacatgctatcaggattagggaacctggtgtgcctgctcggccatcaaccccctgtagagggaaaaggaaaagccatcatggtggagcaaaaaagactctttagatgatgacgctccatctgtgattcaggagaatgcccctgccagtgtgtagagtacttcaacttgcatttatttctctgatttttatgctttcacatattttatgtctgctcctaactgcgttgttttatctgtgcagagatgtctcagaagatgattcaggccttgaagaagagagtaggagacagctcgggcttgtctcctccggctaagaggtccaagggtggtgagaccccatccaaggagaaggtgccagttgacgaggttattgatctttttgaggagcgacccgctgtggaccctccagctcagaaggtcacgaaatccaagtgttccagaggagggagcaaatggagtctgtccgatcgttattttttcagttgtgcggtaagaccataatacttctgggagttcttccggccagttccctttagcatctgcaagtcgtttctttaaagtgtctttaagtgtcttgttgacttcttcgacctcacagtttgcttagggatgtgctactatggagaaactctttatgattccacggtttgtacagaaattagtgaacaattgactaccaaactgtgtgccattgtcttagactattttgtacaataatccaaaccggcatattatatttttttttaccacaaagtcaagtacttttttggatgttattgttgccaatggctcggttttcgtccatttagtaaagtagtccactgcaaccactgtgtattgtactcccccttacctttagggaattgtctgattagattaaattaattccccaaatagcaaaaggccaatgactttgcatctgagttagttcattgggtggtgcacgaggtatctttaaaaatctttggcatttgtcacatttcttaatgttggcctttgaatcttcaatcatgattggccagaaatatcattaccttagaattttctttgacaaactttgcccggctttgtggttgccacataatccgtcgtgtactttagaaaaaagtcttgctgcaaatgattaaaatatcattgtgaggatatataatattatattacagtgaggataatatgcatgtctatttatagaataaataattatattattatattatattaaataaatataatataatataatataattacattattttatattattattataaaatataatattatattttatacacgaataaaatattattctttggaaaagggaaaccttccctcttgtatttagccctataaatagtgattcattctcactgtaatgggagtcgaaagaattacttcagagagatctaagagaaaacactcatagatttcattgtgagagctttgagagaggaaacactgtattctttgttctcgagtcaatacaattcaagaggagtaggctattaccgaactaaaggggccgaacctctttaaaatcttgtgttctttactgtttattggttcttaccttatcttaattacatttcttattgctgattaattgactcattgtcgttggctaaaagcaaggtcaacattaccgaaatctataatgatattatattgtttttcattgtcatcaaagaatataagaacatatatatatatatatgaatatgtatattcatctcttttattctatttcagttatgacatgtttgcataatcttcaggatatatgcaagattttatcgaatatagataatttttaagatatatgcataatttatatcattttttctctatcatattataagcacaaaattaatgtaaaaattataattataaatattgtaaataataagaatataatatatatatatatatatgcatcaaatacttatatataaacatataagaaataagaacaaatacttgcatatataatatataaatatatagataaagctcactaccgctagggaaccttttttgaccattgattttaaatcatgtgtttattatgatgtaaggtgtatactcttacgataagactgcttgtataccattaaaactttatacatattataataatatttaacaatatatttattttaaaaaataaattatattaataattaaaaattattaattttttaattttaattattattattattttctaaaattaatttgaattatttttatattggtatttatttaaaaatataaatttacttacaaattttattatcaattttttatgtaattaatataaactacaaatttataaaaaaaatgatttattatataaaaaaaaatatggagatagagctaacatacataaagtttttttttttttgacgtttgtaacttagaaggtacacaataagctcaagttacaaagagtaagtttggacaattatctttccaaactaattcctcatcaagccctaaagctccctttgccatgtgatgtgcatggatgttgttgtcccttggagtgtgacaaacaacagcattaggaaaatgtgacaaggaactctggatgtccaaaatgacatccgccagagcagaaagcttcctcttgcgactataaactttgttgaccagttgcttgcaatctgtgaaaatagtagagagcggaatccttacattgcagcaccagtttaaacccaacctaagggccatagcttcagccatagcaggtgtaatcttagctgaaagaggcacagagactccagctacaacctgcccattccaatctttaactactgcaccaagcccaatcttactgttcctatcatgaatagctgcatctgtgtacaactggtaagatccttcttttgcttgggagaccaaaacagaggcacgcaattggctggctggttcaacatctatgctcttggcatgtgcttccctgtattgagataaataagtagtaatccattggaccaaatcacctgcatctggattagcattcgcaaaaaactttttaattctaaattcccaaatagaccaaagagtacacattagcaaagagaagtcatcagctttcagatcagtgtatgcagataacataaaatctttaataccagtatttctatgcaagagataaaaatggtataaaggagaaagtttccaaacctgtctcaccctggaacagtctaaaagtgcatgtattacagtttctagagaacaacaaggagagggaacaactttcttcttacataggttaaaggctgtaggtaagatgtgatggaaagtttgccaaccaaagtttttaactttaagaggaatactttgatgccagaaaaatttccaccaactattatagaagctagtattagaagaggagggaggtaaagaagaagtattgacaaaatgataggcggatttgactgtattccaaatgaggcaatcgactttgtttgcataataagaagaatatataaaattttgtttgcataataagaagaatatataaaataatagaataaacaattaaattattttattatacatctaaaagcgataagccattactacaaaaatgacttctaaagtttaatgacacgctttgttctaaatatttttagtgaccctccactgtcagatggtaaaactcttacagagtctctcactgtcagatggtaaagataacaactatattaaaaatgctatgattgtatctattttttttaatttaaaaaataagaacaatatcaaattttttattcaatttaattatatgcaatattaataatattttatttttagaaagtaaatagtatttcgttattattctttttccttaaaaagactgacaagcctaaatatatatatatggaacacttcttaataggtaatactcattgattggaacttaaaaaattaataaggtaacaat

SEQ ID NO: 314231 - DNA, 2377 bp, Cannabis indica
tacacatcgatggatgtccaaggcgattataccattggcttacattgcttttattcaaagacaaagaaacagtagtagcaacagctgctgtagtaagggtgtcttggtgaagcaagaacaattttccatacttttcaactgtcccaatcaccacattcagagtaggatcctgaataacataataattttgatgaaacaagactgaattaagggtattaagcatgtaatctgttatagaaaaaagattaagcttaaaccatggtacataaagtacattctgcagtatgatttcgaatttatcttgacagtaccaatgttttggacaggaagatgttgtccatttggcaaggagacatattttggaaatggtatgttagaaaaagatgaaaaaaaattgagattgcaacacatgtggtgggtagcaccactatccacaacccaagaagttgaggttaaggttttacctgccaaatttgatgcaacaggtgtcattgcagcaggttctgcatttgttgtgttgctgacttgttggcttaacagggatattaagtgttggcattgagatgagagatcaacatgaacagagctactctcaatgtcgggtttctgggtgtttgtagctgcaacattggtcttggctttgcccttttcttgcttctatttgtccctataaccaggaggaaatccatggaggaaatagcacttgtcaactagatgactgggtttcccacaatttgagtaagatggtctaggtttcttggctcttaggggattggtggaactagatgtagcagccaaaggaattaaatcaaaggttcccagcaatctttgacgttcttcttgaacgatcattggaaacactcgggacagattagggataggttcgttaagcaagatttgagcacgaaccgaagcataggattcatataaaccatttaagaattgaagcacttgattttggttgtaataatccaagaaaactttcattgcaccacaagtgcaagtggttataggttgaaattctttcaactcatcccatagggatttcatctttgtgaaataggtagaaacaaaacaatcaccctactgaagccgagtgagctgtgtttgtaattgaaatattcgagggccattgccttcattaaaatgctcagcaagatcattccacatttcagtagctaaatcaaagtacattatacttcgtgcgatctcagatgaaacagaattaatcaaccaagacattaccatattattgcaccttaaccaagagttgagattggtattaccaggttcaggacgagggagagatccgttaatgaacgcgatcttgttcttggctgtcaatgccattgtaattcctcgtttccatggctaatagttggttccgttgaggatagtagtcacaagaaccagatcaggatggtcgctagtgctgaggaagaacgggctggaatgatcatcaacaaccgatcgagagtggagtttctgggttgagttgtcttcaacaatggtggaattgtcgtgaaaaccttgatctgcattccgagattgaactcgtattggaggaattcgacgagggactgctaaggaagggggagtagggatagggtcggagttgacctctgctgcgggattatcgatcatcgatggtgtagtgccatcctaggatcgagtagttggcctggccatggaagctgtgggtcgaagttcttctgataccatatgagaaagaatagagagaaaacagaggaataatcagagcatttggtattttattatactgaactaattttacaatggaaaagagagcttatatagctcgatacaatcaagaagtcattagttaagcctaaccaatgctgtaacagaaaggtaaagctgtaatgacaagttgtaacaaacaaaactatccttaactaacttaatccaaagctaatcctaaaaatttgtgtttttttttattattttgttatgaatgatttttgtaccattttttttttgtaaataatttttgtactattattaatatgttgcaccttaacatgttcaataccatactaatgtggtacccaataattcattagcagtttagcagttttctaaatcatttattaaattaaaagttgtaggaactgatattaaagtacactaataaggatatgctaccttttgtggtacttggcaccttaatatgccttataacattttctttattgatatgtacatatttttattagtttcaattgtgttttattttattttttaggtacgatctttctactattattgttatatgacactttaaggtgctcaatatcatagtgatgtgatacccaataattgtttagcagttttctaaattatttattaaattaaa

SEQ ID NO: 314232 - DNA, 1468 bp, Cannabis indica
attttttcatttagaggaactatactacaattgtagagttcttgatcgattgctaattaattaacatttttgtatatgaagtattatacagtgaaataattgagcatctagtaatatttgtatagctagataattactaacttaatttctccaataaatataccatcattttttccacttttcttttttgtttattttttattctacagttacagaatcgtgttctgtagatataaaatatatgtttcattactattattattattataacaaatttaattaattattaattataaagtagtaaatttcattttgaaatgcatttatagtatcatattaaactttttgttttatatccacaaaagtaatattgatttttatttatttattttgtgtggttcataaaagataagagaatgggaaagagtgaggggggaaattaagaaggtgatatgtaggtaggtgtatgtctccatgcctaattaattacattttgatttgatattatgaattattatacgtattcctataaataccaccatgtatacacttctcgatatacatatatcatcaagaaaaaaaaacatatatataaaaaaaatgatgatgatgatgaagaggtaaatagtactatttgttgtgattgtagcaattgtcaataatatggggttgtgctatgggactagagtagcacatagtgttactattattccaagtagtaatgatgaatgcaagaaagaaggtcaatattgtagtgccttaccttggcaacagaaattttgttgtgaagggtttatttgccaaggatttctgagtagtgacaacaaatgtgtcaaaattccaagctgtcaccgaaatgttggtgacccttgtgcccttttgtcaccatgttgttacccaaatcattgcagcgggactacttcccctggttcaaaatgtttgcccccttctactactactacaccattatcatcaatattgtcactaggtcttggtgatgaataattataatatgtatgtataataattatatatctgtatgtataatatgtatgtgtgtgtggtttgtttgtttctgaattgtaataagaaagtacctctatgtatagtacttatactaggatatatgtcaaaccatgttattataatgtggaaatataagatgtgtatctcaattggtactttcacatgaataaatggcttgttcaatatatatctatatatgtgttatttttgatattataggttagaaaattaaatagcccaaatatatatatatatttgtatataatctagaatacaatttataatagataataattatataagaattaggtatacatacatgattgatcctataatttgatagtgtaatactataaactaaatcttcctctctaaatttttaagttggaagcagttttgtttatttaattatcaaaagtatacaattgtgatgagacaatat

SEQ ID NO: 314233 - DNA, 1180 bp, Cannabis indica
atataaattgtgatatttatttttttatatatttttatgttaatacattatttaaaattaggtgtataattagatttctaattaaaaaatggatccaatttaattggatttaattagattttgagatctaattaaattgtatcaaatgatgtttaaatcgaattacaaattaaattggatcacataataataaattttgattgaattagatgctcagcactaaaggaaaacaaatgctacaaacccaaaacttacctcaccatagccaatttagacttagaacttaccactgctaatcctaagtggacaattaatgctatgaagttgaaaacaatgctcttaaaagtaacaatatttggattctagttcctaaaccacttgatgttcaaatcataagcaacaaatagatattcagaatcaaatataatgcagatgacaccccgatctgtggcaaaagattttcaatagactcctaacatagaattctttgagacatacaactctattgtcaagccttacaccatcaaggtcattttcattctagcagtcatttacaattgaaaaattcaacaaattgacataaacaatattttttaaaatggagagcatgaagaagaatcataaggacttgttgtatgttcatttcactttatttttttcaaatttttatctctttatttactatgttgaaattcttgggttattaagtcttaaataaatacatttaatgttcgggtatagagataaggttatttctaattgagtttggtgtatattctaaggttggatattctcccctatataaagtctcttttattgtatcatttaatacatatattcagattaataaaaaaacattttccctctccatctctctaatatggtatcagactaagagagagaaaacctaaccttaaccttgcttgaccaagatccatttttttttgctgaatctctgccatgactcgcatgcgtagtggccttcctccggtgttagctccaacttctggttctcttgccgacgatcttccatgatgctcaactctagatttcgttcgtgaaactgtcgaagatcagcccacattgttaaattgatgtcctccggttcttctccaatcacaggcccttcttgttgggttttattccctaaataaaactctttacaatctgattagttatc

SEQ ID NO: 314234 - DNA, 809 bp, Cannabis indica
aagatcctggtaaaaataattccaacagatccaactcatcttcttctggcaactttggctcaatattctcgtggagcatcagcaccggcaagtcggctgcgacattataacaatgcttgacctctccctggttgccccttactgtgcccactctggcctcctgagtagggaatttcaaacataagtgccgaatggatgtgattgcgccaaaatccactaaggctggtcggccaaggattgcctggttccattgaatccagtgagtagggaatcgctgggcgattgatcccagtctgtgaggcctatggctgtgaaggcttctttgaataataagttcacggaactcccattatcgatcaatattctagccaaaattttattggcaatgggagtctctatgaccaaggggtcatgatgagggaaacacaccagtttcgcgtcttcctccgtgaaggtaataggttgatccatgagtcggggcctttgtgctggaagctgggtgacttcctagatttcgtcgtgtttgatggccccaacataacacttcaattcttttctggttgtcccaccaatgtcaggcccaccggagatcatagccactctaccattgggtcttggtggcagcccaggggtctgctgagggattgttcccccgggggataccacaggtgccaccactccgggtgcaccccttgctaccccttgaggtaacgggcctactgcctgaaccaggttgagatgggacagccggttcttaatccgctcatacaaatgacccaatcggatcaagttttcgatctcgtctttca

SEQ ID NO: 314235 - DNA, 1200 bp, Cannabis indica
ttgtatcactttttaataacgtagaaaaaactagcataaaatttagtatacgtgcatcgcacgtaactttttactagtatataaaagagacatatatattgaacggtcacatgtcactctaaaatttctaaagatctttaattctctcattttttttattttttattattttttattagatttataaatactaaggaattatataataccctaaatatcttctaatttctatttcttttatttttactaaaatatctaagtctaaacaatatctataataataaaatattaatgatgattaaatgttgattttctaaccaaattttttatctattctatataaaatgtggctacataatagaattcttagtttacgataaattattgggggacttttttttaaaaaagttttctattaaaaaataacagttttttttattaagatgtattttaatattaattttaaaataaattaatattacttttaaagtctaagtcaccgatatttttggtttaaccataatatactataacttaacagaatattcctaattaatttttattattttaaatccatataattaacatctctgttaacttttcatctacctctaccatccaccttgtatattattaattaaaaaaatagattactttctaattttataattttataataataaattataattttctcctccttattgcgattgcctaatattccatccatctctcaagctcaaatctattcgccgatcaactcctccgatgtcaatcgcattgatggtataagtaaaaatactcttctttcccctaatggtcaagaatattgaaaagtaattcaagatagatgataaatatttacttactgaaagtaaagttctaatcattttattttaaaaattcttaatttcatactttcctctatttacttttggccattataaattataaatttggtatcacaataattgaacttagtaataacaccatggtttcgtacttaaagtgcattctacttctattgttaattatgcatctgtaaagttatgctgtaatcttcatgtgaattaacactgtaaattgtaaatcatatcaatttatttcttacatatcttccaattattaactgctattataggtgtattgtttagatactgattagtactttgtgtgaaacagggaaagaaaataaagaga

SEQ ID NO: 314236 - DNA, 823 bp, Cannabis indica
aataacaaccctattcttttagaattattagttatattgcattttaaatatacgatgtaacttccttattaaaggaatattttcctatttgttatacgtaacaacttgtaaccctaacactatataaaggataagatacacacgcttaagaggacactctgaacgaagctaatcacgctctgaagcactaaagcatagaattctatcttttcttatacttctcatctgcaaaactcattctcattgtaatatggagagccatagctaaaaattataagattttagcctctaatttgcttggtattatctcaagatcacttaatacaactaaaatgagagtaggtcattacctgaacaaaggggtcgaacttctataaatctgtatctttatatttattattattccacatgtgacagttataagcgaaattcgattctaatcagactccacgtcggttggctaaatccacagttaacaatgttatttgttatttaatacaatacaacctaccaaacgagtccttataattttgatttttgcgttctctagaaaatttcttttttgtaatgaattaggtttttattaaggaaagcctttattagattcatttttgtcatacacatgagttaggcaattcgtgcactaaaaatagatgacaaactaattttgataaatatttttctattttttctctattttcacggaatgttaaagaaaaattaacctaatagatgtacttatattgttgtttctttttcttgaaactatagtattggttttgaaacattaaaaattaatattttttttaaaaaaagaaacatt

SEQ ID NO: 314237 - DNA, 578 bp, Cannabis indica
cccaaaatttaattttgccttaaatcccatataccttaagaccggtcctagtggtgacataaactcaaagttggattcaagacatcatatatattggcccaaaaaaaaaaggatatgttgggggctaagccgccaagtacgaggcgtagctagcccaaatcatctttaactacacctaacactagctccaactcttttaatgtactggccactagtggtgcttagctcttatagacatgtcaccttgtggttgactagtgatactccataaaagttattacattaaattatatgggatccgatatttagtagtaccaatagcaatattgacacataaaaaaatactaaacactactagtatctttcaatatttctcaaatgcacctgagatattagggcgcttttgatatataatcaactaagtattgagtcaattaactgtctatttatttaatatcaacttcgtctattttaattattataaaagtattttcttagtctctttctttttctttctttcaaaagttcatttttagatggttcttgttaaggatgtgcagaaagtcattcaatccaat

SEQ ID NO: 314238 - DNA, 1197 bp, Cannabis indica
ttacaatgcaaagaatgggaaaccaatgcgtattgcctttattctctaacctaatcccacgaatgtaaggattgtcttcgtgtcttggaagcaacgatgcttgtctctaaatttgccaactcacatatcctgcccggtgcatgcgagttgaccacgcgattgtactttggtcggatgtcccttgattactgtgctcagatatcatgctatacgctgatgacacagatatttataccaaccttcgagggctgctaggtgtacttccttccgcccaggtaggaaaatgtaagacatgtgtcatccggctcactaacaaatcatagttccaaaaataggataatatttgcccccaagtttgcgcgtgaccttcctagtcgcacatgacttcacggtcaagagtcttgtctggatggatgatgtgtgtcttcgatggttgaggctgattcgacgtgacttcgactaggggtctcttcggtgtctgagcatttaatacctcttggaagatgtacctcgaatcacggattgatggctaggtgatagtgcatgcatgacgattgtactcttgtaatgagtactaacattcacttttaggggaaaacccaaatttcaaattccaaaaggattttttcccttttctggttgcttataaaaaagagatcaaagcttttggtaatccttttagccattttcactctcaaagaaccaaagcaaaaaaaattatctaagttttccctcagattcttcgaagaagtcattggaaaacctttgacgataccatccgagtagatcaagaaagcttcaaatcagtgagtaagtcatttatcccttgcttttatatgattgcaattgaatgtatgcgttatttctagattctttgctataaactttgtatgttcttgaactgttcttggctaattgtagaataactagttctagggtttgaaattttaaccaacgtttaattataacatctaattatttgactgtgcctcaattttgaccttaaatcattcattcccactcgttcataaggttctgaaaaatatcaggttcaaactgaagttttaaacttctaggattggaaatttcaattgtgggtgaaaccttttcttttcattcttaatttggcctagtcggcatataaaatctgtttttcatttgttacccgaccaactcttattctcttgtctcccacct

SEQ ID NO: 314239 - DNA, 797 bp, Cannabis indica
accatatcatcgggctaccatcaaaccactatcgaacatttgtcttcaatatttactcattttaataacaggaaggcatcagactaccattgggcctcacaaaaaactaattttttgcccaaaactcagatctagatattttcgaccctaaatctaacatgtactcacagataacaaatattaatcatacaatttattcttttgacaacattgtcgatagggaagttgtagttgatggagaagtcactgggtccacggtagtcattgggtctgtgggtccttggatctgtggttatggtggtcgtggagagaagggaccaaagttatggtggtggaatgcgggtcaaatctctagggtgagttcatagagcgaaagagataagggaggaagagagaagattaggtgactgaaatagaaggggtagaattaagttttataaaatattaacctattttactggttaacttaaatttaaaaaaataattttaatctaataaatcataaaaaaaatcaaatttccttattaacaattgcactattatatctgtatacatgtatatatgtacaaggtgcttagcacatgtaatatcattattgtgcaattcgttatccatctttaagcaatgatcgatgtatcacacaaaaagtaagcggcgcgaatgcatataaatcagattatgacgacccatatctagctaattcaaagcacatgcatatatagaagggaaatttgattttatatacttaaaaaattaaaaaaatttataattaaaccaaaaatttaaaccctaaaaaa

SEQ ID NO: 314240 - DNA, 1662 bp, Cannabis indica
aaagtaattagaaaattacagtaacacgcctacaaagaggacaaaggcgccatttaccattagatgtagttcttattttgtgcttttatgacattacatttttacatattgtattttttcaacatattaaaaataccaatttttacttttggggggcctggggcccagttgtcccacccttgggttggccctactctcattaaagagttatcacttccatatagaatatgtgatcttccttagagaaacttcctaactaggatggtcttctcatttggtcactcttgtggctcctccatttcagacatatgatcttatttttttcatctcaggtatatgatctttctcttccatctagaatatgtgatcttagttggttaaactttcaagatagggtggtcttctcacttaatcacacttatccctcttggatatatgatcttgttcttccatataggccagagtttcttatcccctccaacttactttgtgctaaaccttaacctacacttaagaatcttacaaatacaggagacgataaaaaatatgattttatttactctttagtaaatctcgttaggatgtatgaggcaaatcgatagaaaataattatcattaatgataatcaatagattaaatatatattttaaaaaataatgacaatattataattaaaaaagtgtattaaagtaactcattaatgctaaataataatataataaacaaaaaaaatatgcattaattgtgtgccaaatttggcacattgctatatcttgtgccaaaattggcccaagttttagcatatgccaaatttggcacaagttttaacacactggataaggattttttttacaaaaatatcaaaaaatagcgttgcaccacttatttggcactccattagagatactcttaaacaaccttctagctaggatagtcatcttatttgatcatctctgtgactctttcatctaggaagtatatactattatacccaatttttgcaaaaaattaatacctattctctcatgagggcccacaagcaagaatacagcttgaagatatgaagatcaacaaagaagacctcaatcaagcgagaaatgacaaaacgaagtgcggcatgacaaaacgattgactactacccataaagtgttgttagtacccgcaaccgtagggtttatcttttaaacaatcagagaaatggttactcacctcgaaaccctaaccaagaagaaatccaataagtactaaatatacttaacttgttgggagtacaatagcacaaagaacaagatgaaatacaaagtgaaggagtcatacacaaatactgacaccagcatatgtctagtactcacctaaaaagaaatcctagaagtatggtggccaaatggttctctccaacatcagtgatgactttaacaaatgagagaagacccaaaagaagtgtacaagtgccagaaatgagtactgaccactcccctagggcagtactcgcgtaaaagcttagggataaggtaatcttggggatgttgtgacagtcagtagtcccgtgatccgtaaggggaaataccgggtaagttgtacaatcccacatcacttggagaaggtcaagtgggatgattctaaggctgtgtaggtatgggactacatagttgaagagagct

SEQ ID NO: 314241 - DNA, 699 bp, Cannabis indica
caaacatatatatatatatattccctttttagcattcaaacactcaaacacacacaacccaacctccactttgaaaaccctagcagagaaaccctagagctgccttcgtcttcgatgttcttctctgaagaacacgaagacagcagcaccaataacagcccacaaaaaccagaaattaaacccagaaaataaccctctgcccaattcgaacaacccccttaaaaccgagccttgttcttcgttgttcttctctgaagaacacgaagaacaccaacaaaatacccagaaaatccctagcataaattaaataaaacacagcaataaaagtgcaaaaaagaaaaggaagaaataacaccgggttttatagaggttccccaaaatcgtgctgggtacgtcctcttcgagctcgcctcgttcactatggatcttcaatgatcagatgattacaaaaggtgggattccaaaacacacaggtattgtttggtaatccgaatatgtttacagtattttcttcctctctattctctctgtttctctcagattttgtactaactgttgtgtatttcttctttgttgcatgaacaatcttcctgagatcttggatatctgaaccacaccttgggttccaaagcttactccattgtaagcctcctccaaaaaactcccccaaaaaaaaagtttgtttcttctctgtgaaaa

SEQ ID NO: 314242 - DNA, 404 bp, Cannabis indica
cccgcacagtaaaagatatgcctctttggtatcaccgaggtaattaaagtttccttctgggttggccttccaaaattcatagaaaacttatagggtgacagacaccaaattctcaacctccttcagaatctcttcttccctcgtctgcctggatttaacatcctcttccaagtttgtcttatccgtggtcaaggttgtaagaagagtacagagaccctccctctcatcctttagaccattaacttccttggatagagcctcgttatccgcctcgagctggacggtagatggcatctcttggatctcgttctttagctcctcaactcgattattggtagctagaagtttcttgttcagactgagctgcccttacagcctcaacctccttctgttggaaattattt

SEQ ID NO: 314243 - DNA, 663 bp, Cannabis indica
actaaaccaagagtcccattttcatatgccccatgatacaaggcaagctaaaatatagattatcaccaaaagcctccatcatcccatacaactcacacatacgcgcgatcagacattcacattaatattatgctcaaaaagattgaagactttgtaaaatttaccttcatccccaaggtgatcgtaaacatgaaaaaggtgcaagaaatttgaagcttcttcttcattagccttacaatacacatatgtattatcagcaaaaagcatgtgagacactattggagctcccccagctactttgcaaccccgttagccaacgattctgctcataggtcttcaacaaagaagagaaaccttcagcagatatcacaaaaagataaggagacaatgggcttgtctcaaacctctacttgaaagaattggatccataacgtgccccaaatgagttatcgtataacttacagtagtcacaaaaaaaaaccaaaaaaataggggtctgtcgaaacccatacgaatcagtaaagcttctaaaaaaatgtcattcgaccctattataggccttactcatgtcaagcttaagggccataaaaccctccttactaaccctttttctcttaaataattcattatctcaaaagagaccataatattatctgaaatcaa

SEQ ID NO: 314244 - DNA, 977 bp, Cannabis indica
tcctcgggacaacagtgcttttgtagttagtcgcattttgtattgaatactaaacttttgtaaagtattttacaaatgggatcccgaaatattttgtatgtaatattataagttttaattaaatagcaaaattttaattaatcacgattttcattaacctcgttgattagcaacaagctgcacagtacgtttaaaatcacgtcaacacgcctatgatagttagggtgttacattccctaacaatattatagggagaaaagttataaaggctacatattagcgggcttctaatttagtggaccttcgattaaaatgttgttgcttgacatcgtactcaaacaagcttgtacttttcttgtttcaatctaatccaatttatatatgtacttgtgtgagttagattacattgaaaatttaaaaatcacacatgtgtaaattgagtgttaattgacatgtaaaattaattcatacaatctaatttacacatatttatatataaatataagaaaattcttaagcatcattgctcttacacatgagaacattttttaatatgtttcggaatgaatagacttgtgtgaagtatgctaatatttgttctctaaaaaaaaaactcatcaatattgttttcctcccatcatttgctcaatacgatttggtttttttattgtcaaatttaagttttcagataatcattagtatgttattctctctcttcagtgattgacttaatcaaagtaactgaaaaaaaaaaatgaagctataaacttctgtcatttttgccattaaaatgatgaggaaaacataaaagaaaaattgaaaaatcatttctgtaagacacttaaagagagagacaaataagaaagaaaaaaaataatcctaaagaagattttataatgttaaaatctagtgagaaaaatgataaatcatattttaaggtgccgtttggtaatatttttgtttttaatttcttaatc

SEQ ID NO: 314245 - DNA, 724 bp, Cannabis indica
aaaagagatgtgtttgaacattcagcaagatccgggtgaagaaatctggttttataaccgcttgctaccgaatatttaccatgattgttcaagctccatgatatccaatcgggtcttgaagttatggggattatgccaagcacccaagggatatcatctttatgaaaccaactatagacttcattgactttccaattcccttcattattaatcaatttgtctagagtggtaccttcagggagcattgcttttgtgcgaagagagaaaggaattcctcttggaagccaagcatcttcattgattcgaatagtacaaccgtttccaacacaccactgagaacctttaaataagatctccctaccccaaagaatgcttcgccacactgttgacccgtagtgtcctagactagcttccataaaggtaccatgaggaaagtagagagctttaatcactttagtcattaaactatttggttcggtcattaacttccaaccttgcttagccaacattgcttggttaaaatcttctaaatcccgaaaaccaatgccaccttgctccttaagtctacataatttcttccaattaccccaatggagcttgtgtttattagaggtagaaccccaccaaaacctcgcaatcatattctctatatccttgagaatgccttttgaaattctaaagcaactcatgatatacaagggatagcttggatcacagctttgat

SEQ ID NO: 314246 - DNA, 997 bp, Cannabis indica
ttacaattaatgagttaattacactactatatatatcttatagtttcaattatatttatgtaatttttttataatatttcacagacaattatataaaaaaaaataattaaaattattaaaatttaaatatttacttataaaattttaaatttttagcgcgctctataaataaataatatatagtattgcttttacatttttgtaataattttaaatataaaattataataatcaatattatatttaagttttattattattttactttataattgacaaatacatatattattattattattattataattattaaattatagagtttcttaatgtttcgtgttgtacttttcggacttgtcgcacctttcgggctaatctatttgtatttatgtggcgtacttttcgtgcttctcacatcgtgttgtgttttatcacatattttcctaacagcattgtgccaatttatagcatcgtgccaactcatgtctaaactcatatttttttcgtacctggtcatgctcatgcaaatttcgtgccgttttaaaaaatctgacctatatttacaacactaattcccataagctactttagtctcccaggccaattttttttttcataaattgtgctaatatgaaatctgtcattccttccagccatctcaatatctggtttttagaaactctcctatcttgaacctttgtttgtttgatattttctttttcaaacaaaatatatgaacattacaaatcaagtttaaaacacaggaacatgttacatgtataaacttgggaaaaaaaaaaactatcaattccttcatcatatattatacaacaagtttatcttatgtttgctatggcttaacactcaaatacaaaagctgcccatagtaagcttataacaggtcctcttcgagacaggacaaatctccaaatgcacttttcgagacagtgccaatctcccaattaaaccaaagttctattttctcattccatat

SEQ ID NO: 314247 - DNA, 877 bp, Cannabis indica
catatttatcataagaacttttaaaatcccatagtaagtgtaattttctcaacaattactttgggatatatagataggttttattcttatttttatttttgtaattatagttttgacaaactataatttagttcttgagttataaagttatcaacttttaaagttattgattattgaattagtgctcataaatctactacactctaattgcatttaacaaaatttatttatatgaaggtgtaacacttttgtccattcaagctttttgagaaataataacaaatttttaaggcaaattccgcaacattattaatgatgacattaaattgaaacctattacatttaaccattgtcaaagtttccttctctattgatttcatggttattattagaagtttttacaagtttttttatacatgtttccaaaaatattcttaatttatgttactcatgtatagtacagtacaacctctattcaagaatacacttggaacaaggaaattatattctaattgaaaggttataactaaatacagttacactagaataaaaattcaaaataccaaaaaatatcaatttaacaacaatgacattaaacaatccttaatattatatcataatagaattatttttgagtaaatataatatttatacatgtattacaatttagaataaaataagtaattctacataaataattttataaaatatatgtatatattttattaagatgtaattgagtaaccacttgaggctagctcaagtggccataggtgggtgtgtgtgttttgaaggtcttgggttcgagtcccaggtaaaacatgattttaatatataaacgcttaaatcaaaaaaaaaagatgtaattattcttata

SEQ ID NO: 314248 - DNA, 1120 bp, Cannabis indica
atctgagaagactataaattaccttagtaaacttgctattgcatagaaattaatattaggaagataatcatattagaccataatcaatagaaacaattaaaatcgaagccctagtttttattaactgtcaattttcttgaataattgcttcttactagttccttatttttaattctttcttaattttcattcaaccaaatagaagtaaaggtttaattttaacgtacttaactgcacttcctgtgggatcgacctcactcctggtgagtttactacttgaaacgatacgtacacttgcgtgtgcaaaatatcgcaacagacatccaaataatacctattccattactggaagaagttttccaccaaaaatgggtcatgagtttttcaatttcatgacatgtactagcaggaagaaggaagacactcatagcatatgtaggaagcgattcgacaacaattttcaagaaaattctttgccggcttgagaaagaagtttttcatcccaactgttaattcttctaatcagcttgttctttaggaatcctaaaaaaacatttttgtttctcccaattgtgtttgggatccctagatagaggcttcctttagaggcttcaagcatatggagaatttcaccaatctgagcgcgggaagaagagctcgtattgaggttgaagaacacagtggacttagaaaagttcaccttttgaccagattcaaattcaaacgcaaatttgagacacttccagcaacactagaagttaattggcaaaacaaatagctatcgtcggtaaaaagcatatgagtgatagaaggtgcgccatgagccaccttgcatccttgtaaaagccgttgagattcaaacttcttaataagtgaggatagccctttggcacaaataatgaaaaggtatgtcgaaagggggtcaccctgtcgaatacctctcgtggcgatgatatgacctaaagtatggcttccatgaattacagagtagctaacagaagaaacagaagccataacaagattaatctatctatctgcaaaacccatggaagtcataattgtaacgtctccgcttcaagcctccattgggtccttacacccacggaatgaatggctctta

SEQ ID NO: 314249 - DNA, 1080 bp, Cannabis indica
gtgtaactgatgtgcaagaaaaagtcaagatttgtgggcagcagctaagttcttgggggaagaaggttacagggaattttaaggacaggataaagaagtgtaaaagtgaactgcaacggtggaaattagggcgtgatgggtcttcagttaccaagtataaacaagctaagaaggagttggctgaagcttatgtacaatgagaaattttttggcgtcaaagatcgaagcaattgtggctccaagaaggtaataataatagtaaatattttcatgcttatgctactaatcgacgtcgtaataactttagtgctaaacttaaagataataatggtaattgggttgattggagttcgggtttgcctcaagttatggttgatgattattctgcacttttttcttcttcaactaattcttggctggaagttatgagtgctgtggacagtcgagtttcagctgaccaaaatgtcgacttgctacagccggttacggatgaagaggtttgaaaggctttgtttcagatgcaccctgacaaggctccaggacctgacggaatgacaccagcgtttttccaaaaatgctggtcggttgtgagtagtgatataattactttggttcgagatttctttcaaacggggcagcttcctagaggtttaaataacactaatttcgtgttaattcctacgaagaaacagccaatggacatgggagacttaaggcctattgccctttgtaacgttctttataagattttttcaaaggtgattgctaatcgactgtaagttgttacgccatcaattatatcagagactcaaagtgcgtttctctaaggtcgtttaatatcagataatattatgatttcttatgagataatacattatttgaagtggaagagaagaggtcgtgatggtgttatggcacataagcaaggcttacgactgacttgaatggggatatcttcgggctatgcttgaaagaatgggcttcgatggtagatggattaatttgattatgcattgtgtgggcactgtctcgtacacgatctctcatggggaaaggagttgggccctattgttgcacaaa

SEQ ID NO: 314250 - DNA, 1411 bp, Cannabis indica
ataaagatcaaaaatcataccataacttagtcatatgctttgttcacatgtttgttacatgattataggtttaatattattatttgtgtttctgaataggtgacacgtggcataagatggaagagataatcttataatcttactaattaaaaccccccattaaagcctagccatagagaagcttcatggaattgggaacaagtcaagacaaagagataagaaggagtctacctcgccttatcttagcttccaaaacacggaacacctattatcacttcaggtccctaagtggtccaaagtcagagtctttccaactgatacctagatgggtactcgaagggcttatcgcggatgcttaccgcccaagagtgtcatggacgtcttcctttgatgtaatctggatcgctcaccgatggttatgctttttctaacatagaatcagatcttgtctcctgtgccaaaacatggtagtgtgcgcacctcacatctttttgtcagacggttattttagacttctacttttaaaggttaaaccttttagcgacacaggtccactatgtacaatggtccctaattgtccaactactgcaatgcacgagtacaattctttctaagggcccccatagtcagctcttttttgtatgtattttaccccattagtgggctttttatagattccctaagtgggtcatgggcatgtccatatatacttgcccttagcctacaaatactcttttatttccatacgaagagggagatcacgagctagatagtcgaagctccttcaatattgctctaagctttcctcttcttcaagaaatgttcaaaatatagagttagggtttcctaccaaatattttaaacacatcaaacacacccttagaggctaatagattgactcatggactaaggttaattaacatctaaaccacgtaaaaatctccatctcatttatttctatatattattatttctttagttctcaaatatttagtttctgaaaatctcagtaaatattttggtgctttcattgagagttgaggaaaggcctaaacccatagtgttgatgctaccatggtttttacacaaaagacaattcctaaaaagattcttctaggaggcatagacattgtcatggaggaagtaaaccctcctcgtcagagcacgcccagtcgagcaattcgaggggtggggatacgtcctacattaacaatcaagaggataacctaaacaaccagcacaccaatattgatgaagagagagatgctaagaatgaggaggaagacgaagatgtagcatacgtcaaagatgggtactacaaagatggctaccacgacgagtaagacctcgaagtagtttgagtgttcaatgaattgtgcgagactaaacagaagttagcccatcaagagaa

SEQ ID NO: 314251 - DNA, 705 bp, Cannabis indica
tatagtgaccaagaagtaaactgcatcttcctagcgaatcccttgatgaaagggaaaaataagggaccaagccaactcaaagcagcatgtttgctcataaagagttaccaagcccttcaacaaatagatcaaggaaagaaattcttcgtaagagacttagtgctttaaagaataccccttgacaacaaaggtcctacagcaagcaggttcagacccaactgaaatggtctgcaccaatttacaagataacaataagggtgcataaaagcctggcgagtacaacgagaacttagagttggctattctaccaaaatactagaataaagaacatctcagtaaaatctctcactagccaacttgtatattagttcctctaacgtttcaccaagaagggacccataaaagagccagtacccattgtcctctagcgatggcttctcatcactcttcagtgatggcgtttgtatggtaaacactacagaggcagccaaatataaaagagctactacccattacttttcagcatggcctcccatcactcttcagtgatggtcattgcacggtacgccccgcaggggtagccacacatgactttaaaagcagacactaaactgtaagcttttgttacacgtaagaccaactgtgtctaaaccacttgctaacaaagataatttcttaaagttattctttgccagttccacatgc

SEQ ID NO: 314252 - DNA, 771 bp, Cannabis indica
gattcaaagatttttgtctaattttgtttaattaactagtatgataatgtccatgtctaaatcttgtttgacaaactttgatacgtactaaattgtgtccccaaactttattatgtacaaaatcgtgcaccttgaattttcatcaacgttagacacatgttattaaatttggacgaaagctcttaaatctaataatctcagtaatttgaagaaaattttcaacagtctaaaattaaaaaacacaatttaatacatatcacaattcaaaagacaaaaattctaattaacatttttttaaacccaaaagttgatatattaaactctaaagatttcccataaattttctcatgtattcaacataagacttattagtatttggttttttatttttgtagagggcttggttaacttaattttgttaattagtaatgaatttaatttaatttacccaataataaatacatatatctttctcaaaaaaaaaagaaaaagtttgcactgctttggcttctaagcatactctattggctgagtttgggtttgttctaattcatattttatttatttgtaatagtttattgtttttggtttcaattattataatcggtcatgattttcttataaattagttcatttagattgtgctatgctgtggtggtgaggtctttcatacaactttcaagttgtatgagtttttttagaagaattacttcatatattattttttttttaaatttacggtttgagtttctaaagtggttgcagtgttag

SEQ ID NO: 314253 - DNA, 2083 bp, Cannabis indica
cactagaggtgacataggttcttcgttttgatagcttgtgcttgagggtagtcgttctacacataacgacacaagtggggattgttcttccttatgagtaattcaatctccctcttcaagttctaacactattgggtgtcatggacgaagtcattgtgaaattggcagaattttgacatgtgcctcttgctcatctcccttttgatgagagggggcttcttgtataagaccatgccctgagtggtcatgttgatgattttaggtttctctattaggagagtgaaacaggtgtacttctcttccttatctttttagttttgtggtgcgagagaagtgttgtacttccccttctacccttggtttcttccagatatgttgttgctacgcttgcccccagtgttcttgccactaaagttctgggcggcatttcttgtgcccgcctgtgcgcctggcaagtcctaggactgtagggcaccctgagacttcctattgctgacttactatgattgggcttgtcgaacagcttctttcagcttgataaagttgtcagccctatcaaagaactccttcatattgttggttgagatcctctaaatatctttacagaagtcacttaatggaaggatgccccccagtatggtcgtatacaagtcttcttctattaggcctttgaccttggtggcctcgaccatgaacctttggatgtaatccttcgtaggttttccttgttgttgtttgagctcgacaaggtcttcctgttgtgaaggtatcagtcttaaggatgagaattgagtataaaattcttgggaaaattcttttcaagaattaaatcttcctagagccaacttgaagtaccattgctgagttgtttctaatagggtttttgggaagatcaaacatcacacatcactagtaatcttctagagatcaagttgcatctcgaagtacttgatgtgtgcatgtgggtcctctcgtctggtatacgtcttccataccgacatcttgaacttgggcaagggaaaggcattgatgtatgtcgaaaatggtgaatcccttaacctatcaagttcaagatctaaagtttttgggccagctaggcccttgatcaggtctcttatttgatctgttcttgcatataaggatccaatgttgcaggggcctggctgattggcccttcttggatgggctgcagctctgaatgggccaaaatctggttggctataccctaggaaaaggtatgctcgaggttggccagccctaagcatagtagctggctttggccagccactccaatgtaggggaactggccttggccagccagccctactttagactgttgctcatggtcggccagctttatgttgggtagggcctagcttcccgttcttccctgattggctagttcagcctatgtgttgacaaggggtagatcacaccaacttctggagttaggtggatctaaatatctgaagtggttggactcacttctcaattttttgttatcttgggtgtttccacccattcccagacttagccgattaaagatttgcctttgggttacttggtcctagatgtttcgggataggagtccaccttgttggctggctagaggtgcaccactaaggggctggcttgccaaaggtcgacaaattaggggtgttgttgagccagagatctctggctgccccccagactactaattgttgaggtctgcctattcttgccacaagatctttgtggcaagacttgtcgtccttaagacaggggaaggtctatcctagttccaaatgaaattggttagaaagtttatttgtagacactccctaatctattaaccagtctccctttgagatgatctctgatgagatcccgacctctttcagcaattctttcattaaactgccttatcaggtcactagcttctctattatggcgatctagctttgcctgagatcggaggatgtactctttatcatccaacaatcttagaaactttcatctctgttttacaaatacatcatagccaatagctcgtggttcttcagtttggctgacttaacagacaacctctctaagtccagct

SEQ ID NO: 314254 - DNA, 3368 bp, Cannabis indica
gaagcctcaaaaaccaagaaagtggatgacgaataacagcttgcacttcttcaagccgggatccgtacggggaccccattctggaatgaattacaacaggaaggagctgctaatctccaagacttccagaagagggtccaaaaatacatcaacttggaggaggaccaaatagttgcctatagaggatactatccaacaggagtatcaggatatagtacccaaagcccagctctcgggagccctacctccggccactcctcaattgagcggcatacagttcttcgctacaccaggatataatcagagcctagccttggctcccgcatcattgcattttgggaatcccttaagtaacccctcagggatgagcaaacaagccccgtctcactctgctcctaccgcaagcctgacaagacctcctcaaagctcccggagcaagaggtcctcaaaaggtagcaaccagacggaggacaggcgacaacgaagggggtatacccctcaatatacccaatacacagacctaacggacacgcaagagcgagtgtatttcgccacaaggcaaaatacacactaccggaagcctcctcccctgtacagggacagttcgcgaagggatattagcaagagatgtgaatatcacaacaatattggtcacagtaccaatgagtgtaaaaatttgaaggacgagatcgaaaacttgatccggctgggtcatttgtatgagtggatcaagaactggctaccctatctcaattcgattccggcaggaagcttgttaccttaggtggccctaaggggtgcacccggaggactagcacctgttgcacccccgggggagcaatccctcagcaggttcctaggctcccaccaatactcaacgggagagtggccatgatctccggtgggccccatgttggggggaccacctgaaaagaattaaaacgctacactggggccataaaacacgatgacgtgtgggaagtcacccagcttccaacacaaaggccccgactaatggatcaacccattaccttcacagaagaagacgcaaaactggtatgtttccctcatcatgaccccctagtcatagagactcccattgccaaaaaaaaaattgtggctagaatactgatcgataatgggagttctatgaacttattattcaaagaagccttcgcagccataggcctcacagactggaatttatcgcccagcgtttcccaactcacaggatttaatggaaccacgcttatcccaatgggaaaagtgatattaccagtcaccctgtgcccggatacacctcagagtacttttaagtactgcacctttgtggtggtagactgcccaactgcatacaacgcaatccttggccaaccggccttggttgattttggtgcaattacatccatccggcacttgtgcctgaaattccccgctcaagaggccggagtgggaaccgtaagaggtaaccagggagaagccatgcattgttataatgtcgcagcccatttgccggtgctgatggtctgtgagaatattgacccaaagttggcagaagaagatgagttggatccccgtgtgggatcggaaaaaattgtagaacccatggaagacgtcgaggaagtgcaagtgtgcgacctcgaccctaccaagatcctccgcctgggaaagagcctagagccggaggagagagacaaaattattgaagcattgagggcggccacggatgttttcgcgtggtgccaaggagacatgactggcataagcccagataaattacccatgtcctgaacgttaatccggatatgccgccagtacagcagaagcgaagtccccttgacccagtaaaggcggacgccttaaaaaagaagtggacaagctgctagccaatggcctgatccgagatgtgtactacccggaatggctggccgatctggtgctggtgccaaagccaaacgggacatggcgggtgtgtgtagacttcaccgatctcaacaaggcttgtccaaaagactacttccccttaccctggattgaccaaatggtggatgccacctccgggcgggttcaagctattgtccttcatggatgcctactcaggctacaaccagattaagatgcatgtcgcagatcaagagtgcactagcttcaggagcgacaagggggtatactgctacttggtcatgcctttcggattaaaaaatgttggtgcaacatatcagagaatggtgaaccggatgttcaaaggcctcctaagacaaaatatggaaatttatgtggacgatatgctagtcaaatcaaaaccatgcgtaagccacgcgaacgatctcgcagaatactccgaagtagtccagagatatggaattaagcttaacacaaagaagtgcactttcggggtcaagtcggggaaattcttgggattcatcgtcagccaaaggggaatataggcaaatcccaaaaaaattcaagccttactaaacatgccttcccccaagaagcacagagatgtgcaaagcctgaccggaaaggttgctgccttaagctgattcatttcccgatcaaccgttaagtgcatcccttttttcaacattttaaagaaatgccaaaaatttgaatggactgaagaatgcgaggaggcattcagaaaaccaaaagagcacatggccaaacccccgattctatcaaagctagttcacggagaggatttgttattgtacttggccgtctctgggaatgctgtcagcgcggccttagtccgagaagaagacaaagttcaacatcctgtctactacgtcagcaagcgtatgataggagccgagatatggtacccattgattgagaagttagttttctgcctcctgatggcttcaaggaagctaagaccctacttccaagctcaccccatcagggtgctaacaaaccatctgcttcggcaagtcttacagaagccggaagcgtcaggaagactcctcaaatgggccatggaattaagccagttcaagatacactacgtaccgcgtatttctataaagggacaagccctagctaacttcataacggagtgcaatgaagtagaggctagtgcaagcgtgtcagtaccacaaaccccgacatggaagatattcgttgatggagcgtcaaacgagaacggatccggtgctgggatagctatgatatctccaaacgagcttcaactccagcggccctacattttgaattcccgacttctaacaatgaagttgaatatgaagccctgattgcggggctgaagttggcgaaaaccatgggagccacgagagtagaagtcttcagcaattcgcaactggtggtaaaccaagtctcgggagaatatcaaacgcgtggagaaa

SEQ ID NO: 314255 - DNA, 930 bp, Cannabis indica
gcgctgcaaccactttagaaacccaaactataaatttgaaaagaaaaaaaagttaaaaaaacagtagatgagataatttcctttttttgttaagaaactgaacatattatagtaacttacacatcaggatatgtattttcttttttttttctttttgtgtatttacttttaatcataattgttttttaatgggtcatggcatatttaaatatttaattggaagatattaacatcaaataaatagtatataaactgagaatatcttgtgagaattattaagtgatgtataatatatcaataattactcatcaacaaccaacaacaaaatacatttctcataggaatttaaacttactaatttgataatatataatattttcaagttgatgttgaaatcttttagagtacttcttgtgcgtagagagttatgatctaagtacattatgttaaaaagttttcttgtaaaaaaaaaaaacaacaacaacagctttgaagagaaaaaattcataatatggaaaaaaaaaatagtaagagataaatttgatagattataactctaattatgtgaacaaaggggcatcaaatgagaaaaaatattatcgggagaaaagataatttatgataaaagttttttatttttgattagatttgtaaatttatggtgtgaaactagcctaaatgacattcttatttaccatttatctaagcgtaacattacatgcctataaagtcattttgatctacataacgttggtttacattagtggagataaattggatatacatgcctatggttatcttgaatgttttgtggtaagggaaatctttatgcacatgaattacatgtagggcttttttcataaatgtacaacaaaaacaacataattacaaaaaatgtgcaaaaaaaaattattttaaaaacttatacat

SEQ ID NO: 314256 - DNA, 1135 bp, Cannabis indica
taaaactataaaaccaaaatataaacataacataatgtattgttccaaaaaataaaaataaaacacttaaaaaaaattacaaaaactatatctgtccaaaaaaacaagtcaaatatttaacaagaatctaagttcttcttcttggacttctttccctttgtcgtatcttcagttgaatatccttcattaatcttcttctgggcatagatatacaatgtcacagcaaggtcatccctatagtttgcaatcatgtcatccatatttggaagaatctcatttatcttaccccggatgaatagatcagcatacttaatcataaatacaccacaatcacagaaaataaaacaaaaataattaaaaatatataaccagttatttaagcagaaaaaaaatactaaaaattgatagaagtcacatgataaaatataatcagttatttaccttctgctttgggtgggaaacttgtccacaaactcatacccaattggggtatccttcggaacaacataagggcctgactccaaactattatcgttcctaccatcataaaaatttaagaaatcaagaaaatatggcagtaactcacaatacgcaaggagattaggcaaaatcttcttctgatttgtcttcgtattcttcattgaattgtagacgaagattttcctcctcaaaatgctaaagtgaacaaaaatccaatgttcttgccgactaacacgacagggaccgacaacatcgtccacaccaatccaaggctgaaaacaaaagtattattgccccagaatataatcggtgaccatgttgtcgtacctaataacacttggatcacgtttcgctttaatagaatcagcatatactcccttaagtgttgcatcaaaatatatgcacgtggtcatcactctcttattaacattcgcatctgttgaccgaggttttcggcaaccaatataataatagtatttaagaaagctataaggaattaatgagagagatttttacgtggttggggcattaatgagccttagtccacgagtctgtgtatttatgagagtatttattacagagaatgttcttggtggttttcctctctagttcttatgaaacccagaattcttgacccctgccttaatgagtttgg

SEQ ID NO: 314257 - DNA, 1230 bp, Cannabis indica
ggtaaaataattccaacaatatgctgataattctaatcatgattgaaattttaaacaaataaatagaaattgtcatgatctaagttttcaaaatttaatgcgggaaacttcatcgatctgctatctaaattctcatcgcccttcgacacgagttatgcttgtattacatgatgggggcttaagagcggaggaatgagctccttcccacaaatctttgttagcgaaatatgctagtgatttgagctgaggcaatatgctcttatcactcaacatagtgacgatggaagacatattaggcctatcaactggtttttcttgcacacacaacagaccaatgtggatgcaacgcaatgcttcttccatgttgttgtatggatcatttaacaagcacttttcaataagcttaaatgcactgccttctttcatcagagtccacgcctaataaacattataaatatataaataaaaattccaaagagtcaatgtaatatttaataaagtttgttctatgcacacttaccaatccggtgaggttaagaatgctatcttcgtcgtaaaggcctctacttttctttccacttactctttctaacaccaatgtgccaaagctaaatacatcagattttattgagaatagggcattgaaagcatattctggtaccatatagccactgtatttgcatagcaatgtatattagtatgtaatatatttatattaaagcagctaaaagatttttcaagatgacttactaagttcctacaactttcttagtgtttccttctatttggtctccaccaaaagttctagctaggccaaagtttgaaaattttggggtccatgtcttcataaagtagcacattacttgctttgagatctcgatttataattctcaatcttgaatcacgatgaagatagagaaggcccttagcaattccacatacaattttgtaacgcttaggctattctaaaagtatgctttgcctttcatctacaaatgttggcttctacatatattagaaaaaaattggcaaattgtatatatataaagaacaccacataggttaaaagagtgttaccaaaaatgaaatagtataggcttttgttggacatgtactcataaatcaatagcttcatttctctatgaatgcagtagccaagtatcttgacaagatttcgatgttgaagcttagcaattagcttaatttcatttttgaactcattgactcctt

SEQ ID NO: 314258 - DNA, 2045 bp, Cannabis indica
atcattactaaaaaaaatttatatcaatagattaaaaatcatagattataaaaatacttttaagaacaaaagtagtgctctcaattaaagaataccatatatataaatactagtatcatgttagggatatgattttgtctcgtgatatacttttacaaaatgtattccgtggtacattagatgagtctcagggtacattaaatgaatgtcaggtacttagatgagtctcagggtacattaatagtttgggtacgtttctactttttaaccttaattacccctagattaatctcagccgtcaaatcaaataactccctcatctggcggctgtcgtacatcacggattacaatctgtgaaagtacactaatgagacaaaatcatatccctatcatgttaaaacatgtaggttcataatcttattttaatcaatttcgttcaaataagaacattgtgatacatgttcttaaatataaggtgtaatcttttatcacattgtttaaatgtatgcttataattttttctgccattatgtactaataaaataatatagaaatattaatataatatataaggtcatgttcagtttaatataatggagattgtaatagaatcaaaagtattatttttttttagagaaaaaattgttattataaattaatgaaaaagttcatttacaacaatagaatgaatagaagcagggaaatctgctcgccaaacaatatcagaatccatcctaagagcaaatctagctaaatcatgcgtcacttcattagcagaacgacatacacgagttaaagaagcttcaggaaagaaggacaactgataaataatacttcgaatcgtagaagcgactataatgctgttgataggcattgatactttgtgagacaacgcgaggatccgtttcaataaggtgaataacacaagcagaatgatgcaaccattgtaagcaaaaagaaacggattgggcttcaatctctttgacttgaaaatagccccaaatctgcttagaaatggtagtcacaacattaccacaagagtctctaacaataacaccaattcccataatctggttagttgagtcaagggcagcatgcatcaacattaagtttcaattgtcccagaggaagaggctgccatgcttgaccatgttttgagagagaatgagagcttctttgttgccgactggtatgagactgaaattcagcaagaaagttgagaacatttgcaaagatgattgaaggcggatgtaatgagataacaatgtaatgttaattacattacgcaataaattattttattaattgaagaagctatgtaatgagaattacatcataatattaaataaaataaaatgtaaaatgactcaaataccctttttatataagaataaaaattaatagataattttatgaatgtatcacttatttaaatatgagttaattgcagcataactcttaaaatttttactttgcttacatttaatcccccaaactaaaattttgacaagaaaaccctcaaaactatattactgttagcaaaaacacacttccgttttcctaatcctgttattttccaacgtggcttagttcaattcagccaacgtggacacagtgtacacgtgacacaatattattgatcagtgtaaatatttttttaagaaaaataaaatttaaataccaaattaatttataaataaataattttaaaaaaaataaaaggaacaattttcttttctactccttttttttcgtgtttttatttcttattcttcatttctaccaacaacaccgccaccacctttatccaccatcaatcatcagcaaaaccaccacaaaaacaacattaccctaccatcgcaaccacaaggaaacctctagtttagagtttggattaatggtagtggaaggcggaaaaggaaaaaagatgatgaagaaaaaggagacttggttcgggatgaacagtgagcttgttcttgggtctcgaagaagaagaagaagaaaaagtaaaagtcaagagaaaaacaaataaaaatattaatttt

SEQ ID NO: 314259 - DNA, 2992 bp, Cannabis indica
aagaaggagaatcagactcaagaaggagagaaagagatgcaggttcagatcttgataatgctctgctacagaaaggaatcaagggctagagatctgaatggaagaagtaattatattccgttacacccaatgtaaggttttcttaaacccttatgcgtttatttcattgttttagaaattcatattaggatgttaatgaaacatacttgttagtaaatctagatcctagtaaaatatttccaacagtgagcactcctattgataaccaatttgggttgcatctagatcacttaacgtctatagtacaataacttgttttaggccaaccgacgcgaccttgtgggatatgtcaggttgtggggcatactgttgatacttgtcctactctatttgaagggccaacagaagatgttaatgctattgaaagtttcccaggtcaaccaaggcagcaatataatcctggtttgaacacatttaatgaggaatgacgtgatcatccaaattttagttatggaaaccaacaacaagttgcaccaactagaccacctgggtttaactatcaacaaagacctcaagcataacaagcaccaccataaaactccaagccctctattcaagacttgattactcccttggccacgaatgcactacggtttccacaaacaactgaagccacgttgaagagtttggcaaattctatgggcaaatcgctacatctatggccaagatagaagccaaactttctaaaagattgccttctcgacctattgaaaaaccaagagctcatgctaacgccataacgttgagaagtggcacaacttatgcaccatcaactccaccttcctcatccatccaatctcctcttgcaccatcaccacaagaggatgagattcaacctcccaaggatgcaccaatgcctaaaccacctctacctacttatgttcttgttccttcattccctagtagattgaggaagacaaagaaagatgaagttgacaaagaaatccttgagacattttgcaaagttgaggtaaatctgtcattacttgattctattagacaagtacctcgctatgcaaaatttttaagagaattatgtacgagtaagcaaaagttgaaagaggaagaaaaagtaagtgtgggggagaatgtgtctgtgattctaccaaaaaaaaaaaaacttcctcctaaatgtgaagatctaggaagttttatgatcccttgtattatgggggataaattgattgatcgatgtatgttggatttgggagcttcaataaatctcatgctatattctatttatgcttcgttgaatctttggccactaaaagaaacaggaatagtcattcaattagccaatcaatctaatgtctatcctcgtggagtagtgaaggatgttctcgttaaggtaaaaacttagttttcccagttaatttttatatcctagacatgaaagatgactctatttcatgcactacactggtgttgttgggtagaccatttatgagtacggcgagtataatattggatgttaagtcaagaacataaatgatggaatttgatggtgattaaatacattttagtgtatttaaatctaataatccagcatcaacactaaaggtattatcaaagtcgagctaacgacgttaaataaagtaaattacgagagtttttctataccattttctttttattttgtattgattatatttgattgagccttgaggacaatgcttatattaagtgtgggagagagattaattgtcgtgtgtatccagatttttttccttagttatttatttatttttttatcgttttttttagtttatattagtttttctagtgatcatagtttgaatgaaattctattgacaatgattgctcgtgtttaatgtgtgtttactttgatgccttatgcatggtcttacagagtgaattttcattgaaatacaaatttattttgagataaaaattaatttttggcatgcatgaattaatttgaatgttagtaatatgatgagttgattgaacaacacacacaaaagttgagtttgagaagtaattatcttgagttaaaattttaatgattgaagagtttaaattttcttaaaattataagtggatgtataatttttgaaactattttttttcttcataaagaccgatttatttaagcatcattcattttatcattaacttactcgaggacgaccaagagtcaagtgtaggggaatttgataagtcaatattttatcttataaatatagccaatttatgtattaatattcttaaattgattctttaaattattaattagtgtaattataatttattaggttattttaaaaactaatcatgcatttagagttatttggagggatgttagcacattttagtagaaaatagtggaagcccgcaagctcggttttacaaggcaaaacttaattgtacatttctacgactttaaaggcggagctagatttggagctcaacataaaagttgtaaatctcattattaatatgtacatatctttattaacatcgtttaaaacttaatattttcattattaatacgtacatatctttattagcatcgtttataattttatttttttatcagttactcataagtttaagagcatttccaataggagatgtaagaattgtcctagatttgacaaataaaaatattttgtgacattatgcatcaatttttagcattgtacttcaatgcataattgcaaaaattagtgcaaaatttaatatttttattactaagtatataaaaaaaaaataataactttgtcattaatttttgaatataaacaataaaaatagaatataatagttcataattatactgtaattaaatatactaataaaataataaaagtagcaataaaagtaaatactttaatggggaaccaccttatataccaaattttaactttttttctttctatttttgtgtatttttttgttttttgttttt

SEQ ID NO: 314260 - DNA, 994 bp, Cannabis indica
aaaataatttccaacagttaggtgcataataccatcccgattagtcttaatgatcaacctctgaagcccagggaggaccctccactagtgcattatactggaggaagggccaacatggagcaacccataggctccatgactttgtctggtgtccggtattatgctggagagatgggcccgagaattggcgagccattcattatcgagccccatatagacttgggagaagatctcaagttagccagacttagaaaggttgttcgtcaagtcggccaaactaaaggaccacgcattattggctgtgatgtattcacataatagacatgcaaatgtcagagatggatggatgaccaagagcacatcctccaatctcaccaggcagagatagactgtcataacaaagaaggtagtgacctgataacgcagtttaatcaaagaattacttgaagaggttaggatctcatcagagatcctctccaagggagactagttgacaaatgagggagggtctataggtaaactatccaacgaggctcctctaggagcaggatagaccttcccttacccaaaggaggacatgccatgaagatctggtggcaagaacagcaagatctaggcaaccagttgcctggggggccagccagggatctttggcttaacaatatccctgattgtcgcacctttggccgaccaaccccctagtggaaaacatctggccaacaaatagggtgaactctcatcccgaagcatccgggagtgagtaacccaaaggccaatcattaaccaacaaggtcttggaatgggagaaaatccccaagacaacgacaacttgagatgtgagtctaatcactttaaatatttagatccacgtaactctaataatttgtgtgatctaccccctgttaacatacagtctacaccaactaatcaaggaagaacgggctgttgggttttatgccctaaataaaactctgtttcaatgtaatccagatta

SEQ ID NO: 314261 - DNA, 1643 bp, Cannabis indica
tcacccatacacatctccttttagtttgagaaatgctaaaacactatctaagttttcataaccctattagtataattattataaaatatcactaatcatttacaaaacatcacttataaattgttttgctataaaataccacttaaaaatttagatggccctaaacactactaggtcaatttttcatcatcattattattattattcctacttctctttcccagctccctagcttttctatttgtaactttttgacttatcaatcaactgcgaaaatggagttcgcaaaaataaagtgacaacttttaggctagaaataatgcatgctcatactgtaaatggccgttaccaaattattctgatcagtttacttttcactctaaagatttctctattttttatattctctatcttcatcattatatataaatatatttatatatataccaatgcatgcaatgcagtataattaatgcaactatgctagctttaggaagaaattgggtccactaacagcaaattacaacatgggatacagacacaagatctttagtttatttattagattagaagttatcaatctcattcataatatataaatataaaatatgtatatatatatatatgggtggtccatgtattcatccatgcttggtgttggtaagggaaaacgaaaagaagataaagttggctatgatttcaatggtattactttcgtgggtgtttaacaaaggcaagaaataaaaaatacccatgcttccaagttaccttaatcatttcgcaaaagcttagtaatgttctaattagctatataatatgtagcatctagtgataaaaaaggcttcttttcaatgtttcaacccatatattgttagctaattaatcttaccaattttcaaatttgaaattgttgaaaaaggtactgctgcactttcattattaagatctaaattgatggtcttaattaattaaccacaataagagtaataatgatgttacatgctcctaggccactcttattgggaaacatcaaataattgcttgagaatgtgcactcctttatgctatatgtatagaaggatatatgggagtgaagctataggagtttgaggaatctaacaatatatatgtaccagtacaaattagttaaaacattctcaagcagaaaattaatgttagtatcttatgttcttgatgatgattattgggtatcttataatcaatttgaaagtcagtgtaaatttaaataatactatgagctcattcacatgtatacgtgtaggatataaattttatactaattttaagcctgtgatagttttttttttttttttttgaaaaaagtagccttaagaaacaccaccaaagaataaagatctttaaggggctgagagttagaagatattattgatagatggcctcaaccataataatgtctatgatacaagagggatatccaagcctttagactgtattagctgttattgatagagcaaatttagccaaagtgtcaacaacaacatttacactttttgggcaataaaaaaattcacaatattaaaaaagttacaagaagctttaacatcaaaaatgactaaacccagcgttctttgtcctcacttgcacgcttcttgagaaaactt

SEQ ID NO: 314262 - DNA, 1050 bp, Cannabis indica
atcatgccacttgaggggactgggttaattaacgaggcttagggtaagggccaaaagggcaactcccaaggtaggtccctttggcaaacctactgtctcctaagaggaataggataccctgaagcgaagggtgaaagagcgggaagtacggtatgagtggcaacaacaaatgatgcaaacttagaatcaaatcctaagcacgttttagcaacaaatgatgcatctggccagcaccattttaagattaaacatgctctcgatgcctctgattctaccatttaggcctcttggcattggatcttcttcacaggctgtccttcccgatgatgacaatgatgatgatgacgacgaagacgacgatgttgttgacttgtaattttattttttagtttgcagtgtaaataatactaatttttataaaccaatgatatttttatttagttttagacaatttatatagttttgtaattataatataaatttcagtttgataatatatttcggattatatatatgttattatttaattttaaagattttggctttatttaatttaattttgattttattatacataaatataattttttttaaaaattcggcaaactatatctcgccagcaaaactaaaagaatttttttttggaaagttttgtcggctaagtaagctacgctagcaaaacttttgggggtaaaaaactttggcacgaaagttttgtcaacgaattattttgccagcaaaacgtcgcctgacggggaaacttaatgtcgctggtataaaatattttgctggcgaggtatggtatttcgctggtaaaacaccttaggtcgacgaattaatattgacatcctttgtcagcgtaaaagctcgccaaaaaaacaatactgtcaactacttacgcctatttttatcggcaggaaaacttgctaacaaaaatttctttttcttgtagtgagtatagtaattagcaccaaataataaaagtagtgctcacaccattatgaaactaaaaatgagtattactagtgagtatcaatattactcaaatca

SEQ ID NO: 314263 - DNA, 906 bp, Cannabis indica
ttatgaattattaaaaaaaaattatgaattaattaacaaataatcaagccaacatagatatttttttttaagaaaaaaaatgtctgcaaattttgtgtggttcaagaactattaccaataagtatattcaaccaatgaaagcaaaaagattgagagacttttcatggaaaaacaaagagacaaaatattggttttcaataataaataaaataaataaataaaaagacaaaaaatattgtataatacttatattgtgggtcccacctagttataactagctggtaaagctactaacattatagtctactgttgtgattctctaataaattcataacacattttctcaaagttccaatatcatcttttttttttaaaaatttaaaaataaaaaaaaaataggtcaacaatgctttgatgattaataatttttttatattaatcataaattaaaatatatatatatcatttgatgtatatataattacattcataataatatcactagtcttttttagtattttgttaactaattaaatagaatttacttataaatttgactatttattgatgggaaattattaaagtaaatttattagacaataaattaacatgtgatatattaaaaaaaaaaaaatcaatttattagacaataatggtttataattagtagaaaataaggtcaagatatatatcctaaatcgtttcaaatgtttaaataataaatattataaaaaataaaaatagataaaacttctgagttaggtctcttgcatgcatgccatgtcagctaaaaaattattaaattaaaattaattctcaattattttacaattataattatctcataacacatatattaatattgtatctatatatcgtataacggttatatatatatatatatat

SEQ ID NO: 314264 - DNA, 1761 bp, Cannabis indica
aaccatatatttacaacttcaagacaatttgatttttagcctaatccaacaattctcacatataaaaaaaatatacatttatataatttttttaatgggatgcataaatataatttatttacttcaatgtataatatattacgtaccctgtctccgataattttgccatcagctgatattgctgaaaattaattatacatttatcattagttacaactttcataaaattaaaaaaaaaattaattaatcataaaatatattagttcatataattatgtgttttgtgaactatttatttagacatgcagtgtagtttgataaatcaatttttagatgtctttattttgtataagtatttaaataaagacctcaaaatttaattttactcaaaacatttttaaatataattaaaaatactattacttatattaattaatgaaatgattacatacataagataaacattctttttttagagagataagatattgaacaattatgataacttcaagaatacgtgtttctaattttttttaagctatgtgtggtatagttattctaaataaaaaggtcttcaagagttattcctaaaaagtttgatgtctccaggatgttattcctagacaactaacttatccatcctggaaggagtcctatggaatgatagttgagttcagaagggagttcccggatgactatcatgtccattccatgcttagtcttcaagatagttatttctcctccagaaaggagttatggatagctagttattcttcctagaagctagttccgaatagtcgactctagctggttctatcctatccagaagctccttcagcgagtgcatttggtccgtgatctcagaagctcatatatgttctcaaatacactaagactaatgctgatgtggagatcttactcataggagagtttgttaagttagttattggataactaacttaacaactttgtttattgaagccactaactttagaatcttaatcttaaggctataaataccatccacactcaagcatttgagacagaattgaaaggacgaagatcaaatgattcaggttgagattgagagttagagagagaaagatattgagagatagagagagaaaggtactgagaaaagagatatttagtttgagttttgtatgaagaatcttctgtagatgaagaagattctttggtatgagtgtgagagttgaaacactttgagagaactcaacatagaatttgtctcgactgtaatgtacctgttcttgctcaatcaataaagaagatttggtggtatttcagaactagagtggagtcatagatcacatcaatttatcagacttgaaccaatatatatcttggtgttgatttcgttattttctacacttattttttctggttttccatactttatttacctctattttttcatccaattattgttctcaatattaatcttgtcattcctaattgttcgattatttaaagtttcattgatttaattctactctattagtcatagttttcccacaaatcagagcttggtaatcgatcaagaactcaaaatcaagattctttccgctataattcttgaagaaaactttgaactttatcaatggtgagattcgaattggagaaatttgatggaactaaggactttgcgctatggagagaaagtttaaaaggaatcctagtgtaccaaaaagtctccaaggttcttggagatgagaagttattggcagaaaagaaaccaga

SEQ ID NO: 314265 - DNA, 1824 bp, Cannabis indica
atttcattgttatacgtattttattattgatctgtctctatatatgaggattatttttagaaaataatcttaacaaaattttaagttttgattagagaattaattactttcaaaatatattttatatattatatctaaacatatattaataaagtgtacaaattattagaagcatatatataattaatcattttttttaaaacaatatcattaattatttttaaaataagagggctttcataaaattaaagtttaaatatatataatttatatatatatatatatgttaatttttatttttaaatatatataataaaattaatttttttatataaaatatctccataaattttattttaaatatctatactaatattataaaattaataaaaaatattctattaattaattgagatattctgttaaagttaacgttaaaagtaaaaaaaaaaatatcgttaaatcaagaattttgttatataaccacattttatataaaatagtgttatacccgaaatttggctatactttagaaaatgacacgtgtcatacagtagaatatgaaccacttgatataataaaattatatcatataatgcaaagaaaattattagtcttaagcgagacaaggatacaaaactattaaaatctatattgacgagacacatgcctacctcggagtacatagtttcaagaagataatccatttattttgaaggaatgtatgcagttatgcaaagcaaccttgaattatgtatagcgagaccattcacctcgctattcataagaaacttgacgaggcgaatcatttgttaacacttagtgttttttctacattgtagtagctaaggataacaacttgaaaatatgcaagatatgattgtccaaatcagatgcatcgacgagttaagcgagatgctattgtccaaataagcattgaccatctttaaagataagaataacaagcagttaagcggttatctaggattatctaacatatgatttaaatgaaacgtgatcaattcccacatttcatcaacagttgtattctcaatttaaatgtaaataactgtcaacctatattcctataaatatagacagattccacagaaaaagagacagagaattttttagagaaaaatagaaatacgatcaattgtatattatactcagaaaatatcttgaataagatagactcgtggagtatttagatttaactgcaaaacaatgtaaaaatatctagtgttactgatatattatctgtactttatttattccttattatttttgtgttaaatttattatgaaaaggctcattattggttaataaaaatccgcgttaacaaatagatatatatatatatttatattcttcgtactttgatggaaacaccatgttttctttgaaatttctgctaatgtcactgccataattaattatgagctttagaggcagtttttaacccttttcagtgtcaattttagtaaaattcgctactggtgttgatccagagaatgctgtagaatcaaacataaccaaaatcatagttggttattatgcaataagtgacgccatagtataatcagaaccgacgacttaaggttaaaaatcaacgtcatagtgttaaaaattaatttattttttcaatttaaaatctagtataaattcaaaaatttaatttatttaaattaaatatttattggtttaaaataattattatttaaattaaattatatattatttaaattaatttcatgactgtccaatatacttaaattaattttatgaaagtaattaaaaaaattacaattatattacacaaa

SEQ ID NO: 314266 - DNA, 1458 bp, Cannabis indica
ttaattaaaaaaaataaaactaataactttattatcaattttattatgtaggacaataaaaaaaatataaatacttcatatatttttattgataactaagaggggatcatgtggtgcatatcctttcctcaccccttcggtcattttgataatctcgggaatcatgtgtcagctataaatatcttaaacttcaatctgccttagttaggtcatcggtaactacctcaaggattttcattacacagatgacaccacctacaacaagctagccttcagaagagcgaagcctttaaactaagggttgtggtgggtttcaaaatcttgatccaagcaaggatgccagtaaaagaaatccctaccactacgtacactacaccacacaataggtggtaatacttcataatttagtactaataaaataatataaatgacgtcaatgtaaataaaaaatagtgcatttattttttgcatcatagcaaatttactatgtatcaaatttatatcattttttgacacattattggaatacatttttttgttaaatgagctatattttaactttttttatcgattatttgtaggagatgctttaacctaattcaaattttctaaaaatttacaaattttttttataactataacatatatgatcatgaaataaagtcaaaaaaataaattaatggttgtatataggattatcttatttttatatgtaaacaaacaattacgacatgaaaacaagacaaagcatggtcaactatatcataaaggaaagtttacaataatatacattttctgtatttaatttataataataacgttacaacgcgccacgtcagttaaatctaacgttttccattttttattttttatttattttcttgcgtttttaaaagtaagtgtttagttactaaaagtgttgataagaaactaatagtcacctttatataaaaaaaaattatttttatatcatataatttgagatacattttagttacttctaaaattttaaattttttttgacaagttacctctaaaacttatttgtatacatcttactaattaattagttgtttttaagttatataatggtagattataatttaaaatacatttaggtaactttacaaattatttctaaaactaatgagttgtcatttattataacaagctactatttttatatgtcaattattttatgtacctttttattattttgaaagctaattagttatcatataatataattcaaattaacaaaattgtaaaatgaatgttaactaagatttaataaaattaacaacaactaatcattatacaagacatttatagtaatccaccataaaattaacaatatactaaatattgttttaagtttaaaatttaattacttgtatgttaataaaatatatatatatttatatataaaaaaatattgcttttaagtatggttatttt

SEQ ID NO: 314267 - DNA, 529 bp, Cannabis indica
tctataaagcaatcaaaaaaatacacacaaaactaattgcatgaaaatagctaaatcaaaaattaatttgttgaattaagtaaattaaaaatcggctcctaaaatatactaaaagaaactacttccttaaattaactaaatcaaatcgattctggaaataaataaattaaagttttgctgaaaaaactacacaaataaaatgcacctatattaccaacaaataaataattattatcatgcactcaaaaaattgagaaactaattttcgggtaaataaactaaacatataagaaaaatctcataaaaatataaaaaattaaaaacattatataaaatttaaataaaaaactactttacttttgtaagacacaaaaaaaaaatctcatgtttgaaataatttctacaaaatcaatcaaaattaaatgagaacacacaattccatcacaaaatatatatatatatatatatagctacattagaattacctaaaaacccaataaaaaatatgtattcactattgttttttaag

SEQ ID NO: 314268 - DNA, 1743 bp, Cannabis indica
atgacacaattaagaaaaaaaaaataatatatatatatatacatgcattgcattttaatgaatgaattaattataactttaattgttaaactatcatacattactttaagatagctaaaaattattattatgtctgtacgtgtatacttctaacataaaaaaaaaagggagggaaaatgaagaaaaaaagaaagataatatagaaataatatgtgaagattaaacgtcaccacatctctatttcccaattatatatattatatatatgaacatttaagtaaaatatcttgagaagaatatctccactacatataaaccattatgataaaagttattttcaatatatattcagataaaaatatattaattatatatataagatgatgaagaagaggcaaagtttggtggtttctctagtattgggcaacctgtgaagaaatgaaccttctgccatgccttgcacgtgccctttctatttgatcattcactagacaggtggctcacatctataggccgttattgacatcaatcctaggtagattgtaccgttgtaattgcaatgattggaaaatcatagtgtgtacgggagattcccttttctgttaggattttgtttacaactataattttaagatcctttggctctcctctataattctctggtttgaaaaccatctataaataccagctactcagtctctcttcattgagctgagatttttcacatattgcttttcttaaaattcaacttggtatcagagcaaggttatcaccatgtctgccgagccccaaaacccaaaaaataccaccccttctcaatcctcagctccagctgctgcatcaacacttctaagtgcaaactcgagcagttcgcatcatcaaaactcagtctcacatcataaagcaccttgaattagcccttttctttgaaacttgacaggcataattatagcctatggcaaactatggtgtctaccatagtaagaggccatcgtttggatggttatcttaatggctctaacatttgtcccgctgattttgttgatgcaggtacagtaatgaaaagcattgattctgttgaatcacaaatcgtcaatccagcttacgagaattggatcataaatgaccaattgctgatgggatggttgtatagttccatgacagaaactatagcaactgaagtgatgggagttgcctctgctgctgggtttgtggcaagccttggagcagctgtatggggctcactcaaaatccaaaatggatgaaaccagaacactcattcaagtcaccagaaaaggcagcacacccatgatagaaaacctcagacaaaagaaaattgggccgaccttttagcccttgctggagagcctcatccagagtcacaattagtcactaatgtgctgtctggccttgatgtaaattatctgaccattgtcttacagattgaagcaagatccaaaacctcatggcgggaacttcagaattgctcctcagttttgaaagtaagatagagaggctccaagctctatcatccaacaacaacaaattcaacaacaacttgattgacccaaaagcaaactttgcccaaagacctcaaactggtgcacatggcaggggctccaacaaccactcacaacagtacggtggtagacactccagtagaggtggaggaatttgaggtcgtggcagaaggaggtttagtggcagaactaacaactcaaactagattcttactcgcctcga

SEQ ID NO: 314269 - DNA, 1372 bp, Cannabis indica
tgttgggttttttaatttctttattatgaaaattgattgttttatattcaattataatttatataacagagctattagtagtgaatctggtaaaagaacattatgttgaatgaagatcataaaattgataaagctcatgttgatgaggcaaacatccgatcaggcgctactcataattataatactattacttcatcatcaccaaattattcactgcaacacaagactactcctagtatgaattataataatgattataagtatacaagaagaagagaagaagaagaagtaattgatctttcgagattcacaaacattggagatttgttagatttcttggatgaacgtactgcatggttgattccttacacttataatacaaaccaatcaaataattgattgcaggatatgaattgttattttagaattaattgtattggattggattagattggattgtgatttaattgttttgttgtaatttaaagattattgatatatatattcaaatggataatttagtttattataattattagaattttgtaaacttgccaaggcttattttaacctttcgaaggtcttaaactaggtctagactatttatgatccatagcatataattgtagcacccctcctatcaaacatgcatgccctaaatgaaagtgacaggtatgggtttagattttgtctcgtgattcaaggggttttttgatagaaggtggcaatggttcttactttggttcggtcgatcacctaaaattgcaaaaggaaagcgggttcgtgaggctcttagttggattaaagatcatccgtagcaattgtggttggaaacagattataacttggctattgtgcaagcattataaaattctatcacaataatttctttgtttggtcaaattagtgttttgaaaaatgtttctgttgaaggatattccaactgatttgctaccgtgtttggtagcataatttgatagttaataaagttatttcatatttccattaaaaaaattaataataataaataatagaaagattaaacttagttcaattacaaagttaaaaataaataataaagccttatatatggttctaacatatttaaaagactaaaataatttgaaataatttttttttggaaataaacaaaaaaattaataaataaaactcattcaaaataatagaaacgcacttcagaggaacaaatcctccaactgaagtacacaaacctgtaagagaaactgtgaggacataaaaaacttaacttgggactgcttgtacacacatcaagctatccatttctaacactacattgtcccacgggactgagtcgcaatccaactcaacgtctctttgatgcctcgatctc

SEQ ID NO: 314270 - DNA, 1265 bp, Cannabis indica
tttgagcagtttgatgaacatcctgaacacatattttgtcctccacttctattttgttctcatccatgtcctcactcatatactaaaaaaataatgtatattctaatcatcaagattaactacgtaaagctcctacaaaaaattaaaaacaaagaaaagtattaataataaaaattaataatttattttattaattacagaaacataactaattacaagtgctggatcaacattattatcttcatcatttactgttgctgtaaaaaaaataaaacaaaaattaattctaataaagaaataaaaaaaatctatatataaatatatatatatatacaattgttaaatgatatctacatttttttcagtcattaactaattttgtgtacatactaatgcgtttaatatagtagaatgaagcctcgatcgatgtggactcacgtgtctaccaccaatgtttaatgtagattctgaagaaccattgctgacaggcataatattcaacaaagagtatttgaggcctgtcaccttccaataattacatatatcaaataactcttcagtcctaggtaccaagttttcctctaaatataaatacagttcaaacttcacattctcgactcgacaagaagctctaacaaatttgtcaaagttagaaagggcatccaatcgccgtgttaaataagatgttgatacattttctatttcaacccttctttctctcaaatgaggaaatttagacccgtactcctccagtagctcgctacaaagctcacaaacattcacaatttcaattacatattgctcatctccatagattacagggaaataatattcgagcaacataaatttgtaccttgggtctaaaacaaccgccacacacataagcctgtgaatccttccccaatacttttgaaacttagacaacatttgaattgccaagtctttaataaaaggcacatctgatgacatccatgattcaatatttgtcttattgtcacatatttttggaaaaaaatattggcgatagggtactttcttccaaaaaataattttgtaacttcatgaaacaactctaatttatcacataattattgagcattctgccaatcaaattctaaagggacacacctcaaacacaactcacgttgccttgctcgttcacatatggtcttgtacaataaagctgtgcaaagcatcaaaaagttgaaatcgaccttgttacacaagcaagtgattatttttttggtgtacggtactccaagttg

SEQ ID NO: 314271 - DNA, 1635 bp, Cannabis indica
aaaaaaatagtatatgggataactgtgagtaagttgtttaatatactctcactctatttaagtttagcacataatttacattaacttaaggggtataattgggatatcatctataaaagtgaatatatcttaaagaatatacaaataaagataaaaaattgaaataaataaaataaaaaaggtatataatctaatttttttcccactttttattattgttttacaattattgagttgatcactaaattatatgtattttttataattttaattatttttatgttattattaaataatattttatacataattacatataaaattaattagaatttgtatatttattaataaatacgtaatgtattattattattattattattattattattattattattattattataattttttaatgtattttatttattattattattaaattatagaaatttttaacgtgtcgagtcgtaccaatttacaacactgtctcaaattatgtttaagcttatatttttttttctataatatcatgcttgtaatttttgaatttgtgtagtctcaaaaaatttgatctgtatatacaaaactatttggaaccactcttttaaaagggagattatctataagattatcatcttatagataaccttatttcaacaataataattttcctaaacttaaaaaacatctaaacttagcatttaatttttaccttttacaaaaatgaaaaaagcacttagctttttcagccataaaatcaaatcaaatcaaatatccactattttaacaagaaaaaaaaaataacccaatgttccccaaatagacatataggcatgcataaccacaatccatagccctagagcagtagtagtagtactactactaatactactaatattagaagtagtacaatacataattacatcgttctatttcgatgaaaataatagtgaataatttatccaattagaaagtgacacctgtacaaactacaaagctccctaccactgcaaagtgttaaccgtagaggaatctcgtgcagttaatagattggtccaaactttcaccctctcatacgtgtccactcctcacatactgtttttctgttattattattattattattattattttaatttaaagactaatttgtaatgtgaatacataaatttaactattggattgctaattaattagtaatttttacagtaataatatttaagttatatttttaaaactttcatgagtacttaaccgttaagtgtcaaattattatttacatgttattttttattagtatatttaaattaatttaactaatattttaaagagtaatttactgtgtaaatacttaagtttaatttttggttgtagataaatatataaataatttttaagtaataatatctaagttatatttctaaaatttttataaatacttagttgttaattatcaagttattatccacgtcttattttttattagtatatttaaattaatttttaaacaaaaagtaaaaatataatgacttggactgattaagaattgacaagtgataatttacttaaatacctataaaaattctaaaaataataatttaaatatttatttatccaaaaattaaactt

SEQ ID NO: 314272 - DNA, 651 bp, Cannabis indica
aactaatttagtgacaacttgtaactaaatactatgttttgacacttgtaatattttgttgtgactaaaagctacatttagtcataaaaaaattatcactaaaagtaacagtttcttgtagtgagaatttttaaaatataaatagaagttataaaaatatattctaagcattattatgcatgcatgcgtatgcatgattcatgcctatatatttttacacacatattcatggcattatgaatctatgctataatctatatagcaaatatattgttaattacaaagttctaattaaaatatcatttatatatattagtaaaatattttattaattacttttttttattatagtttaattttaaaaatttcagctttggtcatcaattcgttgtcgcagtgttttaaactacctttcacttaattttaaactatttatacatcttataaaaaaattaatcaaattttcacagctatatattttttagtatctattgttcattcacatttataaataatttagtaacatttttttattaaatttaagaattacgcataagagttacaaaatttgtcattatcatcattatcaaaactatggcatgatttatatatatatatttatatatatatatatatattcaaactattaaa

SEQ ID NO: 314273 - DNA, 949 bp, Cannabis indica
ttctaaaaacaattttttaaaacaaaaaacagaaaacaataccaaacatactctaaccctcaacgtgttgggatttcaaagctacgaaatggatcggaacttttggttacatcaaaaaaaataaggttgtaataatgaaaaaggcgcaaagagccttcgctgcccaaaaaatgcctaccgagttgcaacattcattgggcaatgttgcggcccactacacttaaatgggcaagagattttggattttgcagacacgggccgcgatacgcattagccaatttcgtggcccgctaaggcagttaggcacttatttatgaggggttttaaaccctaattttgaaggaagaagggacttttggatttttagactttcgagatacgaaattggaggcaaaaagtgactggagagactactaccattgtttatcaacgagttttttttttcttcttttaattatatgtttctaattaatttaattcaattgttcagatgacaatgaggagttaaacttttaattaaggtgttaatgaagattgtttgatatttttttatggtttaatgcaatttttagttctttccaatttctcatgtgcattgtttttatttgtgcttaattttaatagttgtttgatcaacaattatatcatatgtttataattttaatgcaaaatttaaaaaagtgagtgttgattattctatagtaaaatagacatagatttcgatattggacgaaagtacctgtatggtctatatagcaattagggatttttatggttaatataaattatgtgtaatttaccacaaaagtgtagaatttttacatataatttggattttatatatcctaataagaatataaattgaaatagttaatccgctatcacgtgaaattgaaatatgaattaatctaatgatttttttttttacatttttacggtttctataaaa

SEQ ID NO: 314274 - DNA, 867 bp, Cannabis indica
ttatatttaaaattaaatttattagcaaagtctctattataataataaaataccaccatctttataggtatggatgctaattaatgtgattatgaagagacttttaaggtggaatcaatggagtcatgatgtgtggtgctttctactttttggttgaaagtgaagcagggaacgtggaagtatcacaacaaatcattattatttgagaattgtggcattagctgatctaactctacaaataattgttaagttaggttaggatttgggacatattcatgtgattaatgtgacaaattgccaaagaaactgcagaggtgaaggaagaaaaataacataattattagtatttgaggttagggtagcacaaaacacaaacaagccaacacacaagacaataaaaatatattagtaaaccaaaagtgaaacacataacaaattaaattgagttaattgtggttaaactatgaaactactacgcttgcaactcaccaaaaattgattttttgacaaaaaatcttctaaaactcaatgttctgttagcaatttagtttttccatccaaattttcttgttaaatgccatataagactatccacgtgtataaaggtggaaattcgtattgtcgtgtcatattcgtattcgttttatgcatgttgacatatttatttagtcaactctaacaaaaactatatatattttgtgtcaagaaatttcaaccaccgtaacccaatttatcgtattttcgtgttatcttgccatgttcgcgtgttgattatacttatattacaatacatgttaaccaacaagattggtaatatatataataatttttttggacccatttaaataatatactaaataaaaatat

SEQ ID NO: 314275 - DNA, 923 bp, Cannabis indica
attatataaaaatatgatatatagtctaattcaatataatacaatataatacaatacgatttaatatagcgttccaaacaagcccttagttttaaattaaacgtaatcagacaattacacgtaatatttatatataccattgttttagtgtcatactaataataaaaaatacatagaggctattaatttcaaaatatatattaagtgatgaagagaaatttgcatgttttgatgagattaacttataaatcaattgaattcatattgtaacattattctaatgatgaattcgttatatgtcaaggtttccttgactccaacacaatgaaaccatgatcaaattgccaaatttcaactgtgctgccaaccaagaatatattattaatcttgaaactaagttgactttatatatatacatatattgttacgcaacctgaattcaaaaatcaaaagttgatatgaaagtgatactgatgtgaaatctcagttgacgtaggtacgtagcctaaccaacttattaatttattaacatcggagatgggttaataaatatattagaacgggttggttttaagaatagaaatagaaatagagtagaattaaatttaaaataaaaattattaaatttttttcattttatattgaaatgatatttactaaaataatgaaaaagtcattttaatagaatgtatgtgagtgtttacgtcaacaatatatgtaacagtcacatttaacagtaaaatttgattaaaataataaattggtaggagaacacgaattttgggaattttatcactaaaaaatgagttttggagattaaatactagtaaattaaaaaatttgagagttttgctgtaatttacctaataaaaattagggtctttttcatttttacacttcaaaatattttttttttgcatttt

SEQ ID NO: 314276 - DNA, 1063 bp, Cannabis indica
ttttaaaaaaaattaattaaaatataccactaagaaaatgacacatagataatgacataaaattttaacggttagttacctacagagttccaaaaatataacttaggtattattaccgccaaaaattaaacttaagtatttatttgcaactaggagttaaacttaagtatttatgccacaaattactctaaaaaatattattaaaattaacacaacgagtatataaaaattatgtatatattaatactagattagtagattttaaaaattaatttaaatttaagtgtcgtttggtaacacttttttaattaattttctgtttttaaaattgaaaaagtgaaaatattttttaaaaattgtttttactttttaatgttttaattgaaaatcaaaattttaaaaattttgaaaacaaaaaagtcactttcattatttttttaaataatttttttttaatcaatgttttgaactcagacccagactcgaacccggtcctggtcctggtgccaaacctagcacccgacctggacccagacccgacctcagacccgacttaaataaaattaaaaaaataaggtaaaaataaaatttacaaaacacacttttattttatatttttaataaaattaaaaaataaaagtggttatagaacatatatttatttttcaaaaataaattttttaaaaacaaaaattctactcttatttttgtgattaaaaattttaaagtaaaagtgttaccaaacgtcatctaaatttttaatattgaggtgcatatataaatttttggagtgtagatatagggaaattttatttgtacctctaaaatttacaaagcacctcattttattaatttttggagaatttccgtatatactattttttaacttttatttttaaatttacggtttaagttacttcgatagttgctctagtaatttttatgtgggttgctatgtgaatatttattgcgattcagattgcttgattggttgctatgcggattgctatgtgaatttttgtaaaaatacaaataaaaaaaaaagaaattattttgaagtgta

SEQ ID NO: 314277 - DNA, 792 bp, Cannabis indica
cgtgcatgtgtattgtggactattagtgacttcataacatatgagagtttatctggctggagtttgagcacaggatttttctcctgtccaatttgccaacgttttacagatggtttgataattcgggataagatgtgtttttcgggtcatcgtagttacttgccgcctggtcattcttggcgaaagcatagacaatataaggcgaattggtttaaagatgatgccttaccgccagagccagtgtattgggaaaacatgttggtgactctcgactctttaccaatcaagacacctggcaaaaatccaaataatgaaaacagaatgttatctcgttatgacacatttttctataattggatgaagaaaagtattttttttgagttagagtattgggccacactgaaggtaagacataacctggatgtcatgtacgttgaaaagaatttctgtgacagtattattggaacattattaaacatggagggaatgacaaaggacacaaacagagatcgcaaggacttgtctgatttggatataagggaagaactgcactttaagcttcacaagaaccgtttgttgaaaccacctgcatgctatactttatcaaagacaaggtctcattgttcagatccaaagacttcgttttgtaaatttttcaagtctgttaaacttccagatgcttatgcaatagacatctcaaaaaaagttagtataaaaaataaggtaatatcaggattggaggcttatgattgccatgtgattttgcaacgtcttcttcctcctgcagttgac

SEQ ID NO: 314278 - DNA, 1664 bp, Cannabis indica
cttgagagtaaaaggactaaaaaggaaaaggatgcgaaataagctggaagcaaagaatagaaaaacctaatgggagactggggcttatataggggagggagagagaatgtgagtttacgaaattgccaagcagtttctaatgtaattactaaaatacccctttccaggctggcctagagctttatcctcagccacgagttctctacggttactcattcacgcttttcggtcccaataagttaggagcgtgtaaaccactctcgactaagagacagatgtcctaattttcagaaatattcaccgtgtcattcggaaaaagggtaatttcgatattttacataaatttccacgtggcaaaaatttgttggttgaatttaaaggacaaaaaaatcgaaaaaagagcaccagatccctgtacgttgaattatgagaatctttttttctgggccaagagttttaaaaggaacgacgcagatatattgtacggtcgagattgctcagatacacgtattgaaattaatttggtctgagctgtcttttttggtttttcctaatgtgctttgattttagattttttttttgggattttttttgggaatagcttcaaattttattatatcttctatacacgtaacacctgctattaatggataaatgggcccagttggaccaagcccagtccatatccattaacttctttcatatttatagtaaatttaatttattttggagtgaaattaatacatgcaggatggagggtagttgatagtcgtaaataatgttaatttacattttataattatattattttaaaaactagaaaaaattaaaatatcacatgtagaagaagattattttataattaaacaatataaatttttgtattggcagccgattagcttgtcacgtgaatatgggacgcgactatttggatgagagaaaaaagaaaaagatgccatccgaatatattctcattatgactttttctttttgatggaagacaaaattaggttagctaagcctacctattactagtatattaaattgacatctataattatactaaaaatatataaaactctctaatctcttttcttttgtatttatttattttaaaaaatatttgttaataagtaaatcaagatcttgtttaatataatcttaatgagaaatattaaaacacatggtgtctcgttcgatttttagtcaacctattcggagtcgtcataaatgagacttaaatcaaaatcacagtaagaaatgcagttaatgacattgggacttacaataaatgtaaaaaaaagataccaaaagttaaagaggttcggccccgaatatctgtaatagcctactccccttgtgttttattgatctgagttgcaagactcaagaacaggctcttaattgcaaagaatgatataatgtttattttctaagtgctcaaaattgcggatccccctcccaggtcatggatgaccccttatataggggagaggatcggtgctctcgcttcatgagacgcgaccaacgcagagctacctcaactgtttctttgatttttggaggtagttgaagtctgttttttatgataatatcctgctattttttgtgggttgacaactatctttaagtctttcgtgggatttgaacatttgaaagagtta

SEQ ID NO: 314279 - DNA, 1249 bp, Cannabis indica
atcaaatccaattgtgatgcccaagccaaaaacatgtgaaaagtatgcatagattttaccaacttgaataagacgtgtccaaaacacttcttcccactttcaaggatagaccagctggtagatgctacaactgatcatgagatcctaagcttcatggagcctactcaggttaaaataaaattaaaatgtatcaaccagattaagaatatacatgttttacgatggacgtgggtctgtactgctacaaagtcttgccttttggactgaaaaaatctagaggccacttatgagagacttgtaaataagatgttaaaagatcttattggccgtaacatggaagtctatgtgggcaacattccgttcaagtctaaaaaggctgggggcacataaaggatctaaatgactgcttcaagatcctccaagagtacaatatgaagcttaacccctcaaatgttctttcggagtaagctcatgcaagttcattggcttcattgtgaatgccaggggaatcgaagcaaaacctgagaagatccaagcccttttctacatgaagtcgcccataatgataaaagaagtacagagcttgacttgacgtattgcagaactaagaagatttgtgtcaaattccatggaggagtgtgagacgacattctaagagctaaagaaacaactagctcaacctcctatcttatctaaagcctctaggtaataaggaattcgacatatacttcgttgttatagaatatgttgtaagtgtagttctaattagagaagaagacatagtttaacacccaatgtactatgttagcaagagacttatggtcgctgaaagtcaatacccacttattgacctcaaaaagtgatcaaccgatggcaaggttgtatggatctgatgcttgccacatgttacacagatagaatagaaaagtaatgaacacatagatttgttatagaggttttccccccttagttagcacctactcccctttttgttgtattgacatatagagataatactattcagatcgctataggtgggatctgatatagctctctataagaatactaaacatgaatcaataggaaaatctctaatgagagagtgagattgccttagaggcatgtgagagatgaagagaggagagaggccttgggggcctgtagcaaaaagagagaaagagaggctagggcttcttatttaaaatgatttagaggcttagtgacttaggtttctaggctagggttaagg

SEQ ID NO: 314280 - DNA, 746 bp, Cannabis indica
ttccattccaattccaattccaattctcattcccattcctattactattccgatattttcgttcctcccaaccaaacgccacctaagtgttggggaaaatgaaaggccgaactacttcactagtatggacagaggtgtaaatccaaaaaaatcactggtataataacatgaacaacggctacattcatagatgtgacatggcagatgaaacatccggttacccagctcgaatttcataaaaaagacacaaaaatgtatattatatataaacatatcgccagtggtgcaactatcatatagatcatataccctttgaggcaatagtgcaacagcacagatctaaacaaatcaaagatatactgaccatgtatttgacaaagaacccaacaacaaaaaagcagaattccttcaccaaatataataggtagacacatttatgctcctaagaattttgtacgactttctattacaatcttcattactgtttccccaaatcatgagtaatcaaattggtaactccaacaaaatatcgactgtggacaaaactagcatcacaaaagctcattatcgtcgaatcaagcaaaattcgttgttgtttcttatctcccaaaatacacagggttcaatcgtgaagttaataaagtaagaataatcaaacaaagtacaagatcgctactatggctaataaagcatcataaccagaaaaaaagaagtcggatcttacaggaggtgtgatccgatactcc

SEQ ID NO: 314281 - DNA, 349 bp, Cannabis indica
ttgagtgtcaagggtcgagcatcacacgcgcaggcacccggacaagacgagactgcgcgcgcggatgcttcagaaaaatcttatttgaactcggtcagctcggcatctcgaacaggggacacgcacgcacatcaccctgctagcagggtcttccgctcgcggatcagcccactgaaccccttgtacgcatgcgtaaatggctgcatacaacctcttggtgcacacatgggtgatttttcacccaaatataatttttgagtgatttttcacccaatttcggatttttcaattttcaaaccctaatttcaaaaataaaatattttttttaatatttaaacttaaatatcaa

SEQ ID NO: 314282 - DNA, 703 bp, Cannabis indica
gtgactgtgggcaaaatagaggttgtgatgcgtctgattgaggtgatggacggtgatttcaggttggtgtttctggtgcacaaaagtagtgatttgagtgttaggttatgcgatgagacggatgtgggttggtggttcgggttgtggtcggaggttgctggtgcaatttagaggttgagtttcgtggggagagatggtgaaggtggggacgtggcttctgctggtggtaggctgattggtgatggaggatgtgcggctagggttggctcagacggtaaatggggaagacaatggctgattcttggggttttgtttttttctttttctttttttttgaataaaaataaaaatacaagaaaattaaaagaaaataaaaagaaaaataaaaaaatatttatttattaatatatataatatattatattgttttttttttcttgatatctatataatatattatacgtataaacatatatttttaaaaacccctaaatcactgaaatgaatcttcactcccagtatttgtttttttttttaaaaaaaaaaactaaaactccccgttgttgcagcattgcttcagcaattaaatatgttatgcatccctacttcaaaatgcggagccaatgctctaactcctaggacctgctgctccacacaatcgaattctgcttttcagcatattgcacaactccatttctgcctt

SEQ ID NO: 314283 - DNA, 1105 bp, Cannabis indica
tgtggtgttcaagctgttgagaagatggtatttttatttttccattgctgttttaaagttgtttctgttttgtttcttaaattttctctttctaagggaaagaagatcctttgtctcatcttagctactttgagattgaaatggacatacaagcggtgagaggtgatgtaccatgcagaatcctcccaactacttcggcagagggcgcccagcagtggtactttaaattagcttcggggaagttcaattcatggaattcccttacatttgagttccatgcacagtttcctctacttggcagcttccatctcatttagaggagttagtagaagtgaagcaaatactaggagagcctttaagggcttacataagtaggttcaaaactgaagcaacaaaaggtgaaagactgactgaggaaggaaggctggccacaatcctaggaggtatcgaacccttaggagaattatgcaaagacataaaaagactgactgtgggatccatgtcagaattcttagacctagcagatggatttataaagcccaaagaagcagtatagcctgtgaatacaaatggataaaagaaaactcaatagcacaccactgtagccaatacatccacccaactagacaaaaattctcaaaatcacagtagttcaaacaaaggtggaaagaggtcaaacaatggtaacaagcaaggtaatgggaagaaaagtatgttcaacaaaaactacgaatagaatcctcgagagaaagcctcaaagttcactaaatttactatcctaaaacaagacatagaaacaatctatgcaaccacccattctgtggtgccatacagaaaactatctcccatgaagaaggacatgagcaatcgggacaccaataagctatgtctttttcctgcattctatggccacgacacaaatgaatgtaataacttgaagcaaaaaatagaatttctcattaggaaaaataacctgtacttacaaaaatatgtcaagaccgaccaagaacaaagggccacctaagaaaataatacccagaatcaaataatgcctccaccattgggcggagatcttaaggtttattggggattattttaccaggat

SEQ ID NO: 314284 - DNA, 3619 bp, Cannabis indica
ttactcttttgaataaatgaattattttcttgaggtcatgtacttcgaggcgggcgtgtctcgtcaatatccaatagtcttttatccttatctcgcctaggactacgtagtcagtgagttatgaatatgttctattaatcctttactaacgagttattctttttctttgcattaaatgatataacttcattatatcaggtggttcatattccttgcaagacacgtgtcactctctttagtgtagctgaattttgggtaattttgggtataacaactgcccctttaaaagttcttttaataaaaatagcttttaaatgattataagtgtattttttatcttaatcccagtttggaaaattgcatgctttgagttttggcggttcatgattttgaggcacatcattcgcattaaatgtctatctttttcaattctcttgttcccatatgttagatcattattctttcaatctaacggtgaccatccttaaagtataaactcaagttaaaacacttatttgccatttctgccttttgaaccttcaagctctctctgcaaaaaagcatcttcgtctttaatcaccttgcatgccctcattgtccatgacctattttctacatatttcctcagattccattttttaatcttagaaattctctaagcccatcatcacgttcatcatgatcccaatcgcgaagttatttactgcccataaatctttagaaaaatagtaagtgatttatttcttactctctgttattccctttttcttgagttaatacttttatttttgcttccgattgtatcgtcttttactgtgtttggtttaagtgtttttcgatttctcttttgggtaatttcgaaggctttgagaagtgaacttaggtttattaaattcctatgtttctggtttaagtcgaattaactccatccaggaattgggattattattttctttttttcagtatgtcccaatctggttttgagatttcaactccagatttcataaaaattgaatgtcctaaagaattagcccttccattcaaacccaaaatctaaaaacctaaatccaaacttgagattaatgatgccaaaattagggatcatataataaaaaccaatcaagatgaaattgttagtcgctataggcaatttttacaagagataactaaaggtaaacgtcgttatctgcaatatgccgcgtggtctgaacatcaaactttatcttttattcctttagtgagacctttgtttttatcccgagtcactattgctttttcatcaagtgaccttgattttgaaattatgtccaccaagcctcgtaaatcaaagaccctctaggatcctaatgtcacttttgaagctaaacttgtttaatccaaggtaagggccattggaaaatatgttggtggtgtattaaagtcttgcgacatcaagcaaaggtgaggatgtcgcattaggtccgttgctcctagggaattcaactgctttccacaagaaagagtaatctatgaggtgttcgatggtgccagtactagtggcttgtctgggataggcgcttggagccttgagcacatcaaggttggagcagttctcccctggagagagtactacaaagaattctataattatcttggaattgccccctttcagctaattccaagttcttagaggattctagcaagtttaaagattttgtaccatatcctaggctaggagtgtcccactcccctcgagatactttatttctactctatcaaagttgtccccacaaggaaacgatgttcaggacgtttttactatcttggtacccacacaaatgatcgcaggatcattatgaggttaccaaacaagaccaagttcaaggaagacttcatctggactattggtctttctcctatcaacacgtctgcattttgcattatacgcaagtaatttctatatcaaaaacttggttttgagttcttttttatattcatgacttagaggtcgcttactttttacacttattgtgttgacagaggtttccaaaagactaatccccaccctcgagatggccgagtgccataaaatcctactcggtcttccattcagattgctattagcagatttccttttcaatgaggccaatctgaggactgtcaacctccttggctcggataagttcacttgtcactacaaggtgccaaaatactcttcctgggagaaggttccagtccctgctgatgaagaaagccaggattatgttgctcacgtccactatctccagaaagtaacccctggagaagctgaagaagaagcatcccgaggtaatgaatgtggatggtcacccaccatacttaggactgcacgtaccttgcttgtaacctttagggatagccaatataatttttatacatgggacaacttttgtatagaccgcataacccataggtttgatagtttgtaccctcgattccatgttcagcttagttgtactagctcatattatgggattgccgagtagtatggtatcaacttagagagggcaagccatctagattcaaattgggatttatctccaataaacccttatgatatgtacatgatcactgggtctagggagtttagtaattattatagttcttcctcgtcatcttctgataattatggtaacttcctttaagtgggagttcattcctcatttttctaatatatgtttttgagtaagtgtttgatgtatcacttttgcctcgcatatatagatctcaattcgaaagacatgctcaacagccctactctcgtcgataaaagatccaaagaacgtgctcccaggttaatgaagcctcgggttctaccaaagaacccaaaagaacaaaaacaactacaaataagaagaagtcttcaaaccaactcactatcgagcctacaaaatctcttgaaaaaggctgctcctaatgtggcgagcgctagtgaacagcccctttagtctattcatcaggtgaaattctctggttttcgcccagagatggtcttcctcgagccctcttgccccttgcccattgaagctagcacagaaggctcgcaactttacgcactacacgctaccaataactggtggtgttaccaaacctttgagtccaacgactgggaattactcaacaagggaaatttttaaagtttgttgcagagtgttgggtattgcgccctaaataaaacccattttaatatattcagatttactaattaataaagaccaaaaatcattctatgtttcatggttcacatgatttatttcatgattatatttaatatataaattctattaagtccagaacatatataaatatgcatatatttatccatgattatagtatcgtcagcactgtggaatataatcatgattatatgttcaaaagtatgatttccataatttttcagctcactggatttagactgacatgataatcggcgataaggtatacttacaccttgaataagtgttatgtcctttctagagcattggcaaagtttactaatatcggatgtatggagtatacattggaaaggaccgatattgatcatagataagatatcataaacttactgttatatctttctaagtcaatatcaatggttgat

SEQ ID NO: 314285 - DNA, 1879 bp, Cannabis indica
aaatcgcactatcaaccattaattgaagattcataaactttaatatgttactgactgtttaattcatggatatatgatcttaattctccgtacaatacaagtcgcggtctcatgtatgaataaagaattttttatatttatatttaattataaattattcaatataaaatattaataatttaacaatcaagcatatatgaaaatattcaactcttatgtataaatagaaatgtctttacaggcttttgaaggtataaatcataataatcccccacttgtcctaaaagtaaattgggcatctcccttagtcacatattagttatatgatccataaaaaatttcaatggtagcatctttgtgaatgaatctgccaggttatgttccgacacaatcttaaggtcgtcacatcacctctttctacaatatctcttattagatggtacttcctctcaatgtgcttgttctctgtggcttcttggttccttgagttggccaccgctctaatattgtcacagtagagcaccaatagtttttctacttttggaactactttcaggtcagtgtataatttcttcaaccaaactgctttcttagctgcttcgcaatctactatatattgagcttccatggttgaatctacaatattagtttgcttaatatttctccagactacaactctaccaccaagagtgaatactaacccatatgtccactttcgactatatttgtctaaataaaaatcaaaatcaatatatttagtaggatttaactctcatcctctcatctgaaatatataagcataagatatctcgttctctaaatatacttgagaatgctctttagaactatctagtgttccaaatctagattcgattggtaacgactaacaatctctacatcatagcatatgtcagcccttgtacacaacattgcatacattaaggtcctccatctcatgaggagtctttggacattgatctttataaaataaaaaaaatgaacttttggtgagttatacaggatagagtagagaagctgatgtaagtgctcttagagcagctctaaggagattgcaaaactcatctttgaagctcaaagtgtttctaacgagactgcatatatcaaattatatttgtcgcgtggcattattttttactatgttttaccttttggctaatttttttagctattagccattttacatcttctattgtgagtgctttaatattttcttcccaaacacaaactttaacgctcctcttaatgagagtgcatatatgccgtggcactgtagcaatgatatctaatgcttttttttattattattatttatatatttatatttataagattgagaatttaatttatatttatatttatatgtcgtggcactataaattaaaatgtaagtacgtaccatatattttttttataatttaagtaaaagactattaaatttttgtattttttttaaaaaaatattatacaatacaaacattacaaattaaaatacacattaaaattaaaattaaacaccctaaatatcacattcttatttttttgaacaaaaatatcacattcttattaagtaatagtatacatatatatatattcaatattacataatataacattataaacttaaaacagcattaattaatagtacataataaaaatattacaacttaaacatacattaaaaaatttaaattaaacacgctagacacatcaaataaaaagtattacgaatttatcgagttttacagattgtatagtagtattgtctataaattaatcagtagttttatttaaattattaattaaatataataattgtagtgattttagtaaattaatataatattaaaaaaaaatattt

SEQ ID NO: 314286 - DNA, 1258 bp, Cannabis indica
agatcctggtaaaataaattccaacagagactatgaccacttaagtctaatgacggctactctatgaagaatcacatcagtcaaaagacaataaggacaacccacataaaatccctacagcacctagggatttgaccatgcattacccaaggcatattcattggaaatacaccactttactggtagttacagaaatacatgtactataattctgggaatcaccccacaaaagcactataaataccccctcaaagctcattaatgggggtcgagaattttgggttgcataagtgcaagaagagtaaatactcaccaagaacattctctgtgttaaatacactcacaaatatacagactcgtggactaaggctcattaacgccccaaccacgtaaaaatccctctcttaatttcttacaactctttaaactcttattattttattggttgccgaaaacctcggtcaacaataccaaactagtgtagaatgtagagttgttggtttaatcagagtagttagtaatgaccaaaataccccaaaatttaattagcctaagtgattaatggagcgtaaaattgtcttttttagcttataagatttatttttttaatttatttgaagacctagattcactagactgaatattggatttaatataagttttatttaatttttttagttagataattaagaatcaaaacttaagtaaatcaagaagccacataactctcatctatctcttcaaaacattaggaaccagctaaaaaccagagtaatttctactcaattcaacattttcctaacagaataaattaattctagggggtgtgcaacttggaggtaagttcttcatcttctctctttgatttttagcatttttaggttgagtttacttaggtttttatatgaatttgaggctgtggttttattggaattcacagcatgagattttaagtttaattcaagattgtttgagtttgaaatttatgtttcagggctgttaagtttgattagagtgaattcagttcaagaactcaaaaattcactcaactatggtgaatttgtaattttgagataattctgagttttgaatattgagataagttgtatttgtggtattgaactattctgaaaagttttattaggtttggagaagttttgaagtgcttttgaagtgaaaaacccgagtttgggttgttctgcaggaaaaatggcctaccgtgtaacaccctaactaccttaggcgtattacgtgattt

SEQ ID NO: 314287 - DNA, 636 bp, Cannabis indica
aaaaaaaaaaaaaaaaataggttaggatatcatttttgttctcaccgttcatggatgcattttttcatttaatttcggtatatgaaaaattataattatagtagatattttatttaattttttaaaattttaaataatttacaatgaaaaattagaactcgaacagtcaattatacgtgtagctatatttttattatgtacgtatttgattactattttgaaatttattttcaaaccctaaattactcaaaatatacatataaaaaaacacaattaaaattgtattcagtgttactttgtagatgtcattattttttattttattttatttgatcatcagtaaaactgaaacggtgaaactttaaatactgatcaaaaatattaattaatattattggattttgcaaattcccatgcttaaatatatattgtataatgagaataagcatctaaagatgatgaccaataaaattaatatacaaatatatttgtactcattctctcagattagattccagcttaatcaaccacttatatatagttgcacccatcactgtatatatgtcatatatattagaatatttctaattaaggaaataaaataatattattgattctgataaatgaatattttat

SEQ ID NO: 314288 - DNA, 1042 bp, Cannabis indica
aaaaaaaaaatttaaagtgtaaaaaatgaaaagtcccttaatttttttattattttatataacggtaatatagctgtgatttggaataattatgataacttttaaaattggattagtttataagatagtggcattacattatgtaattatcacttattgtggtattcgtttgagtgattttttttatgctatttatatgatatgatttgtaagtttggaatttttacaaaaatactaaattttagataaaaattaataattttagaaaatttttacaaaaatattatctttttataaaagaaccgtaaaatatttaataaaacaattaaaaacaatagtggaacaactaaaaaaataataatagaataacagatgaaatttaactcagtatagagtataaaacaatacaatatttttgaaaaaaaatcaaccctatagtaaaaaagaaaaaaagttaaaatatatagtgtaaaaatcccaacaatttttggtacacatgcgatccaaagcataaatgaagggttaattcattgttataactatgtatataaataataaaattagtccaattgaaatacaagcaacatgccattttgtaactttgttcacacaagaaagtagaaaccagtcccaatccatagaatcatgttagaaacaaaacaaacatctcatatccaaacggaaatcttattaatcttaactatgacttagccaaatcagaatccaaacaaatactatgatactatttagtcatataactatttgcgtataaatataattcctgagttggcttaccaaaacaaaattgattttacaaacaaatcataacaatatggcattggagaagtctacaatagcaaaggacgtagtgaagtgaagctcaactaaagtgcacaaatgagtttgcggttttgtgccaagtgcatagttaatgttttacagaagaactaattgatttgagataaattgaaaactaccatttttattaagcattaattaaatataactctaaaataattttaattgatacaatacatttttt

SEQ ID NO: 314289 - DNA, 939 bp, Cannabis indica
aattaataatgtggcattatacatagatagtagttgaaaaattatataccattaggaaaataaattacaagtcataaaaattacaatcacaggaaaaaaaaatgaaaaataacatcccaaaaaatagaatatcattaccttaattttccaaaaatcccatgttctttctagtgatatccatctcttcaaatactgtagaatcctaattttacacctttttctaatttgaactgctaaaaaacgattggaattattttaataaaattatttttattaaatttttttaaaaggttatgaaatcattttttaatcatctttcattgtcagttattatgccacctcatagtcaattttccctctaaaaagagatgaaattactactctatcctttgttataataccacatcatcaatacaaacggtatttttaaacaaaataaacagaaggactaaatgtatgcatataaaattatacaaggactatttgtaacaagctgaatagattaaggggcataatagtatagtgtcataagtacagggggtaaaaaagataattattctaatagataaatagaaagatagaatatattatatataatagaagtgaaatgtgaaggaaaaaaatagaaaataattagtcgggttgggtgggttatttcagtttacttgggcgagttggatctattttcaacctgcccaattagcaaattggacagtttataattttgtcaagttttttttttatttatatttttggtcggctttttcggcttagtttgggcgggtttgttccgtttggaagatttatgaaaatttatgtacaaccctaggctcaatggcccaaagacatgggaaattgcagccttggtcgtgctcagatagatgctcataggcagccagcacctttgaacttccaaaattaatatttttttttgttttt

SEQ ID NO: 314290 - DNA, 2388 bp, Cannabis indica
ccctaggataggtgaaccctaggcacaggcctagcccgcctatgcccagggccgggcctgataacaatttggctcatatggttgttgttgccaaatatttttcattgtaatcccatcatcaaaatgtgtagttattattattaagagcaaggtcttatatttggatttggagatactccttaatttaactctttagtttattccctttttgttatgaaaattactgtcatcatctacattctctttgattaaagatcttgtatttagatttggagatgctccatttatgaatttttcgatttatataagtttcacaaaaatattgaaacatgaatttttgtattgtattttaaaagtgtataaactccccatatattaagtataaaaaaaatcaaaaaaatcaaaatcaaaatcttcacattagtaaaattgtaaagtttgatgataatatgataaaaataattgtaatgaaaagtgtgtttggattagttattgtcaacatattttgttggtgtcaatataaaaagtttaggatattatgtattagtaaagtttaaactttgaggattaaattttttaattttattattttattataaaagttatttttttttaattttttttattatctatttactgttatataaaattattctaaaatttaaaaattgagatagggaaaattacatgaaaatgtacaatttttcttccctgcatttatccttcattttataactgacacaataggtaaaaaaaatatttcagcaatttatgcgtcatttaaaaactgacggtataaatttttagtgtcagtttttaaattgttggtttcaaaatgaaaataattgttatttacgtcatttaagaaacgacacaaataaaaaactatttatacgtcaattttatagaccgacaaaaaaactatatatgtcacttaaaaactaacgaaaatacgtctttttgtagtagtgtaagataaatttctcagcccgcgagaaaagttttgttaaagaaagaccatgaatctgcaataacaaagaaggaacctcgtgatattaagaccaatgatgttaatgaaattgtgcatacaatcaatcaacgagaataacagacaagcattcaatgccatcaattcgataattttcataaccgttataatcgttctaatttttacaatcaatagctattattattgtaacactatcattatgactacatttgtaaccgtcacctactatctataattgtaagtacacctactcccattcaaagggggcgatctaaataataaaatataaagcaaatctcgaactcttgttgaacccctataatttcttttctattatatttttacatactcgcatacattttacattagaatatttgaatactcgttattttaagtgagtattcacaatttttatattgtctaaatttttccaacaacaatatacatattgataaacttttcttatttttttaaaaatttatattcttttttgtttaaaagtttctctttcaattttgaaccagttcttttgaaaaccataatatacaaataataagaaggtcgtggccatttgggggatgtatgtatatttataagcttccggttagctagacaatgagatggcacaccttcttctgtctaggctatatggccccttggtcttttgtccatttctgtattctcaaaataactcaaaacaaaaccgtgaaaagatatataacaacgacaatgagaaagatctagagcctgcagttttgtctagaaatgaaatatagaaaagtaaaataaaatcaaaacttcacatcataacgttggtgtgttcttcattttgtatacaaatatgctatataaatcttaatttcttactaatcaataaaaaaggaatctctcaaaataacagcatatagtaaaaattaccaaattaagaaaaagtgcattatttataaactaaaactatacatctttatatactacttcaatggaaacaggctatactttaagtcattatttccgggttatgggcacagtgtaagggttagtattatttagtaaactaattactaattaggctgattgataaaaaaggattctcttctcttctggcaaaactatagaaaatgctttaaaaacccaattaatttggttgcatctcatgtcattttgtgaaaatgtacacgcggaaagcaaaagctgaaggacataaaagacatgagtggagaaaaccaggctagaaagtgaaagaaaaattaaaataaaaccaactccatttctttgctcccaaagtctcattcatgtgatataatattacaataataaggacaaccaaataaaatctagtgctgttttgcttcactttttatttatttatatatatttct

SEQ ID NO: 314291 - DNA, 647 bp, Cannabis indica
gtagcaacacaacttatctcctataaagtttaggtgcctctttgttgttcgtgaagcgaagaagattttgaaactcctgacactactacaaaaaggcttattagcatcatttttcaaatgacatatataataattacgtcagttcgtgtaaccgacgtatatacaagagacgcaaatagttactctattatgttggttcgtaactaacgacattaaatagtactgtcagttttaaaccaacgcaatataaataaattacaccatatacgtcggttcatatcgacacaactacaaaaacaaaaattaaaaaataaatttgagcactcgaaccatctcaatcccagatctctattcgaaataccaaatacgaattaaagtacataaactataaaattgaataaaaatgagatttgcaaataaatatatatatctatatacacaaaaattttaattacataaaccaatatacacatacacaaaaatcagatttgccaataatataaataaaagtaagaaaatttatggatctctaaaactccatagcaaccgagagtgagcaacaaaactcataaccatggtccatctgaaaaaaaaatgaaaattaaagagagagagagagagagagagagagagagagaggaggagag

SEQ ID NO: 314292 - DNA, 535 bp, Cannabis indica
aaacttatttttttgacattgtaaattattcagaaattttctaaaaaaattataaagtgatcctaaaatagctacaatgtaatgacgatacactaaaaaaaaattaagactaaaaaatattttggatgctgaaatagataaaaatctaccaaaacaatcatttagaaggtctactacataaatttcctaaattcatcataataatagttttaagctcaatgtatgtagcccaaaatgttataactagataagttagttgacctttaaaaaaatatttcggtagactttatatctattttgacataaaaaaaaaatttaaacaatttttttttattataatcgtatatattataattatatatgagtatttgtaaatttttagaaaatttataatgccaaaaataaaatttatatattttattgtacaattatttttttttataaatttagcaagtaactatttagttctaatttttggttcggtaaattatttgattttttgaaaatttataaataattttaaataattaagata

SEQ ID NO: 314293 - DNA, 1182 bp, Cannabis indica
aaaaagtagtcggagtagggttatgctctgtttgcagtttatttcgagttttccttccttgatgcccagaacttgcttctctgatcaccttgactcatcccatcgaactcccttaaccgcctaccctcgaccctatttcaccatgatctccatcttcccctatttcatcctttcaccacaacacctatttattcttaggactaaagtatctttgccctgtttctttgctttttatttcattctccgattctttgtcttttatggattcaattatcaaagatatgaattcaaatttagccttttttgagaaggagcaagtacgtggttcacactttcactgaggctgatctcagtgactctaatcactccacaaaattctttttagttgctcgttgcctttcaaataccattaatcctaaaacctttatcaagaaaattggggaattctagactaaaaaatacagatttgaagtcattgtttcggaattacactctgaattatttttgttaactctttgtttgcagggaataagcttcagattcttgagggtgaacaatggcactccaacaacaaccttgttattttacactcaccatttgttctacataacgtctctaaaaaaattctgcacaaagttcaattctgggttcagactcatagactcccattcgttagtaaatctcgggctcttgctaaaaaggtcgaagaatgggttggtgaatatattgacgttcatgaagactcttcatgaaggatgggggtcgtttattcaaactagagcttggattgatatcaaccaaccacttatgagggaaaaactggttaatctcccaaagatttgggatgaacatttgctatagaatttccctatgaaaatctgcccattttcacttcaagtgtgatttattgggacacccttttgatcgttgtgcctctttccttgaattagttgatgatggaatcgacctcgaacttccttatgggcctgaaattattagggacaagttgcctaagtcggggtatgatcgatatagatatgatttcccaaggccaatgcttaccctctcttcatgacacaattttttacctttactaaacaaccttccttgtccaacattgcgactcagatgaggttcctcttgatctcaggaacattcctcacctattgtagttatatcaag

SEQ ID NO: 314294 - DNA, 1804 bp, Cannabis indica
aacttttacagcataaaatgaaaaatgctggcaaaaatgaatttttctagcgcataaatgcgctggtaaaagttagattttagccactgcaaatgtacgctggtaaaactttgacttctttgccaacgcagtttatgaaatgcactgataaaagtagtacagtagcgaactgtgctagtaaaagtaacatttcttgtagtgataaaacacacacatttatgcataaatatctatttatgtttctttccattacaatttataatgcaaggtctcaaaattattataaatcatatggtagttggccacttgtagtagtaaccatatacctaaacataaaagactttgctttaattttatcattgtttgtaaagaatactgatatcaacattatttatcactgtcttttcttttattattattgtttgatacctagattttaataaatatacttatggtgttggattagtatatgcatgtataggtactttagtatctttcatgtaatttcaaaccctcaacaacatgttcttgaggaaaaactctttcaacaataataacgttcgcaacatgttctcttttactttgttttagttttaaaggtttcgaaaccaaagagagaattagatcacccatgtctattactctccttcatgttgtgttattacttcatgaatacgctgcaactatttatacatatttatgctataataaatacttttggttaataaggtggccttaactctctctgataatcctttaccaaaaggaaaaaactctcatagtactaaatttagcaaatatgttttaagactagtaattataaatatatggtccatacatatgatgattcaataatttacaaaaactaaagaaacatagtatatatcttgaagccaatcctttgcagttgaatattgattgccaatattgccatcgtattttaaaggggttcttatataatgaagttaacaggctggtaaaatcagagatgcataaatttataatatgtatatacatatatatatatgcatacatcatgatgatttgatattaagatttcggatctaccacctccaaattttagtgtgttatacattcacaagcaagaagagatggagatggtggttacaaaccttctctctattatttttagtttcacatataaaatcataactaaaaaccaagtgaagaaaaggtgaaggcagtaggggcatgatatgtatcgtccaaaactcaatttgtttttatttattattaattataactttattgggttatattaatatatatgatgaagtgactcaaagtatgtatgaaagtaaccttatgtagattgatgttgcgatttgagcaatttttggatgatttcttatggatattttcactataacaaaatgtaccacaatcaaaacactcaaactagaaaaataacaaaattaaaaattgtaagttagagagaaacaataagaactataatactctaaactaatatatggaatctgttggaaatttaactctgatacgtaagaattaatctctgtaattctagcttcaagatcacacttaaacaaacaaaagttaaatcaaaacaaataaactaagaacaaaaaactagcaaacacattaaaccagaaaaaatataacacagatgaatctaaatggctgtcagacacaataacacaaaagatttatactggttctgatcctaagttcaatgtgaacttgatcatactctagtttgaaagcattgccaccaatctttattgataatgagaataagtgatatcaatctcaggagctacaa

SEQ ID NO: 314295 - DNA, 509 bp, Cannabis indica
agaaagtatttttaccgctaaaaaaataagttaagtatttatttacaactcagacttaaacttaagtatttacgccgcaaattaattattttattatttaataaataatataacagtcatttagggcaaggaagatagatgcctctatatgttaattccaaagactcaacataaaacctttgaaggaatcgagtttcgtatatgataaattcatataattttatacacacatcttctctcctcctattgatattttctcttgttgcctattattatatccaatcgttggacggcaaatctacagggaaagattacttaatttattttgataattgtttattaatttactattattagtttaattccaattaatgtttttatggggttattagaattataaggagttcattccttaattaattttaaagttttgatcgtgtttatgtgttgaaactactttagttgtttcattagtcttgtcttttgacatgattctttagtcttgtctt

SEQ ID NO: 314296 - DNA, 935 bp, Cannabis indica
gatctctggttgatattgtgattcagagaaaattatggctttggaggaatgtgtccagtgtttgattttatgttttgatgagagttgtgaaaaatatgtattataaaatagtgactaaatttgtaattgaagcagaatataaatttgaagtttgcgagtcttgaattgaagcagaagaacaaattgttaataaactgatttaaataattttaagtcatttttaaaaagaatcacgataaggttaagaataagttttgctctatcgtacaatgctattaaaataggccgaataactaattattagaagttaaaatacatataatcaacatcagattaaagctcttcttgaaaatggttgtattacttacattatttgtatagagaaacaaatcatgttgttatcttttagctaattacgctttgatgggtccttacgctatgactaacaaagaaatgaaaaaaaataaagaaacatatgatcaacgtacaatcttgtatagaaagttggaaggttataaaattaaaatggaaaagtttaatctgatgaaaatagattctgattctatattatgaatggaaaagtattgcctaaggaattatatattttatttgaattaaggaattataatgaattttgatatttatgatcagtggccgtaattgttgttggagaaattttgacaaacacaaatattgaaagattgtttaaatactgaagaataaaaatgtaagtattcatttagaagagcactcaaagaaaataatagaaatttatgtatgtaaaatatacatatgtacatatattacataaccgagatctcgtgattaaatttttataaatattttgaaaatacttttacaacttctcgctagggctgttcatctgatccaatccacatttttttttgacctttctcgctagggctgttcatctg

SEQ ID NO: 314297 - DNA, 3774 bp, Cannabis indica
gccgccgggacctacctgtgtgtgatctttatcattgagcagagcatcatccacgcaactctaaaagttgccacaaaatttgacatttactttaaaatgtaaaattttattttttttctcattcacattaattttagacatttactactaaaaagtactccaccacttaacaactctaaaattgctattatagtcacacacactataatttaatatatcattcattttaataataaaaactatcacaaatatacattgaaattcatatattaataaaaataaatattatatgaaatttaaattacaccaaatttaaaaataactcaaaaataatataataataattaactaatccaaaataataaaaaaaatactaattaaaatttccaaatttaaaccatgtgtgttctattaagtctgcttgaagattgcagtgaatgtttctgtcacaaatttaggcatttttttgaagcataaagtcaaaaataggtccatggcatacttcaattgttagagtgtcggtagagccttaatcataattaaaatcaaataactcataagtttgtctttcatcttgactttcatgttgtgaaattaaatacatgaatacataatatctttaagagcatctctttaccagaatcgagttggacctcgtataatggcataacgagattaaagtacttcaaatgcccgctcaacatctttgcgtacagcttcttgaaattgggcgaataattttctcttctcaagacaatgagattgttttaacaaatgtacctcattctcggtagatactatctgctagataataccccttgttgtactgtgtgccatttatcataaaatcaactcttggagcttgcccctgtaagatgtgagtgaataatggtgattggtttaaaatattgagatcattataggatctcgaaacaccaaaaaaatgcatgtcaactctaaaattcttgtgatgcgtctgtttcaagcatgattgtcggtgcaccgtgatcacctcgtgtaaattgtccttcctatgcaattggaaatttttttcatttctaatgcatacaatcaatatttcccaatatgcctagaaagtcacgcctttctcccatttaaattaagcggtgaatgtcactagcattgggtcgtcttatatattctgccccaaaattttgttcactccatgaacgaaattgagtagacattcaatagcagtggtttcaccaatttgaacatactcatcaacgtaatcggctggtgctccgtatgccaatattcacatatcagcggtacacttctatagtggtgaaagcctttttctaccaatttcatcaaatctcgtttgaaaatactctgaatgatgttctagagctttcattatgtgcaggaaaatatgtctgcgcattctaaatcttctttgaaaatgatattttgtatacactagctcatcagaaaagtagtcacagaataagcattcgtgtccttctacacgacctctgtcaatatgagcttctttttctttctcgcattcttgagctactcgcaactaagtattcatttaaaaatttctcatcgaaatcgtcattacattttgaaattatgataacagtaacactcatattctcaaacagatcaggagagcttgctgaattcattgcccaatttttagtagattataattgagaatgttagatgaatgagagtgtaaagtaatgtatgaaatagagaagtaagtgaaagaaagaatagaacttggtatatatatagacttggtgagtactttgatgtgttaaaatatagtcgttaaaatataaccgttaaagtagagctgttaaaatagagccattaaaatataaccgttaaaatatagccgttaaaatagatttgttaaactataaccgttaaaatatagacattaaaatagagctattaaaatatactcgttaaaatataatcattaaaatatagccgttaaaatatagcaattaatatgtagccattaaaatagagccattcaaatattatcgttaaaatatagatgttaaaatatagttgttaaaatatagccgttaaaatatagctgttaaaatagagccgttcaaataaagccgttaaaatatagctattaaaatatagccggtaaaaatataaccgttaaaatagatccgttaaaatataactgttaaaatagaatcgttaaaatatagtcgttaaaatatagcctttaaaatataatcgttaaaataaaactgttaaaacatagctattaacaatcaaaatgtgattgttgtaatggaatagtttaaataaatgataatttatttaataaaaatatagttattataattagataagaacaataacatttaaaataatatataacatttagttaaaattaaagaattacaaatttaagatattagtcttaatatgagctaccaaatttttgtaatctttcttttgctcaagagtaatatttgattggttaaagaatagataatccatgtattttgccattactttttttcttgtatcaccaccagtttctctaatatatttgctttccattaattaagatcataaaatgtagcaagctgctcatcttgctcttcatttccctttctctttgtcgctttttggccaatagggcgctcttcacggacttcgtgatcactgatgtctacattgaatgatgaaatatatacccgtgaatcagggccgactctgagttgaaatgggccataggcaaaaaatttgtttgggcccttactataagataaatggtattttcaaaaattattagaaaaatatgtaaaaaaatatttttttatttgggcccctaaaataagtgggccgtaggcgcctatgcctaggaccggccctgcccctgatcttgacacctttgctctcttaaaaccttttggttggtacattgtaatctattttggctcatcttttaacaatctccaatagtctacaagctaaaaatatgaattgttattttcacacttgtacatctcatgtgcattctcaataatttgctcattagaccaaccattgtgatgtgcttgttatacttgcttgtaacacccattgaaacatgtcacattttgattcatcttgttccaatggtctttgcattgctttccagttctttattgatcatctttgtagtgggtgttgaagtaatttgcgatctgaccccagaaatttgcaaaagtttggtcagtttccacgacagcattcttagatgtattaagtcatgcactaatcagaagtatatttgcttccttgcgccatttaggtttattttttgacttggctcctcttcactatgcagaaccacttttgctaacccttcaacaccatgtgttgaatgggttttagaaacggattgtgtcgacgatccaacattcaaagcttgaaaccattttgggttggtttgaaaaaggtgagggaaacacatgtgggagtaaatgtctttgtgtgaagattggaccatgttgggaagtctcaaaagagctaaaattttggtaaagaaaagaagagattggataatttggagaattgggttgaattgagaatattagaaattaaaattttgggggttgttaaatggagggttatggacttatggttaaattaagaaaatagaaaatttagattttgagagttaatatatggaaaattttggttaattggaaaatattgcattttgaattttgtgggttggtttgtggagaattttgataatttggttggattgagaag

SEQ ID NO: 314298 - DNA, 1247 bp, Cannabis indica
agagagagagaggagagatgaagattacaagtcagctgggctggttattattattattattattattattattattattatccaatccaataataataacaatgctgtctattgtgattttgatacatatgatctattttatttattttgtgttggttgtacgatgaataattaacaagacacatattgatagtaataatcttgtgaaaatctgatatgatctctacaatcaactattattaagccagccaagcaagacaatatatatttattggtaattggttgtgagcatatatgttcccaaccaataaaatcttccatctctaataataattcaaataaataactttgtacatactaatatacaaagctctaaattggtttgcttgagagttgagattcactttgactttattaactatcccatccacattcacattttacagggattagattatcctcctgaaaattctatcaacagcagtgactcaatatgaagagtgagcaaaacatttaaatagatagattatgtttagaacctacaaaatttcaatactaaacatttttttgaggaaaatgtatacaatagcaggccctacaaaatcccctacccaacagcctgcaataaagaaagaagcacattttacatataaatatgagaaatgttcaaagggcaagtactacaagacgtgacatgacgctattagtatatttcaatattaggttccacgcattttaatttgataaatgatataaaaaactgctaacaaattataaggtgtcctgtggtattagaaaggttaagaatttagacacaaaggaaagcaatatggatatttagtgaggagatattcttacttacctatagattgaccaaccgaagggtcaattaaaactgcaccaattccagctccaatagaagcaaaaattagtgatgaacctaatatgattgtaacacaagaaaccttctttcgcagaagtttaacttcatcaccctgaccctcttcttctttcgaattcagcaatcgaatgatgaatccgtaaaacgcagagccaacttggacactccataatgttgcaattccaagaagatgtcctgcttatacataattaaaatactagtactaccaatcagaaaataaaagctgagacataaaatcaaatttaaaatcgaccacctctgaaagttgttttgccaactctgaaaaagaaaacataagcagacattcctctgctggccttgcgtg

SEQ ID NO: 314299 - DNA, 2710 bp, Cannabis indica
ttaatttatgtttcagtgtttaagaactgatttcttttttattttttaattgtaatcggtttgagttattgcgtgttacttgtttgtattcatcatattatataattgtttctattttagttataaccggtttgagttattttgtgttattcgattctattttaattataactggtttgagttattttgtattatttattttattaattatatcacagaaccggttatatttcaattataatcggtttgagctatttgtttttattcattatgttatagaactgattctatttttatttatatatgagaaatctacttttggtaacttttccaatgacttttttgacgatggtgactttttcagagacggtgattgtcttggcaacttttcctacgacaataacttttatggcaccagtgagtttttcggcacatgtgacttttccgacaaaacttattattacaagtttcatcaaatttatttattgtttcttttctatatttttaactttaattattttttgatgttatatttttttacattatttatttatgccatatcgaaataaactttactatatattttcatatttatgaaaaaattatttttttctttgaaagaaaatgcatgttttttttttcctattttacatacataaataaaaaatttataactgaatgtttaagaacgaatctaaatgaaagactgattataaaatcgtggtcttaatgtaaaggattttttttttttaaaaggtctaattttaaacttttgtacaagtcctaaaatgttttgtaaccaatttccatcaacaaatcactttagaataaacaaaactttaaaatgagtgactatcaaccaggccaataaatttataatattatcaactatcaactaagaatgaataatggatttatcaaacttatctaaaacaacgtttcgattaccaattgggttttgtaatcaaattgaatctatgatggctaatttttggtggggtactaacaaagatggctcaaagatccattggaaaaggtggaaattgttatgaaaattaaagtttgaaggtggtatgggctttcgttcgtttgttgatttcaatcaagctatgctagcaaaacaggcttagagattgtttgaaaatccaaactcactaataggccgccttttgaagcataaatacttctcaagaaactccttcctagaggcgcatcttggacatgctcctaaagggactgcgatacaagattggtaacgaatttcaagttagaagtggtttagatccttggatcctaggacatgatgaattcagaccaattggctttattggtcaaccatccttgcctgtatccacttttattcttgacactatggaatggaatatggatctcctacaagacaactttgctcaaatcgatattgatcatattgttaccattctcttgagcttttaccaatcacaagataggcttatttggcaccataacacatctggggtatattcggttaaatcaggtttccaccttgcgaattcaatctcagagaaacttcaagaatcatcttctgatgatttcaaaagctggtggaaagttttttgggctctacagttacctccgaaagtaaatttttttgcgtggaaggtcattcaacaagctttccctgtggcctctactttgcaaaagaaaagtcattaattcagcttcatactcaaggtgtaaaaacgcatgggagtcgattggacatgctctgttcacatgtaaatatgccaagtctgtttggaagaaaaccaattttacaattgattttcatcatgcacatggtatgtttaatggggattatctaattcacttggcaaaatcgatggagaaagctgactttgagctcttaatatgtgtaatgtggtgtatctgaatgataggaataaagttctccatggtggttcacatcgtgagccgtcttctttgacagcatacgcaaataactacatggaaaactaccaatcggccaaacttacctactgcaaaaaaaaaataaaaaaaaaataagcagaaccacacagcctctgatcttgaccagcagctctctacacatttgcttggcactactttcgatcaaatatcacgaacagggcttgatgctacaaacaaggattcatcttctcagcaattacaaccatggcaatacttggacactctccagcagttagcacaacaccataatttgaccataaaccatgattcacataatatggctgctcgatataatattcaccatgatgcctcaaatcacaacctcaattcatgtcatgtagcaaaccagcagcaattgcctttaacatctgagttgcatgattatgtcatattacagcagaatgtcacaagtgacaatgggaggcaaaaaaataagatagcatggatgccaccagaaggtaatttgcttaaaatgaatattgatgctgctgccaactttcatgacaaaatattgggtattggagctgtggtacgaaacaacaaaggagaagtaattgctgcattttcaaaaagagtcactacaagaaaagacctttttaccggcgcagttcgtcaaatgcgccggtaaaagttgtcgacgtaaaggaaaaactgaaaacccatttacattttcgctttattttttgccggcgcaatattgcgccggtattactatgtttttgaccggcgcaataatgaa

SEQ ID NO: 314300 - DNA, 563 bp, Cannabis indica
aaggccataattcaattgattcgagcttcagtgctcaagaaagttgaatcacgagagacgatgtggagtaatatttggtgctctaactctaaagctttgacttgctcaatcaattaatctttgataatgatgcatcaacttaacttaattatgttataataattaacttatactatcattaatgattatgaattatgatgtttttttaattaggtgaatgaatcaatcaatattcactcaacgccaaaccatgcttttgtttttagtttttcccttactactccattaatgagaattgattaagctacaaagtcaaattaattattaatatatatatatgcttctatcatgtgtaataacaacggcatttagattatcataaactatttattattgctcttacctagcctctcgataatacaaactaattatcatttaatccaaactattactatccttattaatcgggtcccactttgttattattttatttataggaaatgcttaacactgattttaaattttttaaaaaaacaattgattgtacaaaaaaataataataa

SEQ ID NO: 314301 - DNA, 860 bp, Cannabis indica
tttaatttaataattattatgtaatagaatatatattacaaactataataaaaactaatcaaaaaaataatcttttaaaaaatatgttttatactataataaattttttactttaagtaacaataaaagttataactaaaagtaaaaaaattacggttaatcataaattttattatcattcttatattgtgactaaaaaatctacagctaaaagtattagttacaaaaatcacaaattattgtgattaaatgtaattttagtcacaatacttattgtgattaaaataaaactaatatttttgtatctaaatactatatttagtcgtaagtaactaaaaatcacatttagtcacaattttttttattataattaaaaattatcattaaaaataatttttttttatcggtgtcaaatttagacattaatccaactataaaaacacaaaattactttttcaagacactattatgaatttgcccttacaaatatttttttagaaaaaaaaaaaaaaacagataaacatgattatttcttaaactccatatttagacaaaaccattcaattaatttttaatattaaaagacaagaaagaaaaagggttaatacttaataatctcattttcggcgggaaatccgttgattgcgctacaataaagccctctctcacatttcagactgacctttttgaccacatttttcctttctcactataatttttcttttttttttagtaaaaaacaaaaacataattaaacataaattacgtaaatttgcatgttactatgtttttttttcttccttatttttgtcaaaaatatcaaaaaaaaaaaaattagatttttatttcactgcctaatt

SEQ ID NO: 314302 - DNA, 1547 bp, Cannabis indica
aaaaaagaaattatataggtgtagctagtaagataagatcaatgaacttataattatatcactatataatatatatatataacgtgagagtcgacattttctatcccactcttaattaccgaacagctagcttagccactatgtttttattggtttagaaggagttgaatgtcttactcttttgagaaatgctaaaatacattattgatgtctaatatttttctcaagtatcatatttttattagtgtaatttagtattaaatttcatataacttaaaaaaaaaaattaaagaaatattactaatcattcgtaagataccacttatagaacgtgttagacactataagtattcaataacaatgatttactcttttttatgagagcattaatatgggataccaaagtgtttaatatctctataacatatgttttataattagctagtaattttttataatttttattaaattaaaataagtgagactcaatattaaattacactaataacaatattatactagctcatactataaaaactctttagcatttctctttttatcatttaaattataatgtgtacatttcttttggatttatttgttcgataagccatatccaaaatcagctacgatcaagttttcactattttctatttatttattatttttatacatataattatgaaaacaaagaaataaaaactataggagcttctatggtggtgctccccttaaaaaaatagtgcacgatgtactttatactatttggcattttgaaaaaaagtaatctaatttttcttaatcatatattataattatttaagttattatttaaaattttgaagaatttaaaattatttataataaaaaattgatgcttaaataatctatttcacactcatttaaaataaaaaatacgtgtgtaatatattgtttgaaatttattttcaacatattaaatgttttaaaattttaaattacaaaatactttaaattaaataaaaaaaattctgaatgtcgaaatattaaaagtgattttaagtggtgcattctacaattttccaaaactataaatgcatgctttgaatggtacccaattgtttggtatctgttggtagagaagttggtacgtgggtgttttcccgtgttcctcatttggccttatttgaaaagaaaaaaaaataataataataataatatgaagatatatatttatcaaaaattcacacttttaaaagtgatctactagtactaatgtatctttatttattttgatatctcaaataatattttaataaatttttttcttatagtcataaaggtttatttaagacatctgttaatattttaaaaaattcaaaaaaatttaacacaccgaaaacaggtttcaacaagtgttgcacatgtaccctcataaaagaagtgtacaggtgcacccctatttgttttgtaattcagaaaaaaatttagtccaattttttcgtagttgtatcgtatatatttaagacatccttaaaattttaaaaattaaaaaaaaaacttaaaca

SEQ ID NO: 314303 - DNA, 1208 bp, Cannabis indica
ctctgccttagtatcatgttgcatcattacagaagaacttttaaccgctgctgttatctctactttctgagtttgcttctttttctcttgaccattctctgctttcctacaatccaccgttagatggccataaccagaacaggatttatatttgacagggagccattcataatcaactgcttgctcaaccaattgcccatactcatttaaaaactcaatggaccgtggaggtgtttcagcaatgtccatctctaccagcactctagcaaattgaattcgggaacgttctttagtaaatttgtccatcatcaagggcttccctattgtgctaacaagagcactaagacaattgttaccccagtattgaaggccaagtccatgaagacgaatccataaggggactgatctaatcaatcagattgagtagagatccttggaccaaggacacacaatcacaggttttttttatcaaattgaacaatcccatttttaagaacttgatcacgggctgatgattcaaacaactttaccatcataagtcctcttgtcattctaataacccactctatccccaatgtaccccatattcgtttgataaaaccctcaaaacagccatagggggattagcacctaaaaccatacaaataacagcagtatcccagcaagctgcctgagcattaacttcctcaacatctacctgagctattttcttgccctctttgagtaatggttcctcaaatttcaatttagcatcagtatttgggaacttacttgctgagaatttgctccaatggctttgagaagattgttgcagatccatttctgcttcctcagcccacgattgagaggctcgagcatcaccaaaaccctcgtcctaaacttcggagtcttctgcaactcgaccatcctcgaccgctttctgattcgaacctccgtctccttcctcgaccgcatcagctagggctttgcctaactcccccgactcgacttcaacaacttgcttctcccctgaaatagagaacgaagctaaatctggagaaaccaatcgaggcgcaggcttcctggtgactcttttcttcctcgccatggaagagagaaaatcagcccttgaagcttttttatgttttcatactctaattatatcattttacttattagaaatttatagattgtattttaaatatttaaataacttagatatttttgta

SEQ ID NO: 314304 - DNA, 997 bp, Cannabis indica
ttttttttttcttaaaattagctcattgttttacttcaacactcttacatcctatcagcaccaaatatacttgaattctatacaagtatcactataatcattacaattgctcaaattattctatgtctactctttttattttcttaggcaataaagttgaaattaaaaatcatttctcttttaattatgtagacaagttattacaaagtaggaatactcctgctccaataaccactactaaaaaattagatttttctgactattttaaacagttggataaattactttcatcgatctctataatcatcgcctattcaaccatcgcaaaacaagtagaataggcaatggtggaaaattgtcgacaaaatattttgtcgacaggtgaaaatcatcgcctatagtttgtagcagaagctaggatttaaaactgtagcctatagtataggctacgatattaaaccgtagtctatacttttattgttccaccgccaacaacatgaaaaacctaaaacccttgaagcctagtacagttattagcaagctttcaaattctatcaatgcatagatccacaatctctttcccaactaccaaaaaaattacaaacttgaacaaacattcgaagtaatttcaacaaaaacctataaaagagattgtgtaatggcctctaatgatgttattggctaatgagttgttcggggtaaaaaactggcaataagtaccggtcctcacttcatcaatgaccgttagttctagatccaaaaacacagcacggggtgtgaatccgacttgaccaatgtgcatcaagatgcactctctcaattctcttctctaattttttttgttattttgttttagttcggttatttggtgtgagagagatcgagagagacgagaatgggtgatgggtggtgggtggtggttgggtaccgtcggtatggatggggctttctgttagaaatattttaccaggatctatctaacaagtatgtttcatta

SEQ ID NO: 314305 - DNA, 1963 bp, Cannabis indica
atttttattttttataaaataatttagtggcttgtatttagtgctttgattactatgcataattatttatattgaaagaaatttaaaaactctgaatatgctttataattccatttgttattgatctttaacagaaaaataatttcagggtttgtattatattattttgcaaatattgattctaaagaaaaattggaatatatacataactcccaacaacctgtttccttatgtagctcattaagataaagtagtaaattacacactaaatttaacataatttgtccgaaattactcttgataatgtacatctaggtggttttgtccaaaagtgaagcaaattcactatcaaattcaaatattatcaaaaataacatgcaaaagaaaattgagcttctagtgttataacatagaaaaatgcatgtcatgaaattcatttcatgacaaatacatttataaactaaatatggaataatggtaacagttcgaataaatattatcatttccttgctccttcctcttacagctaacacaattacccatcaataattttattttttacaaatgacattttttttcactttaacctttttttttccttcctatcaagtagaaatattatttgtggttatagacacaatttagtaattccttacaaagatgagaccccaagttcgaattcttcatctccaacatatataaattatttgttgttttctagtacatataaccttcccctcgaaattatttaaatatatatttcacaattttaaagaaatcgtgcttaaatccgtctgagtgatgaaaatgattatgtggaatgagcttggtgtataagtaaaatgctacacaagaaatagagggtccaacccaaaacacccagtgcccataccagaggtggcccccgcgcaccaaagctgcacccaagcacctagctgggttcattccagccccagcatagcctttagcaccagtcactgttgtcgagataaaaacaagcaggcccactaccaacccaataattgtaaagactaccacttttccaaggtcttgggcctggcgacgatcaaaggccatccatactgaagcccaaagaaacacaaaggagcaaagaatctctagccatagagcttgctccatccctaagcctaccacaatgggcccattaggccctggtgcaacaactgtgagggtgcatccacctaatgagaatgtttcctcaatagtgttgttgaccacagcttttagtgctagtgcacctaacatggctccaacacactgagccaaaatgtaaatggttgcacgtgaaaaggagatgatgccaacgagtgcggcggaaaatgtgataacggggttgatgtggccaccagagacggggtgggtagcaagaaggagaattgtgacaattatggcgattaggatggccatgacaagatttggtgagcttgctttggactcaaatgaagatatcacaatggtatcaagtgaaaacaccaacaatgcagtgcctataagctctgccaatgatgctctccaaacctattattaatcaacacttagagatatcaagatcaaatagttatcatatgttaatataaaaggtaatgatacgtgacatgtctcaccatacgaaccaaaatattacaaatagtgatgtaatattatttgattctttttcatattgttcatacttagtaaaattatagattgaacaaaatttgagagttaaaaataaaaataagggcacttctctcagtttttcttacttcagcatttctttctttctttctcattttttttcacctcttattttcttttctattttttctttcatcatttttctacttattatttcactttctattttttttgtctttctctttcatttgttattttctttttccacgtgcagtttttaagagagtatttcatattttaatattatataattaatttattattt

SEQ ID NO: 314306 - DNA, 625 bp, Cannabis indica
agtttctttatcgttagccataagtgcaaatagataacagaacttttgcgcttataacttaaaacaatattttccaaaattaataaataccttattttgaaaaacgggtgtcctggttgagttcaaaatggtccaattagttaggagtaagtttgactcggttgaaaatgggtgaaaaattggctgagtcggtccaaaaatcattgtttgactaagtcaactcggttactggtagcaacaatctagcagctactagcagtgcaccagacatccaattgaggcgattcttgcaacgttggattcgtctcgtcaactactttgatttgatatataatatcgttatatttggctctgataccaatttattgtgcgcagaaacaataaatcgcaaaaaaacaacggtgttttatatatcaaataaaaaaaactaataaattcatagaattacatggtttggcaattcgccaactccacaagagacagttgatatgattcaactgagtaagaaatatacagaatacaaatacatattttctactaataatatctctcaaatgtttcccaatgtgtggctatacaaataatacctctcaaatttcccagtaaacttgattgcaccaagttg

SEQ ID NO: 314307 - DNA, 1225 bp, Cannabis indica
tttttctctgatatttttctaatcttcttctattttaaatctgcaaaaataaaagatatcaagcgtaaaaatgctccaaacacgattaaaatttaattaaaaatatactaaaattaatactaaaaataacctaacaaacaaccatttcttcttgcttgttctaagtggttcgaaagagagggagagtgttaagagagggaatttctcgattttgcttctaacttaatttttgagaataatcaatataaacttaacttttaataaatcaaaccctaaaatcagatcaataatgtcctcaaaaggacaaaataaggattctaaaaggaatgaccattttacccctaacacaaaacaaagctcacatgctacctaggggtaatttggtaaattctaaaccccaaaaatttcacgacactactcgtgtctaacaatgatggctcgttaataataaaattccaaaccatgtaaaatgtgactctctaatggcccaacatcgctttccactgctaccggactaaaacacgaaaaacaagaaattcacatatataacataaatagcataatctaaattcatatatatctccacaaatgtgtaaatcataattaataatttaatgtcataactaaaccctagttatttaataatataacatattaaaattaggggaactttataattatccccctgttaaaaggatttcttcctcgaaatctaacctgactagccttggatattgattcctcatgtcagactccagctcccaagtgggctcttccacattactattcctccagagtattttaaccaatgctatgattttgtttcgaatgactttctcttttcaatccagaattggcactgactgctcatcataagacaggtccggttgtaattccaatgcttattggatcagatacatactttctcaacatcgagacatgagattgtgcacagccgaaatgttggaggcaaggctaattaatatgcaacttgtccaaccttctcaaaattttgaaaggtccaataaaccttgcacttagcttgcctttctttccaaagcgcttgatacccttaattggtgatatgcgtaggaagacatgatctcctgtctgaaatgcgatgtcctggcacttggggtctgtaaccagcttaaatctgaatatcttttgggtttaaaatttcaaaattaagttgaggaattttaggcattggttattaagattc

SEQ ID NO: 314308 - DNA, 1215 bp, Cannabis indica
ggtaaaatatttccaacatggatgccacatgattactgatgtggacggatgaaaattccctttgtaactctgccacgtcactggccagaatgccgagaatgctatagcattctggcagcattttctccaaaattttaagtgtaaaactcccgccttgcatcatttcacttggctgatataaaggattttttctaacaacaaaatagataactaataaaataattataattaagactaaaaaattaatagatatccaaaattaacttgctaaattaaaaagaaagataaaaactaacaaaagtaacgaacaacacactctttcactattcttttcatcaaaattaaagtttaaagatgataaaaataactctataccatagagttattagtgcagatcactaaggtagacaaagtgaattctagctacaactctcaaagtatttatatagaatatatttcaacaaagtgctcttagatgcgtgaatatcatttcaggtcccttccccatctgatttcattcactatttatagggagaaggttgttgcaattaactctgtaaaaggagtgatcagaaattaaatatccctatattttagaggcaattacgatctacttaagctcttacttaggaatggcaaacggggtgggtctacctcgacccgccacaagcccgccccgccccaacaaggtattaccccaccccgacccgccctgattggctcgcaagcttaatcgggtctgacccaacccgacccaatcgggttggatttgacccgaatttatttatttattttttttcacaaacactcaacaatataatacatacgtgtgtatacaatattaacttcttctcttaaaaaaaatcaataaatgcattagaagtaaatgaacaaatgcagaaatgggaacaaatcatataaatgatttgacttaaacattaaaaaatacctttttccgatagagtattatgtctttcttgaaaaccagtcacggaatataaaagaaaagaaaaagtgacaacccacacaccatttttgtttctctctctctctttctcttcttcttcttctctgttcctctgagattgttgaagaggaaaagcaaaagctgagttaaagaagctggtcggaagggaagagggatgcagatgatctccaggacatcctcctatgcaatggcctcttaccttgttcttctagggtctctctctctct

SEQ ID NO: 314309 - DNA, 1330 bp, Cannabis indica
tttactctccctctctttcgtcttcatcaacctccttcaaaccctagttcttgtttcgctactccctcttccaccatcgaagacctctaacactcttccgacgaagggacctcacttcaacttcaatcgacggtgctgtttccgacaatcattctggtgagacacgaacgaacccagcaagttgacaatgggcgtgcgacgttaagcaaggtcaaagggaaaggcacatattggattcgcggaggtggggtgatcggggtgggtttacagaggtgaggagaaatttttatagatatgaagctgaaacagagatatttcaggttgataagattgggtaaacgaaattgtgattgagatgttctcaaaagcttgcgttacagaagttgtagggaaggaatgctgaatcaagcaaacaaaataataataaataaataaataatgcttaaaacagatgcacaagcatggttgtaaacaaaatggttatattgatattagtgtgtcctttatttttatcatgagaagagaaaaaaatatggcagttgtaaataatttttcatttctatactatattgcaacgcacggcgtccaaactagtattaaataaaatactggtaatacttgactcttttcttttccgttagaagtttgtgcagaatttgtgttttctgtttgcattgccttccacctgtacgacgtaatgtctggatgagaaaattttgtctattttttttgggttttcaggttgaatatttgaagaattgattttttttgtttttcttttttcctgcttaagtggatccctttttctgtgaagaacatgttgaagcaggctctaggaaatgcctggaacaaaggggtttatgggcatataggagagaaacttaggagctgcttttacgtgcctgcaattggtatccacaacggacaggtacacctccaatctttttctagattcttattattttctggagtttttgtaatcagactaacatcacagcttctattgtcagttttggcactacactaggaaattggtagtggaggatatttatgttcttcgttacttgatttgaacttccaataaatagttgcaagctagaaagaatgatgtggtgtggtcatgacgttttttttatagtgttatacactcgtgagttgtggtgcctgaatttgataattgagaaagaaaagcatttgtggaattctagttttagtttgagttttgtgatttgggagtgtcgatctgataagtaaattttttgcctatcttgtatctgatgctataaacattttcgcttattcctcctcttagagtagtgaaaaagcagtg

SEQ ID NO: 314310 - DNA, 967 bp, Cannabis indica
taagtatcgagtcccataaaatttaatataatagtttttaaggaatatcgctagccaatcgcaacacgacatgtcaagaagatattaggcaccactagtacctaataacaatgttcttctaaaaacttgcataatgcataattataataaatacagttgtataaaaaaattaattacgagagaaacaaaaagggatgaatgaaccaatacattagtcatacattatattataataataaccaaaattaatttaagtgaaaaattgtatatgttagaatcatgaagtattggaaaacatgccacgtgtactgacgaacgcaaaggcaagaagagagttgtgtagtagagaagaagacaactcaactatcttactaaaaattttcaaagtaattaatacattatgtcaaattctaattgattcgaaagatggcacaaacataaaagttttctttttgaaatttttttataaccaaaaagtgcatcatgtttgtggtacaggtctggttctcactccgtcatttggtgattttagagactacatgctagttagtcataagcaactcgtatttcatccttctgctttaaaagtttattgtgtgaaaagaaatataatgttaataactaagcatgtcttataacaaagacttgcaaaataaataaataaatttgagaaaagactccaatgttttttctttggctgtaaaagaaaaactccatgttgattgaacataaactcgtcctgattttaaggtccataaagactaattacgaacggccaagatgaatacatattgctccgtgacttaaaaatgtagaatgacaaatcaatcctggtcaaaaagggaattttgggagacaaaacaataaattaaaatataataaataataaaaatggccatgatatcgccatatcagctaagaataaattaactggtaaaaacatgccaaaaaattatgctgaagtatt

SEQ ID NO: 314311 - DNA, 2055 bp, Cannabis indica
aatattttgttatacatattttctaattttatacaatattaaaatgatctatttttttaatctttttatgtttagtttgagatttttttttatatgatattgttaagatttaaatattgttatatttctaaaaaaacattatatatttttgttaaagtgataagattaccattctcctaaaaatattacacaatataaatattaaaataaattaaatccctaaaaaaggaaaacaaaattaaatttagttagttcttagaacaaacaataaattacaaaatttcattaaaaaaaattacaaaaatagtattaattaacaaccaagataacgagtcatttggtatagaaagagggtaataactaattaattaattaattaattcaaatatcttcttcattcattaattttgttttttctaaatacataatattaattaaccactaagataaacatcatagctaatttgatagcacttattttagcttccagaagatttttcttgtaactttcacgttgttttatgatggtatattgtatttttttaatactatttataaattttttaaaaagtttaaataatttataatattaaaaataagactaaaatattttctagcactctttcttatacgtaagagcatctctaatagaaatataaataaatgatgaaaaattaaaatatagttcatttaataaaaaatgtgctctaatgatgtgctaaaaaatgatataaatttggcacatagtaaattttgtgtcaaatttagcacaacattagctaatagctatgatgtaaaatttacaccacaataaatgcattactttttcatttacatttatgtcatttttattattttattagtacatttaactatcacattaaataataaaacatttgtattatttttttgttgtcttacatattaaaataataataaaattgattataaagttattagattttatttttttaataaaaaattaattagatattaaattttacatcaaaatttttcaattgtgcattggagcacaaagctaaaatttagtgtaaatatactataaaactattttttgtgtcaaatataacacagtttttacatctttcattagagatggtctaaagtaaacaactacttaaacttatttttaaaattgtaagctatctaaaactttttcaaatattacaaataattttaaaaaaactacaacatacacaaaaatatgaaaaagaattagaaataactaaaaagtagataaaaaatacatcaaaactaacctattagggggtttactataaattttcccaacttaatattctcccaattatttttttcctcgttaaaaagaaaaatacaacgaaattctcttaatgtttataattgtcacaatatatgaccctaataaataaaaatggtggtaaaaatactttatattacgattttgttgcaatagtatgttgccacgcatttttaagttagcatttaacaactaaaagtgtacgactgtaacaaaatcataaaataaagtacctttcctgatactttttttattagagtcttaaagtatatgaggcctaagacaaaatgatatttctagtattttaatgtaatggtaaaacttttaaaacctcttaagagctcaatgttcaatctttcgtaactacacattaaatattttatttatatactaataatttttttccacaatattagagccctgagcccaaggcgcacacctagctcaccaaccatatgtgtaacaattagcgtcataagccccaaaaacttcaacttgatggagattagttcccaaattaactatttttgtaagggattatttcacaaatacacaaaaacaacaaaaaaaattacaaaaatacggtttcacgaaattttaaatatttttacgattttttaattttatttacagaaaatacggtctttttatgttgtacttttgttaattcattgttaattttttattatttgtattttattttttattgttgttttgatattattttcataatacttttatgtcattttcttgtt

SEQ ID NO: 314312 - DNA, 697 bp, Cannabis indica
ttaaacacaaatgaaattgatgtgtttatgtttgtgatttttgtgttttggggctgcccagtttgtgctacctattcttgtttgaataaaatatttttcctttgctcaaaaaaataaataaataaaattaaatatatattaggagagttattttatatatattattttcatgttttttttttaaatttacagtttgggttgctttggtagtttttatatgtgggttgctttacgaattttggttgcaatttagattgctctgttaattactataggcatttttgtgtgaaattcgtaaaaaaatatcaaaaaaaaaaaaattgttttaaagtataaaaataaaaaactccttatataataatcattaaatattgaaattttaatgcattaaacgtaccaaactagataaattttgtaaacaaaaactaccaattaaccaaaacaaaaaatacaaaatatatatttcaataaaacacatacagtaataccaaaaaggtatttattataagaaaattgactatgtataaaaggttaattatgatttttttcctctgaactttgatatataccaaattatgttctttgaatttttaaggtcgttaaaaataccttataaactattgagattgttgaatttaaagacttttttccaattttagtaaaaacgtctaaacatagatgaaagttcaggagacat

SEQ ID NO: 314313 - DNA, 837 bp, Cannabis indica
aacataaacaactgctaatttccaaattaactaagcgggctttacagaaactatgtctgagcctctttgtccatataatattcttctgaggggaaaagagaaaatttctgataaggatgctcctttttagtatcctcacccacctgccatgactttgttgaatgtccctcctgttaatcttaatatccctgctagtggctctttgggtttacctattaggtttccttcctttctcaactttaatgctacttctgcttttccatttactcagtcccagcagactactggcatcatgattccaactcctattaaccctaatctgcgtgagatgactccacctttcaacaggtctgatcttagtttgtctctgagtaactttgcttttagtccttattccactgattctgtgatagtaactgccactcttcctatggctagttctgagcctttgatggagggctttctgtctcaagcctctattccgtctgcccaggatgggagtgtgcctcttaattccaatcctacggagatggaacttggtgtcaatgtgagccaaccggattactctgctcgtggtaagggtttggcttctgcttcacgggtcaaaagaccttcctttcagcttcatcaagctgttattggtggctctttgagatctaccctgaagggtgctcgagctggtgatagtaatgataattcttctgctgcaactccaaaacatgaacaggcgggtgatgttgagcacacccgcctagaaaaatgagtcttttgagctggaatgcacgtggtttggggagtacacgtgcattcagaaggctctcccttttggtgaaaaat

SEQ ID NO: 314314 - DNA, 760 bp, Cannabis indica
tgaaacaccaactccattattgcattccccaactgacctttatactaatgtataataaagctgctatcttctttataagtttagtttgggtatgtacatctgatactgatattactgggcttgttaatttattttccaaaatcctcattcagaaaagttttagcatatttgctgatgtttgtgatttcacataacaggtctaacctatgtccctgagtactcattaaagataaacgcaacttcgagcatttcaactgggatttgctaagatgggattgctttaacatctgtaccttgaaacatttatctcaagtatggatcttttttcatttgcttctgatgaatgatatttacattgatattctataaagtatcagattttgtatggcaaatttgatgtataacttcaatactagaaactgtaatctttgtagatgtacctcaggtgtgtgaatatacttatttgatactactcatgagaaaatcagaaataaggcatgttaatcagaaataaggcatgttaatcagaaataaggcatgttaatctatggatgttaagagcatctctaatggtaatatttttggagaatgcttgatgatgtggaaaacttaagtggcaaaatatagagatgttatactattggagataaaagaatactatttttgaaatttgaatttatgcacgcaatgacattgatgctatgttttttaatacaataaaaaattaaaggtgcaatatatatatataatagtttaataa

SEQ ID NO: 314315 - DNA, 540 bp, Cannabis indica
atttattatatgttaactatatgatgcaagttaagttataaattattaagaaattgatgggaatttgagtaattttgtttgtagtcgaaaagagccatgttgttatttttctaaaatcgaaagaaagtgggtgtgttactagtagtattaatgtcattcagttcaggagctttctttcctctctaagagcgtgtcacaacataaatttaaaaatcataaagtaaatacaagatttaattttctttatacaattttcattaaacaattaaaactattctcaataaactttttattttgatattttctcatattaatgtgtaccttaattttatttgaaaaaattaaatttttacataacttgaataaacataagatttgttcgtttaattacatagccacataaaatcaagtttaaccatgggctaagataggctaggcccattcttagggcacactcaaactcgaggaaattagaccctatactctttttatattaaactcttttatttttaccttcttttttaaagtctattattttta

SEQ ID NO: 314316 - DNA, 1025 bp, Cannabis indica
ttctgtgcaaatctatcaccattaggctcaaatatatagttaacaaaaatctgcgttaacagtttggtgctttcattgagagcctttgttaaaaaagctcagaaaaaactgtccttagatacaaagaacaattttctccatggttgacaatggagaaaacattgacacacctcaagaagaggccactcacagtcctggaaaagagccaatgggctctcggatgccttccaactcacaatctaaatggaccactctctccaggaggacccaaccagaagatggcccaagcacacgaaccactcactccagaagtaaccaacctgagggtggccctaatacacggccacacgttcaaggagaactcaacatgaagatggccaaaatcttggagtagtggatgaagaacccaatcttggtggtgctcagcccatggatgatggtgcttatgatcctacaaggtacatacctattgtcgaattagaaaaccgccatctcaggcgtcgcctggatgaggccaaccggtagaatgctgagttggagcatgaggcagtcgcagccagggcggcacaggggaataatacacaaaatcaacctgaccttggagtgagaagacatgaggcaaacctcatctcacgaaccaggaggcaggagacagctcaatataaccctctaaacactcagcaagaataacccgtggaaattgaggttccctttgaaaacgagcaaccaaatgatcagccagaacaatctcatagaaatgaaataagaggcaaccaaaaactagggaacaggaaattcctcgtggaaacgaggaaaatcctgggacacaacttggaagacgtaggtcaccagcgaggaatctccagcgttcttcccaaacccatagggaaggggctcgcacaaatcccagtagggggaacacaacgaaccatgcccaagggagaagaacaggtcgtgaagaggcaagtgtcatcttgggacgcaaaagaacccacagtcgatcaacgcgaggaggagaaagtact

SEQ ID NO: 314317 - DNA, 2267 bp, Cannabis indica
aaggaatccatggtacttgtgtagatgcaaactgtaactggtttctgtatgcttcaaaactgaaatatacacaaactttcaaggtcagaaatatgtcaacaaccacacctgcttattggatgttataatggaagatcataggcaagcaagtttttatgcattcatctactcttatttattcttgttttaagttgttttctttgagtttttggttggattttatgtgttctcagtagtgtgcaatattaagcttaaaatgataaaattacgagtaaacggtacacatttgagcaaaggactgaaaccaggaagtgcatgagttgagaataagcaagtgatgaaaattggccttcgaagctatggttccttgatgtaggcgctatagcacatgcctggaaagaagaaaaaaatgataaaaaagatgattttcacatgttcgcaaatttgagaatcttgcttggcgtcatagcaccatccgtacacgttttgagttcttatctttttcatcctttgtggcctatgaaaagagcattataattttggctccaaaacaccgaaagataaagagaaaacacaactttaaagagagaatcaagtttaagagatcaaggaagcaaccataagttgtattcaagattttatattgattcttcttctaatttcttctttatttttttcagtattattcattataaataatattttgagatgatgtgccacattatgtatggctaattttcttagttgttaggtttagatggatctcaaattatgactttgattttatgatttaatgcaatatttagtttagttcaatattttttatgtgattttaccttgtttaattgctaccattattatgatttatatgtggttttactttatgtgattataattaaggcattcatctagattgtgagatttattactcgagagggaacttttaagcaatcgggcatcgggtagatcaacttaggtggtgtaagatcaagagataagcacttaggtaaccgaaatagttataaattgtgaaattgagagatagaatatttaggattgtttttagactgagacttaaggaaggtgaggtataatggtggtatagagatataggctattatacttacatattctttatgcgacactcgagagagggtataaagatacaatattgctccaggctcttcaaaatattagaataagctagtcacattaatgataaaaatcatagttatattaaggtgaaatcgaaaccttaacaattattctatctgattattctcaactctaatttattattctcgttctttctattctcttttaattttctaatatcactcaaaatcaattgtttagatagaattagattttaatatttgttataattaattattttaattattttttaatctttgtgggacgatatcggtctcttgactactattattatttgtcgatttgtgcacttacaagcatatatatatatatatataatttgcaaaaaaaatttggtggcgtttctagggattaaaaagtttaaatttttaattaatatagtgaagaaattgtaaaatttaatctatttatttttatttagtttttttaaaaaatttatttttaattgttgttgtgtgcatgcacaaagctcgtagttcacctctcttaccttttgatcctgaagttgaaagaactttcaagtcaatcagaagagaactatgagctagagcaagaaagatgagtgataacagacttaacaaaaatatcaataacaatgttgctaatggtgccaaatctaaccggaccttgagagactattttaagccggttgtcaatgatgattttttgagtgtaaaaaaaacagcaagtgaatgtgaacaactccgaattgaaacttacattagttagtatgttacaacaaaatcaatactctagtttgcctaatgaagacccaaacattcacttgtctactttcttaaaaatttgtgacacaataaagataaatgaagttccactagagataatcagacttagactcttctctttctctttgagagaccgagctcgttcatggtatcaatcttcgcctcctaatgcactcacttaggaagagaccgctcaaaagttcctcaccaattctttcctccttccaagacttctaaattcagggcataaattactcaatttagataatttgagatggagaaactttatgaggctgggatagattcaaggagatgcttaaaaagtagggctatttacaaaaatat

SEQ ID NO: 314318 - DNA, 664 bp, Cannabis indica
atctctacacatatcgtacatacgttctatatatcctcatatttataatattttaagatgatgaaataaccaatgttatcacttttcaaaccctcgagattgtaaattatgttaatcccaaatttgttaaagcttagttatatcagccgatgcatgtttgttgatattattgaaatatatatatatatatctacatcaaaaaaaataaataaataacacataaaatattttaaaagttccaccatataatatattcatatatattttctttatatacttagctagatataggtgatccgtaataattatattagcacacaatgggtggcaagtatagtgttagtgttacaattataagctttttgattatcgtaattagtgttgttgatgcatcatcgtcgaaacacacattattccgaaacttgattaattctggtgatcacccaccagacagtgggagtacccgatgggcagttctcgttgctggctcatccggatggcagaactataggcatcaggtacttactatatacaaaaaaactaacctttttctttgttatagtactgagtatggggtaccaccatgatattttagaatattaggacacgtagataataatcaaatttatgtcttaatatattcattgttcattgaagtttttat

SEQ ID NO: 314319 - DNA, 1113 bp, Cannabis indica
atatatttatgaattaatatattcatgacctaaaatctcacttagcgggcaggaactgattatctcccaactataacacaattacaaaccaaaagggtggaggttagtgcacttcgtcctgtttgtaagaatgaaaatgaaattatcctccatagcttagtaacctgtcaatttattaaattttgttggaatagagtaggaatcggtacaaacatagttttgggggctggttttctagactggtgcaagttggtttttaaacagtcgaacaatgagaggatatgtttgacaacttcactttgttgggctatttggagagctcaaaatgatgtggtttggaaagggaaaactgtgggaatctcacacatttttgcttctataatagcttatcttaaccaatggagaagtgctcaaagttctactttagagtcatctgagacctgttatcagcctggagatggtgctgagcgctgggtttcacctagacaaaatagagttaaggtcaacgtagatacaacccgatttgagatgagtcacaacttcggatttggcctagttgctagggacagcaatggtgttcttcttcaaggtcgtactgttttagctcttggccaagtgaaaccggctttagccgaagcaatggaggttcctgaggctttgagccgaatcaagtcatctccatggcatcatgtagttctcgaaatagacagtctagtagtggttcaagcattgcaaagttcagtagaaatgatttctttatttggtttggttattaaagaatgtaaagaataggttattactatgagaaatgtttctaattattttgttaagtgattggccaacttagtagctcactcctttgctcgaacttttaatttaggctaattatgactgaattttgacatgtactaaatcatgctccctgaacttttaaagttgttaaaaatgccccataaactattgagattgttggatttaaggacttttgtccaattttagtaaaaaaatctaatatggatgaaagttcaggggacatgatttagtacatatcaaagttcgagcaggatgatttggtatatatcaaagtctggagagtatggtttagtacataaa

SEQ ID NO: 314320 - DNA, 503 bp, Cannabis indica
aaaagtgcggattggatcggatgaacacccctactcaatattattaaataataatataacttaagtgtcattctattcttttttattattattattattgctattctctaaactagtctttaatgtcattatcattgcttttttaaacctatgttaactagttaatattattatttattttttattatagaaaaaagttaaaaatattataatattatagtttttaatgattgacattattgactgttatctaaataaattattaaagaagtaatgggagtgattccctaaatttgtaatgatcgaacaaagaaagtaaatacaaaactttttcatttttttgtcttaaaaagtaaaaagaaaagttatatacgttgcaactctacatagttcaatcacgtgacaacatatttgactcacgaaacatatgtgtttggcttttgtcattttatgtctaatatttttttttattatattattattggtataattaaatattagat

SEQ ID NO: 314321 - DNA, 826 bp, Cannabis indica
attgaaatcgaagccctagtttttattaacttttaattttctttaatcattgcttcttactagttttcttatttttcattattttctattcttttatttaaccaaatagaagtaaaagtttaattttaacgtacttaactacactccttgtgggatcgacctcactcctggtgagtttactacttataacgatacgtacacttgcgtgtgctaaatatcgcaacaattacttcagccaaggttaaggtattaacttatatttcacttagggaaatgaaaagaaaaatcaaagaaaagccaaaaaaaaaaatagaattgctctctttcctttctcttcccttttcgaaccagcttggaaccagagaatttttgctggtttttgtgtgttttcagcagggattagaggatctcttaactgaggtaaaccctagaagcttttgttattgaattctttaagtttttacttggtttgagtagtgattttcgttattaggggctattaggggttaggttatgttacaatttgaaattcaagtttgatttgagttatatttagcccctagcagcttattttgatgtttgggattaaatttatgcaagcttgaacctaggtactcaagcttttgtctttaatggcaagttgagtttcattgggtttttctgtgattttctggtgggaatatgttgtgtatgcattgtatacgtactctagaaagtttggtggcaattggataagttttgagcaaattggtgaatttttggggaaattggtataaaaccggtttaccggttttaccagtacatgtcaaaccggtaaaccggtttt

SEQ ID NO: 314322 - DNA, 635 bp, Cannabis indica
ttgaaagagaacctcagttcaatcatttaaggaaagaaaataggattgacagggggcaatccatcccctacagtgaacgagttcacaactctcagcactctagcttggacagctagatcattcacaccagtaatacaatcatgtgtaacatgtaaaaaggaacaaacattaaaagactttgcaagatcaattgctttaaagaaaacatccgccagcttccaatccggtaaggttttcgccttcaaagcgttaactgccaccaaacagtccgcgagaagagttatagaagaccagttcatgtcgatcgcccattgcatagctaaggccattgcctttatctcagcatccaaggttgaagtcccttcaccactgctacagatctcatgccactcttgggtagtcatgtccaatgcgattgcagccataccacaacacccgtctttgaaggaaccatcagtaactataagcttaaaattgaagggggccccgagagagacctgttgcaccatccaagaaggaggcgacaggccacacaaaccagcaacaatctctgcaaaccgactgtggatatccttcagaagaccaggggtgtaaagcccgcttagttaatttggaaattagcagttatttatgtt

SEQ ID NO: 314323 - DNA, 1011 bp, Cannabis indica
tttttctttttctttttcattttgtctatgattttactatggactgtatgagaaatatgatagagatttaagagagaatttgacgtttatggtgggtggtaattcaatgcaggaattgacttcttggaatttaagccttcagaggttgcagcagcagtggtaatatctgtgttggcagaaacccaaacagtggacactgaggtagccgtctctgtgcttattcaacatgtcgaaaaggtataaaatccccttacttatttttagtagtggtccatgaaatcataaagtgaaacatacatgatgccctttccatttacttttttttcttatgattttggctttgattacaattactaaccaagaaatgggattctctttgttttttcttcttgtaggagagagtgctgaggtgtattgaaatgattcaaagctcgtcactggataatgggtctactactggtttgggccagtccgtaccacagagtccaattggggtcttggacgctgcatgcttgagctataatgccgctggcacaacagttgggtcacgtcctaattcttcccacggtaactcggacagcaacaaaagaagaaaactaagccaactttatgaggtggtggagctctaatttagtaggactatggggaccaaaaatacgagcaaggatatcacttcttaccaagaaaataccaacgtgttcttctgttacacacgaacttttggtgtgttttggccgaaaagaaaaaaaaaattaaaaaaaaataataaaaagaagggtacggttggaagaaaaaaaaaagagaagttaaaataacttaagaaggtattggagaaaagatggccaatgggggaatacatacatacatcccatcttatttccagccatgaggaagaaatgtcacagctgttaaatatttgacctcttaacagcctagaccggtttaggtttaactttaaagaagaaaaaaaatgaaaaaaaaaaagaaggaaagaaagaaagagagaagaag

SEQ ID NO: 314324 - DNA, 858 bp, Cannabis indica
ttagttgttttataaatcgcattacagcaagatatgagtctaaaatcacttactaaactggatatttgattttggggataagagtaagaatagttgagtttacctctttaaataatttgcctaattgcaacaatgacagtacatcatattagtgaagtcttctcccatttgggctttagcttctattatggagaataatacagttttaatttctgtagcagtataaagaatcaaaatttcttgcacaatctgctttataactttccttctatttctcattttcgagccgagaagattcctatataatttttttaaaaaaaagttgctttaacatcaatatcattatctaaccaatgcccttggtcatctgaaatagcttgtatgtgacagcaattaaagctgatgtgtactccatttgggcagctaagaatgaatcttcatgaaaccaaaatgtgtatatcatttttaaagttttaaatactattaaaagagttgtgattgatagattttctcatataaagaaagagaaaataagtaatgttgatagagcttggatatgccaaatagttgcagatagaatttgaattataattaggtgtatagaagctaggaagtggcttttgtaatagaatttttgagtgagcaataaaaaataaaaaaagtttaaatttaaaaatttagttaaacgttcaatatttataatttagactatataatacaaaaaaaaaaactgttgaattataacttatccaaaaatattaacttaatttctttatttattgaaaatttggtatatatatttctgtaaaaatataagttaattctgttaggttatttttagtattaattttagattaa

SEQ ID NO: 314325 - DNA, 1755 bp, Cannabis indica
agctaaaagtacaataatgttgaaagcatggtgagaagagaaaaaaaaattataaaaactaaccaagtcaaaggatatgttactgtgtatcaaagaaggacaaaaatgactctgcaatggtaaagaaaggcataaccataagcaaggctggaacatttccacgctagaaatcctgtaaagaaagaccaactaattactttgaagtttgaataaatagaaaaaaggcgaatgctgtagttaaaaacatcaagaaaaaagtttaagagagcaagcataagataaataaaaaatacaaacacgatcaaagtgagaaaggaaagcaagaaaaaaacagcagtcaatgtcatactgttagttatgtatgtaccggtaatccttcttctctgaaaatgtcctttgttgcttgtaacattcctgtatattttgatggtccagacaagtttctgcggactaaaccccaggaggttgtgggttccagttgaacctataagcgtaaaggaacaaaggtccatttcagtaaactacaaaattacatgtatatgggaacacatcaataaaaacttccactccctagtctttcaaattatctatcttcgaaacaaacttgcctaaagcccatgtaagattttactttaacctaaattggcaaaatcccatttgtgcatttgaattaacgaacctaatgaaacaaaatgcacaacatttcacacgcaaaataacagaagcactaaaccaatacgaaactccataacaagaaagtctaacactttgcctaaataagagttccgatcataatcaaaataaacttggaatctgattttaataacatcaagcggagaggtaacagtccttgatattaatgggattgctttttgtaatcaaatattaatgggatttgctttatttttattttattatatgcatttcgtaatcaaatattaatgggatttgttttatttttattttattattttattatatataaataaaaagtcacttatgaatttctcataaattattgttttatttttattttattattttattatatataaataaaaagtcacccatgaatttatcataaaccaagaattcatttatatagacacactttatatagaaaagatatatatataaataatagtgagtgcaatacactctgatttcggagtacatgtatattctgctgagatcgtcttttgaaaaatacttgggtctccttgaacaatcaagtctttcactacctcaatgataaagtgtggggccaccttaataattggaagtacaaagttttttctaaagggggtaaaaaaacgctcattaaatccgttattcaggcgattcccacttacaccatggcttgtttccgtcttccaatgccacttgtcattctcttaagtctattatggctaactttttgtggagtttcaatgagaataatcgtccaaagactcactggcaaagttggcaaaagctttgtaaatccaaaaaagatggaggccttggctttcgttccctcgttcacttcaatcaagctctgcttgctaaacaagcttggcgcatcctcaaacatccaaactcaactctggcaaaaattttaacagccagatactacccaaactcttttttccttaattgctccctgggtcactctccttcttttgtttggcgtagcattttttggggaaaagagttgttgcacaagggtctcatttcgaaaattggcaatgggcagaactgttggaaattatttta

SEQ ID NO: 314326 - DNA, 1439 bp, Cannabis indica
tcttcgatcaccatagtcatctgggacgaaaatcgattgaagaaattgccgatgcgtgagaataggaggtcatggaattgatggggtaggaaatcattcataaatgatcgtaccaccattgccgtggcggccattgaagccgccgttgaaaaaagcatcttggctttggccatattattggtttcagccattgatgagaaaactgagagagagtaatggatgaattggagtacgtgctttccattataaatataggatgatgatgatgatgagatgagtaaactagtgtgaagattgcgaaagaagaatggtgttttcgacttgtttagtggtcaggtcagcaagaccgtgttgttgttcttcgtttaactttgaactttgacataatgaaattctaaattgatgagcaagttaacgtgtgcccaaagctatgaattcgaacattctatttgcaaaaatgttaggccggccatagcattttgtagccttgaaacaaagtttaaaattgggcatttatatatgagcattgctattaggtagtgactagcaccttctctacatgttgcgttgcgattgattagcgatattccctaaaaattatgaacgcgatacttagttagaccaatagctatattgacacataagagattgctagggaccattggtgccttttagcatttctctttatatatataaaaaaaaatgtgtattataccacaattttattacatttttttaagatacattctaaattttcaatttattgtatatataatagaaaataaaagttgagccttataaaatatgggcattgagtaatggtttaagctgtccaacttttaaactactcttattgatatattttaatattgaattttatacatttttttgaaagctcaaattttatattttaatttaataaataatatagaaaattattaatcaattaaagggcaccaccgtgtggtattgaacatcttaaaatgtaccagataacaatactctaagggggtgtttggaataggttaatgttagcaagggaatggtaatgttaaacattaccttgtttgtttggaaggtttaatcttaaaatgtcattcccttggtaatgtaaatacccttgaggagggtaatgttgatacattaaaaaagagtgggattagttattcccttccattatattaatttgaataacatttttaaattaataaataaatttaaataccattaatattatgatttattataaataaaatattatgatatatatatttagtctgtaaaatcgattttcttataactgagttatttttatgttattagcaataacatatatatgcattatacatacattttatgagaatggtgtacataaatgacatagcgaacaaaaataaataacatagtgatatatagaaatatttattttaattaataaa

SEQ ID NO: 314327 - DNA, 857 bp, Cannabis indica
ggtagcttatatcctatgtgattcgccttagtgatcagtgatagtactcaataataataattaaagttccaaattccaatatgtgatatgttaaactaattatctttgaacaaaaaagttaataaaataagcaataatattctttaattgggtagttgtcacatactaaagtctatttactatatatatatacatttcttttttgagaaaagggcagtttctttatgttaatttcagtaattcctctaagtttgtctccaactaccaaaaagaataattgggttatcgttttataagtagccacaaacaaaaaagtaaaattatttacactttatttcctttgataatggccagcaaactctatatatataataccaagtcactttacagaatatttgacctataacagtaaactatatatatatatataggtagcgtattagtataatttagctggagtactttcatgcttaagatacgtatatacttttggtaaaaagaaaaattggtgatcataaattcataatttatatgatttacaaaaaaaaaaaaaatcataatttatatattaattaattttttgcatataacttaaagtttaatacatctgctaataattttaatagttttgtatgctttggccataagttacaactggttttctttgattaggcttctacttttatttatagctaaaagtgaaataaacataaattttaatttatttttactgtttagataactattatatgaaaaaaaaaaaagtgattttcaaagtgtttggatgtcattaaaaaaagattttttgtaagtaaattatgaattatataaattattttaattttaaaaataaattc

SEQ ID NO: 314328 - DNA, 504 bp, Cannabis indica
ttttaattttaaaaataaattctcaaaagtctttttgggatagaagctacaaattctaatttcttctaaaagaacttttatattaaaaaataattgttcaatttttgtacaaacacccctaaaagatttattttatttttttttaattctaaaagctaaaaaaaaaacttgctaagtcatacagaaaattatgactaagttatataagagcatctccaatcatactctttatttttctagctaaatcctacatatattaaaagagccaataagtactactattcaggtcaaccaaaacgattagtttaatggaattgaaccttttatgccttgcacctatatatatatcaataaaatattaataaaattattaaacaataaaaaattgaaatttttacaccaaaaatacaaattacacactttattacatataaacctacacacggtcaaatcaacttttttaccttttctcaatattttattacacatataccacatacacat

SEQ ID NO: 314329 - DNA, 4224 bp, Cannabis indica
gaaggccctcgagtcttcgttggtgtgtatgtgaattacaggtgtcctgccaagaacaaatttctgtaaggagttgcaagctcgaagaccagaatcgtttgtagaattcttcatcatggctaatctgcataagagaattgagaattctttggctaaactagaaagggtgaaggagaaatgggagtcacctgtaccatggtcatgctctcaaagtcctagaggaaagaatcccagaggtagaagcccaagagacgtagcccccagaggcagcgaagtccaaagcttgccaagtccccttccaagaaggaaatatctttgaagagaaaaggaggtccatgctttgtcaattacaatgaattggtggttcctcgcgatcatatttatgcgattgaagaaaaaactggagtcttcagaaagcctcccccaatcagagggaatcgtgacaaaagggatccgaaaaagttttgtaagtaccataaggacatcgaccataccactctagagtgctggttcctgtaagatgaaatcgaagaattgattagacaaggaaaatttggtaagtacaagaagaatggggaaactcatccccagacggatgagaatgacgacataaacaatgcaaccggttcataaactcctcgcaatatgacaaagaagcaaaagaagaactagtcaccaatataaacaatctaagtgagcgagttgagaaatttttcaagaaggaatgtgatgacataaccttcatgaagagtgacaccaggtggattcatcatccacacgctgacacgctcgtgatagtcgcaaatattggaggagataatgtccaccgaattttagtggacaatgtgagttcagttaatcttctccatttccaagcttttaagcaaatggggctgcaggagaaagccttgtgacctgtaaccttgaccatctatgggttcactggagatacaataacattgaaaggaatgatgaaggtgcaaattactcttggaaccgcccctgtcagtgtcaagtcaatggctgattttgcaataatcgaccagtattctgcatacaacactatggtaggttgccccatctggaaagatattacgatagtaacctcaatctatcatcttacaataaatttccctaccccgcgggtgtagaattcgtgcgaggagtccaatcgaattcaagagagtgctataatacgacattgaatctcgcagaaaagaagaagtttgtaaatgtgatatatttacttgaagcaccacctccttgagaagaaattttaagaattgaggagatactgcatgttgaagaacccgatttggatctgaggatcctcgattacacgaatactgcacaagctgcacaataaacaattaaggtaccaatcgttccttttgatcataataaagttttaaaaaattggttctaaattaacctttcaatggtgagaaaagcttgtcacttttctcaaaccaaatctagatgttttcgcgtggaaaaaatcagacatgttcggaatatcaccgcaggtcatttgtcatcgattgaacattggcctagaggtgtgaggtgtctgacagaagcaccgcaatatggaccccgctaggtaccaagcgcttaaggaagaagttgatcgccttttggcatgtggcttcataatggagtcattctacccaaactatttagcaaatctcgtccttgtgccaatgcctaatggctcatggtgcacatgcgttgttttcaagtttttaaataaagcatgtcctaaggacaatttccctttactaagcattgacaatcatgttgatgctactgcaggtcatgagcttgttagtttcatggatgtatactcaggatacaaccagatactgatgtatgagccagactaggagcaaacttctttcattacagatcgaggtttgtattgttataaggtaatgccttttggtttgataaacaaaggagcaacgtatcagaagctggttaacatgatgttcgcagatctaataggcgagacaatggaagtgtatgttgacgatatgctcataaaatctcaacatgcaagagaccatgtcacccacctggaggccatgttcagaatcctgcgacaatataaaatgcaactcaaccccctcaaatgcgtcttcgaagtgggttcaagaaaattcctcggctttatgatgaatcaacagggaagtgaggccaatcctgcaaaaataaaaatcctgcaaaaataaaagctttgctggagatgcgatctcccaccaaaccaaaagaagtccagagccttacaagtaaagtcactacactaaatcgctttatatcacgtttcactgataagtgtaaagaatttttcttgattctaaaagggaataaaaagtttcagtggactaataaatgtgaagaggcttttcaggcccttaaaatgcacatggggcaacccccaatactatccaagccaattcctacagaagttttgtcaatctacctagcagtgtccaaatatgcaattaattcagtactaatctgcgaaaaccaaggtagacgtgatctaatatactatgagagtaagcgccttttaaacgctgaaacctgatatctgcaaatggaatgactggcatttgcacttgtgattgcttcaaggaagttgcgaccttatttttaggcacacaacattgaggttttaatgaactatcgcttgcgacaagttttagccaaaccagaagcatcagattgactactcaaatttttcagtagaattgagccagttcgacatcaggtacaagccaagattggcagtcaagagacaggcccttgctgaattcatacttgagtttccaaacgatgaggtggcaataattacagaagagcattttgaccctgatgtaccaacgggcgaggggtggactttgtatgttgacggggcatccaacagtgaaggatcaagtggttgaataatcctcataagcctcaacaagttcaaggtacatgctgccctaaggttcaaatttcccacatcaaataacgaagctgaatatgaggctttaaacgcaggaataaagctcgctctcgaaatgaaattcgaataccttaaagcattcaataactcgcaaattgtagtttgccaagtcaacggagaatatcttgctagaggaggacgttttgctaaatctcattcttacacttttgagctattacaaaaactcaaaaagataatttttagtagaatacctcgtgcttacaattctcatgcagatgctttcgcccgactgacctcaacgagagaagcagaattagtcgacgtaattcctgttgatgtcttaatacatcaaactattcatcgagatgagatgatggaggtcgatacaatcaaaagggtaacctggatgaccccaatcattgactacttaaaaacaggagcgctacctagcgatagaactgaagccaaaaaactgcgatatcgagccgcacgatatgtcatttttgacaacaatctctattgcaaaagttttagtcagccgttgcttaaatgcatcgatgggaatgaatgcgactacatactctgagaagtacatggtgaaatctacggtaaccataccggtggtaattcccttactccaaaaattatgagggaaggatattattggcaaacattgcgggcagatgcaactagctttgccaaaaggtgcaacaagtgtcaccgactagcaacatatgtaaataggccaccaagccaattgagttctatcactagtccttagccatttgcggtctggggcgtagacttaattggtgaactactaaaaggaaaaggatgagtaaagtatgttgtagctgtcatcgactacttcacgaaatggcgtgaagccaagcctcttgcaatcataacgacttccaaactacgcgagtttgtctatagcgctatcatttgcagatttggcattccttacaaaataatttctgacaatggtaagcaatttgattgtaaggagatgtgtcaacgatgtgatgatttggggattcagaaacctttgtcagtagtggaatatcctcaaagtaatggacaaatagaggcagtcaacaaatcatcaagcatacaatataaggtaagctcaaggaaaagaagggtacatggacagaagaacttcaacaagttctatggtcatataatacaactcatcgctcaacgactggtgaaacccccttctcgctttcttatgggtgcga

SEQ ID NO: 314330 - DNA, 1398 bp, Cannabis indica
atataacataccgacaactggacctttccttcttctcgcactaaggtcgcacttatggcatcaccatacactacaaaataaaggtataatgcttctccttctaccgacttctacatgataggagctttagtcaagtgctccttgaacttctagatggaatcctcacattcctcagtccattcaaacttttgtttccacgcaacacatcagaaaatggaatgcagttattcgtggacttagagatgaaaaatttgagggctgcagtccttcctattatgctctacacatccttatgcttcttgggagatggaatattaatgaaagcttttatcttctctatattagcttcaattccatgggaactgaatataaagcccaaaacttcccagatgaagccctaaatgtgcattttttagattaagcttcattcatatttctagatgactgggaaggccttctaaaggtcctcagtatgctctgctaaggttttggagtttacgagcatatcatccacatacacatccatatttctcccaagtttctccttaagcatcttcttaaatagttgctgataagtgactctagaattcttcattctaaacgacatcaccttgtaacaatactcccctttatctgtctggaagtttgtgttttatttgtccatgatatgcatcttaatttgattatagtctgaacatgtagataagaagcttaacaactcgtatcttaaagtagcatccaccatttggtctattcgcagaagggggaaacaatcctttgggaaatccttgttatggtttgtgaaatcaacacatattctccatgtgccatttggcttatggactaaaaaagggtttacaaaccacaccgagtataatgactcttggtggaagtcattggccgttagcttatcaacttctgcctatacttcttctgttctaactggatccaaagtccttgtttctggtggacaagtgtttcatcttgcttgatgtttagagcatagaaaatagtgcttttcatattagaatggctccatgctaggacatcctcatttttcttgattgtaatagtcaacctcaaaaagtgatcaaccaatagtggggtcgtatagatctgatgattgccacatgctgtacacaaatttgttatacaggttcggcccccttgtgatagaaggtaatgacctactcatcttttagttgtactaataccgagggttaatactattcagatcactatagacgggatctagcacccataggaatacaatgtatgaatcaagaatggcacaactgaagtggtagttcttgtatgggcgtgtgagagagagaggaagtgaagaagggagaagttgtcagacgtaggcttagagcttggagacaggtttcaggctta

SEQ ID NO: 314331 - DNA, 2251 bp, Cannabis indica
ttcacttaacagttaggttggctgtcgtttgcaagtctgcttgatgcagctcctctagagacttcaacttggcggtcaattcctgcactgcctccttagaatcccagagttcccgcctcactgtggccacagccgcatccttggccttaagtgcctcgtccttagccttcagcgcctcttgatggctccgctccataagggcctccttctgctgggcttcttctcggatcgctctcttctgtgcctccgactctcggagactcttcatggcctcctacatgcccccaaattcggatatggtgtacccatggtcaatcaaagtcttcgagagatgatcggtctctgcaacaatttgacaacaaaaaaaaagatatatatgagtgtgtgatatcaggcatcgaaagaagcttgacagatgggaacttaccgcagtcatggtcgcgctcacgtcctagatttggtagactagattggtagaagcacaggcgctgtatctcttcatgaggagctaaactaggccagcagcaaagtggctcatcaattctgaggcaaagggagccagggtaggtctgaagcaattaaatcagtcagttaagggatccagatttaaatcgcagacattccttgcgtactcgctgcgagtaaaattatcctgggcctccctcaaaatcattttcagggcctccacctcagcattcccctttgtgtactccgtcgtggcataattgtgcttggcgatccggagttgggttctttcctcgtcagtgggaatgggggtcaggacgatgcccagaggaacagtatactcgtccacctccgacgggatccccgagttagagctgggagtcggagtgtctactctcctgggcttcttagcaaccttagtctccaccatttttcctttgcgctttcggtccaagagaggaagaatctcgccttcttcttcctctactccctctgccccgtcaattaaaatgacttggaccaggggaatgctggaagaagacctcccgggagtcaccaccgggttttgtgcctgaggcgggactggttcgggactataggtctgggcaagagcgtctaggagctcatccattggcttcgctacttgaagacatggaaaataaaggcgttagaacattattgagaagttatgcatcaagaacaaaacaataaaactaatcctacctagacgatctaattctgccctagcaaaagcatgtattaaaaggctggtgtcgtcgtcctctaaaaagctgtcagaggggaggaacgaactggaagataaataggcaaaatgatccaggaaaataggtgtgggagggtcggatcccatcaaggaccggcctaaaaagtgaccaaggttggaaaaatagaaacccttggcatggtcaccccatcggaaagggggcatcctaaaactatgaagtcgttcatcaaactctactggcccacagccagagtaatcctgaatggaagggacacgatgaacaattagcggggacttaccagctccggaggtaccggcattaggagccccagtgttggggactaggaacggaagcttgggccgggaagtcacctgctcttttctagcctcattccgaaggaccctccttgaggcggcttgggccttgatgtaggccaattcttgttccctcctgaagaggtacttcttataccggtcctccgcagaagcaataatgtctgcccaaagcaccttctcggagtcaggattgcaaacgctggggaaaagaaccttggataaattgaaatcatccactgactggctctctataatcaacttggccctcctgcagtgtgcagtcgtgaccaagtccacaacattcaacccatctttgtcgtatgtggagaagaccttagcgtgttgaagaaaaagttgagtgggggcggtgcggtgcatcggcggaaccctgacccactcagtaagcagctccggacgctcaatagcttggaagccagaggaggagaaaaactggtgacggtattccttaacatttttctggaagttgaaagggactggaccctcattagcaggatgggcccggagtgtgaaaaaaccatcttttagtttgtctcccttcttggggacagatacaagttcataaaataaagaacttcagctgggccgggcggagcccagcctctggcaacataaaaataacacaagcctgagagcaggtgatatgcttgggggataagtggtaaggcgcaaggccaacaaaactaa

SEQ ID NO: 314332 - DNA, 685 bp, Cannabis indica
attactattattaattttttttgaaagaaataataagtaaatattaatttttttttattatattaaatatagagtataaaaaaattatgacataaaaatttaaaattaatactatatatatatctccacttttaacatattcagccgctttctcactcctggtttttcaagatgcgtccaaaggccaaattttggcaatttctcttgtgcaaagacgcaggcgacctcaacacgtctgctcctcaggcgaacccgtgaagcaggcgacctcaacacgtctgctactcaggcgaacccgtcactcctcaaacgaacccgtctctcctcaggcaaacccgtgcgatcatagggccaaatggcctttgacaatctatcttttcaatgggtatttttttgtttctctctctataaatgtgaaaactatttgaatctatcctagatctaggtgtttgaatctcgtcgatggatcattggagttacgttcggagtttcgtggtccaggacaatttgttgtttgtggtgcactacggtttttggttcatggttgacggagaatgtaacgccctgtccaacagggacgccacgtgtgtgcaattcaataaaatacttatatagatactatattatacaaaaagtgtgggtaattaaattttttttgtaaataaaatcaagcatgtataaactt

SEQ ID NO: 314333 - DNA, 654 bp, Cannabis indica
gatagtaacataatactttatttttttacaaagatttattaagataaattttattattagattttctcccccttctgcgtttctctcttaatagtggctgaagctatggcgtcgaaaggagcaaaggaagaagggaaggccacgcaaggttgcgattcagacggtgaagaagaagggaccagtgtcgtgagacccagtgaagaagacgaagtcgatgtcggagctgatcggagttgacccaatcgacttctttaagttcgaagtaaaggtggacaaggacgatgaggcagatgctttggcaccagtctcctccttacagcaacttcagagggaagaagaaattcgtagggatttctcttacttcatggaagcctcagataaatgtaacgaggctttaaaattaggtaatttcactcctcccccaatccttagatttgaaaatatcattaaaaatttgaggaaccaaacaagaatactaataaggtaggtaccaaaattataaaattagactttctctctcttctttgcttttctctcaacagtggctgaagttatggcatcaaaaggagctcggaagaagggaaggccacgccaaggttgcggttcagatggtgaggtagaaggaccaacattgttggtgttggaaattatttt

SEQ ID NO: 314334 - DNA, 553 bp, Cannabis indica
acactattttttttttttttgctgaaagagtctttcacactattttcagtactataaaaatttgtccctttcatgtgagtataatcaagtaacgagaggtgtgaatgcttcaacgcattatatacgatggtttagaaagtagtgtcgaattgatttttttaaacttttttttttttttctgaaatgaattgtttattaaaacttgaatttgaaaattatatgataatagtattttaattcagtcaagggggaagataaatgcagcagctcttccttatcatattaattaaattttattaataaaaagttttacatttatttttggaaaaaaaggtattttatagcatattgaacgtacacacttgacttgagagtattatagtttatatcacaagtttgattcgaagatattatttgttcattcggttgtattaaagtcttattgtgggcacatatgaagtgtgatataaaattaagtgaccaattatgttataggtatcaaaagggtattaaattgtcatgaaaataatgtgtagataccataagttaattt

SEQ ID NO: 314335 - DNA, 1136 bp, Cannabis indica
aaggtctagctgcccaaggtgtgctggatgtggcaggtcaaggcctgcaggacatggcaggacaaaggctgcaggatctagtaagacatgggctgcaggactgggtaggttaagggttgcaggacctgacatgtcaagggctgcaggacctgtcagatcttacacaccttaggaggtttggcaacccaaggtgtgcaggatctggaaggttaaggcctgcaagacctggcaggacaagggctgcaggacctggcaggacaaggggtgcaagatctgacagtacaatggcaggccaagggctgcaggacctagcaggccaagggctgcaggacctgataggtcaagggttgcacgacctagtaggtcaagggctgtaggacctggcatgtcactataactctgtctagaggaggccagactcatggcgccggttatggtgacaggattcaccacatctatagagtttattgagattgcagttatgactggaacctaagtatctagacctacagtctgtgggtcttgagggagacctaaagaagcagatggtgcaacagtaattcttctcgtgttaaccatggcgtttgatcagatacaatatccacgctctcaatgaaagcaccaaactgttgacctcaaaaaatgatcaattgacatatgtgtcgtatcgatctgatgcttgccacgtgttacacaaatagaatgaattaaacatagagatttgttatagtggtttgggccctttgtgatagcgggtaatggtccccttgtacatttcccaattaagtttttattttttttatccttaatggattagtgtgtttatcggcgataacttcagaatattattagaattaacaagaaaataagttagatattaacctttgtttttcgtatatctggaaagggacacgtagactccaggttagtatctaaagcctagtagtgggtccaaagaagataatttgggccaagcaaacttattttcttcatcttgctcattaattcttcatcttgctcattaatactagcttgcatttctgtaaacctatttttcttgggcagcttgggcagcctacggcgggttaacatcaccacgaccgcgtaccctacctttagggcctctacctcggcaa

SEQ ID NO: 314336 - DNA, 1484 bp, Cannabis indica
aatcacgtaatacgcctatgctagttagggtgttacacttgaggtctacctcgtgaccttcttactccaggatcaggttgattctatgcattattttcttgagtttccttggtcgttgcaacctctctttctaacttagtgttttgatggttagatttggctaagcattgccaaagttgtttattttccaattctactaatagtacatacctagtggaatcataagcatcctcactcctgggtacatatccagtagtagtattggtttcttcattccttccttctgggttttgattattaccaccatggttccttcttgaacgtgttgttccataagtgggtgacctttgagaacccattggttctttcccaggacgatgtgtggtttcttcaagacgattaccatcgttttgattatgatcagccatggatggattttgtttgttaggagagatttttttttgagttttatcacgtaggctctaaatgaaagcaccaaactattaatgcagatttttgttaaccaataataagcctttttcataataaatttaacatagaaattataagaaattaataaagtataataagtataataataacacctgatatttttatgtggttttgcagttaaatttgcatactccacaagtctatcttattccagttattttttgagtgttcaatatacaatataataattcctctctcaaagattctctaaaaaatcatatgtccccttatctgtgggattctgcccctatttaaaagataatatgttggtaattattttacaattaaattcaaatcgtaaccgctttatggaacgtggttagttcccacgtttcattttgatcacgtggggataacaataagtaacagcataaccgtgtggtatccttatccttaaagatagtcactgttgatatggacaattgcatcttgcttaacctgtagacggttaatgctgatttgaataatagcatgtcttccagcaatgcatgagcaccggtgtactgagtaaacttaagaactgctctttgactataacgccttgcagactagacgatcatgtctcacatatttctcaattgttatccttagctattgtaatgtgaaaaatacgctaaatgttgataaatgacctgtctcgttaagtttcttatgagtagcgaggtggatgcctcgctatatatcgtttgaggttgtattgagtaacttcacttatttctttcgaataaacgaatcttgtcctcggatctgtgtattctgaggtaggttgatgtctcgtcaatagaggtattaatggcccgtttggtacgcaagactggattggattagacagactaatatgtccaatccagtgtttgggcatgacaaaaatctggataactaatccatctaatctcatttgtctaggatgggataaataatcccatgcagatgagaattttttttttatcttttttttagttttgattgta

SEQ ID NO: 314337 - DNA, 1532 bp, Cannabis indica
gaaagaaagaaagaaaaaaaagtagacaactagacttaaaaaattagaaaaagaaaaaaagaaaagtacaaaaattgaactaaaaaaaatataataaaaaaagaacaaaaaaaaaaactttatgaagcttcaaataagtaaaaaacagtaaaaaagaaaaaaaaattaagaaaagtataaaagtaaaatgttcttgtcaaattaaaaatgtaatgtttagaaaaaaaaatgtagtatttggtgtaaattttccaaatagaaaaaaaccttaaatgtaaatgtaaaataaattaaaaaaaataaaataaaactaattaagctaaaaacaaaaacataaaatatgggattggataataagtttataaaaatatggcatatcaaataccataaaaaatcttaaatgtaaaaaaataccatagaagagtggcaaacctataaatgccatatttttctaactttgttatgaaatcccatatttgatgtaatttttacaaaaataaatcacattttaccacaaaagtaattaattacaaatataaaatatctaatttttcgtaaaagatgttttacaaacttataatccgtattttgcaagtaaattttgtgtttttgtaatataccgtattttttatattctttgtttaagtttttaggtaattttgaaaattatccttaaaaagattgtattttgaccatgaaagaagccattcaagtgggcttcttgtcaaggtgcctttaaaagctcaatgctcatataaccaatacatccaagtaaaaattagactcacaaaattacaaaagtttacatttttatggtataaataaataaagctaagagattatagggtttttattttttttacatctatatagttcttttatgccatatttttgtaaaaaaaaaatggaaattttatatttgtaaacaataataagttttactggaaaagtcgccggtcactgacgccggaaaagtcgttggcaccaaaaactttagtgtcgctggaaaacgccgtcactgaaaaagtcatcggaaaagtcacagttgcgagaaaaagtcactggaaaagtcaccaaaagtagatgtctcaaatataaacaaaaatagaaccgattctataatataataaataaaaataaataacacaaaataactcaaatcgattataattaaaaatataaccggttctgtaacataatgaataaaaacaaataaaacaaataactgaagctaattattattaaattagaatcggttctgtaacaatgttatataatgaataaaaataaataatacgaaataactcaaaccggttataactaaaatagaactggttatataacataatgaataagtatttttgaggtaaatatggtatgggtataattatttggtggcttggagcatgttgaatggatatttttgtttgagctattttatataaccggtttttgtgtgtgggtttttatcttagtagctttacagtaaccaagtttttttgtcttatatttttaactagttgataaatata

SEQ ID NO: 314338 - DNA, 878 bp, Cannabis indica
gctgacacgtataggcacagtttctgcatgctaaaggcatggcttggattaatgtgtctcaaaatgccatggcccttctgggaaaatccttactcttcttgggagtcgatggctttggttccacgaacggtgggaaacttttgttcacggatactctccgtgttgctagtacttagggaattccttatcacgataactcttcctatgaagttatggcatttatcttcctagagcatcaaatgaggaggttggtcagctaatgacttcttagcctttttttattaaaacccatgtgtcgtgttcacgaaaacgcggataacaattaataattagaattgtccttacagactttttaggacataaaatcctaaattaaacaccatatccattgtaatcgaaggatgtgcatttacacattgaagagcaataaaagtccaagcaattattggttgatttccgctgaagagtagactatgaactaaacatattcatggatcaaaccttgtaaaaagctatgtgtatttacttgttcttttttgcattttatttcttgctgcattattgtttctactatttggtgatttgtgtgtttttggttctatttattggttttagataaattatattagattagttcttgtttttatagttgcacctatattttaatattagttgccacacaaaaaatgagtaaaaaaagaatgctgtaaagtgtagaaaggactgcttattgttgttgaaaaaatatatatttattgtttataaatggtttaaaaattattattatgttaaaaaaattatatttaaaaaaaaatcgatcatcaaaaaaatataaaaaaaaaaagttgagagcaccaattttatttttcgaaacatga

SEQ ID NO: 314339 - DNA, 612 bp, Cannabis indica
ttttttttttttttggtttaatacaattctagttcttcttcaatttcttatgtgaatctattttatttgtgtttaattataattacttgatcactaattatttaatttcaataaaaaatctaaaaagtattgattttgctttagtgaaatagacataaattttaatattggacgagagtatctttatagtcagtgtagtaattaggatttttttctttaatacaaattgtatgtgtaattttccatataagtgtatgactttgccatataatttagatgatctgtatgtcctaataataatatagattgaatttataatttgctatcacatgaaattgaaatagtaattaaattaattgtattttgctataggaagttgatgcaattgaaattaatactctatatttctaatcattattgattgcctacttgtttatttattttgtttttattattcaattacaatatataatcaactaattttgtttgccaaatagaaccatagattcaataattgattagtaattagttacagtctttgtgggtttgacctcacttatataattttaggttaattaagatttttaccctcaaactttaacatgtaccaaa

SEQ ID NO: 314340 - DNA, 902 bp, Cannabis indica
aatcttatgctcttttcttttttcaatggactttctcaaacaaagctttggttgcgtgtgtcattatcaacctatgtcctaaaaaagggaaatttacatagtatactaagttttgctatttttttacaaaaatactgccacgcggtattttttacttttttactgtgtttttttataagtttcatactgcagtatactgtgttaagttttcactggtgttctaatggtgttttactagtgttctactgttgttttgagttgttctgctttgtgttttattggtgttttataaaaacacagtatttttgaaaaaaatttgtgtgatagtatttttgtaagaattaacccaaattccagtatttttgtaagtttccccctaaaaaacccctctttcttacctcaccatttcttgagtccaattagtgacacatttaattatttatttattttctataattaaaaaaaatcagatggtacatcctatacccagctccttcgacttaatagcaatttcgaagcctactgatgagtaactaggggtttatatagtgtaaaggccgcttattttaatttagaaattagcagttaattatgtttgattatagaaaattatttatagatatttaaataattatttatgctgttattattgaattctgaaatgcattttatgtcatatagtgaatttcataattttacatttccggtgcccggtaacatggaactcggtgtttggctcattaaaatcacaacttagtatgttagtttattgagacggtttattagacattaggaatatcgggattggtcgggaattttaaatttcccaaaataccctttagtaccccttttatgttatttttgggtggaggggcaaaatgaccatttgtatttttgtcctt

SEQ ID NO: 314341 - DNA, 1063 bp, Cannabis indica
ttttttttaattttgaaatacttttatttacaaaactaattaatgggttgctagttatacctataatgatattgggttgaatgggttgaggtgagaggaacagtagaaaaaattgtatttcaaccaattgattgactgtatttcaagttcaataaaggtcttttattaaaaaaaatgaaataagagaaaataatcagcatgtcatggttaactcgaatatgctatttgtttttaaaattgtttgttattattaatgatggatcttgaaagttaatttaaaaattatttaataaagatgaactgcagagaatttgtgcataggtaagtttaattgtgaaacgattttatagtcaatatccaaatttattttgttcactgcatatcaggatatgatcattctaaagatgatcttaacaaacagatatatacaacttatagctaaaaatccagaaaattttgcaaatactgactagttgattcaacccacattataaactttatataaaacataaaaactatttacaaagtaagttgtatacactcatcaaatttttaccgaaaaaattaatagtcaaatctataaagtaaaatcaaaatactgatactataaaactaaaaaattagtatcaaactaaaaacatgatttacttatagaaaaatccaactcttaatttggagaacaaatcattttatagatccaataatcttaataaaaagaaatctctcgtactggattgagaatgtggtaagatcaaaagagtagaagagtgagaaaaaaagtagttcatattggtggaattggagatgaaaaactaaacaaataaattattatttttttaaaaaaaagtccagcctttttgtcagaaaaaactttttatatatcgaagaataacatatggcctttaatttaatgtttgcaatcacataatagtttaaataaaccttcaaaagtcatccctttctacggttcaaaaaatgtctataagctataggtacaaaatatgactactcaccacagttactttagattgtttaatagttgtccatgttcaatgaatctaaa

SEQ ID NO: 314342 - DNA, 1208 bp, Cannabis indica
ttcaggggtttgatcaatgctcgagtttctttcctcaacattctcacaatgaagaaacaaaacaaattatattattattatttttaaggaaaaattaaaatattttttagagatattaaatttgtgctgtttatttattatttatttttttattacgaaaaaaaagagttaaatagagattgagtttttgtacagtgataattttttaatttgtaaaatttatatatattttttttaaatattttaatatttatcatacttcaagatttaagttcacaatattaattattaaatacttcattttttttatagtttttttttttttgcaaagaaactagaaaaacatttcattcaatgaagaaaatttttggtgagcatatgaagacttacctcctagaaattaagaaaacctatacatttgttatcaagatctagcaagaacatgagccgattgatttaacaatttaggaacccaatgtacactaacagctaaagaatctacatgttccatcaacttagaaaaaaacaaagctcaagtttcactgaagtggagacgcagaattgatagtaattgaaaaaaataatatatgattcattaataaataaatctcagaccgaaccactttagaaaggagattttcgcaaaaatactgaattttaaataaaaatttacaattttattgtcatacggaatttttttacattttttttttataaaacaaacgtaaaacaaaaaaaaaacaattaaaaacaatagtacaaaacttctcttttctttttcaaatgcatgcaagttatgtctattgacataatttgagagtattctctggtttttctgaattctgttattttgtgaggtttgtgatcgtgtacaatggcgtcatctagtggtactgtgaaacaaattgaagagttgtgtgcccaagttaatattgatgatgaggaggaagtagaattagcttatgatgaagtggaacaaaacgtggaggatgtcgattaccggtgggcgattgtgggaacttttttaactaaaagaggtattgatttcgatgttgaaaaactgtgtttttgcaaatgtcagttgtatataagaaaatataaaaactgtaagcgtttgcagcagctgaaagtaattctgctacagcaaaacagaacaggcagaatataaaaaatttgtagaaaaaataaataacttgacacaagagatt

SEQ ID NO: 314343 - DNA, 911 bp, Cannabis indica
ccaagaccttggacattccaaaataaggctaacatggctctcggcgacccagttctactgagttcgccgctttcaaagattcatcaaaggtcaaatcggtggctgtcaaaatttcctttggatctgtcttgtatcgtgactgttgtgtctcctttgaagttatcagttttgagccattattcccattgttcttggttctttttgggatcactttccttctcttagccggcccttccatttttatcaaggcttctatgttgctgtcataatttatgggaatgtccataagattagagctatcaattattggggatttgatgggattttcttgaggacatgaatgggagaacttggtagaagtcaaagaattaacaagatcagccatactctcttctctccaggccccattacgcttagaacttccctgatttgcacctttcaaatgttcactattatcggctatgtttccaactgtcataggtaatgggactttcatcaacaaaccgtgggactcatcaataaccttttcctttcctttctccgataatctcgacccaaccatattcaaagagatccctgaaattggaaaagcttctgagtgaactccagttctggcttcagttttataattgacacctttgtttccgcctgaatgtagcattcctgaagatgatgaaggtatttccttgaaaccaggaggaggagacattggggaaaaattaccagtagaaatcttgatatgagaaaggggaggctccttctgttcaacaatcttcaaccatgaaccgtagcccggaatttggtttccaagtccgtcttcaaagaatttcattggttctgcacaaacccgagtatcatgccccacaaaaccacaattaaaacacatataaggtaaacgatcgtacctgtat

SEQ ID NO: 314344 - DNA, 932 bp, Cannabis indica
gagctaaaaagtccttatctgtatagatgtctgcatatagacttgggggaaagtgttatcccaattttttcccacctagtgtggcatatccacatagatagaactaaaaccacgtgggattcggtctctcaataagtggagagagttaccatgcatggctcattaattgtcaagactttgagattgtcaagtaggaataaatgaggggaaaatggtgagccacagagacctaggccggaccatacctagtcggcaaatagagcttcatgtgccagccaggccctaaaaatagggcaggccagccaacacgttcaaacatcatcaaaggaaggttaaacaaattgtggggtgcacgaccatcttttgaaagattctcaagctaaatttcagttaccggatagatccaacaacccacaaagatagggatattacctcaagatattagtctaatattttaggggtttaattatccttttttgcattttaaatataagataaaaaagaagttatgtttcctatattagaggagatatttatctatttaaattatgatcttttgtaagccttacattatataaagggcattaaaccacatgaaaagggacctgaattctaagtcacacacacccatagcctctctctaagccctacatgcccctctatgcttccaagacactttgttcattttcattgcaaagtctaacaagttacgaatctatataacactcaattctcactactgtaccattgaagagagccatagctataaattttaaggtccaagcctataatccgcgtaagaataaatacaactaaaagagaagtaggtcattactcattcataaaggaggtcgaatctctataaattcctgggttactttcatcatttattattattattattattattattctttacacgtgaaaatcag

SEQ ID NO: 314345 - DNA, 1660 bp, Cannabis indica
ccactaacctagctttgaaccacactggttctttctcattgattccctccttcaccttgagaatccatttgcactccacaatctttttgctcttaggcttcggtacaactgtccaagtcttattatttcgaagcgaattcatctcctcatccatctcttggagccattttgacttgttttcacctgaaattgcctcttcgtagcttctaggctcttcaattttagtttgttgtactgttgctagttcaaatgctattaaaataggctgtttctacacaccttgtagggtctcttctagttctattgcatgccaattgataaccttctagacatgtctgtctgagtacatttggaaccttctatttggtctttgttatctttcaactcaacatcagcctctgtctacgcactatcttctggttctagattagcttctagctgtgaaccttcttctgaatgtttcgttccgtattattccatttctatgtgtgtagtgttcttatttctagtttttcctacatcatacagagacactctacctttcccgaatgtcaagtgaggatattccatctcattaaaaacaacatttttagcaatcaaaacctttggtctacccttcttagaaatataaattctataccccttagtacgtaaggcataacctaggaaagttcccttaactggtctaggttctaggttgtcaatagattggtgtacatatgttgtacacccaaaagttcttaaatgtgttaggtttggggttctgttgtaccacatttcataaggtgttttcaagcctataactcggtttgggattctattaataaggtagattgtcgttgctaaagcttcccccaaaatggtttctctaatctaaaactaaatagtaggcatctaactttgttcaacagggttcggttcatcctttcagcaataccattttgctttggggtcttcactatggttctatgcctagtgatcccatactcttaacacaacatttcaaattaagagttaataaaatctaacccattgtccatcctcaggttcataacttttagatcggtttggttttccacctgagttttctgaaatctatactattcgaggaactcattacccactataatcatccaactatggaaagaaaatattgcttagcggagtgagtgggcactttgtatgccccccaaagatcatcatacacatattcaagtatcttctttgttgtgtgcctagcaggagtgaacttcagtttatgttattttcctgaaacacaagcttcacaaaattgtaaggcacatgaattaaattttcaattataccttgtttgtgcagttctctgaggccttgttcattgattttcccaagcttgtgatgccacaattgcacatctgattccagccctttcaccatactttcttctccggatggaaaagtttctccttggaaaaatgtaaaccattgatcctttcacctttaatcactatcaactaccaaacctctagtcatcttcatgcttctgtgcatggacttgtattcgtaaccttcaatttcaagcgtacctagggaataagttgttttgtcttaagtttaaaatgtggcttaaatttttcatcaccttgatgtggggttttgtgccctaaataaaacccattac

SEQ ID NO: 314346 - DNA, 648 bp, Cannabis indica
atttatgatgattttaatattatcaacttcatggtcctcaagcccacgatgatatattaagtattatttttcttatgtttttgctactaaaaagtaactaaatataaaaaagtaactaaaataataatttacaatacaataacaaacacaatatctaagtaattatgttttaataaataaacaacacaaaattatacattaaagaaaaagcaataagtaaagttttaatttataattaagaaataactaacatggtacaagaggtgactgaaaagtaaccaaaatgatataatatactaagaaaactttacacattatttagcataaaaataggtataatttaatttgattaaagtattttaaataaggatattaagggcataaatacataaatttatacatttgttttacttaaatacttagcttttaattttgacagcataaatacttaatttttaattagagatatatattggtagcataaaattaaatacttaagtttaaaaaatacatgacttttaagttttggagtataaaattaagtcagaaactaaaggttgcaacaaaaaattaaaaatagtgtatttatattgtaaaaattaaggtgtcatttggtaatacttttttaatcagttttttgttttttaa

SEQ ID NO: 314347 - DNA, 1110 bp, Cannabis indica
ttgatgatggaatccattgactcatataaggaaggtctccccactgctgttttagcttcagaagcactgattgttcctgcttctgaagtgactgggagagtactctgccatggctaaggaaaagaaggaagataatgctgcataatgggattgacttcactttattcattttgaagagattcatcagattgagagtttgtcaatctgaatatttgataagtacaagtttaagtaatttgaaggagggtttttgcagttttttctaagactgtatagtcatcactatggtgactatcaatgttagaaaacagagtaagtcagttgaaaccaaagaccaagtttgacgctatgttttaaatttggggtttgtgtgatgaatgatgatcattatatgtagcaattggattagtcaagtcttgactcttgagtcagcaaagtaactgccacagtaattcaacttgaatgtttagcgataaagtttaataaaacccaaattgtttaacattaaccttgactgagaagatgctatataaatataaatgtaaatagtgacataattaagttttaagtttgtaatcggcataaactttatgatttttttagtagcataagtacctaatgttcataaaaccagaaacatataagacccaaattttagattatttggtctgaacgaaaaatatgtagtatcagttatttttaaatctttttttaataaatttaaaatggagtctgtactgacgaaaatagagaaaaattacagtcttacaaatattgggtacttatgctactaaaaaaattattaggtttatgtaacttacaaactcaaaactttgagccactatttatcctaaatataattactggtgtgctgtcactcaattctttttatcaacatatgtattaatgcatcatacaatttatttcaaaaaaaaaaatattaggaatttgaactcttgccattaattatctaacttttaaatctttgttttttttgttctgaacttcgtttaatcttacatgccaaatactgttgtttcttttttattgataactctaaatactttattgttttttttttgtaaatgaaatagcaacttcattgaatta

SEQ ID NO: 314348 - DNA, 882 bp, Cannabis indica
catactgtaagtttgaccgtcaagaaaggaatcaaagacggtaaaacacatggccctcaaactcatttttttaagagtatcccatttttaaattctcattaaaagcctgctccccactgtaaaaataaataattatacaagtaaaataaatgctctcggtaacctaatcataatcatgctctctctccctcccagccctcttcttagacagagatagaaacaaactttttagagtgacaaattatttacagcttatattgtatataatatatgtatctacatatgacactactatatagctagctatatgacttttgacctcaggcgaagataaggaaggaaccatctttagggtcggcaaaatgacaaaccctagctctctctctcttattagttttagtttattaattaatttgtaccattttcttttaaaaaataatattagtaatactgtaatattttttttattgcttttgtaagattttttttttcatggaatatgtatatataggttttatttgtaccataaatccttaaataatatatgttttggcaaggtagttcttaattaaactttaaactttatctttttttgataaattaatccccaaattatataaattctaacaaattgatcttcaaactttatttttttagcaaaatagtccccaaactttaattttcttgaaaacataaagtccttactcttaaataatggtattttattcattatttacttttgtatttattttaaatagttttatattaatatgttatcaaattaaataaagaaacattatttatttatatgtattttttttaaatatgccaaataaaaaaagaaaagaacaattaaaaaagcttaaataataatattattat

SEQ ID NO: 314349 - DNA, 986 bp, Cannabis indica
ctaatcagattgtaatgggttttatttatggcacagaacccaacatccaagaccttaatggaagacttaatctctgtcatgaattgtagcaacgtgtctaattgaggattagaccctccactagagtcttgttgttgttgatagtgttggctttgctgagattgattttgcgaaggatagaacccttgttgttcctgattaggaatcttcttttggaagttttgctgacgaccataattattcagatagtttccaatggcgtaggcttgctccattggcaaactttctatcgatagggcaggtgtcagttgtataagctcctccacacagcttgcagacaacttgagcttgcttggcttgtgcaatcaccagcttcgttaatgcctcctcatgggctgtcaactttgttatggcatcgacttcatgcattctcccaacctttttagttgggcctctctctgtttaccattgttgattagttatggccatctcttcaagtaattcaaaggcctcattagaactttttctcatataagccccaccagctgaggcatctatcaatgtttgaatgttgctccttaatccagtataacagttatgcacttgtaaccacttttcaatcccatggttcggacacttcctcaataaatcttttaatctctcccaggcttcataaagagattcgttgtcatgctgggtaaagttattgatttcagctctaagcttggcaatcttcgtaggaggaaagtatttggaaaggagttttagggccaattcctcccaagtgttgatagagtaggttggcaaagataccaaccaacttttggctcgctctcttagtgagaatgggaacagccttaacccgatggcgtcatcgctaactccattcaccttgaatgtctggcaaagctcttcgaagatggagaggtgcatgtttgggtcttctgatggcagtcccccaaactagactgaagattggaccatct

SEQ ID NO: 314350 - DNA, 1244 bp, Cannabis indica
atcataagatgtttgtagatgcaatattgtgtcccacatgtggtgagtctagatggaaaaagaaaaagaatttcgacaagataaaagttggtgtccccgcaaaggtattatggtacttacatccaatacctttttcagttcggttctttcaaaatgtcaatcaagctaaaaatttgatctggcatgctagcgatagaaaattacatggtaagatgtgacatccaactcactcacccgcttggaaatcaattgatgctatatatgttgcttcaatttggcaatgaacctagaaatatccgtcttggtctttctacagatggaatcaatccacataccaccattaacagtaagtatagctactggctagttttgcttatgatgtataacttgctgccttggttggtaatgaagaggaagatcactacacttacactgttgatatatcaggcccttcatagcctagtaatgacattgatgtgtacttagtccctctagttgatgatttgagtcaattgtagtatgaggatgttcctgcatacgatgcctttaggaaagaagaatttaatcttaaggccatattactgtggaccattaatgattttttatctttcggaaatctctctggatttagtgtgaaagggtacaaagcatgtcctatttgtgagaagaaaacatgttatatgtatttaaaacactcgaagaaaatgtgttatatggaacacaaaggtttttgccaaacgatcatgtgaattgacttggaaaaaagtatttgacaataagcaagaatttgaattgccaccgccacctttgcaaggggaacaagtgttagaaaagttgaataaagtttaattccaccttggaaagagaaaagcaactacaaagaaaagaaaacatcgtcgtgagaaaattgatgttgttacaaatgaatcttaggggccatgaaagacgaagtcaatattttttgaccttgagtattggaagcatttgttgttacatcataatctggatgtgatgcacattgagaaaaatatatcagacagtttgcttaatatatacaatgttcaatattcttgggcgaagcaaagaattattgcttgtttgatttggatttgcagaccttactatgttggatgcactgttggttggagcacagtaagatgatactgaaggttgcttcagagcacattgtgaaggagaaatatttgaaagatggaaagttctccattcacaatgatgaataccta

SEQ ID NO: 314351 - DNA, 2462 bp, Cannabis indica
atgttcttgtggattatgaagattttgttttgggtgatgatatctatgtggtgtgttcaagaaaatccatcacatagaccaaatatgagaagagttgttcaaatgcttgaaggtgtgttgaagtgagtgatccaccatgtccctcaccatcttattatctggtataagctttgtttattgtgataatattgcactcttatgagttttgtatttattcacatatattaaaattaaaaagagtgatgaaattaaaagacacactaattgtattgaatcctcaaaatgcataatcctctcaatctgcattcattcataatagtcccaatacagaaaatgcataagtaaataagtaacataatataatcatagcaaaaaaaggaatggaacaacacaagatagatagataattagatatgaacctcaatgacagtagtcaaaaacaagggatggcacgtgcttgactttatagaaatcttctcctccttcttccatcctttctttgaatttctctggcatatgatctatcaccatctcattgagtgtaacaatgtttcttactccatctggaatactcctcaatcttctgcagttaccaatacgcaaatagcgaagcctaggcaatgcacccttctccactttccactcttttaatctacctacaccaataagcataatagattcaagtagattgaaacctcctcttgagcacaccatctcttcccccatataggcttcataaccaatgataaggattcttaattttggtagcttttctaatgttggcattggatcatcctcgagtttgagcttttccaactttaacttgatgagatttggagagaattggttgacttgtggcaatcttactataggtgaccgcactctaagtttataaatctgaggacaacttaatatcaaaggaacaatatctatgcagatgccagtactatttaccacttggaaagtaagaagacaagtgaatgtgatgattgtttgtggactgtgtaagaatgtgtcaagatttccatctatagtaattttcaatttcttgatactgtctagctgtagaaaatcactcagaacaagatctttggtacaaatatttcccaatgtctgtatatttctagatttagttgatctcaagaatttaccaaactctacaccactaactggagtcaaaaaatgcagatgcctcaacttttgcaacttgcacaatgactttggtattttatcactcttagtccatactctcaaagtctgcaggcatcttaaattgccaaaagaagatggaatcttttcaatctgccaataaggaatacttaataaccttagatggattagatttcctatttctttaggcaacttcatggtaataaagtcattccaatgcggaccattaataatcaaaactctaagcatcaaaaagtgattgcatacatgtctcaatactccttgttccactgcgaaattcattccccaaccatctatagtaaggaacctgagagagccatctaaatttcgaaccatatgaataaaatcatgatttgtcttgtcattgttatagatggaaacccttcgtacatttgttgctattggttcttcccttttattcctccaatcaataaaatgcagaaagttttcgttttgagctttagatagacacaagtctcgcatgaggtcatgaatgccgaatgattttatccttcttcctgttgaactcatttcttttacctgaatcatactcctctccaccaactcactcaaccaatcatatgccacatcctctaaagtttccacacaacctcttcttaaccatacaaaaccttctgctatgagtatatgacataactcttttactcttattgtgacatcttcagcgtaacgagccaagtacaaaaaacaaggctttaagtgaggtggtaactcactgtaactcaaacctaacacccccgaaacactacggtattttgattcaacatcatgttgttgatcaccttgacctacgcatcgagttacatttctttttatcagctcccaatcatatatggtatgtttcttagatagaagtccagcgagcacaatgatggctaatggtagaccagagcacttcttaagcatctctacagctagttctttcttcctttcttcatcatcatttgagtctgaatttatatatccagtgaaatgcacaaaaagtattatgatttaagtaatggaacattaattgtagaggctcactaatgctacattcatatttttgtatagatgaaaagaactaatatgaaatagaatagttaaagatatctttgtttaacacaataggaacatctacaaatggtagcaaagataaaaagaaatattatgatcattgaattagaaagagtgatatgaatgttacctgatggatctgttccaatatgggagtacttgttctgaaacagctcccaactctccttgtcatt

SEQ ID NO: 314352 - DNA, 2510 bp, Cannabis indica
ggcataaaacccaacaaattgacctttgagttggaggacatgagcttttgtttgactggagaacctctactaaagtgcacgccaaacagagtatgaggtgggaaatttggccaccaaagcaagaacaggttcagacatggaagatcgcagccatgataatagtatttgatctttctttttccacaacatatactctggattaggggaaccaatgacaagattggctagaggagacacatttgagaataagatttgatcaagaccattactgtaggatgggattttcgcgataagaagttatgatgatcaagtttcagagtaagagaggaagacagagaatttgagaacgagttccatgttacgttgagattttcaggatgatgggaagcataattgaaggatctgatgaggaagtttccatggatgtgagtcaagggacgatgataccataaagaaggtagagaccttctgaaacaacatctagagagcgagatgaaagagagagagaaagaaaccgagtaacataaaattgaatgaaaagcatttcatcaatcgagtaacttagccctttatttatacatgaaggttgatacaaatgattccaaagcaaaatagtattgtaacagtattaacagaagtagttaagtaacctaacaaatttaaccactaactaatacaccatagttatgtaatagagtctaaaacataattaacggtacaccacctgttagaactttttacaaagttaacaaatttttgacaaaataagagaatgtcttagtgtatgtgaaataaaaatagttcaacatgagatttgagcccttatttacaagggtatatacagtataattttagcacttgggataggccccaaggggtacccaattttgtgtgaatggatgaggacacacacatacttgacccaccataaacgcacacatgacgtctgttcgagctggtctagtgtggaactttacttttattttatttatttgaaaatgtgtttaattaaaactaaatgctaaatcgtatcaattttatgggatacattcagcaacaactcttccacaattcagaacacattattgttatttgtgtttccaaagtagacacacgtggcaaaaaatagatgatgattatccaacttattattgcttaaatctctctaatcgggaaggttgtgagaagacttagctaacctagaagaggcctaggtccagcgcctcaccacaagacaaagctaaactcattaagtcttctagaagatacctagaggccaactaaagagtctaagatagattccgtgtgcccaaggaataccaaaagcctactacgaaatggaaatcgggcgtctcccttgacatgtttaccttttagcacaagatcagatcttgttccttgtgtcagagatggtagtgcgcgcacctcttctaaataccatgttttgtctgatggctcctctgagcactttatttgccaggcgtgacctttacccagcacgtgccgtgcaccaacagtggtcctagttgtacagaaccattgccccacgagaggacaccttttaaggggcccaatagtcatgtatataatgtattttatccaaatagtgggtagacattttttacaaaaccctaaagggcccaatatcatctcaattagtgcagggtccatagacctatggcccaatatcatctcagttagtgcagggaccattgacatatataaccaagctcctaataaatagaaatttacaagtaaattttctagcttattaattcctcctgactccactatagattcaaaattacacttaattaaatagaatgctatataattatccattgttacaatctcaaccatcaatgattatttatagacaatttacatttagtaaagacaaatttactgttttacccttaagtgtattttatcgtgaaaacccttagctacttataaatgatatttcagtaaactaatataattcatgaaatgagtgctctatcatttatcccgttaagccaagctctaagaaagccatcgtttcacttttaatataagctatagattcaacatctatgattaaagctcccactcaattgaactatcgagttttcaagatgtaagtattgggccaatcctattggtcagctgtaacgaacaagtcaaggaacccgtatggtacaattaggctagaacttaacaatcttaggattaagatcaattgacctaagatcaactaagtgacattgacttagaaaatacataattgtaagtttatgatatcctatccactgtcaatatcaatccagtccgatgtatagctgatacatccgatactagcttactttgccaacacaaaggacattccacttatataagtgtaagtaaaccacatcgttaattatcatgtcagtgtaaatacactacactgataaatcgtgagactaagtagtttgaagcatataatcatgattatttttcactgtgaagacaacactataatcatgaat

SEQ ID NO: 314353 - DNA, 2225 bp, Cannabis indica
gttactaggtttagaaattttattctaaccctagcaattcgtttctaaacaacaaacccttaagagcgcagtctcaagggttaggatcaagggtacgggtgcgcccatgataattgcgtcgttgtgcctggactgtgagggctctaagacacatagatagttctatgtgctcattattgcctgacccttagacgtggatcatccaaggcacattagcatggcatacttttccctttcgaacttgggtttgaaatcaaacttttcctcaagaggatagatgggacaattcaggtcaaacctgtcaactcacccgaactagtcaaataccagctctaatactttttttagaaaaaaaacaatacaggagttgtattaagattgatgaaataatgcaagaaaagtggatcagaacacttagaacgagctactgagaaatgttgatattacaaaaacaaaagtactaccattctttgattaaatcagtgaaaggagccccgtttacacttttttcgttaagaacctaaaagctactcgatgccgaatctgtccatctcaaagatttattctttcatccatagagcccaccaggtcactataactcctgtcttccaaagcaactgttgagatttaccataatatcatatgttaaactcctgtcctccaaagcatctgttgagatttaccataatatcatttgttaaaagcttaatacattgtcgaggagacatcattgtatggtaaagtccttcaaaatttttttgggggggggtcaatatatggaaaggtctatgtttgtgatagttcatggacaatgagacgtcccaagtacagaagccagatgaacacttttaactttgaaaggtagaggaccctccgcaccatttttgttggatcgacagtcacaagagaaattttctgagctattacataaccgagcctttctgtcttccatgtaatttagtaaatgaaaacagaggccttttatcattcaggtttatttcaaagtaaaagttttaatttgaacacaaaacacccttctgtctctgcaaaatctgagatgcaatcttttcttttttgaggataatcttggactaggtaatatgattaaagattagccaagtccatccaagcgtctttctaaaatgtaatattattttaagttcctacactcaacctcactagttgtaggacattgttataaagcgaagcaacactactgttccatgggcttctaataaattatgggattgttgctcagtttctatttattgattgcaatttacaaattggtttgaataattgtatgtactaggaaaggcatttaaattctgtgtttctttattctggggttttaattctgtctgaaatgcataagctttgatctatgcgtgattcaggaaaagcttgctgaagacatggaaggtttcttggatgaaagttaaagtcaatgggaacgatcaagaggtatcttacagtgctgtatcagttgtggaatcacctgcatagtacatcttgtccactcttaatggatgactcttttactagaaactattcactttgtttttgtatatattatacacagaaagggaaaagaaaagaaacacacaaagaaagcaatattcgttggtgaaccactagtattactcttgttgttgatctgtaacatattgttaaaaacatgtataacttgtagacaaactggtatgcaatctaagatttatttgaattagatggttaatgaaatgatttaaaattcaggtgaggatattttgtgggtctttgattgagagatgaacggtatgatttgggtcttttaatcatgtagggtagaattgttataatctttctatcctcacagtagcatatccataatatgtgcgaaatgtcaagcgaaaaagagtgatttattcgaaattacatgatttcccatatcatccctgagagtgtaaatggatcgggttcataggcggacctaggggtgaggtgtgttgagggtgggcatagctctccctgagatttaaaaatatatgttagtacagtctttgtgttaatatatcgctaaaagtaaatattggttttatattgcttacaaacttaaaattttaaatacttatgtcgctatttacccaatatattaatatataattattgctttcatatctttatatattaaaagtgcctatctaacagcatttcttggtttaacattcttggtttaacagaat

SEQ ID NO: 314354 - DNA, 1415 bp, Cannabis indica
gagtgtgcatcacatcttttagaatcacagttcttccataagtgaagttcaacaacactttttgaacttttagatcctcaataatagcaacgtatattttaaacattgtcctatcatagtttttgggacttttaccttaaaaataagtaattaatgaataacatattatagagtatatgaaatgtaattataagataaataatatattaattatagaagtataattaataaatatctgaaaattctttatttatatgaagaagatataatcttgtaaggtcgcgtaagagaattaagattatatactataaataaaacaagtcaatagtgtattaaaatttaaaaaaaaaaacatttaatatagaactattacgtatgatttactatacactatactctagtgtatgtgatttcaattcagatcacatatgtggatagacatgtagtaaatgtgttgtgtataatttgattatacatgagtgcaccgatatgtaataacatctttcatcaacatgtcgtttatcatgaaatggttattcatatcacaacaataattgtaacgccataatgcttacgcacgctacagtgactttctaataacagtgcacacttttgctaatcaaagggttttctcgaaaattgtaataaattaaaattttattttaactttaaacttttataaacatatacatatatttatatacaaaactaagatcctgtttttaattacattcgaaatagcttttatagacatgtcgcacagcgaccacaaaatgaagctcaagtcgtcctgagaccgaactccccaggtcgcaccgtctcgacatgtacaatcatccccaagctcagaactcactactgttcagttttagccttccctttatctactcatgaaagcaatatttgtgagtcaacaaactcactaagaatagcatataacatacaatatattactgacttgtatttaggggcccataaatctatccacaaggcttaacaaatgattaagaatattcttaacagaagtacgacctttgtaccacatgcattaagtactcgtcttgtactagtgttggtggcgctgaacggtacccctagtactactgagtgttgtaccgcatgcactacgtacttaaccgtactagtgttggtaacaccagatcgtaccctttgaacatcatatcctgtaccaatacactcagtatcaataccgtactagtgttggtagtatatgaatcataactagcatgcatatattacacatacacatattcatataaaaatatattctatgctaatcttacctcgattccaaatttattgttcttcaaatttctgatgatctgaataccaagaacataagcagcttcacccaaatctttcatttcgaattgagtgtcaagccattccttgat

SEQ ID NO: 314355 - DNA, 1321 bp, Cannabis indica
taactccatcatttacctgcaagtatataaattattttttaattggcaatcaatatttaacatcatcattacctaattaatttctaaaaaaattaaaattatctttattaaatatttaaatggcctatttgctaaattagtaaatttataatttatatacaacacagtacaacaatgtaaaattaataacaatataaatttttcaattgaaaacttgaatatatatatatataaattacatttctgaatggtattacacattgatagttactaaaaaaatttaaggatacatattaatttttaaaattaaattattataaaacaaaaatttgagtttatatatttaatttaaccatttaataaaaaaaaaaaaatcaaaaccatatctttttgcactatatcaaaaatatgtttatataaaaagtttacgccaaactcaacttttatttattttatttttttgccgaataatattctttttttttattatttctttcggctaatgagataatctcatctcaattagataagaaaaataaaacataaaatttcatttttttttctaataatactcattcatcatatttgaaaaccaaatgaaatttcgtaatttattcaaagaaaaaataaaaattacttggatggtcttgactgctggcttattcaattgcttaagttgctcatctatttccaagtgttcttcttttgatattgatgatgataatgttgtaaagttttctttagcattagcataatatgaaatataacataatatactaattaagataataaatgccctaatcgccattgaatgagattttgggtttctgcataaaccaaaacaatcacaatattaaaaagtaatcaaatatatataaattagaggaagaaggagatattgatttgtatatatctaccagaaaattatgtgatgaatagaatatttgcagtttagtggaatatttatagggacttattatgcctaatttatctatatttatctatagaaagatatatttagttaagtatattaacatttgacttggattatccaaaggttgtaaatatatgtatatatagggatattggttaattaaagtcttgtttttgaattcatttaagttgatgcaatgtattatgtattttattatgttgtatattaaagtgagttgttatttagttactaataatatataaaaatatcataactaaataaagtcttgtttaaattaatatatatatgtataacggtcggtttcaattttttcggttagtttattatccaaaaaaaaccgactgttcaatggcggttttaactgtt

SEQ ID NO: 314356 - DNA, 1355 bp, Cannabis indica
tgcctgttcggaatgtggtgtcgtggaacacaatgattacaggttatacacagaatatgaagttgaatgaggcctttgaattgtttgagatgatgcctgaaaggaacatgacttcatggaatacaatgattactggttttattcaaaatggtgaattaaagaaggcttggtacttgttcagcgaaatgccttataggaattcaatctcttggacagcaatgatcacaagccttatacaagatggacaaaatgaagaagcattgaagatgttttctaaaatggtggcagttgaaggtttgaaacctaatgaagcaacttttgtgagtgttttgagtgcttgtagtaacttatccggtctcggtgagggacaacaaatacatcagatgataagtaaaacgatcaatcataacgattctgaaacattggtatctgccctgataaacatgtactcaaaatgtggaaagttaagcacagcaagaaagattttcgatgatggtttgacaaaccgaagagatttagtctcttggaacggcatgattgctgcctatgctcatcatggtttcgggttagaagcaatcaaactgttcaacgaaatgcaaggcttcggttttaaacccaatgatgtcacctatgtggggttactctcagcatgtagtcatgctggtttggttgaggaaggcttactttactttgatgagcttgttagagatagaacaatacaaattagagaagatcattatacatgctatgttgatctgtgtggaagagcagggaagcttaaacaagcatatgatttcattgaacagctagagactaataaggcatcagcaacagtttggggagctcttcttggtggatgtaatgttcatggtgacatgaatattgggaaaatggctgcagagaaactcattgaagatgagctagagccacttagtgctggcacttactcattgttatctaacatctatgcttcatctggaaaatggaaagaagctgctaaaatgaggtcaaaaatgaaggaaaaaggattgaagaagcaacctggttgtagttggattgaagttggaaatagggtgcatgtatttgtagttggtgataagtctaataatcaatgtaataaagttgtttattctttgcttaatgatcttcatgaaaatatgaagaaggttgggtgtgtatcaaataatgatttgagaatggatgaagaaagagggtaggtaggtgattagtgtattgtattttcataaattttagctttggttcatattaatatgtgggatattttcataaatacttaaaaatgtcaaaaagtttacaaaatacaaatttatattttttttaatttacaaatttta

SEQ ID NO: 314357 - DNA, 2314 bp, Cannabis indica
cttgaagacctagttaaagtaaagcaaatgctaggggaacccctcagagcttatatcagcaggtttatgaccgaagctacgaaagtcaaggggttgactgtagaaggaaggatgaccgcaatactaggggcatcgagctacttggagagctatggaaggacattgaaaggctgaccatggggtcgatggctgaatttccagatcgagcagatgggttcattaagcttgaagaagttgttcggcatgtggatactgtcagacaaaagaaaagctagcaacgtgctacctcgacgggaacatccgttcagattccataatactataacagctcgaattcaaatgggaagaggtctaacaacgacaacaggcagggtaatggaaagaagggcaaattcactggcaataccgaatatcaccccaggaaaaatgcctcaaaatttactaccttctcagtcctaacagacgacctatagacaatctacgcgataactcagtgtatggtgccgtacaagaaaccatctcccatgaaaaaggatgtaagtaagagagatacacctaagttttgtcgttttcatgcagactacggccacgacacaaacaaatgtaataatttgaagcaggaaattgagtttttgattagaaagaataatctgcacttacagaaatatgtcaaggccgaccagaaccaaagggctgccaagcagacaataatcaaaaccagatgatgcctccaccagtggacgggcatttataggtcattattgggtctacatcttgttggagactcaggcaaagctcaagaaaagtatgcccgagccttacagtacgaacataatgaaatagtcttggccgtggaagagagaaaatcaaaaataccacgagtaggggagccaacaataacattcattgaagtagatgacagccacgtccatttcatgcacaacgatcccttggtcatagaagtgcaaattataaataagacagtggcacagactatgataaacaatggagcttcctcaaaaattttatttaagacaatttatgagaagatgggactctagtttaaagacttgatcccttgcacccagctcgtatatagtttctccagccagagtgttgcaactctaggagaaatctacctacccctcattattggacaagctccgaggagcattactatgatggcataattcctaataattgatgttccatcagattttaatttcatgttaggccgactgaccctatatgacttaaaagctgttacatcatttttcctcctgtgcgtcaagttctgaacaaagaatggggtgggatgtctcagaggaaaccagaaaattgcatgggaatgctacaacttgctctaactaaggtcaagaaggaaaatacttctggccagagttcagaaaaaaggaagagcattgcccaataagaagtcgcccaaggcggggacgaaaacatagatccccgacttggggaaacaaataaaaaagttgggccaattgaagagctggaagaagtggaaatcaacccaaatatcccgaccaggaaactcaaaatcattaagggtttgttgcttgaaataaaattagctctcataaaatctctgagagcaaacctagacgtttttgcctggtcacatgaggatatggtcggtattgatcccactgtgatgtctcacgccctgaacattgacccaaactttcatcccgtccagcaaaagagaagactactggacaaagaacgggcacaagcactgaaagaagaggtagagagacagtgcgaaaataagttcatgattgaagctttctacccagcttagtggttgtaactttgaagaccagatttgaggcataaaaacgttgaatctcaacgtttattaaggtaaaaaaattatatttaataattctattgaggtacattgcattattttttattttgtaattttttttaagatttttcttgttaagattgtgagttctttagttgcagcggtgaccaaattttttgtcagtatttgccatgggatttcgataatgtaaaactataatctttaatagttttgatataaatttttttagattgaaatgatttttcttattagtgtttgtgtttgtattacaataatagttttgttataaatttattatttttttttaatattaatatgttgaatattgtgattgaaaaatgaaaagagagattgagaattagataggagactttttaaataaaagtctagaaattagattctaaaaaatatattagtcagatataatttattatatatgtatagttcttttttttttttttt

SEQ ID NO: 314358 - DNA, 1113 bp, Cannabis indica
tagtatttaccttatatgtttgtgcttattttaaaaatattagaatatgaaaatattattggtgcttattagtaatttgcaaagaatgtgaaagtctataaatatatagttgtgtagctattattagatatgaaatgagataatagaacttttttcaattagaagattaatgtacattttactattaataacatacattattataacacaactatgttttacttactaaatatactgacacatattttatttttataaaacaaatcattcaaataattatactattttaattattaattaaaataaaaaactaaaatattaaataaaactaacactacgtggcttggcacgtaacaatcacctagtataatttaaaagagccgatggaagccttttttttatcatatttagttaaaaaaattagagaatctttattataaagtgctctgtattttaaatgatataataagttaggagtattcttaattaagtaaactaagtaagacctaattaagactcgatatacaattgcactaataatgatattatatcttacattggtgtcaagtactataaatgtcatttaataattctctatttaattaggaggaaattattataagaaaaaataaaaataaaactagcaagagttaaaagtagaatatgtatagatagcaatatagcttgtacaaaaatataatggagaaaataatgattgaggataaaaaggataggtaggccgataaggatgccttatgaaacatatttttaatttatttatttatattttactttacatctgagaaaaggttttattttattcaaatgggaccttttgtagtactaatttattttggctgaaggtggatatgaatttcatacaaattcattggattggaggacaaaaatagactttgatgtacattcgaatttagtcccaagccttctttatacataaatatatatatttaaaaaacttattgactttaattcaaatatttttgtgatgatatggtaggtgatggggtataattagtgtgaaaaagtatattgtataattaattatgatagtgtttggttaacatatatatttattaatattttaattaaaaa

SEQ ID NO: 314359 - DNA, 657 bp, Cannabis indica
ttaagtagaatatccctaataaaaactgactttaatttttctaattcttcccttaaaattttgattatgtgttaattattgtgctttcaatactcttttttatttatgtgaatatatcttttatctaaagtatcaacttttattgctgaaacaaatattaatttttttatcgatacttatcttttaataattggcccccccaagaacttaatcctggctccgcccgtggttacaagactacaagtatgtgttcattactcacatcatgattaagatcaagtttatacgaccatcatgtgatgaatgatgaacttctatatttaacggaggttattaaaagttctaatatttcatcgtgtctctagttttatacaatttactattgtatatggtactcctatcacattgtgtaaactacacttaacaattcagataaattatcctattcaaaatagtggatagattgtgcttataatcttaattaatatcaaaatttccatttttaatattaacgattatgaataattatttatattatttttttttgaattaaattctcttatatatacactcttatatttatactagtaaaaagttacgtgcgaggcacgtatactaaattttatactagttttttttacgttattaaaaagtgat

SEQ ID NO: 314360 - DNA, 1896 bp, Cannabis indica
tcttttcataaacacaccaaccaaacacacttaagccaaacttgttcttatcttctctagtgtgcttgcaattctctctaggatttcacattgtatttcattttattagagagagttttctttgtattttataatcaaatatccatcgtattgagaggtgaggttggcaccaatagaaaaacaacttggttgtaggtgaggttgacacccgtttttgtaaacaacccgagaaaagtgagattggcacttctacaattcagtgaggttgatagtccttggaagaaattaaactattgtgaaaggtttaggaaaaaccttggtgaaaaatttctcggttgtaaggcttagtcaaccccgttaacttggcttgatagttgtactcaaagctaggtccaagttttgaagaccaaggacgtaggtggcttagttctaccgaaccttgtaaagattgagagtttgcaatttctatccctaaactctttacatttcaagtttattatttgttattcttgtgattatctttgttattccattaaacttgaatatttgcatgagttctctttagggtttttaaatttctgagattagcttaaatttccaattcaccccctcgtaaaaacatatcttgggctaacaattttgactcgagccattggatgcagatggtgcctttctcttctgatcagtgttgagtcactaccacccttaccgtaaccagaggtaggaagaacggtggctccaccaacaatctgaatccctcgagactcctgaatgcactcaactgtgccctcagctcgtagtgctttacccaccatatcaacataagtggtggtgtcatcttttataatcatcaactcatgcttaatcttgggattcaacccatcaagatacttttatttcttgctaaaatcagttagcacaattcccgaggccaacctagccaacctatcgaattgggttgtatattctgtaactgacatattctccttctgagttagcagagtgaattcctttctttttgtactaaaaactgcctcgttgtagtactccacattaaacagctcttaaaactcttcccaggtattagtagtgacatcccgagtaagagccaccatatcccaccagaccaggacctcctcctataactggaaggtagcatagatcactatgtcatttctagtgagtcccataacgtttagaatttgattgattacatgtagccactggtcgactttcataacatttgaacttcccagaaagactagaggtgcatgcttacgaaaccttttatacagtgtttctattcggttagcagccacaactgaccctacctgcacagtaggggcaagagccacctacactttaggagcaggtattgcaggagcaccctgctgccccaaacacctaatcactttgtcttgttcgttaattctagcttgcattgctgcaaacctattcattaaatcctgggcagcatgcggtgggttaacatctcattgactgcatgccctaccgcatgggcctctacctcgaccatgattattcgggggaaacctgaactccctaactggcactagatccaaccgaattaccctggcttctcgtgttccgcctggcatccattctagcatgcaaaaccaagaactagtctagttagatcgcgatcaagaataaattactaatatcgcttgcttaagaaattaaaacatccaccaatttagctatcgggctactaacattcttcctatcaggctttccttatagcatactaataaaacaagctactaaagtaataaaagcttactgaatatgagtcgagctttgatcgtacatattgtgatgtgttggaatttattttaccaggatcttagatctactcacaagtatgttgtttaa

SEQ ID NO: 314361 - DNA, 1914 bp, Cannabis indica
tgggagcaattgtcaaaagattttaaaaagaaatttcaagctacgagagatcgtcaactagaagcatctttattgactaatagcaaacaacaaccaggagactccctcaaggcatatttaagtcgctttagtatagctgcagctaaagtcaaaaatttgaatgacagcattcaattaacagcccttcaggcttgaattacaactgacttatcaatcgcatggggagagttatgggatgatttgcaagggcatcctgtaagaaatatcaatgaattcaatgaaagagtaaaaagttttgtgtgaaaagaggaggcacggaatgaaagcaagctgttaaagtcaggcttgggagataaaaccagtactagcacagcaacaacgagcaccatgactaccaaagtaaaaaatccaaatgttcgaataccaagaggacggacgagtcaagagactcatccaaggataagaagaaacaaaagaagcatgagaaatatatacctatttatttctgaattaaatgaaacttgcaagaatatttacctcgccaatgaaaacaaggtcacatttcacaaaccatacccaatgagacacgagaggaataagcgagatcccaataagtattgtcgtttccacagagatattgagcatacaaccgatgagtatcatcagttaaaagatgaaatcaaaagcctaatcttttgagaatatttaaggtagtatgtgaggacacaacagaatgagaccaacccaataacccaaataacccaaaggttacaacctccccctgtagagggcaaggatatcatggttatttttggaaggcctcacctcgcaggaaaaaacaataatgcacaaaagaggtacattaatgaggtaaaaagtgagacatcagcattctagctataacctttaaagaaagaaaaattagatgaaccacccattatcttttctgaaaaagactcaaaacatgtatgatacccacatgcggatcctcttgtaataacaatttaactttctaataaaagaataaagagggttctcgtggataatgggagctctatcaacatcttttataaggaaatattaaagaagatgggattagatgaggaaaagttaagaccctgcattgtaaacttgtgtgggttcacaagcgacagtgtcgcaagtttgggcataactaaactcccttaaccgtgggggaacaaccgttgtctactactaaaatgcaagaatttttagttttcgacatcccctctattatcccaaattttttccacctaacgtggcatgtccacataagccaaagaccgagtacaagtggagtacaaccatgtcagtagcataacagagtctctatacaagatatagcagaactgtcaaacagtaaccaaagggagtgaagtgagccctcaaggagatataccaacatccctggccagccaagagaagcctataggctagccagagtgagcctaaaggttgtccaggttctgtgcactagctggccagccaagaagtgacttttggaccaaggaggattctattcaatcaagggaacctggtctctacaaggaaatgttgtacaaagttgtcctcaacttgcaaaaggttggcctccacactcaatgactagcctcctcttggtggagctacagtgacctgccagatcctttaggccttgtcctgcataatcctacaggccttttcctgccagattctacaggccttgtccagccagatcctgaaggccttgggcggccaggattaacctgacaggactctatgtatagccaaaaatgtggacagcaagtcatgggctacgaattgggccctaaaagcccaacagaatggctgaataatatctagactcaagggcactttagtcttttgtaattatctaacaacctatgcaaatat

SEQ ID NO: 314362 - DNA, 555 bp, Cannabis indica
ttgtaattatttttatttctccgagatgccacgtcatcaagacccttcggtatatgtgcaggtgtatcctttggagaccttaggcattcgcttgccacgtgtctacaccccgataaaaataaagagtgtgagtatttaaccccctcaaatataaatcgattctcatcattcttccctctcattttctaacttcactttctcacttagaaattcaaacttaagaaattctgaagtttcgaattcttgtttgctgaagacgatttcaaaagcttgaggattttcaagagtggtctttgaaataattacatagacggttagtttcttctatataactactgtaattattttctctaatttcttgaatgccttcttggtttttacaccactaagaattctatttaaaaaagaaaaaattttattttatttattattaatatatacatattatttattctgtactattgttacatttaagaaaaaaaaatatttttaggatttaaaaaccctaaacaacatatataggatataaaaatattattgaaagaaaaaatttaa

SEQ ID NO: 314363 - DNA, 1361 bp, Cannabis indica
tgtgcaaaattatcggcaataaaggtattattgacggttttgcactgtcgtagatactataggcgacgatcagtattattgacacttttacactgtcgagacaaagttttttcgatatttttccaccacacctattctacccagtttaatgacagttgaataagcgatagttatatagactgacgataataaattaccccgactgttaaaaatagttgagaaagctgctttttgtagcagtgcttattttcattttacagtttcttcaaaccacttttcccttacttttttattttcttttgcgacgaattcttgttcttttcaacgcttaaatctccccagcttgaaggtgtaacataaaatgaatatcattcttcttcttcttcctagattaccaatcactcatcaccatgaaaaatgaagcttggtttcttccaaaattgaagcagaattcgcaacacatatcacaaccctaaatcattatcaaagcatatattgtaatctcaacccctttcttcttcatcctctgagccattctctcttctctgtgattgttcgagaccaccacgtgatgcttccatcgatttctaaaattaaattgaagtcacaactgatatctcagacctaaatcaccatcaaaccatgtcataatcttaaccatgctccaattgtaacctaaattgcaagaccatatgaagtttcctgatttcctaaacaaaactaaatagtcacaattgatattgtaatgcaaatcgaaaccattacaatcctaatcgcaatcccaagtcatcattaaacatatcgcaatctcagtcatgctcaattgccgcaacccaaatcgcaaccctaaatattcattaaactatattgcaatctcagctatgccccttcttaacccaaatcacaatctttcttcttcttcatttatcagccattctcttgagccaaaggtcagtagctccgacaatagttatcgaaaacttgtcgaagctaaaggagatgatgatgtacgtgaagctccaaaccactttttctctttttttttcttctttgttggattgcaacctttggagatggggtgtggctttagccctagttttgtaaaatgaaacctatatccgtattaatgccacaaaaaattacttactgtatttgtgcaaaataatttagccacagtcgtataaataaaaatcccctatatataaacacttcttaatgagtattacttattgatggttactataaaatttaactgcgaatatcaattttaaaatattaaactattagattttaatccaataataaataataaaaggtaaatttgaatttttatatttaatttagctacttatttagaaaat

SEQ ID NO: 314364 - DNA, 1477 bp, Cannabis indica
ccaacaaaaacaaaggaagtccatagcttaactggtcggatagccacactcagcatattcgtttcaaaatccatgaatacgtgtgttccattcttcaacatcctccaaggtaataaaaagtttgaatggacggaggaatgtgagaatgccttcaaagaattaaaaaggcaactcagcctcccgtactctcaaaacccctggacggagaagaattgagaatatacccagccgtcaccaaatacactgtaagtgtcatgctgataagagaagaaaacaacgtccaacatcgagtttactatataagcaaacgactcgttgaagctaaaggtcgatatcctttgatagaaaaactcacttatttccttatcttagcgacaaggaagttgaggccctatttccaagcgcatcttttttgggtatacactgaccaacctttgcgccaagtattgcaagagccatatgcctctgagcgattactcaagtgggcgatagagttggggcagtatgagataatcttccaaccccatacagcgattaaagggtaggacttggtagactttgtggttgagtgcacaggcaaagaaaaaagcaacataagggatgactcggagccagtacgagaatccctacctgaaaagaatgaagatagacctacctggaaagtacatgtggacggatcagctatagaccagctctctggtgcaggaatcgccctcatcaaacctgggggcaacacctacatggatcaatcaaatttggatcaaaagactccaacaatgaagcagaatatgaagcactcatagctgggctaaaactggctcaggatcgaggtctgtagtgattcacaattggtagtaaatcacattttgggaaagtacgtggcccgtggaggaaaaatgatggcctatctaagcaagatacaaggcctactcccacaatttaagggttacaccctcaggtagattcttagagaaaaaaatacaactgctgacgctttggcacggatctcgagcagcacagtaacagataatgctaacttagtcctgatccaattcttagaagaacccatcatcaactgtggggaagaaatcaaaatgatagatagatatagcaccaaattggatgacacccatagcagcttatctcaacactggagaacttccaaatgccaggaacgaagcttgggaaatgatgagaaagattggacggtatatcatagttgaaggtgtgatttataaaagaggtttttccatgccattacttagatgtgtaataaaagaagaggatgcaaaactcctgcccgaggtacatgacggattctgcggtagccatacagcgggacaaagtctatcaaagaaaatactaagataaggatatttctggccgactatgatggaagattcaaaggcctatgtaaagaaatatgataaatgccagagattttcaaagattccccgtgcaccgcccaatgagctaa

SEQ ID NO: 314365 - DNA, 772 bp, Cannabis indica
gtgttattttccattgacaaatattttaaaaagaaaaacaacatgattaaacactaaaaatcacatgggccatgtgttttttccattattattattattattatttggatgtggggttatgagctatatgtcttcccaataaaatataagtatacttttaattttttttataaattagttatccattcaattgtctcaatctaaaaccatacatgtttttggtttttgggtttggtatatgaaaaagattttgtgaagagtgaggttaatggggatttgggaagtgggagtagggtgctgctggggtctttagcattgatttgagtgagttgagaaagaataatgtataaaaacaaggcagggttgcttttattcaaagctatatcatgccaagtattcaacattcaattctccaataattatagtgtcaaaaacatactacgctaaaatcatttaaaaactcattaatactacatatttaaaattcacaatttttttttaaaaaaatatatctacaggtagctgattttaggaatttttacactgcttatcaatttttttaaatatttttacaataataattttaagatttgttcaagatgagataattaccttaaatacctcaagcataacatgaaataaataaaattaggatttttgaagtagtgattagtgtcataaaagttaaaatattaatggaaaaaatagctaataatatgattctgttataaaatataaaataatataaagtagatgagaagaaagaagaaga

SEQ ID NO: 314366 - DNA, 2299 bp, Cannabis indica
gtgaaggtaatagtgggttccccacccgtggcatttttggcttcctttcttccatggccagaactacttccttttgttcatgttgtaatgttcaggcatacctctcccgagctttgcccgaatctctagcaatatgtgggcctttgatgatgacttgtaaatgcccgtccactggtggaggcattaatagatcttggttgttgtctgcttgggcggcccgttgattttggtcggccttgacatacttctgcatgtgtgggttatttttccttatcaggaattcaatttccagcttcaggttgttgcactcattagtgtcatggccatagtctccatgaaaaaggaaaaatttggcatgtcccgcttgcttatgtcctttttcatgagagcatgttttttgtacgagactacagactgagtcgccatgtagattgtctccaagtcgtcagttaagacagagaaagcagtgaacttggaaggattttctctaggggtttttttggctttgccgtgaactttcccttctttccgttgccttgtctgtcattgttattagatcttttgccactcagatttgaactactagggtattagggattctaagcagacgctcctgctgagggggcatgtgattggcccagcttaggctcgacgtcttcccattgaatggcctcttcaagcttgatgaacccatctactcagtctagaaaatctgccatagagtccacggggccactttttgtgatgtctttccacagttctccaagtacttcgatgccccctagtattgcggccagcctcccttcttcagttaaccttgctactttcgtagcttctgtcatgaatctgcttatgtaggctcgcagaggctctcctggtctttgcttcacttcgaccaggtcttctaaatgtaacaggagttggcgagaagaagagaactgtgcatggaactctgaggagaaagctttccaggaattaaaccttcttggtggtaacttaaaataccactgttgtgcggcttctgaaagtgtagcagggaatactctacaccgcacatctcctcgtaccccttgcaaatccatttgcatctcaaaatacttaagatgtgacaagggatcctccttccctgtgtacatcttccaggtcggcctcttgaacttaatgggtagttctagaacgttgatctcgggagtgaagggtgatctgcatgctcgatccaacttgagattagtgagtttttggctggccaggccttgaaacatatttttcaattcatctaattgtgctttcacagatgggtgaactggttcagcctttggccgacctgtgtcacatcaggatctcttagagttgggtcctggatgcggataccgggctgagtggtcggttgaacatattgttcgtcgagagccctccttctattcaaatcatccctgagatcgtgggctgtacctagtctgttgaataatgaaacactaggctatcttagtgatttgttggtttggcaagtctgttggccagaactgtcagcgtagatggagttattaggtataactccacttaaggaattgtcggataagctctagccatctaccgcttggcccacaaatgaaacctatgatcggggattggacggctgaccgttatgagtttgggcggtatgcttagtaggaatttcttccgtgccgcccagcgggatactggatgtggtagttggttactgattagtaacttggtaggctttttgtatcagtacggtggcctatcttgctcgctcatcgatggctgcctgctgaaccttcaatgtttccatttctttatttctccattcgatgaactgatgcctctgctcttcgaatgcaagattcactgtagcacaaagctcttcctagtcatgatgcaaggtattggtgtgaccttgcatgaggccaagagcattgcagaggttctaaatctcagtatcatcccctattgtcgtctgagcattagttgtggaagggattccaatgctgggagtactctgatcggctgccgaactggtgtttccagtctcttgcacaccgggtgtaatcccagccagaggggatgtcacaccttggcccacagtaggtgggtgcgtgtttggttgctcaggattggtacctggtgggacccttgcattcctaggagtttgcaatgtaggatttgctaacagtgggtcactctgatcaaccacacctcagcgagtttgcaccaccattttgtgtatctgataaaacttaaggcaaagagcaaacttggattttccctctgaatgaaa

SEQ ID NO: 314367 - DNA, 2310 bp, Cannabis indica
gcataaaacccaacacaaatatggctagcaagctcttctcctacaaggtgtccgcattatcaataattattgtaaggagactataaagaggctacatagaggagcctctcatcgatcatctagtactgcttggagtttcaaggccttaatggtcagctgagccaacaaactccttttgaccactctctacctatttcttctttttgccttaacttatactttgcaaagacaattgtacttatcctctaactgcggggtcgtttgtaataacattagagacactgtctggtttttatgtttactttaattatgggtttagtgcttgatttttacttgataagttgacctttatagcttggtggagtgtttgattccaacggccaacacttcaataaccttttgaaaacctacaatattatttgttctttcctaaagggattgggactgcgttccctaatcggtttaggagctactaagattattcctcgcctatgattctcttagttaatcaccttaggtaggatatcgcgaccaaagtctgttgcttttttttgttggattagtgagggaaggaggaccaagtatgcaacaaagccctagccaggttcttttttatggagacaaggttgggcttgtgttgatgctaaagtcatccttccttgatccaaggtgacatggttcatttatcacttagacagattgtcttgagtttgttatgagagagttgctggaccacgaaggatttctaggcatgcttctattttctcacttcctgtataaaatattatcaacatggtcattagactagggcgactgcaatagtattcgagtactgctcctttgtcaaggaacataattgaaaacttgttggttgtgcctttttacgagaaccaaattgggcatgcagtgggtttcaagcgattcctccttctaggttagagggttgaagatgtgctacaatctaaactatggcttcgctcccaagactaaaggtgaaaactaaattggtcatgcaatagacttcaagttcctcctttcaagaaggagggttaaagataaattgaaatgccaaataacattttcgaccgaaagttaaacatttttacaaaaaaaaaaaattgaaagtaatgaatcaattataaaagtagttaggatatgagtataagagcacttagtagggcacttgtatgttttttaggataataaagtatacccccaagtgatcttagaagtttggacgtctctaaatttgtgattacttgtttaaaacataacttgtgcggaacatgaattcatgaattcttgtgcaaattccttctttttcattttattgtacctgcatgtttagattgataagaaagtttacaaaaatatcatgtataactgtagaggaacatcagaaccagatacccttagcctattggtaataacgacgtaaatggtttgcattctaggctctaggaattttcgatccatccattctcttaagttgaaatgttccctctcctactttgtgctacacctcgtatggtccttcccagttaggccctaagacccccactcccaattcttgtgaacctgcgaagactcttctcaagacgagatctccaacgtcaaatgtatggcttttaactttagaattaaagtgtctggcaatttttcgctagtacattttactttgaacttgtgactgttcccaaagttcttcaatcaaatctagcgaatcctggagcacagagtgattttaggtttggtcataagtgtctctcttactttgtgttgcacctcgtatggtccttcgtagttaggccgtaagacccccactcccagttcttgcgaagatgggaagactcttttcatgacgagatctccaacatcaaatgtacggattttaactttagaattaaagtttccctcgtacattttgagttgaacttgtgaatgttcccaaagttcttcaatcaaatctagcgattcctgaagcagagagttattttaggttgggtcataagtgtctagtctgtgagatgggattgtggtttccactgggatgacttcctcacacccataactcaccaaatatgtggtatgccccgttgaatttcttttcatcattctatatgcccagaagactcgtggaatctccttcggccaacgggctttacaagcttggagttttttcttcaaaggtgtcctcaatattttgttcgtgactttgacttgtctatttgcctatggtttggccatagcttagatgctcttcacaattctgtgctagttacaaaagtcagtgaagtgatcactatcaaa

SEQ ID NO: 314368 - DNA, 724 bp, Cannabis indica
gagttgttatgttttgtgttctactagtgttttaataaaatacagtatttttgaaaattaactcaaatttcagttattttgtaagtttcccattaaatttggcattacaaataagtatgaaaaataggtagtcccttcttacaaaggtgtcaagttctgaacatttaagttggtgtagttatagtgggcaattgggtaaattgcattagaaagattctacttaccctaatcaactgaatatgatattttgtccatataattaagttgtgattaatttaaatgaagaaaaatgtgcaagctaaaagctaaaattaatgtacaatatttcacatccaattaaacaagtctttctttatagagagaaagtgtgagaacagcaagctaaaattactttggtggcctagtgacaacgaacaagacttgttcatgtcattttcaaatgttttatcagaaaccctctaaaaaagtactacaatttcttttgacaattcatgaccaaactattaatagcattaacgaatttattataatgacctcaacttaaatcttataactattattttgaaaaacagcttaaatcttatttgattacttaaatgactcttttcttctctcgtctgttaaggtttactagatgactcttaagaaatacatttacgaaataaatggtaaaaattaaaaaaaaaaatacacaagtaatatatgaagtgttcgttcgatgtat

SEQ ID NO: 314369 - DNA, 956 bp, Cannabis indica
ctcagcccaatagccaatattttattgtatttatcccatcagtgagatttctcaccaagcgaaccttaatgggtcggagtctacccaactcgttagccaaatgcctataattatggcttcatctctttattaaaagagcattgctattggacatcattaatgtccaacacattctataggtggcgctctagattggttagcgatatttcgtaaaaactattttcttaactcgttagccaaatgcctataattatggcttcatctctttatgcaaagagcattgctattggacatcattaatgtccaacacattctataggtggcgctctagattggttagcgatattccgtaaaaactattttcttaaattatataagactggatacttaattacaccaataacaatatgacaccaaaaaaggtgctaaacaccaatggtgcttttattatttctcttatggaaagtgtgaaaattttatataaaaaatactccatttaatgatatttccttagactaagctcattaatcctctaactaccttatttatctcttaatcttcttttctgtagctcaaagaaatagtatctttattttttgagaactattttcaaaaaaacaacacccaaacacacctaattgttttcctaaaataattttttatttttaaaaacaaaaaattgtttttcaatacgaaacatgaaaatcatttattaatttttgagtatagaatgtatttgtggagaaagaattgtcaaaagaaaattattttgcaaagtttgtttttagttattttatttatttattatttttgaaaacaaggtaacaaaaacatataaatattgctattggataccaatagtacctagcacctctagacatgttacctggttagtgatacttcctaaaagttattatattaaattatatagggtctaatacttagttgaaccaata

SEQ ID NO: 314370 - DNA, 1080 bp, Cannabis indica
aatacggcgttccaaacgaacccaaagtgtagtaaataggggacatttggaatactttttatagttggaaggatttttatttaggataattatataaagtatcattttttttgtaaaaaattgtatatctactttactttacatgttttaatttttatcttattttcatattttttaagatatacctacttttatagatgatgtttccaatataccccttaagttaataaaaattatgtgctagatttaagtggagagtgaaagtatattggacaacccactcacaaaagtgggtacattttaatgaaatataatatgagagtatttttgattaatggatataaaaaagatatatttctcaacttatcctatctaataatatggtccaatatgaggcccaacccaatgtgatagttaagctttgcaaatggaaaaaggtcttcaagctttgtgggatgtgggctggttttcctttgggtttggcccaatgtgatgcctaagatttataaaggaaaaggtctccaagctttgttgtatgtggactgattttccttttaaaattgatgctttcttccttcttttgtaaggaatgctttgttgaagttggataggttttcattttgcgcttttgcccaatgtgatgactaagctctacaaatgtaataaggctatttataaaaatactgaaaaaaaagaaagaaaattttaatatatatggcatgtaaacttaattgtaccaaatatgatattcaaaaaaactaaaataaaaacatgagataaatcatcgtagataagaaggaatagcttaaaaaaaaatcatatataaattttacttatatataatcaaaaccagttttctgatgaagaaactagtttcatgatgaaaaaattactttcttgatgaaaaaaatcagcgttttgatgaaaaaaccaatttcttaaatgaaagatctttggtgaatttcgctctgatcgatcgttgccagatgggtaaaaaacttaaaaaatcctatatatattttacttctatataattaaaatcattttcttaatgaaaaattagtttcttaatgaaaaaat

SEQ ID NO: 314371 - DNA, 1563 bp, Cannabis indica
tacaatacaatacaatacgatctaatacaacgtttcaaacgagtcctacatgtatatatatggaaagattagcttttgtttttcctccttttaagaaaagctatattgtgatacgtaataaatagtggtcactatagccagtagttggccttaagcttagctgtatgtctttcctttatttaaatagaaagtgacaattacttttgctgtaagagaatgtcttgcggcgtcgtctttgttctaaatttagagaagagttaagaagaataaggttggatgtatatatactaagttgattaattttctttttaattaagcttaattaagtactgttaagtaaaatatatatttaatttttttaattagataatgtgttttttttttaattttgaaatagagtttgaaattttgatatttgatgatttgtttagctattacgggtacattagtgtgtcctttgaatgcgattataggtatgtatttatatgtacaataaaacttaagtgagatataggaggatatcggagtgaatcgttgtgtgtccaattgagcgaatgtctcatattttaattcgaagttaaaccaacaaatttaaaaatgtgattaaaaatatctacaatattttaagtattttaaatttaaatttaaatttctttatattaaatatctacataattttttatttttaaatatatgtaataatattataaaattaataaagaatattatggtaagtaataatatattcggttaaacttaacatagacaacaaagttaaaaatgtaattaaaaatatctacaatattttaagtattttaaatttaaattaaaattttcttgcaaagaatatttacataatttttattttaaatatatacaataatattataaattaataaaaaatattttgttaagtaacagtatattctattaaagttaacataaaaattaaaaattaccttaaattaagaattccattacttattttaaataaattaagaaatgtcccatatatatatatatgtttgtgaatgtggttgatcacttcttgtcattttatgctatttttttcttttccttaaactttttagttatatatataattttcatttttgtaagtatattacacttaaaatattattttttttattatagtagcattgttatttagtactttaaagtcttcctaacactccactcgatatggtcacccgaataattacttagcccaaataataattagtgatattttataaaaattaatatattaaattatataaaattcaatatttaattatatatatatagaaaactactaaactccattaatatcttataacatgtctttgtaatttgtttgtttttatataaataagaaggtcaaacttaaaatctagtcaaactacaggttctttttataataaaaatccaaaatttgtagatacgttataattaatggatggtgtttcgtacaaaaaaaaaaaaaaaaaaaatacttgtgacattttttcaaattaaaaaattatgaaaatagtgtaaagggcaatagtgatgtggtcccac

SEQ ID NO: 314372 - DNA, 2191 bp, Cannabis indica
ggttcatcatcagagagagagggtacaacaacatcttcactaggggctgcacgagcacgcttgagcatgctcctaacagaatcccccacctgagtggtctgacgagtaaaatgtttcctggtgccagcagaggaaataggagaggactaggggaaaggatcattaatgaccaatccaataggcctagttcgaggaggagtggaggagggcaaagccgatacttttcctttagcagtgtgggtgacggtagaggttgtcatgattggtggagggatggtagagggtgaagtctgggaatgaggagaagtaggattagtagtaatggtggtggtgttggtgatagggcgggttggggattgcacacgcagaaactggtttacagcgtcctggagactgtggttgtgccggagcacggagagtgtcacggtattctaaaacagggggagatgggaaattgtcacaacgaaggaggtatcaggtacatcggttgtaagtgtgatccatgaggccacaaaagtagcagaagttaggaagactctcatacttgaaacttatccatttgggttcaggagtggatcgaaaacgaattgtcatgcccctacgcaaaggcttagtgatatcgaggaggacacaaattctaaggaaagggccagagttctcaaggagagaaaggggaaagatttcgataaggtcacccaattcatcagcgatgaattgagccaactgagggcttcttcgaacaaaggggatgcgatgagcttgaatccagaaaggagtgtatctgatactttcaggggtaggggtgggtgagacatcaggatgagtgaagactataaggaacttatcaaagtgccagggctgttcttccaggacacgtcggcgatccccatcgcattggaaagtggccaagaaaaggccagaatggtattcagtgatttggacagggaaacagagggtccaggcctcagacatggccttttcgatccagacgggcttagcagttcgaggagataaagttttgaagataaggcagaaggagttggggtcagaggaagaagagagtgagatatgatcaaagtcatggatgagactttcttcttcagagagaggggtgagagtgttagggttggtggaagaggaagccattgaaagagtagaagaggttagggatacgatggtgagtaggaggggaaaggatgccaaacaaagcaaacattgaaggattaaatagacagaggaagtaggagaaagagatagaagacacatgggtggagaaatacgcgtcgaaggaagagagtagctttgaaccatcgcttcgattcctggagtggctatctgcagaggcagaggaagaatgattacgaaggattaaatgtttgaggcgacggataagatggtttgggttgatttgggaggctggagaaagaagtggaggagagggagggtctgggcaaacattaaatgcccaaaagagggtgccgtcaaaattaaatgcagctgggaaagagaaagagcattaaatatatgctgagcacgaaaaattcgggggctatttgtaatgattaaggatgacataaagaaattaatgcagagaagagattgaaaattgggggattgtggagagaagcgaagcggagatgctcgaccactgtaccagagacacacctggactgaagcttcaagaagaagaaagttttttctggagaaaaattatttaatgggttccaaaaaattttatatacattattataataatgctaaacactgacttttctaactcgacgaatatatataaaaaaaaaagaagcattatagcctaataataaaaaaaatggtgccatacactttgtgaatcttctgtgatttctcttaaatgaaaattattgaatatcttatttttattcaataccttcccattctttattgaaacatgcaactcctaataatataaatctttctaatcataactctcaaagtttaataacaaatacaaaataatgatataatataataattcttcataccgactacatgaataagaataataatgaatatggtgatgatataacctcctccattcgcttgacaataaaatattctgcttaacaaataataataagtatcactgttaattatttaaatataatagtctttaaaaaataaacaaaaaaaaacccttgcttcctcatga

SEQ ID NO: 314373 - DNA, 2187 bp, Cannabis indica
ccattagtgtggccgaccacttagtgcttttttgcccattattttattctttttaaatctatataattaaatcctatatcctagttgaaatactataaaaggaacatgatactctcatcttatccaactgactattcaaccaacaaatctagttttcattctctgataattagtagatgaaaggcaccttctatagtgattttggcacctcctttattgttcttcaccaattcgcccatagtgatagagtgccatgcccacacataacaagttaagtactcaatcatagtgcagaaaacggtagtaaccaacccaaaggagagaaaaagatccaggcttagatcttgttattactctgcgatagaaaggaacaagcgttagagatctgagcggaatgagtcattattattccattgcatcaatgtaaggttttctaaactcttatgtgtttaatttcattgtattagagatattcatatttagggtgttaatgaaatatacatgttagcaaatctagatcatagtaaaataaatctcaacagagacaactaatggtatcattaaaggtggtaggcccgggtgtcaaggtagtgataattctatctagcttaggcattggatcgtgctcctcctagccacgctgctcctgctttatggaataaaatttggaactctagaatcttggagcatcacaaggtcctttggtggagtattctgtcaaataccttacctatcaaggctgctcttgctaaaaggatacatattgaggatgtgtcttgtcctatttgtggtgagggagaggaaataatggaatatcttttcctctattgcaagcttgcttttcacctctggaggtcctccccttcgggtgtgatgcgagtgcgtaattctagggcccgtgtgggatagcgtcaaattgttatagagcctgaaggaaaaagggatggaggtccaagatttgtttctatatgctttaattgtagtagatacaatatggaacaccagcaacgagacggttcacaataattctatatgtaatattaagcattgtattgactatattctatatgttacgcagattttagttcttgtctatttccttcgccgatgacagttgcgactctttgtttggtttccccctccgaaagattgggtcgaaatcaactgtgatgttaaagttggttgtgactcaatgtacgtggtggctttggttagagaccacaatgagtcagttttgtgggtggtcagtttgttagccctggaatcagcaatcctttggaagcattcgtttgtgataattgagagttattctgagacggtgatcaacacgctgaaggagacttgttccgtttggggtattggtaactatgtacttcaatgtaaaaaaaattcaaacattttgattagttgtaacttttcatttatttctagatcgtgtaattttgcagctcataatgtggctaagcgggcttttgccagttatgtaatcggtatggtcgatctgtcctccataatagataaattattatgttacattacaaaaaaaaatattaccttttgttacaacaaaacttatgactaaaattgaaaaagtagtgactaattataaattatcattcctacgttgtgactaaaaagtccatggctagaaatattagtcacaaaaattacaatttgttgtgactaaatatacttttagtcacaatacttgttgtgactaaaattaaattagtgacaatttatgtctaaataatatgtttggtcataagtaacttttttattgtaactaaaaattatatttagttacaaaagttttttgttgtgactaaaaagctgtcactagaagttacattttttaagtgtaatgaccatgaggtatatctacgaattttattaaaaaaaaattcaagctataacaaacacatgcatataccataacaatctgttgactgaggttttcagcaaccaatataataatagtatttaagaaagctataaggaattaatgagagagattcttacgtggtttgggcattaatgagccttagtccacgagtctatgtatttatgagagtatttattatagagaatgttcttagtggttttcctctttagttcttatgaaacccagaattctcgacccctgccttaactgagtttgggggtagtttatagtgttttgttggg

SEQ ID NO: 314374 - DNA, 1099 bp, Cannabis indica
tttggataatgttcatcatgggaaggtcaatatgtgtctactacattaatctatggttatgaaatgattttattagggttttttttttttttttggagggtcacacacaccctatcatcatcatcatgaaagaaaaaagaaaattgttgtgtttcattataaaatattagtggaaaaggggaaaataaataaataaataaaaaatgattcatataaattaaaagcccacaactaacataattcgaaaatctatattatataataacaaagatgatatgaagtatgaagggttcaaatacagagaacaaagacatttaataaacccatgctaaacctattctccccaccacagaagagccccttttctttttccactttcatcttcatacacatttaaacccatgcctcttttacactctaactttgatttggaatttcatcttcttaatttggtatgggaaagaatttgacacactttcatttgggtcaactcaatctctctctctctctacaagtttgaagtttaacaggtacgtttttattttacattattaagttgaaaccaagatgtgagagcaaatatgactaataatgtatctctgcactaaaattgatgaactaaggttaccctgtttttcatgtcatctaaaaattgtagtcaaaatcccatatgaggatttgcttaagtaatctagctatggattaaactttttcttatctcaaaacttgaaggacaatgcacttgattttagtttattatatcactcttatgaataagaaatatttatgtattttgtagctataggttgagaagtttatggaagaatagaagccgctaatgaaggttttaaaattcttccattttagttatgtggctttttaatattgcatacactattttgtgtagtcctatttatttttaatggtattttattaagataatggtttcaaaacctcatcctcagttgatttccattctcaaacaaattttttcgtgaaattggctgaatataaatatgaatctggatatgctaagatgggttcttttaagagaagctcaaggttgtattttttttttttttttttttacaatttagtt

SEQ ID NO: 314375 - DNA, 757 bp, Cannabis indica
cacgatgatacgttttgccacccatactaataaatgcaaaagtctaaagatcacctaattgcataatgctcaaaaatgcttaaacatcaatcttaagtggtagccttctgaatggtcattatttaatggtttggacaatatttgtactacggtcccaatgaccacctccaaagcatagttcattttatatagcattacattactctccaataatgccttctggacggagttatcccttaggagttttatttttaattagctaagatccgaacagatcatgttataggtttttattattcaataaatgtaccttactttagtaacaatatatatcgactaataaatgaataatatgattaattattgttccaattatttcaatttataaataattacttgcaaaattatgttgatttatttttaaatcataaatacttcctatatctgtataatcaggtccgcccagttaaaaggtctgtacaaattactacaacatactctggttaatttgcaagcaatcaagagtcaaaaacctgttcagtcaattggggacacctacaccaacatttataaaaatgcatgaaaaatactttggcataacttcttgaagaaagcaaaattgaaaatcaaagtacatatgcattaaaataagacataaaaggataaaagtatgggtgtaaatgttggaaattattttaccaggatcttagatctactcacaagtatgttcattaacatcctaaataagaactttcta

SEQ ID NO: 314376 - DNA, 565 bp, Cannabis indica
aaaataatttccaacagtaagttcaaatataattgtagttaagttatattaaattgtatgatctcttatatttacttcataaattataggagaacccggattacatcagcacatggagggaagtccataccaaaaagaataagcaatttgtcaatgaatatgcaagacaagattatgtaagtttttgtcacttaatctttatattttcccaatattagtgtcatattgttctaattttttgatttaatataggagcagttggaagcagctcaagcaactcgttctcagatagattctgatcctgggtcatcatctgatcaagccagcatctttgaagaggcattgggttagaggaggggtcacgttcgtggaattggtcacagattgaacggtacatattcaactagtcgtgcccaatccacccaatcacaggcaccttcacaagatttggtaaatgacatgagtgcgatatttactctcaattcatctcaaatcaacccatcaaacatggaccctacaaagtttgcaatatttaatatgcttaagagtaagtactccactccag

SEQ ID NO: 314377 - DNA, 1280 bp, Cannabis indica
taagagtaagtactccactccagggcctcaactgtctcagatgcacatgtctcaaggttcccctgcatattctcaacattctgcagcatcatctgacatgcacacatctttgacatcatagtctcagcacccaccacagctgctctcgcagccttttccataaccatcgcaccctccactgccttacccttacatgtatagaccactgtacacacatccatacatgtacggaggaatttcacagtagcatccttctgctttctttccaggtttgactgatgtgggttgatcatcacagcaagctcagccagcctacccatatcaatgaatgatgggggcaccgacaacagccgttacaaccaccacatacatctcagccgctacagccaccacatacatctcagccactacaaccacctgagacatcacaaccgctacaaccacctcagacatcatagcgccaaccatcgagtcatttagagttcgatgagaacgagagatcaaatgacttttttaccttagttgtaaaagtaaaagactactattatattttattgtaagaactattataatattttttttctttaagttgtcttagttactaatatttgtaagaactatttaattttattatattattgtgcaactatattaatgaagaaatttatatttgatattaattattattttaaattttatttgttattataattatttttaaaatattaaaaatcaatatttcaaataatataaattataatataaaaacctttaggggcaacattgtcacccctaaaagtcaaatagaacaattcttacaacaccatttagggccgacattatgggtattaggagcgacattgttgcctctaaaagtaaaaaaatagaaattcatgtattacttttaggggcaacattgtcgcccctattttcaggcgacttttttgtcgcccctaatagttcttttaggcgcaaatcattagaggcgatcttttaggggcgacatgtcgcctgtacaagtcattaggggcgatttaatgttgttttaggggcaaattttgtcatcctaataaatgtatttgttgtagtgggttgagttttctggcacaacaaagcagcacaagacgattggcagactacgaatttcagcaagcgatggcagtaggcggatgagaattgagtgagtagcaagtgacgattgttgtttgtgggtgaacaacgattaggagttcggttggtgagctataacaccctaactagcataggcgtattacgtgatt

SEQ ID NO: 314378 - DNA, 1317 bp, Cannabis indica
tttttcccacaaggtaggcatacccaaatacttggtatggttcttaactaatttaacccccaagttggaggctatattagttgctagtgaatcattaactttgctccccacacacatctccgttttttcaaaattaatgcattggccggacatcttctcataagtagcaagaacttctttcaaggcattactatcctctatgtttgcatccaggaatactaagttgtcatccgcaaataaaaggtgggaaagtcgttgagccaaattaccgaatcttagcccatgaattttgcccgccctttcggcttcaaaaatcaaacaagaaagaccttcagagcataaaagaaagagaaagggagagagggggtcaccttgtctcaacccacgttcgggaagaattaatcctttaatagagccattgatgaggatggagaatgatacagagcgaacacagttcattatcttagtaatccattgagagtcaaatcccaaatgtgtcatcataacttctaaaaagttccattcgaccctatcataagctttcgacatatctaacttgaccgccatttttttccattaccaaaccgccctttcttcatacaatgaagactttcaaacccgataatagcattgtcttgaatgagtctaccaccaatgaaagcactttgattctccgagattactgaaattaagctttgtttcattcgattcgctagacattttgacaccactttataaatcacattacagagacttataggccagaattcagacatttttgaaggctgtttcactttgggaataagacaaatcaatgttttatttagaggttgatagtcggcattttcatttaaaactgccagacaagctttgatcacatctttcccaacaatgtcccaatatttatggtaaaaggcccccggcaagccatcttttccaggtgcttttagtgggtgaatttggaacatggcagccttcacttcatcacaggagaaaggttctaaaagagcttcattttcggccaagcttacacggttagggacacatcttcggagagtatcctcaagctcgattcctttgtttgaggtggtgaatagttgctgaaagtatgaggtagcaataagttccagatctttggtctttgttttccattgctggtttgcatcatataagccttctattgtcactactacaaaaagggctattcccaacggtttagaagagggtcaattataggaaccgttggaaaaagtaagtggaagtttttcccatcattttagcactgtagcaaaaaaaactgttgggatagttattgcc

SEQ ID NO: 314379 - DNA, 858 bp, Cannabis indica
aatttagtataattaaagatattaattttaaataaaataaaaattattaaaatggggtgtctttagaaaattttgggatgtaaataaaattttccatccattttttatgtgttaattccaaaaataaataaataaaattgtgcactcgtaataagtttatcgtattcgtttgatttctccaccaaaaaagagaataggaataaaatatcatatcatattgtaatacgaggcccaaataaagactaattaacaaagagttaatggaaaaaactgtttctaagatcattgaaaaaagtgttttaatgtcattttcccattaatttgatatatgaccactaacaacaaatatattaaaaaaacacagaaaatttaataattataaattgaatcaatttgaaaatgtcaagatcttagatccacatagaaggtggctggacaaggaatagaattggtctccctcgattcctcttttacagcatgtgccacgtcattatttaaaaataaaataagtcgaattaaaatccaaatggcagtggatggggcccacgacaatagatggaccgataatgacgtggcaacgtaggctttgcgtagaaaacccggaggtataggcgcagctttcaaaatgaagtttccgtttaaaaaaataggcgcgtttgacttgaaggggcaagtgaagtcacgcgtctaatggaaagtggttcatatatgaaatgaaagtagtcaagaaataatggcaatttttgggtgggattttacagatattcctcaaaaggagattttttttttaatatttttatttatttttccttttaaaaaagtcaaaataataattaaaaaattaattatggtaaagta

SEQ ID NO: 314380 - DNA, 1481 bp, Cannabis indica
tgcttgaataagaaagaaagtatcatatcattattggaaactatagctccagaagtttttagtagaaactttggaggagtttcttctaaatcagatgtttatagttatgggatgatgattattgagatggttggaggaaagaacaataatgtcaaaaaatgttattagtcaatctagtgaaatttattttcctgattggatttataaacatcttgaagaagaaagtaacttagcattgtggggtgcaattacaagcttagaaaatgaaattgcaagaaagatgatgatatagtaggtttgtggccatcaaataggccatccatgaataaagtgattgagatgttggaaggaaatttggaagccttgcatttaccacaaaaaccttctttatttactccaacagctcaagaaatattttctactgaggtagtatcagaatcttccaccatgtcaatatgacattgatgatattatgttatcaataatataatatatctaaacataattaattaattatatatattgtagtaaacttatttaatgtatgtactgttattattgttaaaaattaaattgcaactttcgaattaatcttgagatttagttataaaatttatagctgagagtaaactatgttatgtttaacaatgtggaaatttagtgtgttttgatatttttattattttattgttggaatttatgcttgatgtttgtttttttaagaaaaatatttggagattttggtttttggtaatttggtattcttcaaccctttttgagacaaaaataaaaaattataagagaaaaaggaaactccaataatgcttagttagattttttgttggctcaatttggtcaaagtttgtatttttagctttaaaattcatgttctagagtcaagagtgaccactttttaaaaataaattgaaaaattttaaattttggatgttgaacacgctctgtttgtgactgaaaataaagtctaaaacttcaagataatttttggctatgacctattcactttcaggaaaaactttctgaatcaaagttctaaatccctttttcatctttccaaaacatcttgaatcgtctaatttcaagctacattgagagagttatgaccaaaatactattggtcgtcacacagaaaatcagaaaacaagagtcgtggctcttgcaaaaaaaaaaaaaaaatgggaaactttccaaattttgtctataaaacgagttggagctaggctttatcatttgaacttggagaccaattttggacattggaggattttataaaatcttcctaattgtgtatttagggactgagagcttagatctaataccattcaaaaaattgaaaaattcttagcataagaggaaggtttggagcaaaaaaacactattggaggattccaaacaatgttctatcttttccatctctatcttttatgtttttaattgaatttttattattttaaaataatttt

SEQ ID NO: 314381 - DNA, 567 bp, Cannabis indica
ggaattgtgggctaagctcttagtgtaatgacttcgcaattgaaaattgcatggtgtcttgtattaaaagtctttgatattatggtagtcaagcagcatgttgagatggagatatgtgtttagagtcttatgtcaaaagtcttcatcacaatgtaaaaggtcgcttcttatgtcaaaagtcttcatcacaatgtaaaaggtcaagcgacgagttctattagtgatagtggcaatacaaagatgattttgccaaaagagaagctaccgtccttaatttgataagattgattgggtattgattgaagtctgataagttgtggcgaggcatctgcgtgttgtttagctcttgaaacggcaaagctcaagaggcacaagttcatcatcgtagaaagtgactcaagagtggtgatcgatgctcttaatcaagtgtccttggtttgggggattgagaactattcttctttgtgttggaaactctccagatgttttgatggatgcgtgtttacttgtatacccagattttgtaatgtgaaaattacatgaaatatgggatttcataacaaagtt

SEQ ID NO: 314382 - DNA, 2267 bp, Cannabis indica
ttaaacaacatacttgtgagtagatctaagatcctggtaaaataaattccaacaattttttcccaaaaaatagctatgcatgggaaaagaagaccaaaggttcaaaaatagaaaagtgtctagccgttgcacaaattctcataatgattagcaataaagtcattttttcataaagataagtcatctgaagagttcaatatttgactaggcaaagttgcccggtaaaggcttttacaatcaagactagagtttaaaagttcctatctgtacaggcatgcacacaaggacttgggggacaaatactatcccaattttttgcccacctaacatggcatgtcgacgtagacgaaattgaaaccacgtagaatacaacctgtcaataaccggacaaagccaccttgcacgacatattaattatcaagggttgtaaggcaatcaagcaaggtcaagcaagaagaaaatgaccaactaagtatccctggtcagccaagaagtcccatgtgccagccaagccctaaaaattggattggtcggctggcaaatgcaaatagccttgaagagaggttgaatgaatggtggggtccacacaaaccttttggaagatgctcaagctaaatttcaattacaggccagatccaacaacccacaaagatagggatattctctcgagatattatctaatattctaaggatttaagtatccttttttgtaatttaaatataagatagaaaatatttttccctattatagaagggatatttacatatttgaattataatctttcgtaagctcacactatataaaaggcattagacaatataaaaaagagacctaaactctaagtctcacacgccccatagctcctctctctcagtccttcacgcccttcactcactagacacgtagtctatttccttcacagaatctcacaagttctgaatctgtaacactcaattctcactactataatattgaagaaagccatagctagaaattataaggtccaagcctataatttgtgtggtactatctcaagaataaatataaccaaaaggagagtaggtcattacccattcatcaagggggtcgaacctctataaattcatgtgttacttttatcatttattaatattatttacacgtagcgattatcagcaattaataaggctctactgtaattaatcaaattttgagtcaacaatatataatttctattatatacaacaccttcacttagatgtcatactacatcagcaatctgaatcaggattgcttgcactgaataatgggcatcagtgaccgtactagcaatcattaggagtgtaaatagatcgggtaagattcgattcgaatatgactcgacccaatccaaactatgtaatgatctaccctgccttgccccgctagaccagatattcgaatcaaatcagatatgacctggcttatttagatcgggtccaatccagcgcgacttatctaattttttcttagaattttatatgtaaacttaattttttcctaaatctaattttttaagaactaataataccttataaatgaaaaagacaaatcgttaatttttttgttcttaacaaactcaaataatcatttcttccttgatttttgtcatttttaatgaaattatcattttattcacaaaataaaagagtaatatgactataagagaatggattattcctaaaattgatcattatagcatagaaattttcatgacattgctctcaatctgacattattaatttattttcttttcatttgccaaaatcaatgaaaggtaagagaatatcaaattttaaaaaaaaaaaaaaatacccactatatatcatggtgtatatgtaacaaaattttattactttgtaaacgattttttcaaaaaagtaaaattagattttggatttcatgtgatgaaaaatatacaaaagaataaattggaaaattaatttttttgaatttggatattaattaacttagcacgttggttttcttaaagttattaattatatgctctttcatatatatgatttgctcacagggaatatatatatggaacactttttaatgagtattaccgttactaaacaaatttaactataaatattaattttaaaaatatcaagccatcaaattttgatctaataacgaataatgaaatcacaaatttgaatttctatgcttaatttaactacttaattaaaaaaaatatcaaaaaatatctctttttacactatatcaaaaatatgtccat

SEQ ID NO: 314383 - DNA, 1398 bp, Cannabis indica
aaatagtgtcttatgtaattatttcatataaatacttacaaaataaagctatttatataagaacaagttacataaatttgggataaattgataaatacttcttttttttatctattaattaaaaatattcttatatgatattttatttaaatctactaacttttatgagtgagttgcttaatatactcttgccctttacttaagtgtaacacatgatttatattattataaatggtataatggggacataatttataaaattaagtatattttaaagaatatgaaaataatggtaaaaaatgaaaatagataaagtaaaatgaatttacaatacaatttacaccataaatttagacaaaactattaaactatgaagaaagaccctcaatctaaatgaacaatttaagcaaacctacagaataaataaataaagtataaatttgattagcacactaaataaacaaaatggtaagatatatatataagaaagaaatgttcaactattttcttttttgataagaaataaaaattagcgaaaacttatctttgagaaattcttgaataaaatagtgtcaccctttatcaaaactaatatgagtagtctaacttttagatatatcttctaagacgaaaaaattaaacaagaaaacatctataaccacaatcatacaatgcaaagtgagaattagaacactaaaattgataatgataaagttaaaaatatttaacaataagagtaggtagctcaaattttagtaattcaacttatctttgatgactttatgactttaggacttatctacctctaccaaaatataataaagacatactattaacttataaagactgagaataacttaaaaaataatataaaatatttatcgaaattttcaaaaactaatataataagtgcttaccaaataatcaaatgtagtaataaaggagatggagatttttacgtagttcaggcgttaatgagtcttagtccatgagtcagtctattggccttaaaaggcttggatgatacttttacagtgtttatgcaagaaaccctaactctatactctttgtttctcttgaagaagatgaaagcttagagtaatgttaatagagcttcgactatcttgattttgatccccctttcgtatgaaaatggaaaagtatttataggctaaaggacaggtatggacatgctcatgacctgtctaaggtttacacaaaaaccccactaatagagtaaaatacatgcaaagagctgactattgggccccttggaaggtattatgctcgtgcgttgaagcagttggacaatatgggaccaccatttcgaataaaatgtgtgtcaccaaaaagtttaaccttgaaaagtaaatgcctggaataactgtctggcaaaaa

SEQ ID NO: 314384 - DNA, 2256 bp, Cannabis indica
tctgattatattgaaatgggtttcatttacggcacaaaatccaacacaaagatcacttaattattgatgccactgcatctattatctatttgacatagacctacgtgttacgctcccacgtttacttagaataaggccttagaatagtttatcttggttctaattaccaagtctaacctaattatgccttgagggcataattctttatttcaacatatatagcatcacattgcattcaaaattatttaatcacagagtaataaccctaggctttataaccgcttaccttagggtaataaccccaatcctatgtttgtcatttaatcaaaatcataatatcaaatatgagcgcaaccgcgcttaactctacgtgctaactactatcttacctggtatcccaagtatgtggagattctctgggtgttcctgaacaagcgtcagtaatcctagtcacaattcttaggattttacatatagggttaataccaaaattcaattttatataatcacataattggcatttcatttatagataagcatatatagctcagaacgagcttttcaatgatataaagaatgtcccaaatagagtcctaagttagaagttatggcaaaaataaaattttaaaatccccagggcaagtagggcctcgcagcggcgagcaaggccgcggtgagcaacaacaggttgctctctccacgatgagcctagccgtggccgcggtgaggggccctgtatccttaaaaatgccattttttaataacttcgaaaatcaacctaaaatccattccattccataacaaagctgcatatcatcaaattcaatatctcgcaaacaaaattcaacatcaacaatgaatttaaagcttaaaacatagctccatatcaagtacaagaacaagaaattcaagtctaaagcaaaaatactataattactcaaagttcacaagcttgaacaaccaacttcaaatcttcaaagaaaatcccagagtttcaagaccaaccccaaaaattaatcaacattaacaaccctaaaatctcacacaaatagtctagatacaataacatctaatcctataagctcaactacacgaaatcaccatattttacttcacaattatcaacattcatcaaaactcataagatcttcaagaactccatcaagcattaccaataagtattttaattcagaaactaatcaagaactaattcaaaataactacctcaaatactcaaaactcccaagcaaacaagatcaaaccacaaattcctagtttttcttcaaagttgggtgaaattggaaaagatgaggaagagagagaaaaagggccggttatggggttcaaacccagaaattatgattttccaattaataatatctaatttttttcccttttgatgaaaatagaataggtggtcaaatgaccaaaatgcccttggggccaatataatcacacacgcacacatcaagggcaaaattgtcgtataaatcacacacataacacaatatttcaaatttctcatttaccaccttaacaaattaattaaatcccaaaaatacattttgggccccgaacctagttcgacccaaaatacccaaatgtgactatactgcgccggcttgttagagaatacgtgcagatagatagaacaaatatactatataataatatagctcataagcacaatatatcattagaattacgattttacccttctctggtcaaaattacaaaaatgcccctagtacactaacgaggtcttaaaatgcaatttatcagtatagtttcacatattaaattatataataatataattccacattaatacataattaaacaagttagggttgctaatccgattccataaatcctagggtattacacatgaggagagagacacagtactgcaattttaagtagggtttgatgcatttatagagtttgccctaaggacttctagaaatcccaaacgtattcatcgtccatgtgtagattgttgtaatagatctaaaagaaatattacgatgattaaggattatgtgtatttacgatgtcttaattgaagttatactacttggtattggcatgataaacatttagctgatgatacatatccattagagaagcaggggtagatgatgttgagagtaatgatttcgatgatcatccattggacttgcttgacgaagcataggaggaatttcttaatgatcctaaaaaaattcgataattttctaagtgatgcaaataaac

SEQ ID NO: 314385 - DNA, 1568 bp, Cannabis indica
atatatattatataggttggtcaatttaatttactataaaggtcttcaaattaaggtacaataatgatacatggaccactttttgtagaaaggaagacaataagggacccattatgggtcacatgtaacattctatataattaacaatttatataataattttggagaactttaacactaaaatattactttagttaaattacctcacatgtattaattcaaaaaataaataaataaattttggtaatatctcaatgagcattctaatctagaaattagggaaaaaaaaaacacacctgcccacagaaaaaaaaaataataacatttatactttgttggggtagattttgtaatgggattacatatcaattaatatttttatattggagtatattttttttaaagaaaataattttactatggtatatgttgtttttaataatgcttgaaagtgtataatatttagttataaattcaaattaataattattaactttattagtgtatattttatttagtttggtttggttttagttatttaataagttgtgttttaaatttgattttagttttatttttagttctaaaagtgcctttactattaccttagttttttgttgaaggttattaggtgatttctttttgtcttctttatattctaatttttcacatattagttactgttttgcattgttacaggtttttaataattactcttttgttttattaactgtcatgattatttttaaataatatctaatcaagtagttaatatttaataaacaataattagatgtccttaatttaaataactactaattcaaaaccccttcttcagttataatgtcattgtcaattcagttcagctagcccacattcaaagattggtaacaataaatatcataatcatcattattatcattttttaatggaataataattatcattatgagtaaactatctattttggacaattttttttcaaaaaaatctattttggacatttgaaagcatagttatttagcacatcttaaactttttagaaatttttacatcaaataatttattttataaatgtatagcataaaagggttttgtatataataaattgtttaaattatatttttgacattttaaaattttctaaaatatcttaaataattataacataaataatttatataaaaaaattaaattaaaaaaaattctcaaatgtcaatgcatgatagaccctttaaaagatgccaaaataccctttaagtttgcaagtgacataaattcaatatttatttttagcagtataagtacctaatgtttataaaactataattttcctatagttttgtcagtacagactccgttttgaatttattaaatgaacatttggaagtaaatgatactacatgtttctgtttatactcaataatcaagaatctggaatttatatgtggtctgtttaaaaaaataacagaatttgtgttgacgaaattaaagaaaaattacagttttacaaatattgggtacttatgccgctaaaaataaatattggatttatgacgcttacaaat

SEQ ID NO: 314386 - DNA, 1724 bp, Cannabis indica
aaaccagctgatcttttggcaagttcgaaggcttattactgcaattttctgcagcaaagtgccatttcagcctccttgatgcaggttcatcctgctgttgccgcacattgcccttggacaccaccaccagaggggaagattaaactaaatgtagatgcaactgttctttcttctcaaaataaatttggttatggggctttaattcgagactctacagggactgttttggctgcttgttcctcaccagcgaatggcaattttaagtcaaaacatatggaggccaaggctttatttcatgcattacgatgggcaaatcaacttaattatcaagtgaacaatgtagaaacagattccttggtgctggttaatgccatccatgcctcttcattgagtgatttgtcttatcgtgacttaattctcgatgttaaaaatcaattatcctacttccctaatgtttgtgtatctcatgttcgtagagatgcaaaccaagctgcacacggtttggctaaacaagctttagcgatggattttgattctgtttggataggagagattcctcctcctatattttctgttattgtaaatgactctttgaatttataatagcagaacttattctcaaaaaaaaataagggatttatataaaaaaaaagttagcgatagaatccttctatataaaatgtttagatgaattttaataaattatgtaaatgtgaattttatactttaaattgtaataatgagaattgacttatgtttcacacgattttaataatttcttaaaattatatatagaaaaattaatttattaattatgaataaaattttaagtgtaaaatttattatgttttatgaataatataaaattatacaatattcttataaatatcttttttatatgtgattagcacaaatatttattataaaaataaaagcgcactttgcatgaagttatttataataattaaaagtagttaaaaatataaatttattttgaatgagtcagatattaataataattaataaaatatatatattattatagactacacattagataaattttaaaaattataaataattaattaaaaaaaatggcaattttttttatatataaacatatagataataaaatacatatagagtatagattatatgaatttaataagactgatttaatcgattatcccaaaaggggattaaatgtaattttggggcaattaaaattaaaatggtaaaaaaaggtcaaaactataatgtaacaatacaaatattatccatctattcgaccaccacagtacatgtattcgcagaatctacttcactatggttaaatatttaagatattcaaactcaaaaaatatgaatattattccacccatccgaccgcagaacaatatatcacaaaatcttcttcactacggatgaatgttaattatattcaaactccactaagcactaataattaattaataacaaaaagttagtgaatgtatatacatgtaacaagttaaaatccgatcaactccaaattattcggaaccttgaaaattagctcacaacctacaatataatgaaatacaacaaaattaaaattttaataatttaacctacttactagttatatcatttatgagtaactagttactaatgaggactagttagtaataaaaatatatgaatatgaatgaaaaaaaaataactagttactagttagtaaatta

SEQ ID NO: 314387 - DNA, 1150 bp, Cannabis indica
tcacatggagagtatcttgaagtgacagggacaaaattggtataatgtttaaaaaaagagataaaaatgataaatttaaaaaaaaaaggtaaaaataaaagaggacaatataaaaatggtatagagtgtaatttcctctattaattttgcaagacttgtcaaagtaaataggatttacgcaattaattttgcaaggcttgtcaaagaaagggctaggcctgatacgtttgggtctaaataaaggagttacgaatgggccaaaagaacagtttgggcaaagattattggatcatttggtcctatgaaccatgctatgctcttgcaaaatgaaaaagggaaacttacgaaaatattaaaatttattgtacttttacaaaaaaattactgtcacacggaattttttttttcaaaatactgtatttttataaaataatagtagaataactaaaaaataaccgtagaataacagtaaaaacttaacacagtacatgatatttttgaaaaaaaatacagtattccgccccagtaaaaaagtaaaaaagaatttcagtatgtggtgtaaataatccaataataaataaataaatatatgaaccttgcaaaatttatttcacttggaaacaattttttattttccacaaaattcacttgctacattagttataatgttccatttagtgatttcttacttaaacaataaaataacaacaataatcatttgtaccacttatttcacaataaaaaataggaaatataatatttggtaacttgtgtttgattaaaatacagagttggtaacggtatcctatattttcataatatataattggtatcctgaattcaaatttaatcaacttaaccaaataattcttaattatatgtaattaaataattaaaataaaatctataactcatatacttggagacattttgatcccaataataaaattttagtaatcaaatttaaatgcatagtaccaaatatatataattttaaaatataaagtatcttacaagtattattaaaaatacagataaaggtaaattgtgacataaatacttaacgtttcagattttatacacttaaatactttatttttatttttggaggcaaaaatattcaatgctacaattctcttacacccgttac

SEQ ID NO: 314388 - DNA, 1499 bp, Cannabis indica
gtaaaataattccaacagtgtgttactagcggaagctaatgaaataatcagagaaattcatgaaggtttctgtggagatcatgtagattggcaaaccttgtccaataagataatccgtcaaggatactactagccaagtatcaataaggacacacacagatttgtcaagaaatgtgacaaatggcaaaggttctcacatataccttgagtaccacccaccgagttaagaatgatgacctcgccatacccatttgtaatttggggaattgaccttgttggggctttacccacagggcgaggtggtacaaagtatgttgttgtggtagtcaaattcttcacaaaatggatagaagccaaacctctagtttccatcacatgcaagaaggttcttgattttgtcattaagaacatcatatttaggtttggcattgtaattaagatagtatatgataatggaactcagtttgatggtgaattatttactgagttctatgaaagaaataaaataattgagagcttctcgtcagcagcgagtcctcaagcaaattggcaagtagaagctattaataaaactttgaaggatactattaagaagaagttagacgccgctaaaggaagatgggttcacgagcatccacaagtgctctggcccacagaaccacagagaaaaccgcaatgggacacactctattttcattgaaatttgtctcgaaagcaatgttacctgtagaggtgaacattgtaacccacaggcgtgaattctacaatcaggaacaaaaccaagaacttttaaatatgtaattggatctacttgatgaaaaatacaatgagtcacaaataaccaatactgcttatcaacaccgtatcacgaagtactttaacaaaagagttcaaaaaaggctatttgaattaggagatttggtcttaagatgcgtatttacaaacacgcgagatctagcagctggggtgttcaacccgaactgagaaggaccgtacatcattgaagttgtagttggaacaatggtttataaattagcttcactggaataaggagcatctacggccttattaccagtagtttattatttaaatattgtactaatctttgtcataatcgttcattattctgaataaaagttgattttttcaagtaattataaaatctcaatttcttgaaaattacttgggggcatatatgtgtataataactagattctacctaaaaatatataggaaaatgctgaaaacctaaaatttaattttttttcacaaaaaaaaggataattaattaaaaattgtcttaggacagtacaaaatcaagaattaaaaaaccttttcttcaagtggaaattaaattagcagttgtaagtgagattctttctcatgaaacaacaagaacctatatgcgatctgagtaaataacggctcgcatgattatatcatgtattataaacaagacacaaatgtgtcttgaaaaataatacgcaagctaaagtatg

SEQ ID NO: 314389 - DNA, 1419 bp, Cannabis indica
aaagagttttatttagggcataaaacccaacaatctcctcctcctcgacaacaggtcgggcctattctgccttggccaaggtggctagtcgagaaatatgagggttgacggatgaaggctttgtgacagtctgcttggtttgtgccatcattttacgaatgggcagaattttatgagagatgggccttgcaacaatcacagtaaactcaacaatagagtttccttcagtagtcaggattggatagccctcaggctgagtgtcaaccatgcttggatgggccctatacatccagtttgtaggaaggtagagtctccaacctttctttagttaccagatgaaacagccgtatccttcaccacgtatcaagtcaagatacaagtgatattgcacctcgggctccggggaaggtgtgtgttcactactcccttcccaatcttcaaaactagaatttgaaagatcgtcactagacgaggatgggttagcacagaggtgtgggtgatcttcatacataatttgaagcaagtcctagtaaatatgatgcttgcctctccagaaatcaccagtgttcatctacaaaagctgggggacaagagaataagagttagttagggtaacgaatgaaaacagattttatatgccgaccaagcatgattaagaatcaaaagaaaagatttcaccgagagttggaacttccagtcccaaaattttcaaacttcaattggaacatggtattttttcagaaccttatgaacaaatgggaatgaacaatttaaggtcaaaatctaagcacagtcagataactagatgttatagttaaatgttggttaaatttataaattctagaactgattattcaacgattagccaagaacagttcaagaataggcaaaatctatagcaaagaattcagaaataatgcacacatgccattgaaatcatctaaaagaaagggatgaatgacttactcaccgatttgaacctttcttgatctgctcagatggtatcgtcaggggttttccagtgaatcctttgaaaaagcttagatgaaaatttttctttggttctttgagaatgaaactggctaaaaggattgccaacaattttgatctccttttataagcaatcaaaaaaagaaaactcatttttgaaatacgtctatttgggtttccccccaaaagtaaacattagtactcattacaagaagtacaacggtcaagcatgcttagatattacaccgtgatttgaggtacaactttcaaaaggtatttaattcccagacacggaagagacccctagtcaaagtcacgtcaaatcagcatcaaccattgagacacacgtcacccatccgggaaagacaacttccttctgttcgtactgtaaggcttgggcatacttttctcgagcgttgcctgagtctc

SEQ ID NO: 314390 - DNA, 692 bp, Cannabis indica
tatatatctatatatcattgagagggaggctgctgctcggtcatctccagacctggtggtctggctggttgctgcttagttgacaccgaagttggtggtgtcagaaggcaagagagctggtggtggcaaaccaaaatagaaaaaaaaaaagacagaagtctgaaaagaataaaatgaaagagatgatgaagaagaagaagacgtggtggtggtgggggttgccattgcccgaccagactggggttctcgccgtcgccgatagaagaagaaggagagaaggaaagagggatggtggtgggttttggcgtcgtggtgttttcgttaagaattaagttctttttaaggggtatctgataacataacataatatatatagatagatatataattacataaataaataaatatttgtatttcgggtgagtctgggtgaaacccgaattttggaagtgtggaattttttaaactcgaacctggcccgatttggcactgggtaacatctgaacccgcccatgcattattttttaaaacccaatttttttgagtttttcaagtttgcgtcagttaggtttgtcgagtgggtgcgttttttgattacaaatgttgcatccatgtaagattattcatatgcatataatttatattagagataagttgaggaatattttttttttattcattaatcaaaaata

SEQ ID NO: 314391 - DNA, 787 bp, Cannabis indica
accaaaccgtataatttaaaaagaaaaaagttaaaatagtatatgaggtaatttcttatttttttaaccaatctcttctctatttttttttttatataaaaaactaatgtgagtgctcttatataataaaatttgaactcttaattattcctatcaaaattttaaggatgagtggtagggatactaattgaatgaacagaaaaatattatgtgaatgaaagaaaatttttaatttgaatttagttctaattaatttatgagaaatctaacaatagaatttattatctgtaatctcggataaagtgtacgtggtaatctcagaaggaggccacattagattacgcattgttaatatacaccctccgcttctcaaagttaaggaaggcactataataccagatgttacccggaggccctccctactagaaaatacggaaaggactaagggattctctttaataaaactactatcaagagggaatataagtcacaaagtgctcaaggatggtagcgaatcagtttggtctgggaaagccttagccagacgttcctagaactcacttgtgtatgccttatccggagctacacctaacgattgcataccttctgacaccaaatcagatcttgtcccctacgtcaaatcttggtagtgcatgtacgtgctctagagctcctttttgtccaatggttggtctaaataccaattttgcaaggtaaaaccattgtgcgacatgtgtccttagtcccacgatttgtgttgcagtagtcgtgcaccacacaatgagga

SEQ ID NO: 314392 - DNA, 1704 bp, Cannabis indica
gagtgatttttagtgacacgcataatgagactctaaacattcggtgttagtctcttataatgtatgtcactaaaaatatgtagtgtctctaaagaataatactcattactttatcattttttttaaaaaaaaattattgacctatagagtcatgccatgagggactgcaaaagtgtgtcccgacttacgtagcgcgtcactatatcatagtcttatatttaattatttttaaataaatttaatattatgatatagtgacgcgctaaacgagttgggacatgtgtatccagtcatgcctcgcgcgtcactatatgttaataaaaaaatactttttaatttattaatttttttgatttttattatttaagtaaataaatcaaatctgtttttttttaaaaaaataaataaataaataaattaagtgaggtataaaatggacattatgaaaccctaaagcccaaaactcaaccatttccctcatatctctctgcgccctttcaaaaaaaaaaacaatatctctacgctcctccagactgacggcaacccttcactgtccaacctttcaccagaccgacgacaaccctttactgtccaacctttcaccagatcgacgacgaacaccatgaacctcgctgctccctctccaccctattgcccaagttatgggctctctcgtctctcaccctcacaataatcgcatcaccgggatcttcaacagccagcgacagtcattctctcagccacacagcggccgcatcaaaccatctctcgacctctctctctctctttcacagtctcaacaactccttctagtcatctttctcttggtaacactgacctgcaacttttaatctcactattacatatatcaataaatgatgaaattaaccaactctttctcatgttctctctccgcaatgcacgacagtgctatccggtcaccgtaggcaaaaattgaagttgtgggtggtctcgtcgagttctgaaggccaatacccttgagccacgaattcaccaccgttgttccacctccgtgaagaagtgcatgcccgattgcttctgtgaagaagctccttgagcagatctaaaaattctgtgaaatttgttttctgttattttctttttgtatttgtgtactttgttttttctgtatttgtatttgtatttttatagtttataaaaattctgtggaaatttatgtatttctttttctattttgattatgtatctatattaattttttgattgttgttttaattataaatttacaaaatggtttgaggtacctaataaattattaatttttgtgtatgtattttttccaaaaataaaattataaaagttattttgagaaaattatattattttttttagaaaaatatttaatatagtggcactttttgtgtgtcactatacctctaaaaataataataaagaataaaaagaaaggtatagtgacactttttgtgtgtagctgttactttttaagtctgacaaaatttgactttaaatgcctatagtgacacgcagtgagtgactgtaaaagggttaagtgacatgcgtgaagtgtcactaaaaattgtctttccaatcacccacattagtgacgcgcggtgaagtgttactaaataattttagagtgactcaatgtgtatctctaaaactcatttttctagtagtgagaatatgatgttgcataatgtt

SEQ ID NO: 314393 - DNA, 597 bp, Cannabis indica
attacaatatattaatagctacgtgtaatatgccttaaaataaaataaaatgcatagacaaagtcttgtcttgtgacatgttgtgagtgttgtgtttgttgtgagtgtttggtagtctgttggtgtttttccagtgttatggcgtcgagtagtcgaggtaacattgatctgaaagatcaatatgcacagcttcagttagaggaagaggaagaaggtattctgatctctggggataaggaaggggatgagttgatttttgatgacagatggtgtttggtgggaaaattccttacaggccggacaattgattttgatgcaatgagacatatgatggcatctctttggcaacccggtaaaggtgtttatgttaaagagttagatactaattgatacatctttcaattttatcatgaacttgatatacaagttgtgatagatggaagtctgtggacttttaataaaattccattgatctttcatcggttgaaaagtggtgaggatccaagggctgttcacttacataagcttgatatgtgggttcagctacatgatcgataaaattggttttatgatggataaagtgttgggtttatgccc

SEQ ID NO: 314394 - DNA, 1659 bp, Cannabis indica
tacgtaagggtccttattataaggatcatatcacataatcacattgaatgattttattatttttatataaatatttgacctagtatttcatatgctatatgaaaggacgaggtttattggagaaccttgttatagctagcaaataagactacatatataatctatacatattataatgataaattataattaaataagtaaatataaataattggcagttcaaaattactatataaactttagaccaattaagctaagtttcaatgttatatacattttattttaatgattctcctttttttagcacgtattttctttagtatgtgattttctttttcatgcataagcattctttttatatatttgtctaaaaagaaaaaaaaaataagaacatcatatgtataaatatttagtttcattcatactattataaaatgaattacattttgttgttatatattttttttataataattaattaataatttattgaaacaggacatggacgtaatgtggctcagaaacccattcgaaagactaagcaaaaatgaaacagaagatttacaaataagcacagacatgttctttggagatccatggaacaaaaaacatttaataaacacaggattctactacataagatcaaacaacaaaaccatagctttgtttgataagtggtactccatgaaagacaactcaacgggccttaaagaacaagatgtcttattgggcctaatccgtggtggcataattgaccaattgggcctcagagtaaggttcttggatacaaaatactttagtgggttttgccaagacagtaaggattttagggcagtcaccactgtccatgccaattgttgtagaagcatcaccgctaaggtcactgatttaaggactgttttaaaagattggaagaggtataagaagattatgtcatataaacgctttgctaataatgttaatgtcactcagactttcaaatggactggccactgggggtgttggagctcttggaaagttggtaataataagactagtaattaatgtgattaagaaacaagattaattaaagagtttgtaataataagattagtttaaataggttataggtttcattttatgtattgattggttgataatgtcaaaatccaaggctgaaataaaaaggaaatgagaaatgggtgttgtagtttatttgcttgtgtatgatttgcttgttacatgtttgtagtgttttatctctcatgtgacttactctttaagtccatttttcgctttattttttattaagatgaaacaaacttcattgatcaacttggtaggttacaacttgaaaaatcgtatttttgtatatactaatttatttatttaaaaactgcaagtaaaatacgattgtaaagacttgtagtaatagattgaaaatctgttactacagaacacagacttgctataacataacagaaacaaaaataaattgtgtagatcaacttgacacaagagaatcatatgtggtatcaatgttctttcaaacattattagtccacgagatcacgcccagagaataaaattaattagtaaagtattaaagattacaaaagcaattaacttaaacaaaattactccatctaatcatttgttgcaaccctttgtaatccacct

SEQ ID NO: 314395 - DNA, 1852 bp, Cannabis indica
agtacatcttctgatctttccaggaggagttggatcaccgcaacacaaaaactagcgacctaatgaggtagttcaatcaaagaattggttgaagaagctaggatctcatcagagatccactccaaggaagactagttgacatatcggggagggtctatcgacaagctgtacaactagtttcttcaggaacaaggacagaccttcccttacctaaaggaggacaaaccttgccataatgatctaatgccgagaacagttagatcctaccaaccagcggtcttagggactaaccagggatcttaggctcaacaacaacccccatcagatatgctttggtcggccaactacctacttgtgaacatttggccgactaggggaatgatctccctccctgaggcatctgcgagcgagcaacctaaaggccaatctttaactggctaggaccacgaatgagtggaaagaccgaaaacaatttgagaagtgagactgatcacttcaggtattgagatccacctaactctagaaattggtgcgatctacctcctatcaacgcaccagcttcatcagacaagtggggacatgggcggcaaggctttgccaaatatagggctggccagccatggacaactgcctgacacaagcttggtcggccatgaccaacctccttacctgggagtggcctgccaaggcctgaaaccttgcacagggtcggccgacctccaccatacactttcccagactatggtcagctagaccctggcacattcgagtctatagcccatccaaagaaggccagttagtcaagtctctacagcaacggatccttctatgcaagcacagttggaccaaataagggacatgatgaagggcctagctagtccaaaaccttcagaccttgagctagaccagtcaaggggatcaccattcttggcatacataaatgccttgcccttgccattgcccaagttcaagatgtcgatatggaagatgtataccaggcgagaagacccaatggcacacatcaagtacttcaagatgcaactcaatctctagaatattactggtgatgtgcgatgtcgtatattcccgaaaactttgtcagaaatatctctgcaatggtacttcaagcttgccccaggaagatccaattcttggaatgagctttctgagaattctacacatagttctcttcctcaaggcatatgccatcgcagctagaagaccttgtcaaagttaaccattgacaaggagaacctttgaagaattacatctagaggttcatggctgaggccaccaaggtcaaaggccttacagaagagggccgatatacggccatactggggggtaaccatccattgagtgacttctggaaagatatccggaggatctcaactaataacatgaaggagttcatcaacaaagctaacaacttcatcaaactaaaaaagttcttcgacaagcttagacaaggaaagttagcaataggcagtcaaaaagaatcttgcagcttcatgacttgccgggctgtaggcaggtaccagaaactctacccaaacctctagtgtcaagaacactatgagcaagcgcaacaacaacaactctagaagaaatagtagcaaaaaggggaaatttaacacttctcccacgccacaaagtcagaaggacaaggaggagaggtatacatgcttgaccctccttacgaagaaacctgaggccatcttcatggccactcaagcaacaaccctgtacataaagcccctccaattcaaaagggagttgagcaagagagtgttggaaatattttaccaagatctagatttactaacaagtatatttctgttgggttttatgc

SEQ ID NO: 314396 - DNA, 1030 bp, Cannabis indica
attttcaatcctattttttcaaaccttttatattctttttttcttatcattttttttttgttctattagaatcaataacaatttttataaatacttgaagttttttggtatttaataaaatatataactgaatgataatatataaaaatattatttataaattacatttttttcttgctaaaattttaaattagaacagggcctccaaaatgtttaagacggccctaaaagtatgttgtaagtgagggtagccatggtcccccttgatttttcaaacacataaatattatattaagtattcaagttgtataaattatatatgtgtagttgtaatttattggtctcctatctaaataagtaaatgaaatataatacaaaaacttattataagatagtatatatagagtggtgttaatagtgatactataaattaaaataaatatataaacaaaataataaatattatatttatatactaatcacatattatatatattaataattttataaatatatatacatgaaaatgttttataaaagaattcaccttatatgatataatttttagttctcttcatttaaagttttttagaaatagcaataataattaaataattaaattgagttattttatagagttaattctttagatattttttaaaaaaataaatatatcaataaacattatattttttttaatctacaaactatttcaatagtaaatactaataatatgaaaaacaataaagaaaaattacacatataccattaataaagcttacttcttttttgttaataaaaacagttcgctttttcttctcttaaattgaaaaacatttgattatgctatatgaacattttttttttattttatcgtcagatgtatatattttctatctttaaatttatggtaaataccattttggaccttgtattttgcaaaagttacagattggaacctgtgttttgttaaatgacaaaatggaccctgtattttctaaaatagtaaaaataggaccctgagcttaat

SEQ ID NO: 314397 - DNA, 1747 bp, Cannabis indica
tcttcatgggagcaggttttttgtacaagaccataaacggagttcttgcatacatcatctctaggtcgtcatctagcatagagaaggcagtgaacttggaggcattttctctaggggtgtgttcgacatttcctgtgaactttccctttttcccatttccttgcctgccattgttattggaccttttttcgcttagggttgagctgctagggtattgtgtactctaagcaggtgctctttgccgaggacacatgtggttggcccttcttaggttcgatgacgtctactcaccgaatagcctcttcaagtttgataaacccattttctcagtctataaactctgccatagacgccacagggccacatcttttaatgtccttccacagttctccaagtggcttgatgcccctagttaatcttgcaactttcgtagcctctctcattaacctacttatgtaggctctgaggggctctcctggtttttgttttacttcaacgaggtattctaggtgtgatgggagttgacgagaggaagagaactgcccatgaaatcctgaggaaaaagctttccatgaattaaatttccttggtggtagcttgaagtaccactgttgggcagcttctgtaagtgtagcagggaataccctacaccgcacatcaccccgtactccttgtagatcaatttgcttctcaaagtatttaagatgtgcaagggatcttctttccctgtataaatcttccaggtcggcatctttaactttaggggaagctcaaggacgtcgatctctagggtgaagggtgatccgcgtgctcagtctagctcgagattggtgagttttgggttggtcaggccttgaacaatattttttagttgatctaactatgcttgaacatatggatgtatcggttacgcctcttgaccaacctgtgtcacgttaggatctcttggagctgggtcctggatgcagatacctagttgagcggctggttaaacgtattgttcgtccaaacctcttcttttgttctgatcagccctgagctcatgggctgcacccgacctattgaatactgatgaatcaggtggtctcagtgtttgacaagttagcccagtgggttgactagaactatcattttggatgaaatcattaggtataactccacctgaagaacggtcatgtaggatttggctatctactgctcgacccaaaggcgggacctgactggggattgaacagttgttcattatgagtctgggcggcatgcctagtagtcatttcttctgtactgcccagtgagatacttaacatggcatccagttgctggttagcaacttgaaaggccctccctattagtatggttgcctacctagttcggtcatcgatgactacttattgtgccttcaatgttttaatctgcctgtccctccactcaatgaattggcatcgctcctcatcaaatgcaaggtttatggcagcacggagatcctcctgatcatggtgcaaggcattagtatgaccttgcatgagtccaaagcatcatggaggttttgaatcttagtatcatccccctgttggtttttgagacctaaataaaactcatttcaatataattagatttactaattaataaagatcaaatatcacattttatgttgcatggttcacatgatttatttcatgattatgtttaatgtataaattctattaagttcaggacatatgtatttgttcatgattatagtgtcgtc

SEQ ID NO: 314398 - DNA, 1620 bp, Cannabis indica
tagtgtgtaagactgtgaagaatccaacaacttgaaggagtgtcgggcttagttgataatattctgtgacagaaaggaacaaggattagagatctgagtggaaggagtcatatattccactacaatcaatgtaaggtttctcaactttatatgtgtttaaatttcattattttagaaattcatatttagggtgttaataaatatatttgttaataaatctagatcctgataaaatatatttcaacaccagcagcgttgagctgggcgctgtggtgcctggaggctgggtgcatgtggtgcgtggaggcggggtgcaagtggtgcgtggaggctgacgcaggcggtgcgtggaggctacggaggaaagaaaaaggtaatatgatgggaagatgtgatgaggagacaagggaaaaagaagtgggggaccaccccttgttccttttgtctgtcttgagaatcttgtattattcatccatcttacttgttgttcataagaacactcatttattgaacttctacagttagcacttgcccccaatccaaaagagcactttgaagtggtctttatgactacaattgagccattctttaagccctttgcggcgcacctcatctggtgtgacacttgacatgacatactaaaatattgatgagaccattcaatgaggtttgtgggtgttgcttctcatgtgtgcatgtgaccaaccccattcgtcgatctcattttgctccaacggctccatccatctcttcttcttataaataggctctcaccttcacctattctcatctcaaccttacctcccatcacttgttatctcttttagcttcgtactcctcccaaactcttcttacatttcgagccctttgacgcttgctcttttttcgagtttcgacgttgtgagcctcttcttactcacattaatcttgtcaggtaccttcttgccccattaatattacttttttctcttttatatttatacacctactacacttacgggtaccacttaaatttacaataactctcgtttaagtcttgttagtctttggtcctctagtcatcctacccattcatgcaccctctccttttattgtttctggttactaggcgtgtgcctaaggtggcccttttatgagtgagttatagttggaggtgtgttcccacacttggttagcgggtattggtgcccacatttattttcttcgaaaaatacttatgctttctccttgcatctccctttttccttttatagaagaccatataccacctttcatcctcgaggggcttttccctattgagatttcatccgactcagacggggatgtcatagacccttaggcacagtatcaccagctaatggctaagcatttgaaatgtctataggaaatttgtgagttctaggagcatttatctaggcttaaggacgagattgagttcttggacgaccatgggtatgccaacacgaatgcgcgccttttcctcctcagcagctatatggtgacataggagagaagcttgctcacttaaaacacatttcttcgcctgagctgtctcccccttgcctcgccatagagaatagattgaatggcaaccttaataagcacctcgcgacttaccat

SEQ ID NO: 314399 - DNA, 1030 bp, Cannabis indica
ccagttaagcttttattttcttaaaatatttttagacatcgtattatgtttatgttctgtattttcttggtgatctctatatactttaaaatatgtacttttaatgatgatatttgttctaattgatctataaccataataaaatgaatggtgtgttttgatgtatgtatatgtgtttatatttttgagacaaatttatcatatctcattaaattatgataaaagtgtaccttatttttataatttttattatgaaattctcatactattttactattaattttaataatttttattacttacatttatcatcaaattatttattaatagagatatgataaatgagaaattattttccaacccatcaaattattccaaataaaagagaaaaagaccatttcggataggttggaaaataattcttccataaacattaattgtaactagagaaataatagcccacaaaagtgttctctaaaaaaaagcattttgacttttcaaacatggtaaaaagaaatagtaatgattttttgtaaaagagagacatgtaatagtaatggtcgtgtaagtttgatatacagatataataaattcttgaagtgatatgtctccattattgtaatttatggcgctaattgtttactctaaataattgaatattcattgtttgtattttttaatttaaatatatatatattacttaaaaaaattaatatcaatcaatcaatatcaatcaagaaaattttaaatgagttgatgtgactttctatattttatttagtctaatttatttactattttgtaaaaattttatatattttttcttaaaaaaaaattcatatatattaaattctcaaattccattttttatttttataacttctacatataatattcattattattattattattattattattattattattattattaaaattaaatgataatatctcttcattttctataacttacactacataaattatatataatgttgttatagaaataataatataattgttt

SEQ ID NO: 314400 - DNA, 1627 bp, Cannabis indica
tgtaactaccgtagttatatatttgatttaaccattaaaacgtcattctttaaaataaataatatcattttaaaaaaaagtattagtgatttgtcacatcaaaattttataagaacatacaaatctttattaactttttattaatttttttctgtattaactttttaaaaattgtaaacttcttcttagcaatttaattatcaaaagaatacttaatttattatgcatatttattgtgagttaactataatttttttgtgttatttttgtatgtatggttgctgttatctgcatttttggtattggatacgtagactccagatcagcattcaagatccatcagtggggccctcatacaaaatgggccaagtccatctgggtgttaccttccagtaacatattgtgattctgtcctcgcaaagtcttcctccatcaataaatcgagcccagaagacgtgtccggcaccacgagaccggagaggcaaggcaccacgtttctggaagacccttccaatttccttttataatcgtgaacataaataaggaaacttcagttgtcagattgcaatagtgtatcgaatagaggttaaagggagaacttcctacaacaaatattatgtaattaattcagattaattacccacaattaatgtacgcagtgttgaccaagtcgatcctaatccgatctgcctagtaagctgatcgtcttctccgtgagctagacctcatgagaaagcccaaggatattctttactgtaaactccccagtagagagaaaatgaagacctaatgtaattctcaaactactataaatactccattaatttcatggattaagagttgaactctcttgcatattttgctcaggaaaacttgagaacataaattctgagtattttcatatggcatttacaagcataagcttactgaataggattgacttgtggactaaggcttggtaacgccctaaccacgttaaaaactatttatctcatttcatactttctctattgattatttatttttcagttcttattacttttattctgtttccaaaaatctcgataaatattttggtgcttttattgagagctgaagaaagcaatgagaccatttgaagattaagtccgagtaataatggccctctcccgaaccaaatctggccttcatttcactagtcctaatactagagctggagattctagtgaacctcaggaagtaactagtcgccacaaaagccatcaacacgaggaccagaatctagatgctctcatcgtagaggatgcaaatatggagaaagtagttctgaggatgttgaggttaataccaacaacacatcggaggatatgaacacagatgaacctcaagacaaagttggtaaggacaacgctgaggagaagagccagcctgataagtcaaaccccatggtcatcatggcgtaacaactttaattggctgaaagtaggttaactcggcaggatgacttcaacgagctgctactcgacaagatgaccaagatggaggctgtgatgaccgccctgacaaaattatcccctgatgtactagatcctccaacaacagagtgttggaatatattttaccaggacctagatttactaataagtat

SEQ ID NO: 314401 - DNA, 756 bp, Cannabis indica
atacttgtgagtagatctaagttcctggtaaaataacttccaacaaggatttctacaataaaaatactaatgcaaaataaaaagatatatctaattctcacctctggttcaccgtgaacgagaagaaacgaggaagagcaagagagagcgaggtggagttgggtggcagtggtggtgcgattgggaccaagaatgagaagagacgaggaggagggagaaagagcgaggtggagtaagagtggggtggggcaagagagagctggagcaagagatggagacttggtggaggcggtggcgatggttgtgggtgttgctcaccgttcaaacgggagagtcgatagaggagtggagagagagagagggatgtaagatataaaaaatgagatctaaaataattgggcttttatatatttaaatgggaatcctcgacagtgttaaaccatcgagtatactatttttgactatattaaacgtcgcagattccatttacaccttattttttaattttggtctcggtaaccattttaaaccgtcaacaatggtaaacaattgttaaaaactgttaggaatactccactatagctagcgattttaaatagtcaaaattttttattagtgatggtccataaaaaaattgatttggggaccgacaaaaataatactttttgttaggggtgttcacggtgcaggtggtgcggtttttaaccatttttcaaaccaacccgcacatgcggtttttctaattttccaaaccgc

SEQ ID NO: 314402 - DNA, 3912 bp, Cannabis indica
ttgctgttaaggttgtatttgattcctttagagagaattggaaattgtaatatgaacctttgagaattagtggatgaatttaccctggttcggggaacccaagcactagtcggctgagatgtgttctcagtgcagatgaagcttgtaaaattctggtgttgaatctttgattttgttctttttatattcaagcttaaatcaagataaaatcaatctaaatatgaaaaagataggttagacaagaacttgggcttacacctagtctaggtccaagttcgtgttttagttcaggttcgggtctcgagtcccggtctaagtccaggtcccgattctgttttgggtttgagttacatcccagtcccactgtgggtctgaccgtaactttttgttcttggtctgggtatgggtctgggtcccagtctgggtctaggtcccggtcttagtttaggtcctaagtcacaggtcccagtccgagtctaagtcatggtatgcattttggtctgagcttgggtttaggtttgagtcctgttacggtcctaggtctgggttctagttcctgcatagttcgattcaaattccgagttcaggatcgggttcggatcccagtctcgggccgggtctgggtgtaggtacaatctcgggtccaggtcctagatccaaacactgactatgggtcaggttgaagcctcaggtctagattcggatctcggtcttgttccagtttgggtctcgggtcttgggctgggtcctaagtttaggtttgggttcgggttcaggccgtagtcaggtccagggttctgggtctagggtcgagtcccatatctcgtgtgtgggattgagttttgggtctcggtcctagttctggggcacagttttgggtccaagtctcccatctatgtccggatccttagtccaggtttgggtttggggcccaggtcccccatctaggtttggatcctcggtccaggtctcggtccaagttcagatttgggtttggatcctgagtttaggtccagtagaggttaaggtttgattctgagttcgagtcttggtctgagtccaagtccatgtttgggtccaattcggggtcccgacatgggtcccaatcacggtctaggtcttggaccaggttctaatctgtgtctaggtccgagtttaggccatgagtctaggtctaggttcgggtctggatctgagtctagattgaggtcctaggttatgatctcgatatggatatgggccttggcctgtgtctaggttagtgtttagggtttagggtttagggttttggatttagtgtttagggatttagggtttagggtttagggcttagggtgtaggggtaagtgtaaagagtttaggatttagggtttaaggtttaatggtccgcttctagttccagttccaatttcgggtcacagggtattatttaaggtttgagtcctagtctgggtctaggtccgtgttttggtttaggtctgagtctttgtcccaaatcaaaacactaaccactggtcaagtctagttcgagttttggtactggtttgggtgttggtccaggtctgggtccgagtccaggtccaatttccaaatctacacactgactatgggtcgggtccaagcctctggtcttgggttctaggtcgcgagtccaaatccagatcctggtccaattctagctcatgtcttgggtcctcattctggtctcaattcgaggtttgggtctaggtttcggtctgtgctcttgagtcatgggtctgggtccctgattcagctcagggtcctaagtccttgtttgggttagggtcccagtgtgagtacaggtcccggtccctgtttggtattggtctttgtctcgagtcttggcatggtgtgggtctgggtcatggttcgtttctcaagtcccaagttcgagtatcaggtaccgggacacggtccaagtctaggttcttgtcccagtccaagttcaggtcttggtccttgtccgagtctgggtcctagtcctgatctcggtcttgttttgagttgcgtgtttgagttcgagttctggtacgagtctgggtctgggtccgggtctaggtttgtgtctgggtctgggtttgggtttcagttcgagtttgggtctgggtctgggtccaggttctagtacggttctgggttttggtccaggtctcgggtcacaggtcctgggttccgggtattgggtcgcaggtcctggagcaagtctgggttcgggttcgggtttgggaccggtatcaatcttggtcttggtctgggtccgtgttcggttccgtgtcgaaatcctgttttggatccaagtccaattcgtgttctaggatcctgattccagttcttcttctgattttgggtctctggtcaaagtctgggtttagctactggtcttgaaatggttccaagttcgggtcttggtatgattcaaagatctagacactgactacaggttgggtccaagtaacgggtcgttggtcaagattcgaatcccaatcatgggtcctggtctcattctgattcggatccagggtctaggtctgtgcctatgtccgagtctaggtttgggaccgagaccgaggtcgggtcttgggtcccagtcgcagtcctaggtccttattctggttctaatttttagtttgggtccccaatctaggattttgtctttggtttggtctgagtctccaatctcattccgggtcctgggtccaggtttgggtccaagtttgtgtctgggtttgtatcttgagtcccgatttgagatttaattcaggtccgtgtttcggcttgggtctaggtctgggtcagattccaattctcggactcagacccaggtttggggtacggatctgggtctaggtcagggtctgggtccgagtctaggtctgggttttagtcaaggtattggtcccagatcaaaacactaactatgggtcaggtctaagccctgagtccaaatatggttcacagtctcgggtcccagtctagttccactttgggtcccaggtcccggtcttagttctaggtcaatgtccgggtccggggtcaggtcttgggtctcggacctaattctgatacccgtgttcgatctgggtctgggttctgaggcccatgtccatgtccaccatcttggtatgggtcctaggtcccggtctgggtccatgtttgggtttggatcctaatcgcagttttgattttaatttagtttcagggttcgggtctgtgtctgggtctgggtccgggtctgagacgtagtttgagtttgggttcgggtctgcatccaggtccggatcccagtataggtgtgggtttaggtccaggtccgagttcgggtcccgggtgcgggtccaggtctcggtgtgggtcaggttctcgctctatatataggtcctgagttttaatcccgatctgggtttgggtctgggtttaagtccaggtttgtattcggatccttatcttggtcaaactttgggtttaggatcgagtcccatgtctaggtctgggtccgggtctcggtctcggtctaggtacacgaccgtgtctgggcccgagatccggtcaagctttggctttggggctaggtctgagttttgttctaggtttgggtctgggtcctagcacgttcctagtcttgttcgagggtcctagtctagtagttcttgtgtaggttccaattttgggtcccggctctgggtcagggtccgggttttggtccttgtccaggttcaggtcctggtctaagtcccagatttgaatccttgtcacgtgtcccggtctggttcttgttcaagtcttcggtcccaggtctgagtttaggtttaggaccaagactgggtgcggttctaggtcccggcctcagttctgtgtctttagtctagttccatgtttgggtctgagttcggg

SEQ ID NO: 314403 - DNA, 1092 bp, Cannabis indica
aactaaaagttcccctatcgatagattaataccctaaatatcgctaaaaaaaagaaaaaactagggttccctaaactgccccaactggtagaccagctctccaactagaagaccggttctgtgggatttcttggggaccaactggaattccgattcctataggtcccactgaaccggtcgaccagtttagtgcaggaaacatcaaaaacaccacaaacacctcgattcgatcccaaatgctaccaaaccttccaaagtacctatttacactataataagaagaattcatgcaataaaactaaccaataacctttgtagtaaaattcaccattagagagcaaagcttgagttcataaactcaatccttgctcaatcaccacaacaaccagcaaacccaacttaaaagagcttaaacaacttcaacataacaatagaacacaaaatcaaataccattaacaaatacagaaccttaaccctaagtatcatgcaaactcaagcttaaaactatgaaattttaaacagaataaggaggaaacttggttaccttgaattagcttaagaaaccctagtaaaatcaactagaaaacctagatagcagatgaaatatccacacttctagctgattgctgtggaggtcgagagaaagagaaaaaaggtttggaaagagaagcttttgtgtttctttgatataaatattttattttttctttgagatatatccacttatccaataatactaacttaaattctgaatacaaacataattaaagtagtaagacaattaatccaaatggcaaaaaaagaccattatgctcttgcctaagccaaaaggcatccttatcacctatgggtattttggtcaaaactaatacctcgaatagtcccgacattcccaatatctatctatatcgccccgttataacaaaaaatactaactcataagaaaatatgattctatcagccaaacgtcgcattctaatattttcggacataaaatatgaaaaatataaaattattgagttttgtgccctaaataaaactaatttcaatataatcagatttactaattaataaagatcagaaactacatt

SEQ ID NO: 314404 - DNA, 1154 bp, Cannabis indica
aaaaaattgaaaagtgaaaacagttttatagaacatgttttttaaaaatattttcacttttctaattttaaaaatagaatattgattaaaaaagtgttaccaaacgccacctttattttttaggcttaaaaaattactccataataaaatttagatttctaattaatttcttttcaaaaaaaataataataatttaaataattaaatattaatatttttaatcagatttattcaaataccattcttttcatttttcctttctttctatctctttctcttctcttcctcgcatcactccgaccctccaaacctacctagtcaggcatcaccaccaccaaacctctttatctaccccaaactcaacccaacaatcttcaaatctcacctactcaaatctttctttctttctcatcttcggcttctctcaaccactagtgccaccatcatcacctaaccctagcccaaccagaagctcattgaacgacgccactacaccacgaaccaagactgagacagaccaccatgaaccgtgtcccctatactcattactcctcccatttaagttgagtttgtgaattttttgagataagttgaatttatggagatgtttaacttacacatatacaatgagttttacattatttaattgaaagaaaaataacaagtagcttttactttttcaaattagttaataattaataaatatatcaatatttttgtcaatatattatttattatattctattttaatatttattgcataaataaacagaatatcttaatacaattcctattactattcttattacattttattactattctcattaccatttttcttaccctaacatcacctaaatagaacaaaaatcaatcaatttttattttataactttgtttagggtaattgcattttaatatattgtaatattatttgaaatagattaatttttacaccattttaatagaataattattttattttgaaataaaagaaaatgtcattttaaattttatacattttcttaggaaaatttataaaaatactgacttttggcccaatctttacaaaaatactaccacacggcaaaaataacttttatattgtcttcgccaatattttttttttcttttataatgtaaacaaccccccc

SEQ ID NO: 314405 - DNA, 1535 bp, Cannabis indica
acagtttgggcttttttagagatcatacggccaacaatttacaatttgtactattatttattttaggataattacataatgttgtgtttaatttttttactatttctatgtttacaagttaatttttttttactatttttaatggttagtttaataaaataagtaacaaaaataaataaaaaataatatactaaataacaaaaaaaaaacttattatcctttttacatttttacatttttgatggaattattatgaaaaaagattatataagtgaaatggaatatgtcattaatttccaattcagcttgttcaaacttgttgtcgtttccaagaaactgttgtcgttttccacataataagatataaagaaagaaaaaaaaacaaaaaacgacattgaagaacaactagttactcttcattcataattatgcagaatataatacattatcaattcattgtcgtttttctgtattttatccaattcattgtcgttttcaaatttcattgtagtatgaagaaatattttgcccaatttcattgtcgtttgaccaaaaattatgcagaattttataaatggcagatgaactatttttatccaaattcaacttgttcaaattattgtcgttttccaaatataataaaagattaaaacaataaaacgacaataatttaattaaataaaaatgattcgtcaaccatatattctgcatttaattttgtatttcaattcgaaagttggatgaaatgttcgattccataatctttaaattgaaaaacgagtaaacgacataaatatataaaaacgacaataatttaagaacgacattttgctaataaataaacaggagaattgtactaccgtgcctaatttttgtttttattttttaaaacattataaatgtataataaccaaaacagtaaagatttaaattggttcaaccacaaactacttactctattctattttatccaaatatacattttctattctatttatttctgttaataagtaattttcctacgtaccctttagcaaactttattttatatatatgtatataaataagtggattcgattggaaaacataacataatcattttctttaatcatattctctaattataatgctccttcaaattaggagagaaaacaatcattaaagggaaaaataggtaagtagtagatgagtcaaataatatatttaaaacataataattaacaaaagtcttctaagaatccgaagctatatataataattattaattttgatttgattattctatataactatcaaataataattttttagaatatttcataaaataataatttattccaccaatatagaaataaaaaatgtgcccatttaaacgtatagttctacttaattaattatgtcaattatttttttcctaatatgtactttgtcttttatttattttctattctctttcttcttttcaagactaataaacataattttaaatcttatttttaatgatagtgctccttcaaattaggagaaaaacccat

SEQ ID NO: 314406 - DNA, 1575 bp, Cannabis indica
tttttgcaaataatttatgtattgaatgtctgtaaaatatctttatttttcacaaaacaaaacatgctttctcccattacaatccccccatacttattgtatagttagaaacaatggtagacaattcattttttagctcaaggtatgcgtaaaaataaagaataacaagtaaaagctcaaaaagtaaactaggataaaaactaaaaatggtttcttgaaaggaaaagacatttaaaaaaaattcctaaatcatttttaaaagcacacatcatcaaagatatctcctcaaaagtcaattaatgcaagttctatcaaatccaacttaccaatcctctaaccgatcaagcatgtataacaaaatcctactagtaaaatttaccaattgtactcaacttttacaaaaaaccctaaatttaagcgcaaaaaaaatcaaatcaaacacacagtatttataagtttttttacaataaatagaagcaaatggtatttcttcaatcactaaggcttacttactcaagaaagatactaacatataactaataaagaaaaaaaaataaacaagaaaaagtttagttcaccataactcccctaaacttaacctttactcgccctcgactaaatattggcactaaaataaagacagacaaacacaaagtaagccttactttatttcacaccataccacagctactcacaagattcaacacttataaaaatagatttttaatttgattgctccaattactcaactttaacattcaaccttgaaatggaaaatataatttgcaaatgacaaaaactattcgaacataatatacattcgtgaaatcaatccatcatctccacaatacaattatcaataagcttacaatatttggccttatccacaaatatcaaaaacatttgctttataatgaaaagattttaattgggttataacgttcggcctaagtaagagtagatgaaaaatattatttaggctcacctatacaataagtttatccattcaaatcaccttacaatttttacaaataatctcaatatcacttttgctaaatacatgagcgaactttctgttatataactttgtaacactttttttaattattacacaacattgtcaaaataattcttttattttatttttcctttttttcaagttgttgcaaataaattctgtatttaatgtccctcaataatatctttacttttctcaaaataaaatataattttccccattactatccctccaaatttatgatccacttatggtatagttagggataaaggtagacaataatagatttactttttggaaaatttacatctaagtacatcaattgtaattaaattttaaaaatatggtgggtccattataattctaaactataccatttttaaattaattgattttcattttgatgacgtcagcacatcatatccatccttccacgacatcaaccaacctccaaaaaaattaagctccaagaatttcgttaacttttttcaaatttgtagttagttatttttgtgtgtgtaatgtttataatcatatttttttttgtttaaaatagg

SEQ ID NO: 314407 - DNA, 521 bp, Cannabis indica
tttttagttttgtttctttgattattaataaataacagtttagacaactatatgagtgtagatatgatattaatttcttttgtattgttattttctttttttatatatcacactaaatttagcttcaagaagcgaatctatatcacactatgtcttagtttaaatatatataattgatgaatgtataacgagaaatgctaagggccggacaccttaagtgcgaagcactacaagatgtgacatatcgctattcgtgtattttaatatcaggtctcacaaattaaaatttaataagttatacgagaaatcactaactaattataagatatcacactggtgtggtgttaagtattttaaggtataagtaacaatgttcaaataagatatataattaaagcacgtcctcatgactactaatatatatatatatatggaatactttttaatgcatattactattgatggttactaaataatttaactataaatattgattttaaaaatattaaactattaaattt

SEQ ID NO: 314408 - DNA, 1716 bp, Cannabis indica
taagggggttttgccgcaaatttttaattatattttaatatgcctttcggccaaattacatgagactttttctttattgtagttgttcaacatcgcttcttaataacgttacgttatattttttatattgaaaaattttctaaaattattgtgaaataccttacaaaatttatatattaaaaagattagggatgactatatagtattgttggatttggaaattttaatatttctaaagaaattaaatggaattgtaactaattttttcatggaaaaatatttcccaatttgaataattacagcaaataaattgtttttttttttttttgcctagaaatattttattgaagaagctagaaacaataaatttgaagagtatttgtacacatttattatacaataatatgtaataaatatagttaaatacatttttaagtgggactatattattttttaatatggttgagattaattatatatcattatatgaaatatgtttaatttgagtgtgtttcaattattttccatcaattgtgtgatgatttcattaaaataatttggtctaaacatctcgtgaaataattttaataaagaaaataattttgaaatagctactaaatagatcagggtatggatctcgtgaattatcttgaataaagaataattaaaaaaaaataataaggttgaaatttttggttctcgaagaatctcatcaacttaggtttttttttatttatttttattttttttatttttatggctacaaataataataataataataatttaataaaaggatttaagaatctttgaaccaattttctggcaaagcaagaattgccaactaagtttgaattgtaagatttggaagctaataataataatgaaaaggaaatgctctcgttttcatattattatgttaagacaaaaatagaaagagatatatcttccttgcaaaataaacaaataaatagatagataaaatttcttctgtcttgtatggttgcctatgaactacccattaattttgccaacttttaactgttattatttatataagctttaattttttattttttttttatttttagtatttggacaaaatatgcatcaaaataatatacccggtaacactttatattatttttaggaaatttacaatgcacttcaaaaatatatatttttttttttatattgttgcagacttttttttttcattcacatttttatagatattttttttctttttttatagattttcacttttttttttaggaaaatattatttttctgtaatagcaacgtcaaaataataatttttgaaaacaacaaaaaaataatacaatgtatttttgtaaaaaaaatataataaaattcataaaaatgtaaaaaaaaatagagtagatacatacaaatgtaaaaattttgctatttttgtatatttatgaaataattctctattatttttcaaccaatcatttttgctatttttgtaacaattttaagtatggttggagtttatgctcataaatagataaatatttataattaatgatcggaaatttatgagccaaaaatatgtcatttaaaaaataagttgagcagaagtgatttttaagagaagaaaaaaatataccaatgcacttgcatatttcatggcccaaaaagaaaaatttggacatttggaatgcggatatgtaacatttcaaaaattat

SEQ ID NO: 314409 - DNA, 1314 bp, Cannabis indica
tagttagggtgttacacattaatacaagtgactggtggactaaggtgttaattaacacctgaatcacgttaaaagattcctttttatgcatagttaatttttgctaaaacaagattaaatagttgtcaaaaaagtggtcaacattttggtgctttcattgactgtagaaagctttcacctgaaattcttttgtcacaatggtgatgaccagaaacaaccaacaacctcctctgccacctaatcctcaagagtgtctagaagaagaagtaacctcccgagttggagaagaggaaagtgacaccaacgatcgagattactaacgagatggtcaccctaaggactctaaggaggataagtatgctaaacctgtctcattacgatggcatgccacaaaacacaatgttgagctgggaaagcaaagcaaaaagagatgaacagaaggatgtaggaagtcttaggtgccatgaaacaagccatagccaccgcgggcctcgatgtaaattctagtgccataccatatatacctggaaatgaagaagtaggtccttcccaacctcaaattaactagaaatagaaggaacggctcctataaggtacccttcaatgacaaaccctattggaatacctaggggtagagtaaacagcgacgaccctagaagggtgcgttctaacctaacacaagggaaaagtccacaggtgttttgacctaattgattttattctctgaaagtacgaatcaatcccacgaaagtacagattacttcttgtcatggaagattgtagatatcatcaatcactgctaaaattgccaactcacatttcctggctggtgcacgcaagttgatcatatgatcgagctggtcggatgtcccttgatgactctgtccggacatttttctatgtatgtataactttgaccatcttatcaatccttgtgggctgctaggagtgaaaccatttgcccaagttgaagaatgcaagacatgtataggataacattttccctcaagtgatacaaaccacactaacaattgtgatgaaacccgacaccaaacatggcagcctctaagaattctcgaaatttggatgtaaaaccgcgacccaatgcttagttaagcatgaaccttggtatgaaggaagacgccacaaatggtggtggaagttcgcttgataagtcggttgaacgccacaaggaatactccatgatatgtttgaatagttctcaaactcaagaagaaaacatctcaaaattttattaaaaaataatctaattttccaaagtgtttacaaggcattatatagccaacttacaac

SEQ ID NO: 314410 - DNA, 1942 bp, Cannabis indica
ggttttttggttgattgtgttgttcttggctcccttttttttttttttctttctgcttgtttttttccagctcctgctgtttctccgccctcgctttaaaaatttcatcatgcctacaagttgctttgttgtggctgtacctagaacaagctgcacatttggctaggagccgctcatattccacattctgatcttgcaattgtccaaattcatttaagtaaggaatgaaccggggggttcatttgtgacttccatttccaccagaattcttgcgtattgtaaccgagacctatctttggtgtgttgatccaccattatagatttcccaattgtgctaacaagagcacttagaattttggtaccccgatattggaaccctaagtcatgtaatctaatccataaaggaactgtacgcaccagattcactgtatttaggttagcagaccagggtcgaacaatgactgcctttcgatcgaattgaaccactcccgcctccacaacttgatctctcgttgcctcatcgttagaccgcaccatgattagacccatagtcaattttgagacctaaacaataccatgatgaccccaaaccctttttacaaatccttcaaaaatggtaattggtggattagctcccaatacatttcaaataactcctgatttccagcattgttcttcttctcgaacttcatccagatccacctgtgctattttcaatccatccctgatcattggctatgtgaaaagaagcttttgatcacgattcagagttttctccttcaaaaaattctcctagaatttcggaggcgattttggtgattgcgggtgttctcccatcttcgaaagctcttcatcaacctcttcaccccaactttgggatcgactcttgggtgtatgatttggttcctctgtttcaattaggtcatgagcattaaccatctcatctatcaactgcaggccctccgtcgagtgtgaatcatcgtccaccgccacctccgatgtggttccaatgaatacttcttctacagggatgcgcgtgactggtttctgacctaccttcttcttcctcgctatggagggagagagcagagcagagggaaatttttttgttacataaatatattcttattataatactttattaatagagttatattgatgtcttatggaaaatcatatttattatagtgatcattggagaaatagtaaaaaaaaattcctggatatcagaacaatacatataccaagagacattgtaatggacacactatatgattatggagtgtcaatgggatattaaaaggcttggagagcaagagaaaaacattagaattggcgagagggtgacaagatgattcttatcaacaaccaccaatgtacctacacatgctgaaagtatcaaatccaggaacaatcacacacttagaaacagatacagtaaattgtttcaaatacttgtttctagcattcaaaaattcaataagagggtggaaacattgtacaccagtcattgtcacagatggaaccttcttgaaaacatcatttggcgggacgttattttcagcttctacaatggatgtaaacaacaatattttcatgttggcattcagaaaataagactcagaaaatgatgactcttgggattggtttttcaacaagataagagaaatatttagtgatagagaagatacaacatctgaaactggttttatgttcatttatatatatatctaaataatatatattttttgaatagtaacaagttaagtaaatttcaaattcacataaaaagtcattaataatcacttttaatcatgttgaacaaactagttactaacataagacaaatatatatatgtaatgaggtttcggggagatttaacacaccaaagcatagttttattctttggttggctgttcaaaatcgtctcaaaaccaagga

SEQ ID NO: 314411 - DNA, 2576 bp, Cannabis indica
aaaaaaaaaacaaaaaaaaaacgggtcgggcctaacccggcccgattatctcgggccgcgcttgacccgctaggccaaaagaaggagtcaggctgggccgggccgggccaaagtgatgtccggccgggtcgggtttgtggcgggtcgggccgggcccgaagcgattgacatccctaggtcgaacggatgctccatcacttgcatgaaggttccacaactcaccaaaatgcccttggctcacccaatggcccatgggattgcacaacctctatggggtcgcacaatagctagggagtcgcgcaatagcctgtcggctcgcatgggaactatcagctcgcataccaagctatcacaatttaacagtcttagtatgttggccataaatttctcgatatacatttgaattggacaattaaagatgctttggaaagataagaaagagatctttgaatcttatgtttgtggcaagatccaattcttaacatatcactatgaaaatcctctagcaattgtaaccagtaagttaatctcacaaactctactaatgagttgttacggggttgacctccaagttgcgtggatatacgtcgagacttgtaagcatgtatttccaagtttaacaatctttaggccatatgaattgactcagtcattcttggactgactcttgcagttgatgtctcttgactgctggggcagattgttgactaatctcaaaaatcaaatctgtcgatttttggggttaacattgatgttgatattgtttgaattctaaatggttgaaggtttttgggttacagtacattagatcgtgcagcgatgatccaatcgcctaaaccgcgagaaggggctcggggtaggtggtggtgaagagcatcctccaccccctcaggactgggaacaactgtttgctggcatgcaagagacgattaggtagcaaggggagtagattcgagacctgagagagcaataggcttgtcctgcacctattttggcaccttaggtagtgccacaaaatatgggggatcgtatggaaccaatttatcagcagttcaggaaacagaaccgacatgtgtttgagggtggcccatacgcactgaaagaagaacagtggatgagtatgattacttccatctttgactttatgcgggtggaagataatgaccaggtatgatgtgctatatatatgttacgggatgttgctcgtatatggtgggagattgtttcccagggtaataatgagaatactatgacttgggatgcatttaggtactgttttatgagaaatactacaatgaatccattcgtgctgctcaggctaaagagtttgcgtgattagttcagggtagcatgactttgactaaatatgcaaccaagtttgacaggctggccaagtttgcttctgatgaagtggccagtgatgctgtaagaaaggttaagtttatcaaaggccttgaagaacatatttctagagattttattatggaagccaaacaatcaagggtcgtgaagacttatcctaagattgtagacttagctctcactgctggaggggctgaaagcctgattcgtaaaaagtgtactcagaggaaggacatgtagaagacctcgtgtggtctggagtgagtaaaagctttagctttaatgatcgaaataggaacccagatggaccaccggttgtgggtccaaatagaaagtttcaaggtaactagggtttccgtcgaggcaaaaaaaaaggtttggcagccttattctgaatgcccaaaatgtaagagacaccatgtgggtgaatgtcggtctggagtttgctaccaatgtggagtagcaagccatttcaagaacaagtgcccgcagctacagaagctcgaggccaagaaagagagtcctatggttcttactaggttgtttgctttgacccaagcagatgcggaggctggcccttacactattacaggttagataactatcggttgtattatgtttactattttgattaatctggtgccacacattcatatatttctagtaaaatcattgacaaattgagtagaccatgtgatatcatgtctagtggatttggtacgttgttacctactggagaagtggtaatctccaagaggtgggtaaggtctctcccagtgttagtagaagggagagagtggtcagtgcatctgattgaatcagacttagaatattttgatgcaatccttggaatggtgacttctggaccagagggtgagaccccatttgtttttatgggaaaggtttagggatcttggactccaatgatatttgcacttaggaccagagaattattgcaagaaggatgtatggggtaactggctagtgtgttggataccacgaaagatatacctaagggaccgaaaaatgttcgagtagtatgtgaatttcttgatgtattcctggaagagttatcgggattacaaccaaggagagagattaactttaagattgaattagtattaggggttgagccaatttctaaggccccatacagaatggcaccaacagaattgaaggaattgaaaagtccaattacagaacctacttgatct

SEQ ID NO: 314412 - DNA, 842 bp, Cannabis indica
gtttgccaattcctggccttatttttcgtgcgtagcactgtggaataaccccatttgtgttatgtggaggttgttccatgttgattttctcttctgcatgagaacttgtgagttgtcccagtcttggaggaatggcttgatcaacagaatttgcaagattggctagattgacagtgttatctgaattaataggaccttctatggtgggaggaacacaaacattggaatctaccatcataggatcctgaggaggatttgaaggggtcgttcttctggctagaaccatggtgattgatcagaacgagatgaaggaattaaagaaggctctcaatgaaagcgccaaaatattaactcaaaatttggtcaattgacaacgaagcctttttcatgactggcaatcaccatgggtaaataatagtaacaaatggtaaaattgacacatcgatttatagaggttcggccaccttgattagtgagtaatgacctactccacttttagttgtattcactattgagataatactatattacaggttaaaaccttgtgatttctagctatgactctcttcaatattacaattgtgagaacaatgtgatacagataaagaactagtgagttgttgaaatatattttaccaggatctaaaattaacaacaagtatgtttttaacatcctaaacatgaacttctaaaacgatataaaataaacacataaagggtatgagaaaccttacagttgttgcagcggaattaaatgactccttccgctcagatctctgacccttgtatcctttctgtagcagagtatcatcaagatctgagcccgattctccttctcttga

SEQ ID NO: 314413 - DNA, 788 bp, Cannabis indica
agaatcccacctaaagtcaaacaattcctttggaaagtgagtcatgagtggctccaacagaaattcaacatccctatttaaaacatatctagagttaattgcttttactgctgcattgaggcaatcggactgaatataaaaacctctcagattacgattaccagcaatgaggatggcctccttgattgctttgagttctgctacaaacgggctgtagggaaggtgccagtattgttggaaggagatgacacagttgccgttgtgatcgcgaagcacccctcccgcactgctactcttgttggtggtatcgatcgccgcatccacattaaagagtaaagagccacaaactgggggagtccaccgcttcctctcctgggcttgggtgtttgccttgggacttcttcttccatggttgctttggtattcttcaagaattcttgtagctaccgcaataacatcctcactcttgggggagaaattattgtgcagcgacaagtttctgctataccacaattgccatgaaatcatcacaaagagatcaaagttcgccccggacagcttgtattttagaacccataaaaaattttgaatatccggattgatttcattttttatctctttgtacagcccacaacgtttccaggtttccttggctatagggcattcccaaagggcatgaatgactgtttcttcttgtctcgcacctttgcaccacccacaatgttatcaacctccattttcctgcaaaacagaacactattagtctggagccactaatgactcacttt

SEQ ID NO: 314414 - DNA, 1440 bp, Cannabis indica
agttcatgtttaggatgttaaaacatacttgttagtaaatctagatcttggtaaaataattccaacactgagataacccataccctcaacttcaatccaaacttctggcccgtacaacaaaaaaaaaggttattggacaaagaacccgcccaagcggtcaaagatgaagtcgagaagctacgggcccatgacttcataaacgaagcattctatccactttggtatccaactctgtgttggttcccacaccaaacaaaaagtggagagtgtgtattaacttcaccaacctgaacaaagcatgtccaaaggactgcttcccacttccaagaatttacaacctagtggacgccacaactggccatgaagtcctaagcttcatggatgcatgctcaggttacaaccagattaagatgtatccgacagatcaagagcacacaagcttcatgacagacttaggcttatactacgacaaagtcatgccctttgggctaaaaatcataggggctacctaccagaggcttgtgaataaaatgtttaaggatctcattggcccgaatatggaggtgtatgtggacgacatactagttaagtccaaaaaggctgggggcatgtggaggatctaacgaatgctatcagatcctctgaaagtacatcatgaatcttagccccctcaaatgttctttcgcagtaggctcaggcaaattccatggctgcatagttaatgccacgggaatagatgcaaacccaaataagatccaagcccttttggacaagaaattgccaaaccatcaaggaagtacaaagcttgacaggacgcattgttgcattaagcagatttgtgtccatgtctatagacaagtgtgtacccttctttaacattctcagaggcaacaaaaaattcgagtggacaaaggaatgtgaaaaagcattccaagagctaaaacaataattggctcaaccacatgtattgtcaaaacccctagacaatcaagagcttagcgtgtacctagttgtcactaaacatgctgtgagtgcagtcctaacaagagaagaagacagtgtacaacaccctatatactacatcagtaagagactaatcgatgctgaaagttgttacccagtcatggagaagctgacctacaacttgtgcttggaatccagaaaggtgaggtcgtacttccaagcacactcaataaaggtgtacaccgatcaaccattgcagcaggttttacagaaacatgaagcatctgactgactactcaagtgggccactaaaattggccaattagatatcacatatcaaccaataatggcaataaaggctcaagcccttacataattcatggccgagtgtacaaacacatctcttgaaatctcttaagattcaagagaaaagcaagagctagagaagaaactgttggaagttattttaccaggatc

SEQ ID NO: 314415 - DNA, 980 bp, Cannabis indica
ataaaaagtcacccatgtctcataaactaaaaattctgttatatatgcatactttatatagaatagatattagttagttcacaattttattatttttctaatataataattataataaaaacatacaataataataataataataataatataatttttttttttaaaacaaacctcttatatgaaaaagccccctaaataatattattaataaattaatattttaatttataattatatataaatatgccttgagtatttaatatgaataaaaaatatataggcatcaaataaatttaaattaatgtatgtatataccaaaaaaatcatataggtggtgatatattttagatttacttgattttcagtatttattattttagttctagagttggaagaattctaaaagtttattaaaaatgataatgagtttattgccaacaaatacttaattaaaaaaaagctaattaagatttttgtcttttgaactttaacatgtactaaatcatacccctgtatttttaaggtcgttaaaaataccccatgaactattaaaaaaagttcttaaatccaacaatcccaatagttcaataggcatttttaacgaccttaaaagtttcggaagcaaaaatcctaattaaccataaaaaaaatctggtacatgttaataatttattggcgacttaatcgttttgattaaaaaaaattaaataaagacttacatatgtttatgtatatttttcattatggttccagtagaagactttttcagtatgaatattaaattccatttcattaccaatcatagattttatatgattggatcttgaagaatattattaatagcattagcacaagtttataatattccacaacattttaaaaaaatcatactaaaaactcagcagttaactgttcttcttaggtacacatatgcataaacatatgacatttgtgtttctttcttttttttttttgtt

SEQ ID NO: 314416 - DNA, 919 bp, Cannabis indica
gttataatttctcaattcttgagattttattaaactgtaagtgtattattcttgctatgtgtgaaatttacaattttcatgacttttactcggtaatgatggaaaatgcgatggatgaccattagagtgacatgggtgagtttagaaccttttacttagagggacaaatatatgtgatatttgaaatatcgggtttaggtgaggttatgatttttgaccattttccctctagacctattgactatttaaggtggaaataaaggggtaattgtgaaggtaattgtggaatttttgcccttggttattaataaacttatattctgaatagttttattattattattaagataaggttaggttttaataattaaagtcctttgaagaaaaaaataagaaaaatcaattttatctctctctcttttcgaacccaaaggaatctagggttccacttctaatttttcatctagtttagctagaattcaaggagtaattctatagaaattgggaggaattgacaaggtaaaccctagaaatcctaatcttcgagattttgaagctcttagttaggttatagcatgctatttcaagaatttggatcctgtatgaactgggcttgtttgttttgagtttttgcgtttgtttgttgctgctactgcttgaaaataattcattggtgttattacaaatattttggaaagcttatttgaaggtgggataaatttgagtgagattcaaagttgttagggttttctgcagagaaccggttaactgtttctccaggcaggaccctaagaaccaatttgccatttggaaatccgatttacaagtttgggtagtttctagaaccttagtttttgttggaaattattttaccaggatcttagatctactcacacgtatgtttattaacaccctaaat

SEQ ID NO: 314417 - DNA, 1316 bp, Cannabis indica
catatttagactttaatatttcaagatgtttttactcttatctttatgcatcggcctgtgtagttattttaagggttgtcttcttaggccgtttagaagtctgtggttctaacgaccaccacttcaaacctttgatgtcaatcgaccttcgacccctctgctgacttaggaggtacttaaaaagaacctgtttcctattgctaggcataatggttttggtcttaacccctcaaaaataatttaagcttgggccaactaaaagtttctgaaaacatgaatggtctttaagattgttcccagattattgtatgatcacagagccctgacattcttcagctatttaagctttttataatttaaggaggccagtttcacacgctacagactttagacgtgaagctgaagtctacaggagttcaagcaaggaccttttgatttattttttattattaatttttattttattttttgaaagtttttcaagaagagattgaggcgagcatttcctttttatgggaattttggctgaaaatgctttttctttcaaaacatgtgcttattttaaatttaagaaggaattcaattgatcttcctttttaaggaatttggttgaaaatgcatcttgtcttaagcaaaaattacgaattctaataaacaaaacaaacagaataacaaactatggcacacggtatgttttttgggggcacacacgactaggcttgataccccccaagttaggtgagaattgtggaagtctccaacttttggtcacttggtttaaacataacttgtggcctaaaatgtaaagtggaaattcaaatgtaaactgtttttattttcatttcatgatgcccgagggccattcgcacaaaagttaattacatagatctttacataaaatagtctagatgccgtcaaagcctggttttctctaccgattggtagtatccatgaagtgatctgcattccatgcatgagggacccttgatccatctatcctttttcaactaaaaagtaccttgacccaccttcttgagtatctcataggggccttccaagtgtgggccgagtacccccactcccggttcctgcaaaggttggaatactcttctcaaaataggattgccaacatcaaatgtacgactcttcacttttgaattaaagtgtcaggtaattttaccttggtacattttaagttaaacttgcaactgttcccaaagctcttcaattaagtctaacgactcttggagaagggaatggttgcaggaagggtcgtaagtatcttgtcgataggaagggtgttgggttttatgccc

SEQ ID NO: 314418 - DNA, 1880 bp, Cannabis indica
ataacctctatattgtaattagttatgacatttttttaaatcccgtattaataaaatagacctctatataggaataattacatcttaaaaaaatatatacatatattttataaatttatttatgtaaaattaataattttatttcaaattatagtacatatataaatattatatgtactcgaaaataattttaatataatatagtattaagaattatttattggtaatttcattacattgatattttaattttttttttcaagttgtaactctatttagttataacctctcaattagaatattattttcttgatcccaagtgtattcttggatagaggttctactgtatatgattaattgttgcaaaaattctaatagttttactttgctagcaattaactttaaaatttaaatttcaactattaattgcccttttagattgttcaggtatttaaatgctaacgatacggtagttttggaagttttatcgataaaatttgagtttttagaattaattgttaacaaagtgaaactattaagaattttgccgcaattaactcatcaatatataaaagagaatttggtttcttgattttatttgaagaatattaatatagttacaacttacaagtgacgtattgtttgttttgtcttgttttgagcaggaatgcttgggaaaatcaagttgtacagtgccagcaaagagagaggttttcgacaagaatggtgatcattgcccagatacaatgaaaacgcttgcgatccaagtaaagtgtgctgctaaggattaatgagtagaggattgaaaaaagtaaaagttgggatcgtcagaatcaaaaacatgagtctcttcatattgtttaatgttctcaaccaatcaaccatttaaaactctcaacccttttcttcttttttttcttttctatatataatacataattttttgtttggcaaatatacaaaactttatttgctccaaagagaagctatattgattgatatatttgataggagatgatggatatgcattcttttggttgattttattcttttttctttcaaataaatatttaaaactacatatgaaacaaaagaaaaatcatttttttttatttttcatcttctttcggtgatggtctcgcttacaacaaatttaccaagctagcatattacaagggcatataaaaaatgtacacaaattcaaatattagaaccatacaataaaggaaaacctatatttcaaccaacacatcagaatcaaaatcaaaccatacccacacccaaactcaaatcttcgtcatattcttcttcttcgagtatataaggtacaattcgggagctttgatcacaccaagaaatttccatccattgtgaaaaacataattaatatttttgtttctttaatttttgacactatcaagatgtgctattatctacaaacataatttttataaatagatagatagtaattgataaatagattcaaattaagtacctattatcctttttactttaatcattaaaactaaaaattaaaacataaattattataaggagtattaatatgtgcacacatatatcactcacaaatatgacacatacatatgtgaaaagtcgctattaacatgaataagcccaatactaattgagtctaaataaaactatcataaggtgatattttattttagcaacctagtccatctaaatatttgaaaataaatggacttcctatatgcatctaagctcaaaagcaaacatataggctcacacatgtcaaatcatgtttctaggtttacacagataaaagaagtacaaaatttacatgttacaaattatttataggatctattgacaattactatgattaaaatcagatcttt

SEQ ID NO: 314419 - DNA, 2000 bp, Cannabis indica
tcacatttagttacaaaaaatttatgttgtgactaaaaatttgtcactaaaagtagcagttttttgtattgtggcttcagggatgaaatgggtaaaatgtattagttagaccttgctcttgtcatactcttcttttttggttaaacaaaaaaaattattaaaatatgatttaggattttcacatgattaaatttgagattatatatgtttgttgaagcgtttataaatcctagcaagagattcctattagtattattcaaccacctcttctgttagccatgttttgaaacattagtaagtggttactaatacattactagttaattaattagcaccacctcttctacatttttaattactttgaaaaaaggaaactagcagctggttactatgaagtgatttccacattttgaaaaatatttgcatattcaatttgtatgtattcatttatatgattggaattgcatatcgattaatttttttttcttttcttatttttctattacaaaactcagtcaattagaagggccaccaaaattgtggagagatttttgccagagaaggtctagccttaagatttgtggggccttttggaaaaaaatatattattgggcccttatttcaaatatgtgtggtattttaaaaaattgataaaaaaaatatgtgtattataagagaatttttaattttttttgggagatcctgggctgggtgtgggtctatgcgcaggaaggccacaatgtcagccctggaaaatatgaacggatatttggttacatataattcaattcatattcatgttgaatatgaatatatgattatattgttgttgttcttgcaattatacattgttgaatttgtgttgaatatatgattatatttttgaccaattataaattgttgaatttgtaggaacatgagatttgttgtaaaaataaatctcatagaaaaaacgctttttttttatatactttaaaatagtttttttttgcccttttacagaatttcacacataaatacatatagcaactaacggaataacctaaatcgcaaccgaaattcgtataacaagccacataaaagccaccaaaaaaacccaaactgtaaattagaaaaaaaaaattaaaaataataatatatgggataattatcccgaaaaaagttgattttttaagaaaaaaattctatttataaatatatatcttttttggttatttaagattttcacacctaaactatgaatgtatacattattatgcccctaaattttttatcacgttcaaaattatccttgaattactcatagtgttgtaaattgttttgtattttctatgataaaatcattaaaatcgtaaaagtatttaaaatctatacaattctatttttgtattttttttattgtttttgtatatttatgaaataattcttaataaattttttgataaaaaaaaaagcccaattaaaatttttggcctaaggccctcaattggcttgagacgaattgggtaaatgaaatttcatctcaaaaaaaaatgaaaatgagaagaatagctcattcttatatatagtattatcattttatatattagcaatgtaagattaattttaataaataaaatttaattttttgcaatacatacaaaaatacaggaattaatcaaaatataaaataaaaaaaatagtagaaacactttattcattattattattttaagtgatattaacactttataaaactcccatatgtaggctagctcagtggccatagggggtgcgtgtgtgttatcaaaaaaactcccgtatgtactatagttgcatattctcaaagaaaggcttaaggccccctctgaaaaagtaaagggttaatttcacaaatgcacaaaacaacaaaatacggttttacagaattttgaacatttttacgatttttttgattttatttactataaataacggtcttttatgtttgaaattttgttcatttgttgttaattttttgt

SEQ ID NO: 314420 - DNA, 909 bp, Cannabis indica
aagatttatcttttgatggttaagtaacttttcacatataatgagttgaaagagagaaaaagcagcaccaacaaaatatcatgaaataaaaattgtaatcattaagatatttatctgagatgagagtttcagtttcgattaatgaagttaggctgctggcaaagcaaactacccaaatagtaaaaaaggggtttcaagaacgacattttatcattcctaaaagacccctttggcattctaacaggattatgccaagcttcttttattgaatcactccaagaaatttatttaataaaacattcaccaacaccattaaaaagtagactattattattgttgaaataaatccctatatacactgtccaagtcaggggtatcttctacaactataaaaacaaaaaataaagtgaccttcagccttaacagtttgctcgctctcggaaccaaagttagttgcaaatgtgttggaaatcgttgcaaataacttcagctcactacgaattctcaactcctatatatactgaaagtaaaaaactagaagaagagagatcgagaaggagaaggaagaagcttacattgctgagctttggagccctagggctagagatcggaggtccatttcatgaagtgtacgtacaaaagaaaaagaaagaaagttagggagtgagagagataaacatagagagatcaattcatcgtaataaactcagatgactagtcaaattacttgtgacttggaatctactttttgaaattgatgatcgttgaagatctgatagttaaaacgagtcagggcgagctcgaaagaggaagtacccagcaacgtttttggaaacctataaaatctggtattttctcttcctttacttttaataattgtttattgcttgtgtgtgtggtttcagattg

SEQ ID NO: 314421 - DNA, 509 bp, Cannabis indica
aaaatgacattttcaaaaacactgccctacaattatgggcagaaaataattattgtgaaaagcacgtgagatcagttagtagacttttatggaacaaggcacatcatttggattagaaattgttgaattttatattaatttattaatttttaattttttaaatatcaaaatgttttatttcttattttttttattttgttgagaaagtaagtcaagctttatccaagtgagaaacttttttcagaatctttactctaaccctcttttgaggttaaacccattttcgaagtctttgaatttttaaagattaagcaacttttctgatgatttttgttttttgagaaaagattgatagtggagagtcaaagaaaattttatgagtgtgataaaaatagaggtgtgcgtctaattaaatctttaatattttatttaaagtgcattcgattgaattcgaaatataaaagaataattagcttttttagtccctgtatttatgacactatactatg

SEQ ID NO: 314422 - DNA, 822 bp, Cannabis indica
atatatatatatatttagagagagagagatttagcaagaaaagtcacactttcgaccttgtgcgactatggtggctttggatggtagagacaacgtcaagacttgttatgggtgggcctagaagcgctagagacaacaatgagaaataggaaatatctcagagaagatgagaaagacaaagaaaagcactgggtcaaagcttagggacttggattggaaaggggcatcgataattttattcgaaacaccctcttgcaacctatgggaaccttgttagctggtctaggcacaataacccatgttttattctttttgagagcaataacttcagtattcatggcattattccaatgtggttcttgaagggttgctttactgtttttggttcacaaacagctaaaccctgtgtagattgtcatatcagttaaaccctgtgtactgataaatctaagaatacatttaattacataatcttgattgctttttactgtactgacgacacaataaacaagaatatcaatgtgataaggatttagatgaatttataaatcaaataaacatataaatgataacatgaaccaaatgacacactaaataagtgatgaaaatacttctgtctctttattgataattgaatgataaatattacattgaaatagagttttatttagggcacaaagcccaataaaatcccacttacactaatataaaacaatcagtacatttcaattaatcctaaattcagtcggtgcttttcaaatgcagttcctgccaaaactttggtgaatggatcaactaggttgtcttcagtgcccactttct

SEQ ID NO: 314423 - DNA, 1244 bp, Cannabis indica
aaccctaaattacgaaaaatgggaaaaattagggctcgggaaaaagccccaaccggcagaccggttcccaactggaaccccggttcctgggcaccaaccggtcgaccggttcttatggtcccccagaaccggtcgaccggttctgtgttgggaaccctaaaaccgatcctcctaactccaatcaatcccaaatcttctcaaaacttctaggatacctggttatactccaataatcacataccaatcaacaaatcacaacaaaccactcaaattataaaatcaccattaaaggccaaactaagcttccctaaacttgaacttgaacaaactctcaacataaggctcaatttcagttcaaaaaaacaagaacaaacattatttaacctcagattatgaacccaaactaaatgcacacatacagctcccaatttaaacctaaatccacatagctcatcccaaaactcaaataaaactcaaataggaaagctaagaagatataccttgattcaaagtgttcaaaacctgctagaatttagagatttcagcaaagaataccttcctccttgctgggtttgatggttcgaaagaaagagagaggaagagatggagattgctttgaaatttctaggttagtctcacaagaaatccttattcatttttccccattaattcaatataagcctagacaaaatatggctgcttctagtgttcactacaagccaaaaagatgaaaggacctaattgcccctctttagaaaaacaaagattaatataaaccacgggttgattggtgatttcaaaatctcgaaaattccatcaccatcaattcccaaacaatgatatcccaaaaataatattctaaaacatataaaatacgactctctaaaggcccaacgtcgcttttcacagcttccgaacacaaacacagaaattaagtaatttacataaaatagcataataaacatatatgaacttaattatattttcacaacatgcattttataatattaattaaatgtcgtatataaaccctagttaattaataatccaatttattaatcttaagcggtctttacaacattccttatgcttctgctgtcggaagcctaatgtatgctcaagtgtgcacaagacccgacattgcttattctatcggaatgttaggaagatttcagagtaacccggggatagaccactggaaagttgcaaagaaagtaatgaggtatcttcagggtactaaggat

SEQ ID NO: 314424 - DNA, 1825 bp, Cannabis indica
accactgccatgaagatggcaatgctctccttcttttttcagagcattgccacaagaagatgacatctttcccaactcacaaaatgccaaaggggacttttcaaaatgtgttccctcaacacataggagtgcgacacaagtgaaagaaatcatttctcaccaaagcacaagcctagccaatcacttccatctttgtggtacaaagagtggcagtgatcggccatatcaaatgggaatgacatttttttgccaaaatcactttttcatcaataacatgctaaaacaaagtgagaaaatgcaccaagtggtatagaaactacttggcctaccactaccatctttttgccacaaatagtggtagtggctggtcataacaaagaatgaggattttcttatgccaaagtgtatttccaacatcaatttgtcaaatacaagttagaaaagtcacccaagggtccaaacccacacaggcgaccactaccttctttttagccaaaaaggtgttagtgctctcttaaccaattggctaagaaccaatgtgaaaaaatggtcttatagcatccatatgactaaaataagcaagaaaaccatccaaggcatcccataagccatggccgaccattgccatattttggctccaactgattccagtggtctctcgttagggtttcgaatgtcaaaatgagattttggggtcccaagacccccaaaatatgattcaccatcaaaaaataagtcaaaacacgactcgaggggttagggaacatgcacggccaagagccgccatttggtcatgtcattactcgtatatggagcaaaataacacaaactatctttcagtaaaataggcataaatctcccaattttcattcaaataacttggttcaacttgcattggaaatatattttcaagacggatctaagtgtgtctcatagtcatagctcaattctaaagttatcaggctcaaaattggtatactttacttgggaattgagtagtgtaattaagtgtgggatgttagagagctagaccacatctcatgtggcatcatatgcgagaagtgacaccccaaaatacctattttcaacacttctctccaatttcatgaattgtaagccgagaggttacatcccttgtcactcttctttaatttcatgtatttctagccaaaaataactattcttctaatatttgtaggatttcggcttacaaataagtgagatttttgtaaacatatgtttatttgtactttttttttcattattaggaataagatatggcatttgttagtgtgacacccgacatgtgggggatcactaacaaatcctaagcctatataaagatagtgataggttggttatggggatcggtggcttgcttattggatggctactaagaacaacacatcccttccttcaccttcttcctaaaccctacacactttgtcggcactaagcctctcttagtaaaacaccattggcatacatagtttccaagaacagagaccattctcttttcttacacttattggtttattgttcacagggaccttacaaccaccatctttatcagatttgtgaatattgagtctcatatgagccttgtattcataagtctcgatatagatttctctaagaaatccattattgtattattgtctacatactcttgagaacataactctagtgtgtcagatttaattaataaaaacaaaagtagatataaccccattaccatcgcagcatgggagtgaactactatagatctctagtgtccatttatttattgcagatttatttagtcaaattaattcatcgcaatcct

SEQ ID NO: 314425 - DNA, 1675 bp, Cannabis indica
aataatttaaagaatcaatttaagaatattaataaataaattaatcatatttataagataaatatggactcatcaaatgcatctgttcatgattcgatgtgagtctgaccaattgtccctttagtttttggctaattaatgctctaactaattaataccttgaaacacgtttccctttgcacgcttttgacggttttttccctaaggcacttgattgcttttaatttctcaatatttactttttgggggaaatcaaagcgtctgaggatttgaattgattactctttttcgccatttagcttataaatagggctgaaacttttcataagttacttttaccattttcttcacgaaataacctctgagcaaaaaaggagttttctttcaagcttgtcgtgggatttcaagtagaagtatccaaacagcttcgtctggacaacgcttaggcttcaaacagtgagtaagttttcaatctttttctcctttaactttgtatcttcaattttctgggtttccattgtacaaagtacggttgttctagacttgttgtaggagatatgtaaaaaatctaggcttaaaattttgtaattttctctgtaatagttcgtatggcttcattatttatgacattttgaccttaatctcgcaatgttcgattttcaccttactcataaaaccttcgtgaaatttatcctttaacccaaaaatttcaaacccctgggttatgacttaatctttatgcattttttgtctttttaatctgttgagtagtcctggtcgcatatttgcttattttttgtttgatatcatgaccaaatactcatctcgtgtattgtcttttgtagatgaaccctggtgagttttggggaggtgaacactgtattgaccaggacctgcttcaacttctgtacgaggaccaacctcgtcttcccaccagtccctcctcttcaagtggcggactttctaacttgagtttcgaggattgggaagtgagtagcaaacgttctcctactctagaacccgaagtgcaacaccattcttactccaagcagatcgcatcagaaggttgcggtcgctttatttgggaactaaaaaagtttttccttagagagatcaataacctcttcaataacatcgcatgagaagattatgaggggtacctttagacttcttggacggactctcaccactcaaccaagacgtcaccctgcttggatactggtttcccgacctcactatatcctccaaagcatggaggttcgaccactccttcctcctcagcctcggatgggctatcaagagaagtctaaaggtggtgagactccgtccaaggagaaggcaccggttgaacaggttattgatctctttgaggaacaacctactgtggacccttctaccttgaaggtcgccaagtccaaaggttcccaggagggagttcggatgcactgaagcaggctaagactagatcctagttggttaggggtggatctgaacaagttagggcccctgccccacctttggtattgtgcacggagaccaagagaggcaaagacatgcttaaccactatgtgtcccagtcgctcccagaggtgaacgaacagttggctggggcagacaatgatttgtccttggaactggtcttgggaggagttctgaaggagctttcacgagtaag

SEQ ID NO: 314426 - DNA, 3063 bp, Cannabis indica
cgcacagagtagaaaccatgatgctccttagacaaaaaaaaatgatcatcagctacattcagactcaatggaactgccaaaaatatctcgttgatcgcgttcgttaaaaagatctttaataatattagtacacatcaacgagctcaccttatggcccaccaaatattgggcatctgaagtaataaaaggatacacatcatccaatggttgatgcaaaatatcaaccttcaaaccaaaatatattacccaacgaacctagacttaagaaactcatgcgatttgaatacgctcttccacaaaaaaacttgaattatttctaaggggtgttgaaattaagaaaattaacccttggaaaataacgagcttcatataacctactcaccaaagagtttgattttgtcagtaaacgctacccttgctttcccaacattgccaaattaaagtcacgaagattacaaaagtccattccatccttagtttatatctactcattctttcgcaactcatccaataaatacttccaaaaaatttgaatgccaccaaaatatacgcataattctctctaaatttgtagacatattaattgggtgcaagataatacttatggaacaaaagaagacatttaactaacgagcaattctacacattttgacaaattatcataaattagtatcttgaatgatgtgacaatgcttacattcaaaatattcacccaaaaagttgaaacataaattaataaaataataaattgcaacatgacatgtcattcatgatctaatatcatgataaattttcacgatatagatcattttctttaacaaatacaattctgtaggggatttttatataaaaataaaattaaaatttacttttacatggtataaaaaaatgtaaaaggatataagactaaaaactaaataaaatttaaaatttgagaaataaaaaaaaaacatataaataaagttgataaaatttttaagaacaaatatcgcaggataacttgttggagcaaacattgttgtcgaaaaagtcattggagcaggcaaagtttctggagtagacatctttgccagcaaaaagtcactagagtagcagtcgtcgccaaaaggttaccgaaattgtcatcgttgccgaaaaagtcatcgaagttgtcatcgtcgttgaaaaagtcatcaaaaaatttgtcgtcaccggagttagatgtctgagttgaacactagaatatatgataaagaaactgattacatttatcaacaagttgaaattatgagacaaactttacaaaaaaaaaattaagacaaagaagttggttccgtaaaacaaccaaaataaaaattagcacccaaaaactagttacatgaaataaataaatcgaaaataggttccttgaattaattaaatcaaaaattagtttctgaaataaataaattaatacccagttcttgatatgactaaatcaaaaatcaactgaaaaacaacacacataaaatacagcacggtctttgcaacttactagcaaacccatgtgttgacgcggtttttcgtcaactgatctaaggagattgtaaaaataaattaaagaggattgcaatgaattaatttgaccaaatcaaacggcaataaacaaaatgaacactatagatttatactaatataattcaccccccatgttgtaatggtaatggggctatgtctacttttgtttttattgattagatctgacacacgagagttatgttctcaagagtgtgaataaaaatacaacgaaggatttctaggtaaaatcttaattgagacctatgaacacaagactcatgggagaccaatattcataaatctcatcaaagttggtggttgtaaggttcttgggaataataatccaataaggtaggaaaaggcatgtatattaatgatgtttaaggtctgagtgtcgaaaaagtatggtcgactcaaggaaaaagatgaagcaagggatatggtgttattggccgtcgtcaagtaagtccaaaagagaaggacccttcacttcagcctcttactctccatatataggttgtagggtttgttagtgatcccccacatgtcggagtgtctcactaaaaaatcttgtatatcatctttaataatgaataaaaaattacaagagaataaatatctacaaaaattcctttgtttttaggccaaaatcccacaaacattgagaaaatgattattttccgctaaggatgcaccaatttaaaattgagtgacaaaggatgccacctctcagcttggaattataacattggtgatgagtgctaaaaatatgtgttttggattgccactgttttcatataataccacatgggttgtggtagtatcttccaacacctttcacttagttacactactcaattctcgagtaaagtgtactggtctgtcttgtgagccaattattgttccaataaatttagaattggggtatgactatgagacacacttagatctatcttgaatgcaagttgaaccaagtaattggataaaaattgagagaattctgtccgttttactaagggtagtttatgttgttttgtcccagttgcgagcactgacatggccaaatggtcagtgcttggtcatgcatgttctcggacccctcggatatatttttacttattattttgatggtgagtcatattttgggggttttgagaccccaaaacctcatttcgatgtctaaaaccctaacaagagaccactgccaacagttggggccgaaaagtggcagtggccagccatggcttatgggaatccatggatggcgtttcttgcttattttagtcatatggatgttagaaaaccactttggtcacattagttcttggccaattacttaggagaacactgccaccattttgccaataaaaaagtggcagtggtcgcataaggggtttatgaagcctcgggtgacttgtctcacttgtatttgatacatggatattggaaatacaatttagccaatgaaaatcctccttcgagggagtggccgaccactgccaccaattgtcccaaaagtgtggcagt

SEQ ID NO: 314427 - DNA, 587 bp, Cannabis indica
taggatgttaatgaaacatacatcgtagtaaatctagatcctggtaaaatatttccaacactcagcacaaataagaaataagtaaggtgatagaagatcaccttgtctaatacccctctcaggaacaatcagacctagctcatgttcgccatgaattattttatacctcacagagctaaccgtagcaataacaagatcaatgaaacgcaagtcaaatcccattttactcatcattgctcgaagaaaatcccacttcacacgatcatatttaagctttattaagatccagtttgagatagtatttttgagaaaaaaaataaataaattaataacaaaaagggtacatatttttgtaaaaacctattaataatcactagtcacttttgtttctattaattatatatgtaatacaattctctctttagttatcgctcacaaataaaaactactaccaatatgagtttctaactatatgaaggaagctatgcaaataaataaaaggcaacaaacaagcttttctatacatgaaaggtgtggaactgatgtgggtctaaaacttatcttctatataactttaatttatctct

SEQ ID NO: 314428 - DNA, 1114 bp, Cannabis indica
ccaattcttctcaaatattagattgcgacaccctggacagaccattcgacccgtatagttcgacttattccagatctgcgacatgaactccacaattcataaagaccaggtccttatgagtacctaaaatcgtgaaattaagagaacaatcaacctttaatgaatattttataattaataccattttattcacttgtagctttataaataacgcgactcatttagttatttttgaggattcaatttcgatactttctagagagctattacgttataaaaaacaatcatttgtaatccatctgagagtattaagaaactcacttgactctgattcttgtgatcttgatattccaataagaaatattaagaaaaaggaataggttattactatataattggagtcgaaccattataaaattattgtgtcgtttatttacttatcgtaatctcgtattcaaatacttttattgtcgtatgtgtgacagtcagtagtctcatgatccgtaagttaaataccaagtaagttgtgtaatcccacatcgtcttgggaaggtcgagtgtgatgattttgaaattgtgtaggtatgagacttacacagttgaagagggcttaaataaattgattgattctacctatctcaacaaggtgcatcttgcttttggtagcccatcttgaaagaactccacagttaaacgtgcttgacctggggtaattttaggatgagtgaccacctggaaagttttcccaggaagcatgtgagtgaggacaaatttgtgttggtctgtagggccagtcgtcagttcttgacgcagccagagtgacgtacccatgtataaaagccatgagtccgtgggggaaggcccaatggaggtttgaagcggggaggttacaaatagtatcaaagccttaacccagctggaagtgtggtcgacgaagacgtcgaaccccgtaagggggggtgattgtgatagttagtagtcccgtgattcgtaaggaaaataccggataagctgtgcaatcccacatcgcctaggaaaaatcacgtgtgatgattctgaaattgtgtaggtatgagactacacagtcgaaaagggcttaaatggattgattggt

SEQ ID NO: 314429 - DNA, 1357 bp, Cannabis indica
aaaagtacacttacaagaggattctgcataatatgtacaaaatgttaagtattgcaggagatttggggcaaacatataattccctttccactctggagcattacaagcagagtggagccaaggcagtcttatttctgggagatctttcatatgctgatagatatcagtttaatgatattggcttacgttgggatacgtggggtcggtttattgaacgaagcactgcatatcaaccctggatttggaacattggaaatcatgaaatcgagtacttacctgatttggtaaagcgttaacaatagatatttcaagtaaactgcttgttacatcatatttagtacttgaaatgctttaccaaacatgatatttagaaactaataaattcttgaaaaaggaaatatgggcagtgaaaaagaatttagttgcaatagttgtcatgttcacttctgtctgttttgctcaacctaagagtctttaaaaaagattaagaataccttacagaattattgttttaagttctattatgcaatattagcctttcctctcattcaaatgcttaacaagtatatatgtataaacatttgtaggaagaagttactcctttcaaatcctacctcgaacgatacactactccttataaggcatgcaaaagtagcagccctctttggtatgcaatcagacgcgcatctgctcatataattgtcctctccagttattctccatttggtatgaatctcttaattctttatcctacctctttgattttcattataattcctacttggtcagtaaacactccatcaaatgtttgttccccttccttgttcagttatatctctttttttctttctttgctttgttagaacttagcacacactactcattctttttgatatctcattctataatctgttctcatatgaagtgaaatacacgcctcaatggacgtggttgagagaagaacttggaaaggttgatagggagaagacaccgtggctgattgttcttatgcacgttccaatctataacagcaatagcgcacacttcatggaaggcgaaagcatgagaagtgtcttcgagagttggttcgttgaatacagagtcgatgtcatctttgctggacatgttcatgcttatgaaagatcagtatgcttttcttcctctcctaactagattttaattacattagattttgggttaataccattttggaccctgtgttttgcaaaagttaccaattggaccctctatgttgttaaataacaaaatagaccttgtatgttataaaattgtacaaataggatcctgaactgattttttgtcaaaataaaacttaattataatctgatctagagat

SEQ ID NO: 314430 - DNA, 722 bp, Cannabis indica
cgcctaaggtagttagggtgttacatcttctctctctttcggtgcttcaccggagctatgtcaaaaaagggggaaaatggccaaaaaaggaattctaagaggaagaaaactagtcctacatcttcggatagggtcatcaagaccagatatatggatgcggtactaggagtgcaggaattagagatcactgatgatgcagaaccaatggaacagtacactaagaaaattttcttgcctgaagaaatagaatccttctttaggagacgaagtgaaattagccaagacttttcttattagcttactgtggcaaattgaacaactcaagatatcagtacagggaagaatccttctcgcccaatactcagatttgtagtagttcgtaacctggagaacaattttgcgagttcagggaaacctgttgaggcaaatcagactgagactaagaaagttaagattgattttactgatattgttgatgaagtgaactattggcaaccttcgctggtctgttatgtaattggagctaatcctccaatcagcatactagaggggtatgctcgaaggttatggaaagaaacagttgtcaaggtgggattacttgctaaaggaatcttcattataagattttagaacatggagcagagggataaagtgatgcaatagggctatgtgttttttgataggaaatcaatggttatgaaaccatggaatcctattgatga

SEQ ID NO: 314431 - DNA, 1056 bp, Cannabis indica
ttgccttgtctgttgttgttgtttttagatcttttaccgcccgagtttgaactactaaggtattaggggttttgaacggacgttctagctgaaggagcttgtgaatggcccagtttgggctcgacatttgctcgttgaatggcttcttcaagcttgatgaaaccatctgcgcggtcgagaaaatcactcatagaatctactggactacttttcttgatgtctttccatagctctccgagaatctcaatgccccccaatatggtagcttatttcccctcttaagttaatcacgctacttttgttgcctccgtcatgaatctgcttatgtaagcttgaagaggctctcttggtctttgcttcactttgaccaggtcttctaaatgtaatgggagttggcgagaagaagagaattatggatgaaactccgaggagaaggccttccaagatttgaaccttcttggtgtcaacttgaattaccattgttgagcggcttctgagagtgtggcagggaaaactctgcatcgcacatctcctcataccccttgcaagtccatttacatttcaaaatacttgagatgcgataagggatcctctttccctatatacatcttccaggtcggcatcttgaacttgtggggtagttctacaacattgatctctggagtaaaaagggatccacgtgctcggtctaactcgagatcattgagcttttgaccagccaggcgttggaacatatttttcagttcatccaactgtgcttgcacggatggatgaacttgttccgcctcttggtcgatcagtgtcatcttaggatctctttgagctcgatcttgaatggggaccccgggctgagtggttggttgaacatattgttcatctaaccctctcattctatttagatcatctctgagatcatgagttgttcccaatctattaaatactgaagcaccaggttgcctcagtgactggtttgtttagccgagcacttggccaaaaccgctagtctgggaagagttattgggtataacactgttggaatttattttaccaggatct

SEQ ID NO: 314432 - DNA, 2024 bp, Cannabis indica
actttgccaatgttctggaaagaacataacacttattcaaagtgtaagtacacttcatcgttgattatcacatcagtgtaaatctaaagcagtgatgaaacatggactttgtcttttgaagcagataatcacaatcacattctactgtgttgacatcactgtaattgtaaatgactatatgttttggacttaatagattttgtatatattaaaccataaacatgaaaacaacatgtaaacataaatgacttctaatcttttattaataagaaatcatattagattgaaatgagttttatttagggcataaaatcccaacatacatttcaatcatggctcacttttctttgatggtgtttaaggatagctaatcgtgtcttgtgagacacttgagcagaatgtttgtccccactatggccttttaaaaaaatttgtaaatttagtctgttgaaatcgaattatattatgcttatctcctgcctcattcatctttgttaagatttgagaattttaaattgtaaatcttattatcctccaaaaatcatttttttgataatgtcatgcaaggacactacacttcttaaccatagcttaacccgatgtatgttgtttattcattctttgtgtttatttttcatttcatgaatgtagactttaatgacatgtgccatgtccatattttacatgctcaaaatatgggcataacatactccactataattatagaattgtactctctgataatatagaattatatttatagaattcttactcatagactattgatataataaatataagcaatttccttccaattattagttcataattagtgttggtcaaaattactattttgcccttctaattatctcttgatcccttatgtattattaatttatagtgaacagttattctataacttattatagattaggatccaactgctagcactccaagatttaacattataagggaactaatattcgttctattaggaaagcttggattccactattgtatgacatgttcatagcccctcatgttgttaagctaccaaaatagatgttttaaaatcatcttctctaagaaactttatcgagtgaatcaaaaaactcaatgaacacaaatagaagttcatgaatactcaagatttaggttgatctactgatgatcattattacattatgaataaatctttcatggtaaacgacacattaattaaagaagtttattgcatatcagtccagtcatgcataattaaattatacacaacacatttactacatgtctatccacatatgtgaaccgaatcaaaatcacacaaactagaagtatagtgtatagtaaactgtacttattaattccatattaaagaatctcattactttaatacactaccgacttattttattcatgtcgtataatcttaattctcttgtacgtcctcacaaaattatactttctccatatgaataaggaatttttagatatttaataattatactattataattaatgtattgtttatcttataattatatttcatatattctctaatatattatccattaattacttgcttttagggcataaatctcaacaatcggttcaatataatgaccagcaacactgacgaaagcttcagcagtgtgaatgaagaatttaggaaatattcaataactacattcattgaatttattaggttcacattacaatcttagttcacagagtgcctcaaaaaggcagaaaaatgtacaacccctttagggactctttttgaaaataacttggcaaaaaatataaggatggaaggtttaggcgcatccagcaaaatagagccaatttgtacaacatttaagtaggaggtcaaatagtgaaagaagtggtgatgtgaacctagttgaaaagacatgaacatgtgacgtgtttagattgctaaaactcccttgcactcatgcatatgtgtcgcggcgtcgaaaacgaatacaagtgtgtacacgttgtgctctccttattatttgaaa

SEQ ID NO: 314433 - DNA, 509 bp, Cannabis indica
ctcgtatactcagatcctaaactcggaaccatacccgaacccgaacccaaactcggatgaattcatgtcatgatatggtgttaaaatattaattttttagtaagaaaaaatttaaaaataattttaaaaaatttgtgctaagcaccattaaatttttaaaatgacaaaaaacgattttttattcgcactttaaaaactaaaaactgaaaacacaaccaaaaaggctcttagtctttcaattttgtcccttctacacgactgtgcctacttttgttggaactcgacaacatattttaatttttaatagagtatttttattgggtactagtagtgtctattatgttttataaatggctgtccacaattagataaagtgatatcttttagcaattttctttttaataatatatactaacatcattaagagcatctctaacactaaaatttgttaaaggtgtcaaaaatcttcatatcatttacaaatataatattttattttagggtaaata

SEQ ID NO: 314434 - DNA, 6218 bp, Cannabis indica
acacccaattcttcaaattctcatatacatgcaatccaacaagatatgaacattaaatactcatgaagatcaacatcaaagttcagcaaccgcactcaaagtaaagaggtggaaaaactacctcacgttcctcacaaatccaagcaccacaatcttcaatcaccaagcaaaatcaccaacatcaatttgaagaagattaggaaagtatgtatatagagaaaaagagggagaaggtttggttaagttctataaaaccataaatatgtttttaattttctctaaaaatctcttttgttgaaaataaaatcaaatagtcaaatgaccaaaatgcccctaaggccaatataccacatatgcatacaacaaggggcaaagttgtcatttcatcacacaccaaacttaaataaattttagaatattcaattatttataaaatgctaaaataaaatctcgaaaatgcattttgggccccttctcgggtcaaaattacgaaaatgcccctagctcaccaacggggtcttaacatatcttttattagtataattcatatatattaagttatataataatataattcaacattaatacacatttaaatagttaggatttgctaatttgattccttaatcttagggtattacaattatcccctccttatagaaatttcgtcccaaaatttacctaaacaactccggatatttttgctgcatatccatcttgagttcataggtagcctcttctactttgttgtttctccacaacactttgatcagtgcaattgtcttgtttctcaagactttttcactcctatcaagtacttgcactagttgttcctcgtatgatagacctaactgaagttctagtgcttcataacttagaatatgagattggtttgagacatactttcgaagcatcaaaacatggaacacttcatgtacagctaccagcgctgggggcatagccaactgtacgcgacttgccctatcctctcaaggatctcaaaaggtctaagttttcctttcttaccaaagcgtttaatgcctttcatactcaaagaaatactatatctccaatataaaaatcaatctctcgacgctttggatctgcataactcttctgtctactctgagctgtgagcattcgcggtctgattttatcagctacctcacttgttctctgaacaaccgcgggtcctgaaaactttctttcacctacttcatcccagtgaataggtgatctgcattttcttccatataatagttcataaggagccatcccgattattttctgatagctattgttgtacgagaactcgatcaagggaaggtactttacccatgatccttcaaagtctagtacacatgcccgaagcatgtcctctaagatctgaatggtcctttcggactatccatccgtttgaggatgaaatgctgtgctgaatttcaattgagtacccatagctcgatgtaggcttttccagaatctcgatgtgaactttggatccctatcagaaacaatggactttgggacaccatggagatgaactatttctctaacatacagttctgcatactgatcaatggagtaattcgtccgaacaggtaaaaagtgcactggcttggtaaacctgtccactatgacccacacaaagtcatactgtcacgtagtcctaggcaatccaaccacaaagtccatggcaatgtcttcccatttccattccaggagattcagtggctgcagcaaccctgcaggcctttggtgctcagccttcacttgctgacaagataaacatttcgcaacataatccgtgttatcattcttcattcctggccaccaaaacttgatcttggtacatctttattattctcatatgaactaagtaaggagtcgtatgagactaatttagaatttctcttctaatatcatcatccatatgcacacaaacacgattcataaactgtagcatactcgtattatccactataaagtcactaatatttccagccgaaaccttatctcaggatttcactaaatttagatcttgcaattgggcttctttaattcgcaaaagaagaatagattgcagggtaatgttagccaactgccccacgacaaactcaatcctagcttgggtcatctaatctgttagctgtttggaaatctgcttcactgcattcatctgactctgtcctttcctactcagggcatcaactacaattggccttcccagtatgataaagaatctcacagtcataatccttcaccaactcaagccaatgtcttcgtctcatgttcaagactttttggttgaagaagtatttcagactattatgatcagtgtaaatctcacatttctcgccatataagtaattctgctaaatcttcagcgcaaatactactattgcgagttctaagtcatgagtagggtacctttgctcgtattccttttactgtcgagaagcataagctatcacctttccagtttgcataagaacacagcccgaccctgtctcgagacatcacaataaacaacaaacttatccttaactgaaggaagagttaacactggagcggtaatcaagcgctgctttaactcttgaaaacttttttcacaccgatcagtccaaacaaacttcaaattgttctaggtcagttctattaggggtactgtaatcttcgagaaaccctcaacgaactgacgataataaccagctaaacccaaaaagattctaacttcagtagccaattttggtgttggccaatctcgaacaactttgatcttggtcagatcaaccatgatcccatctttatccactatgtgccctaggaaagagatacgtggtaaccagaattcacacttcttgaagttagcatacagcttgtgatcttgtaaccgttgtaatactgatctgagatgtagttcatgctcctcttctaactttgaatacaccaaaatatcatcaataaatacgatcgcacatttgtccaggtaatccttgaatacccgattcataaggtccataaatgtcgctgggtcactggtgagtccaaaagatatcaccaaaatctcataatatccataccaagtacagaacgcagtcttcgggatatcttcttctcgaattctcagttgatggtaacctgagcgaaggtcgatctttaaagaccatcttacccttcagatgatcaaataagtcatcaatttggggtaaagatacttattcttgatagtgagtttgttcaattcccaatagtcgatacacatcgacagtgacccgtctttaattttcacgagcaacactagagtacccgaaggagaataactcgatcttatgaatcccaagttaagtaactcctggagttggatctataattctttcaattctgctggagccattcaatacggtgcctttaatactgtttttgcccccaaaactaactctatcacaaattcaatttctcgggaaggtggtaatcctggtaggtcttcaggaaaaacattaagaaattcgcacaccaatctcgtattctcaggtccatatcacacaggttggctggtatccactgcggtgactaggaatcctagacaacctttacacaacagatctttagtttttaaaagtgttattcttggtatgcgcattccctaaactttacccacaaacaccactgggttggcactatcaggctcaaacaccaccatcttccacttacaatcaatcgtcgccccatacttagacaagaaattcattcccacgataatgtcaaaatcagacagttataactcaattagattggtggttaactcataactgtcaatgcaaaaagacaaggaccgaatccactgatacaattaggtctcccgagggtaacagggtacctaaccccaaagcatagacatcacatggtttatgaaaactttcaattactctactcgacacataagagtgactagctcccgaatcaaataacacagaataagaacaactgttaatggataacttgcttgtcaccactgacgggctagcatcagcgtcagcctggttaatagtaaatagacgtcccgagttcaggttggaattcttctttggctcctctttcttagtccgtggacaatctctgatagagtggcccaccatgccacactgaaagtaagtcttggcccgacactcaccctgattgtatttcttgcattttagacactctggatatgatctgaatgaggacccgcggccttgacggctacctctgtttccctaaaactttctattaccccctgatgttttagaagcttcaaccttccatttatgatcagggttaccactatcattccccttactgacattaccacccacagaaggattcgatgttgtggcggtatcctttgcggtctactctttcattacatgttgctccgcctcttaagctatcaaggctaattcaaccactttcttgtataaagggtcgtcagcggtggtaatcttcaagtctcgacttattttggcattcagtcccctcacatacttttatttccgggtgaagtcagttggtaccagattaccaccaaacttagatagtcgatcgaattccaaggtgtactcgaccacgatcattttcccttgagtcagcttcacaaagtcttccatatatgtgaagtccttacagtgatgttataattttttttcctcaaatagactcttaaactcattccaagtcatagtactaatgtctcaagtctgccccacaatgtcccaccaaacgtgggcatgatcttgtaacataaaagcagcataatttactctttctgttctcgtcactcccatattatttaggatgcgggtaatagtgctcatccactattcagccttaattatatcagtacctcccagaaacgttggaggttgtagattcacaaagcactcaaatacaggatctctatgcgacagtataaatcccgggttacccaccactggcacacgagctggtggtaacacttgctttataagagctgttgatcccggttgcctcaactggcgcaattcatcttcttgacgaagtatgatacttcgcatttcttgaaacatctacttccaatcagtaggcggattagcattatcaaccgtcgcattatcccccagattctgtggaggcgcaggcggtgctagtggattggtttggtcaacaccaagctctacatgctcgccctgtggtccagatgattgcggagggtccatcttcataaataaccctgtaatcaacaaccccggcaagtcaggcactaataccacactcacgcacttgttgccttaaaccccaactcgaatattttatttcttattaaataaaaatttatcaattactacattaatcgtggctttcataacgcatatactagatgctcctcacatactacctaaaatggaaagcgataaataaacaatcacataaacagttaagcatttactctcaacacttactacaccacgagtcgagcttgtctctgacgatgattgtacatgtttagccggtctacaggaagtttaaaaaccttggtgctctaataccaaactgtaacgccttaataattaggcacgctatgacaactagtaatataacctaatccctctaaacttggattactagatagataagagcaggaaaatttaaaaactttaattgtaatcgaatgaaaatatagcttgtaataatttaaactttacaacaatacaaaaagacaacatgtttcgggatcccacaaaaacttttcacaaaatattacaagttaatttacatgccaaccgaagcggcaaaaatccgagatttcaaaataaattcattggtagatcccaacccgctttgtctagtaaggcccgaacatgtacaatccatcgtcaagctctcgaactcatggctaattacagacatatttaccctttcttgcatcgtagagcactcgcgagctaagcccagtaaaacagcataaatatcaatatacacaataacacatatcacatatataaacatgccaataaatttattgtctatttgacatagacccgcgtgtctcgctgacacgcctattttatgtctatgtggcatagcccacgtcttacactcacacgtctatttacaataaggccttagaatggtttatctcggttctaattaccgagtctaacttaattatgcattgaatgcataatgttggaatttatttt

SEQ ID NO: 314435 - DNA, 3369 bp, Cannabis indica
tttagggtgttaatcaacatacttgtgagtagatctaagatcttggtaaaataatatcgaacactaataacatgaacatgtattcatgattacttaagatttagaccaatctactattgatcatcgttatgatataaaataggtctttatagtaaatgacatgttaataaacaaagctttatttatatcggtccttaacatatataatctttattatatatagcaccttcactttgatgtcatactacattaataatccaaaccgagattacttacaccatatagcgggcatcaatgaactatattagcaaccattgattaaagattctataactttaatatgttgctgactgttttattcacagctatgcggtcttagttctttgtacagctacaagccattacatcatatatgaataaggaattttccgatgtttaatataatttattcaataacaaatattaataatttaacattcaagcatatatcaaaatgttcaactcttttctaaaaatctataatgtctctacatgttttttaggggataaaccctaacaatctcccagttgtcctaaaagaaattgggcatttcccttattcccatattatttatatgaccgataaaagattttgttggtagcgtcttcgtgaatggattcaccaggttatgttcagaggcgatcttgaggatcgttcacatcacctctctcttctatatctcttagtagacgttacttcctctcaatggctccttggttccttgtggatggccactgctccactattctcatggtagagcaccagtggcttttctacttctggaactacttccagagtagtgtagaatttcttcaaccgaaatcttccttagctacttagcaatatgctatatatttagcttccatggttgaatctacaatactggttcgcttaatacttcgctggactacaactcctcaaccaagagtaaatactgacccaaatgtcaactttggactatctttatcttattgaaaatcaaaatcaatatatctagtaggatttaactctccataagaatatacaagcatgagatctctcattctccgaagatacttgagaatgtgcattacaaatatcaagtgatcaaaatctaaataagattgataacaactaaaaatccccataatgtagcccatctgaggccttgtacacaacattgcatacatcaaaatcacaattgctgaatcataagggtactttaacatgtccacattgatcatatctgaacggcaactatcctttattagaatactccattgacaatctttgtaacaccttatcgatataagtttcttaataaagtactaatgttctctattttctatctctatagattttgatcccgcaaatatagcatgcttctccaaaatttttcatttggaatttataggctgaccacttttgtacatttgataacctttctatattatttccaataagtagaatgtcattaacataaggaactagggatagcactagattagctttaatgtatttatatacaaaggctttgtctttgttttgtgcaaagccatactctttattagtcttattaaatgtgatattctaagatttagaagcttgcttcaatccataaatagatttaagcaactggcatacctttcgatctttctctggtaacacatacccttctagttgttccatataaataactttatcaagattttcatttaggaaaatggtcttgatgtccatttgccatatctcataatgatatatggcagctatcgaaagaaaaatgcaaatggatttaaccattgccacaagagagaaggtttcgtcatagtcaacgccttctcgctgtgtatagcttttggctacaagcctagctttaaaggtctctacattcccttcaacatttttcttcttcttgaaaatccacttacaccctatacctagattttgttggtacacatggaatccatttctgaatccatggcagtgttccacttgtttgagccagggccatctctataagtcaatcgatcgtcattatctggaacagagataagaacatgtactttattttcacagtggacaggttgtcttgcaatcctcccacaatgacgatgtaccggggtttccttttcaagaactgtggtaaccactattgattgttcaacaaatggtgctaaaatcattggattagaaatctgattattttttatttcctcgataaccacttggctattggattgtgacttttcatatagtcatgttcaagaatagtagcatttatcgatacaattactttattgtcatgatgactatagaaataggcacaccaagtttcatttgaatatcctacaaacatacacactgtagtcttaggagcaagtttcccagccatgggtttaagaacatgagcaggacaaccctaaatatggaaacgtttgaaattgggttttatcccgttccataattccattggagtattgcctatgctcttcgagggtactacattcaaaatgtaggtagccgcaagaagtgcatatcccaaaaagtttagtggtagtcttgagtaacaaatcatcgatctaaccatgtctaacagtgtcaaatttcttctctctggaacaccgttttgttgaggtattctaggtgttgtaagttagaacaagatcccttcttcaaacaaatagtctttgaatttagaatccaaatacttggcaccacggtctaatcgaagtgtctttaatgatttacctgatttcttttcagccatagccttaaagtctttgaacttcagaaaagtttcagacttcttggccattagataagtattaccgtatcttgaataatcgttaataaaagtgacaaagtatttatcaccacctcgagcttaaatattaatgggttcacacacattagtgtgaactagctcaagttgttctttggctcttttgccttttgcagaaaatggtctttttgccatcatgccttctagagaagattcgcatactgaaagagtttaaactttttgttctctcaaagggccatcttttgttaaccagtttattctatctaggccaatatggcctaaacatggatgccatagatacgtttcatcatcatcaaaaactttttgcctcttgattgaggcaatgccactctaaacaattcattatttaaaattgattgctcactagccttgagcaaataaagtctgttactctattttgcataacaaataggcgtaccattcttgcaaataataacctcattattaataaaaccaatattaaaaaaaattaatgcaaagagccaaagaaataatattcctggtacattcaggaataaaataa

SEQ ID NO: 314436 - DNA, 1009 bp, Cannabis indica
gtgtaaaaatttctttattttatgattattattttcttttttttattctactaatgtatattttgtttatttgcagttaaaatattttctttcttcgagggagtcaattctcaccttcaactgctaagattctcctcatgcatgcccagagttgttcaatgcgctgattttttttgcttcctttgtagagatgagagcactcgtattagtgtagctaaaataattcatctttaatttttttgctaaaaaaatgataaaacagtgatacatcaagtgagctaaatccttcctcattttagctcaaacactattcatactttgagcttttttaaatattttttttttcaatttttttttcatttttaatttttatctcaacactaattatttgtttattattttctatttcttacatttttttttcttattttaattaataaaaattataatattataatgttataaaagaaaatatagatcaaaagtttatgtaaaagtgtgagctaaaataaataaaattgagtttcgataaggtattttaaaaaatatataagagacgctgatatgctctgatgttgaagttgttgtcaattttgtctattctttttttagggtgttttccaatgggattatttttagatttattagtttcttgcttttttacaagtgtatatcttcaacatataatgtgaataatggtaatacaatacatgtataatattaataaccaatatattatatgaatttcaacaataaacttgattattataaaaataaaaactagcaagctaaacaattttgtaacttaagttcacaaaaactcaatatattgtataaaacattattagattgtaactaatattaataagacgaaagaggagtgctatcgtcaacttcttattataaattttagtcaacctttacactcaaaaatacatgtagaaataattttttcaaaatttttttcacggcggtgttcgttacgcttacaatatcattcctgtaaatt

SEQ ID NO: 314437 - DNA, 608 bp, Cannabis indica
tatatgtgtgtatatcagtgtatgagtgcaggatacagtatgatacatacgatgatgatgatctcaattggaaatgaaagtatatatatagctacatagatatagatagatagatatatatatacatatgtaatattgctcagtagattgatgaaatttatatatataaatgtatataataattaatcatgtaatttactcattgtgtagtgatggaagatttgactcattggtagattaattcacaaatcattgtgtagtgatgaagatatgatttttcttttttgtaaggagtgatgaagttaatattaattacctttttttttatatgtatatatgttttagttatatatatttacaatgaattgtattgcatatcagcaagtcttcactgttctactgatatttcacaattgtattatctatgttaacacattattacacatgaaatcattattgtatcatttaattaatttttaaatgaaatattgttgtaattgtatcgttttattatatttgtgagcttaaatagcggcataagtatctaaagttttatgtttgtaagcgacataaactcaatgtgtatttttagtcggcgataagtacct

SEQ ID NO: 314438 - DNA, 859 bp, Cannabis indica
ttcaatttcctacagttactaattgttttgctatggtgtagtgatctttattgcaggtgcaaggcagggaatggtagaaaatagagttgttttaatatggtgaaaagcagaatttattttctgaagcagtaggtctcagaaattatagcattgcttcagcattttgaaacagggatacataagaaaatgaattgttaaagcaatattgtaacaactgggaggattgggttctaaaaaaaatactgaaagtggacataaatctcattgatcagaaattttccccaaaaaaaaatcatatacatatacatatatatatacatacacatataataatatatatcacaaaaaatattaatagtatataaatatctttaaatagataaatatatataaatatagataaatatatataatgataaataaataattttttttatttttatttaccttaaaaatctcattaacccagtcgcctcttctcctgcataaatctagccgacccaccattcccatccccaccaaatcaccatctgcgtccaccattaccagtcaacatccgaagtacctccaccaacgagttccacgcacgccaactaccatcacttttccccaatccgcgcgacctacctccgtttcaccagaccaccatctccgtccacatccgaaccactacccagctccgcccatcgtcaccactttcctctctgcaggaagcacatcagccaccttcttctacacatgagatcaactgccattttcggaggagaatcaatggtagaaaaatgaagtacagaagaggaaggagaaagaagggggaccaaagtacaaaaagagaaggacacaagctctatttgtttga

SEQ ID NO: 314439 - DNA, 1452 bp, Cannabis indica
ggttggttaatatttttgagtcctctagaggtgccacgggaccctcaagaaagatttcttaactcatttgacatttataagtcttggtcaaagttgcaaggttgatttttttgattttttgaaaatcaggtataacatttgcccctaaaagtgtttgtcaaaaactttcgggaaaggcttttttttattgtacccctcatgtcttaaaaataataagcgtgttgccttttgcttatttcgttgtctcttggagtacccgattgagactttcgtcgttgcgagtcggttgtgtcttcttggtgactcctctcgatatttgtgaaatttaaatttaattatgtgaaaagaaatttaatttgtctaaggatgacaactttttattctttcacataattaaatgtgtaaatcacaaattttatcaacacaagtgacaaaaaggagaggagtgtcattagcacttaaaataaaagacatgtgccaaatgtgccaagggtatttttagaaacccatggctatatgtgaggcacgaccataaggcctcttttccttataaataaaagctattctctcttccaacaacacattcaaacttcactcattccatccaagctttcaaagagaaacaactcctccatcttaagcattcacacacccactcaaggtattttttttctcttcgttctttttattattttccattccctcttctcatccactcattacatttgaaatttaaaaaactcctagaaatcctcattgttgccgtggccacacattggtgaagggagaataactttttaaattttcttcaaggcttttgagaattcaagtaacttttgaggtaatttctaattctttttgcttttttaatagcacttgattggttttagtataaattgcatggatggaatttttgtggatatggaaattagaattgaatttgtattttcttgaatgtgtttggatgtgttgtgggaattaaatttagatagattttggatttattttgaattggtattgatattggtgatagaatttaagtaattagattttgaatttgtaaatttgggagaaaatttattgttatcctaatttttgcactctgacgtggcatcacatgaatggtgacacgtggaatccacttgaaacatctgctcgggaagcatagtctgagtaggatatctcactggcatgcccagagcaaagtattcagcaatccgcgcagagcaaccaacacttagcgaattcaactttcgcatcgtgagtcatcagcacaatccctataactcaaggatcaatttacgtggatatgtcatacacacgatcccactatcagtgtattcagcctcaatcccacgatccttgtattcagcattgatcccacgatctttctgtttatacgcattgtaaagagagaggggaaactcttcctctccaagcttactagcccta

SEQ ID NO: 314440 - DNA, 1916 bp, Cannabis indica
aatgaatatatcattgaacaaaaagaaaaaatctaagaatcccagagccaatatatattaaatattaagatacatatttttaaaaagttctcatgaataagtagatatcatgtaaaccaagtgctccagtagcccatctaggcccacagcccatagttacatatcgtgtgacaaaaggtacacgtttacaagtccaccagaccaagaaaactgggctccactccacattaaaacacgtagtcacgtacacggtacacttctactgctacacctctcaactacaaataccatgggtaaaagggtaaaccacaaacactttccttttgttgttttttaacaattttacttaaaaggaagtcaccgaatttatctactagactattcgtggattctaggttcaaatgtaatatccaaaaatttcaagggtaaaataattacaagacctaccccagtgatctgtcctatcctatcctcttttcttccacaacccgttacccacgtcccaccacccgctataaatacccacttctatcccattacccttcaaaaacctcaaacacacactcacaaaacaaaacaaacaacaacaatcccccaattctttcatttcattcattttttcttaccctaaaaaatcaccatgcgttcttacactatcttcttcctcttgggtctcctcgtccctctcgtggtctcaaccggaaggcataccaccggtgccctcaccggcgcctggagccctatagaggaccttaaagaccctcacgtgaaagagattgcagagtacgctgtgtcggagtacaacaagcaatcgaagtcagatctgaaattgagcagcgtggtcaaaggcgagtctcaggtcgtcgctggcaccaattacaagcttgttcttgcggtcaagaatggacctgcgaaaaagtacgaagccatcgtttgggaaaaaccatggcaacatttcagaaatttgacctcgtttaaggcggtttaattttataattatcgcttttaatgtgtgaaattttttgttattttctcttataccagctttatatatgtatctatatatatatggcgtgtgtaataccttttgataataaaaatttagttttgatttcttgatatcgaaccgaccatggtcttcttcttcgtttacttaatgtatggttttgtgtagtgaagaagcgtaatagtcttcacgtgacaacagaggttgcctattagtcttcgtatacaacaaaaattagattgtcaaggaaattttgaatctaagaaagagtgaatcagtccaaatgctgtttttggttgtacaccgaattaataattgaaaacttccataaaaaattcaatgtttaataagggaaattcctcttttcggaaaccgtgtgaatgggataaggaaaatataaaatattagaaatctgacctggatttttatttttttggtagttggatatctggacttggaatggaagaattgaatttggacaattttatataattatatgaattaatgtcactcgtttattaatatttgtttgtttaatatcaaaatatatttttgacaccagattctttcattctaatataagttttaactttatatatccttcatgatggtaaataataatgactattagtatttggacatatctgaattttgaaatattctttaagtgcccattccattagtattaaataaatatgacacattagattcatattataaaaattagttattaatttatataagccagttagtctagtggtgtgagaggaatgtgaaaaagggaaagcataaattccaacctaaaatttttaaactattaaactattaattaattataaaatactattatactaaacgcaaataaaaatattaaacttattacaagtagagtagtctctaatcataaaaa

SEQ ID NO: 314441 - DNA, 2607 bp, Cannabis indica
ttatttttatttttttatattattatttttaattcttttttaaatataaatttatatgcatttgattaaaataatttattatttattttttattatgttttatctaattttttttaaaaaaaagtagaaactcaagcatataagaaaaattctaggttgatgttgtttgttaataataaaatataatataaattattttggttaaaaaaataagagatttaataattaattttttttttcaaaaaaataattatttattttattataattagtttatataattttttaatatgtaataaataagtaaatatagttttagtacaaaaattattatagtcttttaaacaatcaaaaagcagcttttagctttttcaaaagctatgccaaacgaaccctatgattgtgaaattctctatcatctcaagaaggccaatgtagaggcagacgtcctaagtaggaaaagactcgggcaagttttcaaaatggttatgagttctcctctattagcagtggatatggtcaaatcatgtattgagtttgtggttgtcagacttacaattcaaaactttaatcagacttgttagaaagaattagaagtgctcagctagtggatccaaaattggtgaaaattcaaggagaagaagtcttagctggtaaagctaaagatttctcagtgccgagtaacagaatgttactttaaaaatcttgagtttatgttccgagtaatgttaaacttaaaaagaaagttcttgatgaatctcataccactccctattcattacattccggtaccaccaagatgtaccaagatttaaaacccttttattggtggtgcggtatgaaaaagggtgtggtggaatatgagaccatatgtttgacttgtcaacaaattaaggctgaatcaaagacctacagggttgttgtagcctttgacacttcatgagtggaaataggaggatgtcaccatggatgttggggttagattacctagaatcacgggtatgtttgattccatatgagtagttgtggatcagtttaccaagtcagcacactttgtgcttgtgaaaacaatgtattcagtagatcagtatgtagaactatatgtaaaataaatagtacgacttcatgggactccaaagtccattgttttggataaggatttgaagtttacttccaagttttgggtaagtctctaatgaaccatgggtacaaagctgaagttcagtacaactttccatcctcaaacagatggtcagcccgagaggataatttagataatagaggatatattataagcctttgtgatggattttgaaggctcttggagtaactatttgccattgatagggttttcatacaacaatagctatcagagtacaatagggatggctccagatgagatgttgtatggtagaaaatatagattttcaattcactgggatgaaactggagaaagaaaatgcctaggttcggaataaattaaacgaaccaatgaggctatagggaagatcaaggccagaatgcttgcttctaagaacatgcaaaaaagttatggagatctaaaacacaatgatatggaatttcaggtaggtgatcatgtcttcctacatgtatctccaatgaaagagattaagcattttggggaaagggcaggctatgtcctagatttacaaggccttttgagattcttaagaaggtaatattggtagattactgtttagccttgtccatagctttctcaacaatacacaatgtatttaatgtttctatgttaaggaaatacattttagatccaacacatatttctcccaagtctatatggggctcattgatggttagctcgccaattcctagccccgtctcaccaacacaatatcaaggaccaaatctagttatggtgcccgggggttgctccatattggccattcttcagttccaggcactagtggagggtcctccctaggtggcagaggttgaccattgagaccaactagaatggtggtgtcaacctgggcaattgtggtggccaggttcgtggtgcttgccatggtagcaggtgtggctgcatttgtcgggttcatggagattctagttgtggctgaacatgaacattaggaccagccgccatagggtcttgaggaagacccaatgaggctaaggttgtagtcgaagttctccttgtgttaaccatagcattttgatcagattaattgacaactcactctcaataaaatcaataaactgttgacctcaaaatttggccaaccgatagcggagtcatatttaatgctgatgcttgccacgtgttacttaataagaacatagaagtaaataagacacgagattttatagagattcggcccccttagctagtgggtaattatctattccccttttggttatattgataccaaagataatactatgcagaccacaattgttgtggaatcaagtagctctcttaagattacaatgtatgaatcagtaggtaaatctctaatgagagagagagagagagagcctttagggcgtgtagaagagaggagaagagagagttagggttttagacttagagttgagagtgtagggagcttagaggcttaatga

SEQ ID NO: 314442 - DNA, 2130 bp, Cannabis indica
caagaggggccgaaagagtactgagcgagcttgatgattcgtcaagattagccattgtggaaagcagagactcgtcaataggatagtatgagttatggctctctcatatcctcaaatagttcaaggttggatgcaatatagagaaaagaagtgattatatatatggtgctattttacaaggaggaatcaaaagcttcaaacaaattagctatgtcaccagacaccaattgtgaacatatctcaactacaattaaaaaattcagattatatatgcatatagaaatacattgtgagaacagtaggagacgactacaagtgagatacggtgatgacaacatgtaaaatacaatgatgacaacgactttaaatgattgagatataaatattacaggagaaaaagtattacttaaataataataacactatttttttctatgccacgtacttttttatttttatattgaaccaatttaaaatttcatatgtacattgatcttataaaaccaacttttcaattttcctaataataataattaatattatggttaatagactttaaagaaaaatcaaaatttaataaatagaattattattatcaataggtaattttaatgttattatatattagaataatattttattttgttaattattatattcataaataattattttttgttatcatacttgaaaagtattataacagacgttcgaagagcaactatattacctagttatatatagagaaaatttacaatgcggcacactctcttttcacagttaagcgacacagaaaaaatcaatgacagcacaccacgtttgtgaaaaacacaaacataaattggactttcaaccaccaaatcaattaatatttctctgttaaattatttatctttacaaataggataaattaaaattgtcgcttcaatatgtcaattggattagaatatgtaagataggtcagattaaatgatgtcatggagtctttccaccctctttttttatcgtctcttctttacttttcctctgttgttccttttttttattatttcttcttcattgatttcagaatatttatattgtctgctattgattagaatttcagtttaaatctaaaactataaaatcaaaatttgattatttttgaaattaactagccttttcgatttggtataaatgcttggatttctataaatattgaataaaattaaaatttaattgtttgtcaatttatctagcctcttcaatttggtataaatatctgaatatctatgaatattgaataaaattaaaatttaaatgtttataaaattcttaattcaaaaagttcataaattcatcatggagaatttatcatgggagcagtttaccaagcaatttctatcgtcatcaaaagattttattcactgattacgtcatgaactaactgctctgttcacctttattcctctctcactcatatttggaaaatctttaacatttctccacacaaccctaacaacccatgcaacttttccccatcataaccagtactacaatttggtcttttaattacactatttagtgatcacacaaaaagtgcgggtcactaacaatttaggagtaattttaataaccaacacaattagactctaaacattcagtgttagtctcttataaggtgtgtaactgagggtcactaaaaagtgaaatccaaattatttttttttttatcaatttaaaaaatattggcatatagtgacacgctaagcacgattgggtaaatgtatcccgacccacctagcatgtcactaatgatagtttttatgatccatatcagagttataaaagtagaagaaaaatttgataaaaatagtttttatccaatatgaaccataataagtccaatgatctcaacataattcatatagattaaatctaaactactaaaagaaagattataccgcttaaagcctcatagtatccttgtttcttttcatataattatcgatcatccaatctaagaactttattgaagaatccacaccttgttctttcaagtcagactcaacactcaagaaatggaatgggatattagatcttaattaagatgacaaattaggagttacagtatgtactcaactcatgaga

SEQ ID NO: 314443 - DNA, 769 bp, Cannabis indica
atatgttcgttgctcctcaatccacaggtgccccaaatcttcttggttctgtaccaccagggcctactcgaaccatgcaacctcctgcaccagctgcaggcacgaaacttgtctgtcaactctgctctcgcacaggtcatatagcctccagatgttatcagcgttttaacatggaatttcctggagtaggtgcagctaatgtaggatctcaatctgtcaatatagccactgctgagacattacttgatgatgcatggtatccagactcgggtgctacaactcattgcacagctgatgcaaccaatttcactcagcaaactccttaccagggtaatgatcaagtccacatgggagatggcactggtctcaccatatagaatgttggtaaggctactttctttactccctactcctcaaaaccccttacattaaatcttatgcttcatgttcctcacatcactaaaaacctcattagtgtatctcagttttcagctgacaacaatgcctattttgagttctaccctaaccattgtcttgtgaaagatcaggctaccaaagcagtgttgatggaaggacaacttagcaatgggttatatgtcatccaaccctctcagattcaactcaccagacctcattctaagtctgttattttccctgtagcattgtctgtcaataatgtgggagtcactacacccacttctcatgtatccaattttacaccattctctttatggcataagaggcttgttcacccctctgccagagttgt

SEQ ID NO: 314444 - DNA, 664 bp, Cannabis indica
agagagagagagagaaatgataaaggggtagacggagaaggagggggatggagggatggctcgccaattaagaggaagaggacaaaagaagagcagggtggaggagggggatggaggggtaagccacctgagccctttttctcttccggtgtaaataacaaaagaggaagaaagggttgggtctggggtttgtgttggtagatcccactcgcgaaccaactttgtatatggtcttcacaatgtcaagattggttagcaactattctaaactgatgcaaacacaaaataaaattttaagaaacctcccttttgttttcgtcgattttgacgttagcgtctaattagcaacttatgtacccttttttattgtcgtttgttatcaaatgaggaaacatttctaaccttctctatttcatcgtcaacgccatgaatagtcgcgttaactgacgtaaataatacgttttacagtagtgtaaagtatggtgtcttatgggctttaaattctaaaattgtccaaaattgattagagaaaaagatagatattaacaattgatagaagaatcaaactcacaaatgaaaatgaatcaagccaaaaatataaaaaaaaaaaaaaaaagaatgaaatgtgtatagtagagtaatagtattaatatatatatatata

SEQ ID NO: 314445 - DNA, 626 bp, Cannabis indica
atgtggtattaactttatggacacttaaatatataatattttagtataacttaaagtttaatatagtattatataaaaatataatgtataatctaatttaatataatacaatacaatacaatacgacctaatacggcattccaaacgagtccttaaaattttttggcatacaattttactaattcagtgattgtcatgtactaatctccagactttgataattgctatgtctttcaaagtttcacatgtaccaaattatgttcattaaactttaattcatattagattttccatattaaaatttgacaaaaatcctaaaatcaacataatttagtacatgttaaatttaaaggccaaaaatcttaattagtcttttttcttactaacacttatctattttttaaataaataaaatatatttttttgaggaaaataaaaaaattatataattggttgatattcatgtacttttgcggctttaataagggaattatcaaaatacttttttttttttttgtagataatacttgttattattaaataaacaatgattcgtttacaataacagagtaaataggtgaaggaatagcctccaacatagaacaagttgttagagtttataaaac

SEQ ID NO: 314446 - DNA, 1584 bp, Cannabis indica
aaaatagtgaaacataaacacatatgatcttttgtcaagccatcaaaacctgtaagaagaaagtcttttatatcctgaaattgataagtattataaaagttagatagactggttttcctccatattttccttgctctagaacatcctaggagagcatgtgtgacagtgtcaaaatcatgtgaacaaaaagaacagttaggcaaggggtaatttttctatggaacagatttgaagaagtagggaggatatgatgataagcacgccatatgaaatgctttattttgggagggacttgaagatgccacagagttttccaccactttttagaaaaggcaagattggaggatgaaggtgcagaagtagtgaatgaggctcgagaagaggctaggtggtaggccgtgctaactgttaagaagttccccgaagaatgaggactccaaataagagtgtcatcttgggatggatctgttgggatagtgagaatggtactaacaatatcttccgtgaagtatgtatgaagtttttgaagatcccaacatcctaactcatttatgaaaaaagacacaatggaatcaggtggaggagtattggttttaaaattaattgttttgaatccaggaacccaataatggtggaggatagaaaccgatttaccattaccaattttccaaatgagcccctgagagagtaagtcccgaccccataaaatactactccaagaataggaaggtgtgtgacccttagtggctgaaaggaagtcattatgtttaaaatacttggctttgaaaagtctagaaactagagaattaagatttgtaaaaatacgccaagcttgttttgtaagaagggcttgattatgaagaacaaagttacgaaagcctaaacctccatgaaacttggaaacacaaagggaggtccaacttttccagtatgttttatccttgttaccagtggatccccaccaaaaatgagcaataagtttatcaagggccttacaaatggaaacagggagtcgaaaacatgacatggcatatgaaggaattgcttggataaccgctttaataagagtctccttcctagcttttgaggaaaatttatgattccatacctgaagtttagcattagccctctggagaatgcaatggaaggaagattttttggatcgaccaaagcactgcgggtctcccaagtattcagtagcaaaaggcttattatcaatgccaagggtgctatggaagaggtctctctctaaaacagcagtatttggtgaaaaaagaatggaagatttagagaagttaactgattgaccagttgccttatgatatagagaaagaatatctataataattctacaattattatgagaagtattagtgaacaaaaggctatcatcagcaaaaaggaggtgagagatgaaaggagcagacctacagatagagatacctttaaaattagtatgtctagggtggacacgaatagctgccgaaagaccctcagtgttaggttatttttagcctacattttgggtcactttttatagctgttttccttctttgttattctttttggaatagaattatgctt

SEQ ID NO: 314447 - DNA, 3037 bp, Cannabis indica
gtgtagtgttcttgtttcttatttttttttttgcatcacacgtggccacactacctttcctggatgtcaagtgaggttattctaactcattgaaattaatatttctagcaatcataacctttggtctacctttcttagaaatgaaaattatataccccttggcacctaaggcataaactaaagttctcttaactaatctaagtttccatcttgtcaatagattggtgtacatatatgtcgtacacctaaaggttcttagatgcattaggttcagaattctattataccatatttcattaaggatttttagcctataacacagtttgggtttctgtttataaggtagtttgtagtatttagagcttctcccaaaatagtttctctaaatcgaaactgaacaacagacatctaactttgtttaacagggtttgattcatccttttagcaacaccatttttctctgggggtcttcactacagttctatgcctagtatcccatactcttaacacaaaatgccaaatttagagttaataaactttaacccattgtccatcctaagtttcttaacttttagatcggtttagttttccacctgagttttccaaattctaaattattccaggctctcattcttagtttctagcaaataggcccaaacacacctactataatcatcaattatagaaataaaatattgcttaccgaagtgagtggggactttgtatggccccccaaagatcatcatgcatgtattcaagtatcttcttagttgtgtgccttttcggagtgaacttaaacttatattgttttcctaaaacacaagcttcacaatcagtacatctctgccatatttgatggcagctttgactttttgatatgcgattggaggagatcttaacaaaatgatggtctagatttcttcatcaactttatgatttatattagccactcctacaatgatctcattaaacctatcaatattatcatctaaagaaagagaaaaaatcattctaaaaccatataacctttagcaaattaatcttgctaacaattgatggtttcatgtagaattcttcaagcttgtcccactttcttttgctgtcttttctctaacaagctttctcctcacactgttgcacatgtacatgatgatcgtttaataagccatctcttttatttctggtttctcttttggtttcttattctcagccagtaacttctcatctccgagaactttggagactttttggtgtactaggatccctttcaaactttctctccatagcacgaagtctcctgttttattgaatttctccaatttgaatctcccattgatgacaataattgtttcttcaagatttgcaacagataaaatcttgattttgcattcttgatcgattatcaagctctaatttgtggagaaattacaactaatatgcaaaatcaaaacaactaaaacttaaataataaataattagcaatgacaagattagcaaataacacataacaatcagagattaaaacatggatgaacaaagtattaaaatcagaaatgataaggcaataaaactataaaattaacaccaagatatatattggtttaagtcttatagatcaatgcatctctcactctagttctgaaacaccaccgaaatcgagatcgattctctcaaagtgtttatctctcacactcttatccaagaatcttcttcatacagaagaatcttcatacaaaatctaaatacaatctctttcttttatctataccactctttctacctctcaatctttctctctcaagatcacctctcaaaactcgtcgatctccttcttttgttctccctcgaatgctaagtattgatagtatttatagatccaagaaatagatcctaaagtcagtggctgccaatgataagttgtttagttagttatgacttaataagcttaacaaaattctcgcaacagtatcttaacatcaacacaagaagaagtacttccagatgagacgtaagctttctgaaagacataccaaaacatacgctgaagggacttcttggataggaaaggcaataactggagtcgactattcgatctcccttccaagagggaacaactgtccatctagaactcttttctcgagggaggctagttttcatgaagactcaccaggtggacatgataggcatcctgaaaaacttttccggatgacacctatcactagttccaaatggttagtgtagacttttgggaacgcccttccggatacatctatctttctataaccagaatattttttggagatctttacatctggagtaactataccacaatttttgttttgtttttaaattctttccttctttccaagtttactaattgtagcacgatcagattcattattttctaaaaactattacaatattttttcatctttagggtacttttattatttctggcgtataattccttcaaatatatctaagttcatttcttttaattagttgcaaattattagttaagtaaatttttccaaaaataaaaaaaattaatatcttgtgtcatgcatttagctattaaattctttccacgtgctttaattaataggataagttgaggaatacttcttttttttatccattaataaaaaatactctcatattatattttattaaaaatatacatactttgatgagtgagttacctaatataccttcactttctacttaagtctatagcatataatttatattaatgtaaaagatctaatagggacatcagtatattttaaacaatatgaaaattaataaaaatcaaaattaaaacaaataaagtgaatttcacatcatttaacttaatttaataattatattatagaaaattactatttattttaataattatattatagaaaattattatttatttgtaagagatatatatatcatctcactattgcctgattataattaatgctcattttttgaagggtaaatatcattttggaccctgtgttttgcaaaagttacagattggacc

SEQ ID NO: 314448 - DNA, 1495 bp, Cannabis indica
ctgtatttttttataagtttcatactgcagtatattgtgttaagtttacactggtgttttactggtatttttaggtgttctactgttgttttgagttgttctgctttgtgttttactggtattttataaaaacacagtatttttaaaaagatttccgtgtgacagtatttttgtaaaaattaacctaaattcagtatttttgtaagtttctttaacaaatactctaataatatagcgtggtactcgtgctactcatttctacatgttgaggggtccccatgcttgcacaataatactcttttattgaaggaaaacataaatttgggcccatagcattgccacctttttcttttcaattatcattgtgaactgaattctttttaacatttttttcccttacatttttacttttgacataacaaatttactttaactatatatacattgataaggatggattgagagtttataaaaaaaatagggagcaagagagatgaagaggataaatgctcttctttgtgttgcttgatattgggagtaaagttagaaggattaagtaaaataaatattaaaactaatgatatttttttattttattttatttatttatttattttttgccttttttctagaatttccatacttttggaaggattaaaatttgtatactttaatggagagagtctccctccatctcttccccttctctctgatctctcttattaaacaaaaaatttacactatgtttggtaggagggaagaatagaaggaagggagatggacggaaagaaagggatagagggattgatgtgttaaattttgattgattaaataaatgttataagtgtgtcacgcattttaatttagtaggggattgttatattatttaatataataatatgtagattaaaatgtagtaatatattttattatgtgaataatatatattatgtgtttggtaaatactaaataaattgtgtaacatatgatttatttaacctaaaattgtaattaacactttgtaacatggagatgagttacaaaattaattgctgtcagaagcggagccaggacttgaatgctagggggaccaaattttaatttagcatcaaataaaatttttatagtatatatttatattcaatactaaaatttaaaaccaaaattatctataataaaatgttaaaataaaacaaaaagtattatattattgaaatttctactctatattatccaaattgagaatattattacaattctaattaagacacattaaattttaaatttggtaaatattttataaaacaaaataatttatataaataaaataattttaacaaactctaacaaattagaggagatcgtaaatctcaacttctattttaatgataaaagttatcaattaatgagtgattttgagttaaaatgtaaaaaatataactattgttataaatattaataattatgtggatgtccaaatcttttatttattacc

SEQ ID NO: 314449 - DNA, 2220 bp, Cannabis indica
taaacaactgctaatttccaaattaactaagcgggctttacaaacaatttcatcatccatagctttgggttatggaatttgacctgaaggtggttcacctgaaagtaaatcctcagaggtgctaacataggctttgggtttaaatataccagctttagcacgggttatcatgtgatgtgatccctgtgttcgaggcatttgagaaacaacaagcaggagggatttcatctggtgtggtgtttacaccagcagcagaagagggagataatggagcattgggacctgatatttcaggaacaatagtagcatgatcagtaatatcattattgagagtaatagatgttggagacctgtcttgttgggtgggaagggatgagtggtcaggagaggcaggtgctgcaacatgggatgctcgatgagtggaagtgactgcagcaggtgttgaactgatgggaaaatgaaggttgggcaattgtgaccaagcttcattgtgaatgattaatgactgttcagcagcatatgtgtttaggaaaccagttttaaaaggaaattccttttcattgaaaacaatatgtctcgaaatgtagactctacctgtagtacttaaacatttataacccttaaaggactcactataaccaagattgacacatttgagagagtgaaattgaaatttgtgagtttggtagggtcttaaacaaggaaagcaagcagtaccaaacgttctaagtaaatgatagtcagattttttgtgataaacaattttgaatggtgacttgttgctcaaaactagtgtgggcagtctattaatgaggtaaactgaggtttggaaagcgtccacccaatatttgagtggcatgctagcttgagctaagagagtcaatcccatttcgactatatggcgatgcttcctttcagctctaccattttaagctgaagtgtggggacaagagtgatgaaattgaatcccatgtgttcttagaaaatcatcaaaggcttgaaattctcctccccaattagttctaataaattttatctttgtttcaaattgattttctgcattgttttgaactgaatgaaggcactaatggcataagatttttgttttaacgggtacagccatgtaaaccggctgtagtcgtacccaaaatgaatgtaaaacttaaaatgtgtattagaattgattggagagggaccccacaagtctgtgtgaattaattccaacatcttagttgctctactattggacaatttgaaaggtaaggcatgagactttccatattgacatgcatcacaaaaactttcattgtttttaagcgaaatcggtacattgctagaatttaaaacaagtttaaaaattctagtagatggatggcctaatctcctatgccaaacatcttcctggaaagtaaactagattgttgaacaacattagcagaccaaacaaaggcactgttagatagagtggactggtttgagtgacacacagatttgggcagcaaggagttgaattggtacaatccatctttaagcatccctttgagcaacaccttccttgtgaccttgtccttcacaaaacaaaaatgagagtcaaattcaataagtatgtcattgtcagatgtcaacttagagatacttatgagattcttagccatttcaggaacaagtaaaacatctttaagcacaagattcttggaatgaaaatctgtggtgaggataccagatccaatgtgtgttatggccaaaggatggccatctccaacaataagtttatccttaccgccatagtcattcttttgagtcatgttgttggcatcttgtgtgacatggttgctggctccactgtcagcataccaaacctcactgtcaacaacttgaggagtagcaacaagagccgtaggacctggttttcgttgagattgattgtgattagggtctggcccatgtaggtatcatcatacctattgtaacagatagccgcactgtgcccatacttgccacacacttggcaagtgggtttagagttgtcgctgaacctgccatgacccctgcctcgagatgaacccccaatattgttgttagagaaattcccacggccaggagcagagttttgattggaattctgagatgagtttccaccttttccatggctagtattagtagatctgctggccaagttagtgttggaaattatttttccaggatctagatttactacca

SEQ ID NO: 314450 - DNA, 598 bp, Cannabis indica
gcttcttggaaggctatttattagaaggctatttttccgcatttgccaattttagagtcttatagttatgtataaaattttgcaactgtattttgggatctcgagtcttctaaattttataaaaaagtttagcacatttccaataattcacgtaacgactcttagttattagggcgttacataataaattttcgatgattccttgtcccaccttgcccttgtcagaaatttgaataagaacaaggccttaacaaggaggcatggatggttggggcggggacttgggaatgcccttgcccgacgatgattccttgccccatctttgcccttgtcgaccctatgtgcattgctactcatttccaaacataggtgagtagggaagtgaaaaaaaatatcttaatatgattaagcatataaataaggggtaatgaaatggatggatttatagatggaagagttgaaaatgatagtcaaatagttttaggtaaggaagaattgagttgatgaaaccacaaccagccacatcggaccaagtggtcacgctaactaccagacatccttagatctcgtctcccactcctatatcacatatctttta

SEQ ID NO: 314451 - DNA, 460 bp, Cannabis indica
ggcataaaacccaacaggcggacccccgccgttaatagtacatgggtccgccgctaatacatttttatacaaacaaaaataaataacatttaatagcagaagtctgccggtattagtcctattagtagcgtcggatttgctccgctgctaataaccaaaattcttgtagtgaaatagaaattaaaaataccttatgtgaggggattgctcggacggtggtgatgcagtggtggcaaggagttggtttgacgatggtggtgcaatggtgggaaagggaagacagagacaaagagagagagagagagatagagagagacgacaatggtgcagtggtggcgacaaaaatgtagttgtgtagtggtggtgatgagttgtgcagttgtggtctgatgatggctacgggcagaggcagagagagagagacagagagaaagagggagaaaattagagagagagagag

SEQ ID NO: 314452 - DNA, 838 bp, Cannabis indica
atttgggaggaggtccctcatggacacgggccttcatctctcttttaaaaaaaaaaaatcgtttcttgctatagcccttctaattgaactccacaaacaattgagaaaagaataagcaacccaggcaatggtcttcaatccaaggttacagatttgtattagacatacttgttcagcacatagacgcaatgcattttgtggaagaccatccggcaatttattagaacttgcagctgctgatagtgcctccgaaagctgctcaatcgcaaaggctccactcttaacaagtgtatcacgtttagtatcccatgcttccttcacctttctaaagaacaaaacatgaaattcataatatgaggaaagaagaccaaatataatatatcctaacatataaacaaactcagcaacactttgtaataataatataacatgaaatatagtgtctatattccatttttttcaccttagtatagtcttgaatcctggtcttccatacttatcctcaggagggaaatatgttccacccatgaagggctttaaatcaggtgaaaggaagacagtcagcggccaacctccaccaccatataaagcctgcacgtacgtcatatatacctaaggaaaataaaacagcatttttcacattagaacaataaaatagatggagagaggttacaaattacatcacttctaaaatatgaagtactaacacattaaagtaaaatagacaaattactaagagctcgtttggaacgtggtattaggttgtattgtattgtattatattaaattagattatatatcatattttttttatataatactatgttaaactttaatt

SEQ ID NO: 314453 - DNA, 2148 bp, Cannabis indica
tacaattgtaagaacaattttatatgtatttatacgaatagaaatactctgtcaattacatgtagtctcctctctcccagaactttaaattttacaataatcatttttttctttttaaatggttacaaataatcatttatgtatggaaatgagtatttacataaatatgtgagaaatcgaataaacaaatatttgatttgtcaaatttctccaaattatacgtttcctctctatctcaccacttgcaatttgacaaatacatttatgtatgaaaatgtgtattttatctgtcaaatttcgagttgtgggacagagtgaaacatgtaatacggatagagaatatttgtatttgtacttgtacacatgtaattgaacaaagcatcttgtatacaatttaccaactacatgcagatctttacaattgaagaggtcataccgttttggatagctcactgcccatttccatagtccgcaggcacaagggaattatttctgtcgagagaaggaagctaataacttctgtctcatcaaccttgtaaaatagaatattatgcaaatattacaacttcagaacaagaaaaggctgatcatttgtaacttggatatagttacaatttccttatggcctcaatgagtgtgcaaaagcaaggaaggaaaggaaagcccacataaatattgacaggaaaccgaagaaattgtgtgaaacttaacattgcttttaaacatattcctcccaataaaaattgttcattatgataatcatgaaatgtaaatcctgctaaatcccaacaatcctaagaacaaattgagcaaaaagaaaatctgtacaatacacctggtgcagaaagatagaagtgtaaaatgatgactcccatgattttgttgtctctaaaggcatgaaaaatccccaccttcaaactttcagtgaaaaccagcaatggggtaagatctacaaaatataagactgaaacattgtataaatttggaacaagatgcaattttctcaggtcagaaacattgttctgcttaacaaatttcagcctctggatcaataatgttattgttagaatctgagagtgtgagtaaggtgcatgggattccatctcaaaagcaattggcaatgagaagagtagtatattcatcttataaatggtataatctttccacacattaacagtgtgggactaattctggtagttatgaacattctaatgcgggatatgcagatgagctatgcaattgctagcacaaaaaataaccaaagtccaaaaccactaaataggaaaaaccatgtgtattagattattacacacacaaaaaaaatataaaaagatagtactaaagatgatttaccttcaccaaagccccaatgacccctagactagtaagcctcaagtactcaaagggtcttgacttgctcgctgtattaaggaaaggatacagatacaatggaatatgtgctgcaaataagtgaaagtttcagtagaacgaactagttacttggaattaaaacaataataacatatgcatttgttaccctctgtaaatttatgaaatctagaaatatactccagaacatattttattatgaaaacaataaataaacaccatacagcatagtaggatggatccactatggcactgaacttgtttgtctattaatctgtgccagctcttgtgctggttgtcacttctaggaatttcagtagtcctgggtaacctcccaagtgcaagactctaaacaagtcgacactcaactgccctcttctgaatctcctaggataccctcataactgaacagaaacaagtagctaacccccttattagttatctttatatatttctcactaatccttcacatggttacattctttcttctagaatatgtaaatagaatgggttgttatgcaccgaatagtcaatacaatagacataaattaagtaacggaaagtgaaagaatttttaagggcttggttacattttattgggaagtgtaagagtctatactgggcatatttaaatatgccaagggaggtgtattgctatgtagtggtctctagttttgtgtgtgaatatatttgggtcctaacatgggtgttctaacagcatctcctaccacgtaaaaactactttttcctctcccctct

SEQ ID NO: 314454 - DNA, 1382 bp, Cannabis indica
cctagtactatataaacactgccagagacgcaaaaatttgcgtacgtgtgagaaaaatcaagaaaaaactataggtccatgaaaaatgaaagaaacttttagaaagggatagatcatacctgggtatatttgtaaaagccagaaaaagaatgtcctctgagaaaaagagaaaaaaaaagaagaagagattacagagtggtatgtatgtttgtctaagtagagattttgagagaaagaaagatagaggttgaagttgaagagaaagaggatagaatcctccgctaccaaaatatcaatacatacgtgctgtgtgattgtggtgtttgagtttcttatcacaagttaagcaaatgacaatttagtcctcaaatttgtggtaggtacagtagtagactagagaagagttagtggagggtataattggcatttaaatcctatggtttggtttgtaagccggaaccgaatcttattgtctgtcttaagcgttaaacaaaggacaaaaaaaacgcgcatagagaaaagagtaaaagctggatttaagaaaatattttttatttggattaaaatggatattagtttaatctacttaagcattttatatgatctactaacccatgatatttatgaggacaaacattttagtgttaatttctatagctaatgagaataataattaatctacaaatatatttttatagttttattttttgggaaaatacttcatatttttttttatagttttgatgatgtaagattcataatctgagtgtaaatatttccataaaaaaatatttgacgtcactttatcttctaacaactctttctctttttcaaattggggtttcattttttagtgtttcttctttttcttttctcgattagggaagttgtcgccagcttagctatgccactggtgttctttggctgagatggacttttgtggtgcttcttttggcaatggatccttgctcgacgagagttgggacgacggcgtggggtgagttttcttagaggtgcccattgtgggggattgcgcaacaagacttcttcgtcgtcaacatattcacttcatgaaagtaatgatgggggttccaaagtatgcattgatgggtctttggtgatatttgtataccatgctgttatattattatatataatataatatagattaaaatatttaaatgtgacaaattatatattaatatgagattaatatatattatgtgttggaggttatataatatcattatagtataataatacacataaattgtaacaaatgaggacttacaaatctgaaaatagattgtaacctaaggatcaaaattgataaatatgtaattatgtgagttgttacatatatgggagttatgaaattgatg

SEQ ID NO: 314455 - DNA, 1568 bp, Cannabis indica
tctctctctctctctcatttctgttatggtatcaaaataaatcttgcccatagcttccatggcaataccttcaaatcgttcccaagatggtgctcctccatcaacgatcgacaaccacacaacagaggtcaattctgatcctcctctatccgtgttctaaattcctcaactgttcctcctcgcaatccccaacttcggcctcaatctcagaatacagatccatatccccaggaccaatccaccattgttgatgacaacacaattcctgcacttaattttcgatttgttacaaatgaccactccagtccattcttcctcagtaacggtgatcaccctgggcttgtgctcgtgtctactgtcctcaatggcaccaattataaaccatattaatgaggcatcactatggccttaacttccaagaacaagatcgcatttatcaatggatctctccctcgtccaaagcctggtaatccttatctcaattttttggtaagatgcaataacatggtcatgtcttggttagttaattctgtttcatctgagattgcacaaagcataatgtacttcaatttggccactaaaatgtggaatgatcttgctgagcatttcaatgaaggcaacagggtgatcactctatttcttcatattttacaaaaatgaagtccctatgggacgagttgaaggaatttcaaccaataactacttgcacttgtggtgcaatgaaaattttcttggattattacaaccagaattaagtgcttcaattcttgactggtttaaatgaatcttttgcttcggttcgagctcaaattctactcaatgaaccaatttctaatctatcccgtgtgtttggtatgataattcaagaagaacaccaaaaatcccttggctctgctgatgcacctcctttggctgctgcttcaagttctaccaaccctccaagagccaagaaacctcgaccttcttgttccaactgtggcaaaccaggccatttggttgacaaatgttatttcagacatggttttcccctggttaggggacaagaagaaacaagacaagggcaaagctaaagccaatcttgcttccaccagcaaccccaaatttgacaccgacggaatttttgtgaatgttgatctttctacacaatgtcagcacctaatctctcttctcactctgcaactcagccataataaccatgttgaacctgctgttatgccccctgctgcatctaatcttgcaggtaaaataattttttctaattccacaacttagattatagatagtggagctacacaccacatgtgctctaacatagcatgtttttcctcttttactaatgttcaatttcctaaacatgtcattttaccaaatggacaaaaaacatcagttcgaaacattggaactatcaacatcaatcccccacattactctccacaatgtattatatataccaagttttagggtaaacattttttctatatctgaatatatgcataacacatctaattccatcttatttcattataattcttctgttattcaagatcctactctgaatgtggtgattg

SEQ ID NO: 314456 - DNA, 522 bp, Cannabis indica
gaaaagttttacaaaaagggttatatacactagttgaaaatacacattaggtacaacccaaaataactcaatcccataatcggataagttaatatgtacatttgtaagagaagacagtaatctcatgactggcctaattttctcttgcccttacctacacctcaaagtacccgtgaatcgcgagacttaacaagaaaagtaattaacaacataaatgagatagataatcaatccaagttaaaacaagagtaagcccatacttattatcataattataacaacaattcataatgaacaaacaatagtctcatgaggcaaaccataaacatcactacaccggataaacattctagatgcaatctaataaaacattcttgatacctatactggtatttaaatagtactatcgttgtcaaactagacaactgggatacctagaggctatttggttgtgtttttagtttttagttttcaattttcagaattgtgttttcaaaatgagaacagaaaatattttttttt

SEQ ID NO: 314457 - DNA, 946 bp, Cannabis indica
tgcaatatttttttttttttttccagtttttaatatgtttgcttccattctttagagatggctcctgaacttaaacttctagtttcataacatttcgtccggcgtcttacctatcagggttcagataggtttagagatatcaaggtcaagttcatggagcttcagttgatatcaggtacttctgggaagctagagtgctgactttctctggggccttggtccacagtcttaccatgaactcaaaattcattttcaatgcaaaccttcccactacacaattcaattcagtcttgtttgtgtacaatttgccaacgtgtatttccccctgaaggtgtaccactaagagaagttgtataaatattattttcctctatgtcttcccttgttcacacaataggtttagattttgtacaaacttcaaaattagatctacaatactaccaaagggatctggccgggtgctactagtgcttggtgtttggtacagtacacatatacaattaaatctgcaaaaaaaattatattagttaataaaaactatgtcgagaaatattgcaagatatgtcacaagtaatcgcaaactatgtcgataagcaagtcgcataacatcgctacatgtcgacaaaatgtttcctcctactaaaccaacacaatactctaaactatcgacacatgtcgcaaacaatatcgacagaaatggcaaatgtccatggcaagcataaattggcacatgttgtaattttagttgctacatgtcacagaatgtcgttaaaagtcataaccttcagcatactttaatatatgtcgctatatatcgtagattatcactaaaacacgtaaaaataaactagaaaacataaaatttaggcagctcaagtttcgggaacaagacaagtaaaataaaagaataatatgtgtaaatctattcattttaacctaaatacaa

SEQ ID NO: 314458 - DNA, 1377 bp, Cannabis indica
aagttcatatttatggtgttaaacaacatacttgtgagtagatataagatcctggtaaaataatttccaacacggatctcggtctaggtccgaattgggcttcgggtgtccgttaaggtcctgggttttggtccaggttcaggttcgggtctgcgtctcaagtttcgatctcgatctaagtttgggtttagttccgggtctacgtcctaggttctgatcccggtctaggttcgagttcgagtccagggggaggtctaggtttgggtcagatactgggtctgggtctgagttcaggtttgattttgggtttaggtccgggtttgggttcggtcctagtatgggttcgtgtctaggttcctttcctagtttgtgtctggggtaggttttgggtttggttataggttcgacttcggattcttgggtctgggttaggtcctggtttgggttcgagtcccaaatttagatctgggtctgggttccgggacctaggtccacggtctaggtcccccatccaagttcagttcctaggtcatggtctgagtctaggttcaactttgggtcctgagtcttagttttagtctaggtcccggtcggggttcggggacaggtctcggtcccaatcttggtccaagtttatgtttggatccttgtgagggtcggtatcctcgtctggttctcaggtctcaggtcccggcgagcgtttaggaccaggtcaggtcgaggtctcggtccaggtccgggtcccatgtctcaagtcccagtcctattgaaggtcttggtccaggtcctggtttgagtttgggttatggtttgggtttagttctggtctcaagtccgggtcctagtcacagttctagttctaattccgggcccaagtttggtttttggtccaggttggggtctgggtccaggtctgagttcgagtcctggtttgggtcctaggttcgggtcctaggttcgggtctaggtctgcatctgggttcaggtctaggtcccgtgttttgatcctgatctaggtttgtgtcggtattcgagttcctgtctgggtttagtccatgtcaaggtccgaaccccattttaggccaggggcttggtctggatccacgatcgagtcccgagtttgagttcgggttcaagtttgagtctaaatcctagtctgggtccgggaccgggtttgggactgggtccgagcccgagttccggggctgggtttttgtctagttctgggtcccggtccaggtctaggttctggtcacggtcttagtcctattctagggtcttggtcacgttctggttcatgtttcggtttcgggtcccaagtctaggtctgggtccaggttctggtccagctttgggtgcttctctgagtcccaaacc

SEQ ID NO: 314459 - DNA, 1743 bp, Cannabis indica
gcatcgactgagaacacaccccaaaacccacgacacacgcagtcgttccaactgatcagtacgtgccaacgtttcacacaggaaacaactttgggctgcttttggataactaaatccttcaagaattgaatagcccatgggttcccaagcccatggcaattccaagataaaatgctcataataactggtgggcctggataccaaggcccacctctaaaacgtttttggctcttcattcaaattctccaatccgcccatagtactatcagcatcattaatctccttcattgtttccttattagtacgtcttctcttattatctaaaataatgagagaatcttcattgtgatcttccaactgtagctcctcaatatcttgatttgcactaattggcatggttgtctttccatgatttactccaccatcagatgcttgattagcgccttcttgagtaccagaattattgccatcagattggattctgattgggcaattaatgtccatcgcctcctctgttcttctggacaatccattaccggccaccacctgctcctcctcatcacggccagaccgtaaccactgcgcacctatgaggtaattcttcttcctcgtaggagctttcatccattcaccataaggcttaatgctttgatcgaaattagaatcaaatctccgtggacaaaacctttccgaatgaccaataaggccacaaataaagcaaaaaagaggaacatgttcatacttgaatgtagtccatatccaggtaccatcttttttaatcagcttcatacgccgtttaagaggtttgttgatgtcaattgtcactcggactctgagataatcccgccatatgccgatgaaatttttggggtctgatttaacaaacttttccaatataattaccagcatgtttgaccacccaatcggacataaatccatacttcaaatcatgaagctgaacccacatatccaattcgtacaattggaccaaacgaggatcttcacccctcttcaagcgatgaaaaaccaattgcattctattaaaggtccaaggactcccgtcaatcacagtttgaacatcaagttcatagataaaaactgaaaaaggtagcgatttgaatcgagctctttgacatatactcccttacctggctgccaaagagaagccagcgtgtgtctcattgcatcaaagtcgatagttctattggtgaggaacttaccaaccaaacaccatctgtcatcaaaagcttgctcttctccctcttgttcatccgctatcaggacccctccttcctcctcctctaattgtatctgggcatattgttccatccaatcaccccctgccttactactcgaagccatctcagacgaaagatcagaaactagagacagaacaagaatcacaaagaaacaaatctaggattactgacaacaataaaccaaaatactttcaaaacatgtcaatagacaagacgtacgaataaatcatcttaatttgtaaaaaaaacagatattattatatttcactcaaaaaaaaaagatatatgattatataattatttaacttatatttaataatctaaattttttttttatgttccaaccagcaaccatcattatccgaagcatccactaattaaaggtatataagtcaccgtctccgatgccggcgccggagtagaagaagatgcagtcgttgaaaccagtgaagaagatgaatcaacacgtgtgcagcttcgctct

SEQ ID NO: 314460 - DNA, 1094 bp, Cannabis indica
ggccaagatgttgatgataatgtccttatcgatcttcaaaaaccctcgtggcttattgcctctgcgaatttgatggttgttattcatgtcattggcagctaccaggtaccgtaccataatttaataataatcaacttacttataataaaaaataatatttataaacataatattaactttagtataatgattaaactagattagtgaattgttcaattctccctcactttaaatcctagatcagtgtatcatgttttgaccaaaagtaatatttgtctctttcgttgtaagacttttggaagagttacctattatcttgagtgctcttgcatagtatcgagtggaatttctttttaattatgtaattctatcgaaattgattttaaattactaattcatacaagtataagggtagattaagaaacacactaagagttagaggggtatcattttaaaattaaacccaataaatgtttgtattggtttgtataaattatatatataagaatttttgttataattgtgtatatattatatatataggtttatgctatgcctgtattcgacttggtggagaggatgatgatggaaaaactgaactttccaccaggaattctacttagattggttgctcgaacaacttatgttggtaagaaaatatatcatataaatttatatatgtatatatataatatgtatcacaatatttttgattgttttaaattactatcaatatatatttgtggtattttcagataaaatataatatgattgtataataaaactacaattattaaagaatctcctatgtgtttataaaattatgaataatttaagatattcaaattatgattcaagtcatttattgcacttgtgtataaatatcgaaacaagcatgtttaaattttttctaaatatttgtgagaagtccctataattatattatgtaattttagattatatgtttcgcaccattacatgtttgtaccggagtttttaaatgtctttgaattctgtatgtaaaataattaaaatggtaaataccattttggatcctgtgttttgcaaaagttgtcaattggaccctctgtttt

SEQ ID NO: 314461 - DNA, 1775 bp, Cannabis indica
actgctgctgatgctggtccaattttcatcactcccatcgagcatgaacatgaagtttctggtttatcacctgtctcgggtcctactgctgtctctcaaattgctcaaccggttacaagtcaccccatgattactcgagccaaagctggcatcttcaagcctcgagtattcatgggcaaagcaacgtggaaacaacacttttctgaacccagcagtgtggaagaagcacttgcacatccggagtggaacaaggccatggacagcgaaaacaaagcactcaaagccaacaacacatcggttcttgtcttaccatctccacatcagaatttaattgggaacaaatggatctttcgtcacaaattcaatgcagatggtacacatcaaagatgcaaagctcgccttgttgcgaagggttttcaccaaagaccaggtatcgactttggagaaaccttcagtccagttataaaaccctctactgtcagaattgtattgaccattgcagcaacacacggctgggacattagacaattggacatcaacaacgcgttcctaaatggaacactcgatgaagatgtctacatgctacaaccacaaggctttgaggaaaaagggaaagaacactacgtgtgcaaactaaacaagtcattgtatggactcaaacaagctccaagagcgtggttcgacaagttgaagaaaccttaatcgattggaacttcaaaaatgccaagtcagatacttcattgtttttctacagacatggaactgacattatcattgttctaatatatgtcgacgatattatagtgacgggaaataatagcagcaaggtaaagaacttcatcactgaactcaaccaaagattcactctgaaggatctcgggcctcttcactatttccttggcattgaggttttcagagacgaaaccggcctttatctaactcagtccaaatatatagaagatctgctgaagaaaaataaattcatcaacctcaaaccgtgccccacaccagcaactgctggaaaaccaatgtccttaaaagatggagatcttcttcccaatccgacagagtacagaagcataattggtggactgcaatatctatgccacacaagacccgacatctcatatgccgtaaacaaactaagccaattcttgaaggctccaaccacagtccatttgagtggagccaagagagtattgagatatctcaagggaacaatacataaaggtcttcacatcagctgcgatggaccattgaacatcactggatactcggatgcagactgggcctgctgtcccgatgacagaaggtccattgctggtcactgtgtgttctttggaaatactctggtgtcttggtcctcaaagaaacaaagtgttgtcgctagatcaagcacagagtccgaatatcgatcattagctcatgtggcagctgagatatcctggattgaatcactactaaaggagatcagttttccaactcctacagcagttacatggtgtgacaacatgggggcaaatgctcttgcctctaacccagtttttcatgcacgaaccaagcacatagaggtggacatacacttcatcagagacaaggtattgagcaagcaactggatatcagatatgtcccatcttcagaccaaatagctgactgtttaaccaaaggcctgtcaaattcaaggttccaattcttagttgacaaacttgggatggctgactcacccctgcgtttgagaggggatgttaagaattaaggataatgcagaggaatt

SEQ ID NO: 314462 - DNA, 802 bp, Cannabis indica
atcaaactgggaatattaaaatacggaatttcacatattatttacaacacttatgtcaaaaattaaaaaaaaaaaaaaactactatacttagaaaaaaaaaaacaactaaatctaaaaatacggaaagtcatttccaattccgccaataattataatattgactataatcttttgatgaatttttagatccttcacctaagatcttgcatcttcagtttcttgatgttgagatgctcggtattgagaacctttatattcagatccttctctttgttcttcatgttgagatgcttgtgctttcttttttttttttatcaattttgaatatactcacgactctgtagatcgggtatagagtttaaatctatgaatataattttatttgcttctctcattgtagccacatcattttcttacttttgaatctttattttctctttgaatttcatttctgtcagagttactctttctttatgctttaacaagtcgttcaatttgctccattagtttttttttatattgttcttcacttttgactttttcttttgctttcttgatgccaatagatctttctgttaagttaacatcgatttgttcatcagtcatattgagatcaaatgaattcataccagtgaatgccaatgtcgatgactcaaaccaagagaacctgattgggatacattaaagttaccaccttgttgttaaaatctagttgctccattggcattgttatttgtaaatttctcacaatctttaagaatgggctactcatgatcgtatttgaatcctttcttgtatttt

SEQ ID NO: 314463 - DNA, 1245 bp, Cannabis indica
aaaattaaataaatctagtaagagtgattataatataagtataaatattttttaatgataaataagcccccacaagtaaaaattctgggtccgtcactgagtatgtcatatatattttagggtattgagaactcaagaatctcgaaagagtatctagattgtaaatcttaccgctttcattacacgcaaaacttgtccctcccagtaaggaagaaagccatcatgaaaatacacaatacgataagtctcagcaggagcttttgggccagaaatcttgtcaacagagagaatggtggccgtgtgaagtgaattttccgagtatagattcgtgggaggccttgtggaattttcgagctctaatggagccacaggaaccttgttatcttgcggtatggcgcatactacatgacgagagcgatgatgaggagtagtaagtagcctttttgatgagacattctctagtgcttgtccaaaatttgtcttaaaagccaaactcaaaggtgcactagagaaaccctaacatatagtaacaaattaatatcaagattaatactcaattaattaatgaaaccctaaaacaaagtatatatatatacaaaaataaataagaagaccaaccaaaccttgatgaaaaaagatcttttgagccccaaagacttatcattgatgagagaatgattggatgcaaaagaaacatgagagagggtagtgatagccatagctagctagctgttgtgataatatatgcttattattatgcttttgtgattgagtttgggtatttgtgattatgcacaaaggcctttatatagtgttttaaataatttaaacttacattataatagtccttactattagtaacccatgtgatttttctatttttcatgtctataataattaagtattgtctctatatgaaataaagtcagatatatgaatattaagaaacgtatttggtcatcaaatattttccaaaaattatgagaaatttttttatatgatagcgtacaacgtatttattgaagacatttgtagatttttgaaatatttagaaaaaaaaaaataatacgcaaaaaacaataatttaaataattttgtatgcacgtacatttttattttatacatatgtgaaatgaattatttttaatttactaactacatattattttgtaaggtgtcttataaaatgacattgtacttgttatatatgtatatataataagattaaaactatttaaatataaa

SEQ ID NO: 314464 - DNA, 1318 bp, Cannabis indica
aaatgaatagaaaatttataccttaatggacgttgaaattcaatattttctccactgaaatcggtgatcagagttataaccaccaacttttttaataggttcggtttacagtgaaataggggaaaaaaaaactttttgggtgtaaagattaaataagtgtcgaaaatagaagatttttttttaaaataaaaatagggtaaaatggtgtaaaaaatggtggagataaagaggtttagggtggtggttggcgagagttttttggtggtgggtttcaggttttggtggctgctgtgctcttttgtgatgaagaagacaaagtgaggtcgagtcctgaatgggtttgttaaataaccttttggtgttagtttttatcaaataaccgatgtcatatgttaaaaaaaaacacgtgtcaacatatgatatggcgtcagctattttgaaaaaactgatgctatagaagggtttcttgcaatttaaattctgatcctaaaattgcctttattaaataatatgtaataaatgatatagctacagtttttatcaaaagattgcctttaaatgtcaattttgaactagacgagtattttcacactctttagctttccttttatcaagttgatagaataatctaataggcatcttgtaggatcttggtctcaacattgcaatcagtaacattagctaccagagactccctttatttaggaccaaccataaggacgcagattttaatttcattcttgagaaccttgtctcgaagctccatgggtggaagttaaaaactctgtccaaggagggctgtgctactttgattaaatttgttaggctagctatgctgatctgtaccatgcagactaccaagctctcaaagaagctagcttctaaaattgatggtatgattagagatttttggtggggttgtgacccaggtaacatgggtctctatttgaaggtctgggatcgactttgcctcccaaagtcaccgggttgcctaggtttccaaaagtcactagaaatgaatcaagctctgcttgctaagtggggatgggccctcttgaacgatgatcaatcgttgtgttgtaagtgctaaaagctaaaaatctgagaaacaaatcattctttgagtgtgcttataagaattctgactcttggttatggaagaatgtggtgaaaaccaaagagatccttaagaaaggttcttgcaagataattttagatgggaaagagactaatgtctggactgatccttgggttatccacggatgggatttttaccctaaggccattgcttctaaggttagggggttacaaaggtggc

SEQ ID NO: 314465 - DNA, 1049 bp, Cannabis indica
tgaacaagtgctctttaacatttcttatagtcatgtaaaattgttattagtataatttagtgatagatcttatatattttttaatttaaatttaaatatgtgagattcatatctattttacacctatgatattaatattaatatgggatttgatatttatttgctactatatcagtatatggtgttaaaaagtatttttctcattaagatttaggccagctaagatacaatcaacaacaatatttttctagtccaaatagacaattttcttacttaatttggatttcaaagctgaaagttgaaacccacacaggccagctaatcaacaacaatatttaaaattatacaaatataaaatatgatttaattacttaatggtaatacttaaaaaacacattatataataaataaacaaataaaaaatggtaaagatcagtaatttgtaaggcaagtctgtgaggtgaggaagggacatttttgctttattacttatctgtctcaatataacagacacaacatgggtggctgccactcctataatatcattcaaatataaatattaaggtactttttttaataaaataaaataaaattctatattatactatacctttgcctatcatatttctaatgatcattttagtactttcctttttttccttttgtgtgaaaattataattaatgtggaaaatcaaattaattaaaacttaatcaataaacaaataataataaaattaacaaattacacacaataattaaaaattaaaatagggataaacagagtactaaatttagaaacaataaaagaatgaaattaatactaagatatatactagttcaagttctataaatcgatgtgatttacgactctactacagttctaaaataccatcagatctttattgattgagcaagaacatagtgcaatatagtcgagattgattctctgttaaattctcacaaagtgtttatttttcatactcttacctaaatatcttcttcatctacagaagatttttcatacaaaacttaaactcaatctctctct

SEQ ID NO: 314466 - DNA, 1289 bp, Cannabis indica
cgtgacatggggaattaactactatatattattttaatatttacttaactcattattcatcttgccaatctagcgagttggcgttggccattttttatcgtcaagaaagaccaatgaaaattatatatacactaataagatttacatttcaccccaaatataattacacaatataacaaacaaaactacatgtactaaaggcatctgtaatgactgcatttcaaaatatggattagaaaaggcaattagcactaattatcggtatttttataattatttatgaattcatttaattgtggatcccattgttagaaatgggcattagagttataattttttaaatctggagattttatgaaactctaggtgtattatttagattatatatgcattatgttatttttataatttgtgctcggcaacaacagaaaatgcgatggatgggtagtttaatcacatggataagtttataaccttatttcttagtaggatgtgtattggagaaaatagagtaccgagtttgagcggggttatggtttttgaccattgtacccctaagcttaaattaacctaagtttaggctataagggcattttagtcttttgccaagggagtgagtggtggctgccttagatgttgacaccaagcctttttattttcagtaaaggattagttagaaaatcctttttcatttagagaaaaatcaataaaagaccaaaaataatgcaacctctctttcccttctctctctctctctctatctattcgaaccagccataagcaaggggatttgctgctaatttttagtgttttcaacaaggaattcaaggggaaatcaagttgaggtaattcctagctcaattgtttggtgttggtttgaatttgtgattttgagttataggggctgttagggtttggtttgtgtttgattcaaattgtgagccttatttatgttgattttaagctctggatattagtttttatgtatggtgatagaattgagcaagtttgagctttgaaactcaaacttaggtctttaatggcatgtttgaattcagtgagtttttttgggattttctcgctggaatatattgtgtataccttgtttacgtactttggaaagtttagtgacaattggacaagttttgagcattatttgggttttttgggggagactggtataaactggttaacctgtttaccagtacctgtaaaaccggttaacaagttttggtaggttccccgaacaacccattttctcaattctagtccatttcagtgccttagtt

SEQ ID NO: 314467 - DNA, 2529 bp, Cannabis indica
gatgttaatgaaacatacttggtagtaaatctagatcctggtaaaatatttccaacacatcttcccagctagcactaagggaggtccaaggagaagatgaattaggtctacgggtaggtgtggaatgaataatagagcctgtggaagaggtagaagaagtatgcattaatgatgaataccccactaaagtcatcagagtgggaaagaatctacctccggcagtgaaagaaaagattgtctctacagttaaggtaaacattgatgtattagcctaaagtccttctaacatgagtggagtcagtcctcaagtaatttgtcatgcattgaatatagatcccacggctgatctaatttgatagaagtggagacccttagatacagtgagatcggaagcagtgaaggtagaagtagacaagttgaccaacattgatttcttcagagaagctctatatcccatatggctagtcaatctggttttggtcccaaagcctaatgggacacggagaatgtgtatagattttacagatctaaacaaggcttgtccaaaagactacttcccacttttgtaatttgatcagatggtcgacgtaacctcaaggtatgaactcttaagcttcatggatgcatactttggttacaatcaaatcaaaatgcacgtggctaaccaagagcatacaagctttcaaactggcaaaggaatcaattgctacaaggtcatgtcatttggatagaagaacgatgtagctacctaccagcaaatggtccaaaatgttcaagaatgtactgaggaagaacatgaaagtttatgtcgatgacatgctggtgaaatcaaaatccatgagcaatcacgaagatctcaaagatgccttttccattatctgggagcgtagaatgaaactaaaccaaaagaaatgcacttttagagtttttttcaaggaaattattgggtttcatagttagttatcgaggcattgaggcaaacctggagaagatcaaagcccttttagacataccttcacccagaaaacacaagaatgttcacaagttagctggaaggattattgcacttagtagattcgtttctaaatctatagataagtgcatacctttcttcaatgtacttcgagaaaataataagtttgaatggacaattgagtgcccacttagtagattcgagaaactcaaagaacacctaacgaaggctctaatattgtccaaatcaattaagggagagtcgttattcttgtacctgtcattgtcagatcatgctataagtgccgccttagtgcgagaagaagaaaatgtacaacttccagtttattacatgagcaaaagattgttgggcgtggagtgcaaatatcctatgattaaaaacctttccttttgcttactaattgattcatggaagttaagaccatactttcaagttgatgccattaaggtattgacaaccaccctctttgtcaagtattacaaaagctagagtcatcaggaagactcctaaagtgtgcaatggagctaagccaatttgatatacattatcaaccaagaattaatcaaaggtcgagccttagtaatttcattgtgaatgcacggggataaatgatgaccctgaaatgccaatcttgaagttagaagtttggaaaatatatgtagatagagcattaaatgagaaaggttctggagctggaatcaatctaatttcttctcaacaacttcaactccaaagtgcacttcaatttgaattcgaagcttccaataatgaagctgaacatgaagctatgattgctggcttgcaattggctaaagaggttggtgccaagaacattgagctttgcagcgattcacaggtagttgtcaaccaagtttctggagagtatcagacgaaagaagagaagatggctagttatgtagcaaaacccagggagctattgaaacattttaagcactattctatgaagtaaatccctagggataaaaataccttcgcagacatgctagaaattagcaatagatctaaaaagtgaaaaaaaatacggactagtgcccatcgcacatctactttgtaaagaccgcttagtttaattcggaaattagcagttaattaagatttaattatgaaaattatttatagatatttaaataattatttatgttgttatatttgaattctgaatgcatttttatgtcatataggaaaattccataattttgcattttcggtgcccggcaacatagaacgcggtgtatggctcagtagaatcacaatttagtattttagtatattggcgcagtttatttagacattgggaatgtcgggattggtcgggaatttagagatttcccaaaataccctttagtaccctttatgttattttagtgtggaggggcaaaatggtcattttgccccattgatgtttttgtccgtttagtggtttttattaatcttaattatgtgttttattcattaaatcttggctggtggtattatgataaaatcaatttttataactcttattttatcaaaaa

SEQ ID NO: 314468 - DNA, 2687 bp, Cannabis indica
ctctctctctctttctctctggtctaaaacagagcatcaaattttgcttttctcatggttccttctgcgatgttgcagaccaaaagatttagtgtaatgattctctcttactttatatgtatttatgttagagagattttcaaacttattttccagttgtctctttattgaatttttattttgtgaattctttttgttttgtatttatcttcagagtatatgtttcaaccctttccactggaagttgtagcgggccaatgacacaccaccatgtctagtagcctgatgattcgaatctcttttattattcaagtcacaaatgtgtataattgttgacctcgcttttagccaacgataaagagtcttaataataagcgataagaaatacagtttacgtataatataagcaaataagtaaataacacaaggtttttaaagaggtttggcgtcgttcagttcggtaatagcctactccccttgatttgtaataacttaagagcaaagaacacaatgtttcctctcttaaagctcttacaatgaaatctctgagtatgctctcttagatctctttaaagtaattctttcgacccctttactagtgagaatggatcactatttatagggctacatgcatcagggaaggcttcccttttgcttacaatgtctataatttgtaagaacatatattacatatttagaatacacagattgcgggatttggacagcttgctatagcttggtgatttgatcccaatatagggattacctttgtgcttcacgatgcaaattttggaattgctaagtattgatgcactgcctggattatccactgctcagctgggaagacatcgttcgtgcaggtgtatgctgtgccctgctcgcagcatctctctctcgagaaaaaatggggaaccaggtccatgtgtcaccagcttgtgatgccacgtcatagtgcaaaaaatgggataacatttgccccccaagtttgtatggggcttttgaagttgcgtgtatacttcatctgagctaactctacatttgaatgggtgacacgtgttgaatgagtctgtttgtgattcgatgtgattgtaactagttgtcccttcaattttcagtaaattaatgctctaattcattcgtaccttgagacacgcctttcttttgcacttaattccttttaatttctcaatatttactttttaggggaaaatcgaagcgtctaaggttttgaattgactacgccctttcacaagttggcttataaatacggttgaaaattttcataaattacttttaccacttttctcactaagcaacttcagagcaaaaaaaaatttccctctcgaatttttcatgggattctagcagagggattcgaatagctcaatctgaaaagcactaaagcttcaaacaatgagtaagttcctcatctttctctcctttaatttcgtatcttcaattttctgggtttccattgtagaaaatgcaattattcttgactttttgaaggagatatatagagaatctaggctcaatactttataatttttactgtagtagaccatatgctttcattgtttatgacattttggatttaatctcgcaatgtaccttgctacttcaaagcttcgtgaaaattaacccttaaccaaaaaatttaaaactcttgggttatgaacctaatttttacgcgttcttcatcttctaaatccatcgagtagacctagtcggtatatttccttgtgtttgttcaatattccggcaaaatagtgatctcgtgtattgtcttttgtagatgaaccctggtgagttttggggaggcaaacaccgtatcgacaaggatctgctctagcttttgtacgacgaccaaccttgtctttgtgcttgtccgtcctcttcgattgatggactttctaactcaagttttgaagattgggaagtgagtagtgaacgttctcctactccaaaacacgaatcgcaacatcacttttactcagaccagatcgcaggagaaggctacggtcgatttgtttgggagcttaggaagggttggagacattatctttcgtccaactggacttatatcgtctgacctggtattgctgacacacttcctgtaggccctccatgctctggtgccttcggcattccgattgccattcctaccatgactattgcacggcatgcgcaccaatacctgtccaagagaaggatgatggcccgcacaaaacagatgatgtagagagtaaatgcatctcaccctcacgtggctcaatatgccacactgccaagtgctgaacaggatctgccagcgacgcaggaggaatattacaagggggacgttaaggtctaagagatagaggaccagcacagtgtatgtcctaatagcccttctgaggctgaggaggagggagatgctcatcccctatgttttagaggatataatgagtccagcgagctaatgtccgagctggctgatgtcttggttgagggtgaagactatgtcacccaggaatttaccgaggtaaattccccacaagaggcaaggtgccttaggggccagatgggtgtgtcctccgtccatcgatactgagggccacttgaaaaatttggagaaggctgggtatctagccggactcggacgctttctcccttctccaaattaccaggcaacaagtccaaaggca

SEQ ID NO: 314469 - DNA, 1598 bp, Cannabis indica
atatttagggtgtttaaacaatatacttgtgagtagatctaagattctggtaaaataatttccaacagttatgccctaggtttacagggccttttgagatccttgaaaaggttagagtggtagcttatcgtctagccttgcctccaacactattagcagttcataacgtatttcatgtttctatgctacaaaaatacgttttggatctcactcatgttatgagttatgaaaacctagaactccagtcagatttatctttcgaagagcaaccagttaagattttatacaaaaaagataagatccttcggaacaagaccatagctttggtcaaggtactctggagaaacagtaaggtggaagaagccacatgggagttggaatctgacgtgagagctcagtatctagaattgttcaggttagatttcgaggacgaaatccttttaatggtgggtaattgtaaagactacttaattttagtatgagaattagcagttaattagggtttaattcggaattagacttttaattatgatttatgaatttatggagatatatttaaattctaggtatgttatttgtgttatatatgaaatttcatgttgttcatattttatgttggtaacagtagaacgtgccgttttgtcgatagatcacattttcttatgttttagaattttagtagtagcagggcaatttaaatagacattgggaatgtcagaaatatttgtggtatagatttgaccaaaatacgcttacgtgataatattgcttcttagtgaaggaagggcaaaatagtttgcctttatttgacctttgtcttttaatgacctaatagattaatttttgatattaatcagattttattaattgaaatattaataaaacatgaatttcttctttgtacaaaattagaaacaaaacactctctctctcaacccttaggaaaaccagcaaaagataaggctctcaacttagattaattgtcaggtgtttagacaataattctattagaattctagggattcaactcaaggtaagcttctttactctcttctccttgaatttttatgtgtcaagttaggtttctatgcttgaattgagttagggttctgtagttttaagaagtgtttgtttttgtttttagaggatgctttaatggtatttgagctgttttagaactgatttaagtacttgtgttttgattgaacaaaatttgagctttagagctcaaatattgctctctcatggttttttagtttctgagtgtattgttggattttattgcttgaattctacttgttgtggtctaattaggtactctaaaaggtttatgttgatttgagttgtttagaaggtttttaagggttcctacactgaaccgatcgatcggctcagtttggacctataggaactgaaatttcgattcatcccctgtcaaccccatagaactgatttttcgattggggaaacggtctaccggttggggcattttagggcaccctagattttcccatttttacaatatgtaggatatttccatgttatccatcgatagaaaaacttttagttttgattttaagtccctgaaaagtgattta

SEQ ID NO: 314470 - DNA, 601 bp, Cannabis indica
atatcatcctggtgggtttttattaaatagtctctaatttttgcatcgtttatttctaatttggactggggttttgaaattctaagtttgtacgggatggcaagttcgttaggataatctatttctaaggattatggagaataaacttctgaatcagattgggacattttaacaaaaaagagcaatcccaattcctagatgaaatttatcaaaccagaggcttaaaaatatgataaacctaaaaacttgtactctgcctaaaccataaaattacccagaaaaatttaaaccaaaattgctaaaaccaaatagaatggcaaaaatgcaaactataaaaatagtgatcaaaacctaggaatgtgaaaaaaaaaaaaagaatagagaagaatgggtcacttactgtttgaaattgagttgttgtacgatgaagagttcgtcaaccaaagacggagtgaatggcgtgatgctttttttgaactctgtaggtctaacaaaaaatccgagtatacacacaagaagaatgtcagtgacagtgagggcatgcaaagcttcgaaaaaatcaggatgaattttttcgtagaaaagctcaagaatttttgaa

SEQ ID NO: 314471 - DNA, 533 bp, Cannabis indica
tttaattttatttaaatcgggtcaaaattcaagtttagagttgggatcgtgatccgtgtctgaaactggagtcagtgggttccaaggtccaagttaggataagattccaaaatattgattaaaaaaaattatttaataaaattttgaaagtgattcttttttattttcaaattttattttttttttcaattaaaaaattaaaaagtgaaaataattttattaaacatatttttgaaaaatatttttacttttctaattaaaaaaatagaaagttgattaaaaatgtattaccaaatacacacataattttaacaattttctaaatcacacccacattgcataaacttcaaaaccacacaactgcaccacacaaatatagtagggtatgctacagtacgatatcgacagtttgaaataatcgataactaatggaaaaaaaatagaaaaatacaaaaaaaaaattacaaaaatactatgggtcggcccattaaacatttatacaatccacatacaaatatttacaaaaataccac

SEQ ID NO: 314472 - DNA, 1595 bp, Cannabis indica
aataatcatttctttcaacaagtaattgtaaagcataactctttaaaattacttacgggacatatatgtatgatcaacaagaatttatttgaaaatacataatacaatggaaacccatcacttaaaaaataataaaaaatttgaaaaacttctcaaaaggtcctcgaccaaacctttttgacgaaagaggggtcgaactgttataactccctgaccaaacgttttctacgaaagaggggtcgaatcgttataacgctctgatcaaacctttctgacgagaaatggatcaaacaactatactttttggtttaaaacctatttgatgagaaaggaaaatcaaaagttagaacttgcgcataaagttgaatactaatggctcgcgctaaaggaaagtattaaacgagatatcaaagtgtcttggaaaaatacttaaacctaacacgtgtgtagaagatttaactattcatgtaagcaataaaaatatatacaaaatgacaaggtcattgaaaatatatttaagttgatcgcgaggtgaaatcaatgactacttaacattagagaggaatacgaccaatgaaaacctttgataaattttatgcatatgattgtttaaattgtgagtgaaatgcaagcaaacaaccacatgttgaaatttaaaaggcttcaggaattaaaaagcaaagttggccatccaacttcgcaagtctgtctttacagaaaggtgccaccaggggaaaaccattgtctcggccaaaagtgcactttaaaaaaaaagaaaggggaagataaataaaaaccatatctacatagtgggagacctggatagctcttcttcttcttctgcctcgacctcttcctccttcgtcctggacttctcacagaaagccagagtttcctcttccttttcctccacaaagcttgtttccatattaggattcaccatctaggcttgatataaagtatgaaggccaaccgtgttgcatcgttctatggtctcgacttccttcttggcaagctttttctcaaattcatttgcttgggccttgatggtcttttcggctttttcttttgacttctcggcttcttgtttaaggcaggtgatttcttactgggtgtcgtcacgttgcttaatcacaatcccacattgcgacagtaatttctgtacctcgccctctaaatgtttgagccgctccaagagtcgccgatttgaagcgaaagagatgaaagaagcctagagaattacgaaaaattgaataaaagaaaagaaaaaaataaataataataatattatgctcaacttaccatgaagttgcagtccaatatcttcaaaagcatctcttctggattcccaagattgattaaatcccaatcagggggaacgagagccttaagcttgtgccaacaagcaatcccttatgcctgggcaaattcaaatccagcctcctctgctgcagctgacaaggtctcactggcgttgctcgaggaggcaaaacaatgggttgtctcaagatgaggagtgtatgtgttgggagcaactggaggaggaacttggtcttaggactcggtatcagagacctcgaggttaataggcttgg

SEQ ID NO: 314473 - DNA, 1093 bp, Cannabis indica
taattttcttacagctctataacttttataatatttttattaattgccgaaaacctcggtcaacaacaataattattgtgactaaaactaaattagtgataatttatatttaaataatatgttaaaaaattatgactagctagtaacttttttttggtagtgagtacattttttaggaaataaatttggtatatatcatattttagtgtttaaaatattcactattcatttcgtccagaaaaacaaaacagattcactagtactagtaagttctttatataagctatattataattattttaaagatttttgacaattgtgtctatacaagaaaaataaaatgaaaaaataatgaatacgtaattaagtccaaattatatacttttttttgacgtgaaattatatatatataaatatatatatatatataaatatatttgagatagaagaattataagaaatctaataattaagagaatcgtaaagaaaacttctatagtgaaaaccacaaaattcggcaatcaataattttcgtttctaaaccggaaaagatgaagaactggttttgtgtgtacaattcaaacaagaaacaaattaattaatgttgaaaacattcaaagctgaaaaattcttctatacacccacataagtttataaccaagattagtaaaaactactactagctcctacataagtttcttatatttagttttagctacataataatgcctatacaaacccttaccaaaacaagaagcaaataaattaagaaaaaaaaatgttcatatcttatattatgagcagtgagacctacaattttttatctgtgagaacttaattattataaaagtatttatatttttttacattaaaattataattattttgtaaaaactttttactactttgttatataattatttaactaaattataattattagtgtgtccgtcctgattatgagtagacaattcacagaggagagaaaccctttcgtgtttagtttttcacacttatttatttatttgataatacctcctcaaggacctgatcaactttatatataattaccctattatatatatatatatat

SEQ ID NO: 314474 - DNA, 706 bp, Cannabis indica
ataaataatttcctgattaacataaataactgccaattaactgctaatttccaaattaactaagcgggctttacacccttataactctaaggggttatatactaattgagtttaagtggtttaataatggtaaactataatttaatgggccaattatagttttaaaagggtgctttcatgtgcctctaacataatgtataattattaactatcacattatggtagtgaacaaatattcggtacatagttaatgattgtgtttatgatattaaacttatgattatatttgtccacaataataattctaacataaacaactcaaattgacgaattaataatgaatcacactagtagcaaaataagcctaatctataaaaacgtcatataaaccagaaaaaaagtaaaacacacggtagaaaacataattacagtcttaaggttatttttgtaaattaaatgtaaaattagctgccaaatgtaaattttcctaccaaatatgtaattattgtaaattatcctaattttaattagtgtaattagtattgaattttatatattttaatttaataataattattaaaaatattagtatacaaggtactttagtatgagagagagaagctcattttgatttcaaataatcttttagggtgtgattggtttaggatttgaaaactattttatttttagggtgtaattaatattg

SEQ ID NO: 314475 - DNA, 711 bp, Cannabis indica
ttttgtttttaaattttttaatcccaaaaatgcaagtgaaattttgtttttaaaattatacttttgaaaaataaaaatgtgttctataacaacttttatttttcaatttttaaagcagaaaacaaatgtgtgttctatatatttcattttcatttgttaattttatttatgtcaggtccaagtctgaggccaggatcggggatcgagtctaggtttggagttgaagccagggtccaagtccgggtttcaaggtttaggttgggatcagagtctaatatattgattaagaaaaaaaaactgtttaaaaaaactttaaaagtgattttttttttcaaagtttttaaaatttgattctcaattaaaaaaatcaaaaagtgaacagttttaagaacataattttagaaaatattttaaatttttaatttaaaaaacaaaattaattaagaaagtgttactaaacgtaccctaaataatcagaatttaattaaataattaatgtgtatttaactaaaaaatcaataattcttcaaaaaaaaaatcaataattcttgataaaactaataattttgtcaaaaaggtctaatttaatttttgcctataattttcttcaagtttgaggctggaacaagactaagcaggagaaaatatgagtttgaatacgacacgatgctacaaattggcatgacaagactattgggttttgtgccctaa

SEQ ID NO: 314476 - DNA, 1853 bp, Cannabis indica
tttttttttttttttcatttcagtataaaaatgttatcaattgggcatttaggttttccatgtgttgatgggaaattgttcattattgtcagggtgaagtttgtaaagctgttatctgtctagagatctcggcgacaaggtatatatattaatgtcataattatcgatcattcaagttcatcatgtgatgggttttgttcattttctaatgggttaaaggattgattgtagattgggagttttattcgatcggcagtgtgcaataaagctgagtggaatgtcggaaaaggcttacaccagatcgtacaattcgctccagaacggtcttggagtcaagtgggttactctcatttgttactttaactacatttttatgtttctttggtggtggtggttttgctgacaccgaacacggattttgttggtgtaggaataagctggacattagagaattggccattcaatttggctgcgttagaatcatcccttttgtgagaaagggtttgtctctgtaagatcatcgccttctagttctataagcttttagtatatttcaattgctttcagattagattatagaatgcaaatcttaatggaaatggatagcaagcatatgaacagctgttacatgcttgataaaatgcttctgtggccatattctgttattttgaagagtgaatttacgtctttaatggaaattatttgaccagaagtaataggagtttgaataaggataagtggagatgttatttggctatgttttggtgcatgttttgtttctgaatttaggtacttgcatatgtttgcttttcagttacaaggaccgatttctttcttcactgcccgcttctcggcgagcaagtgcggactttactcgtcctgtgtttacctctgtagccttctacttgtgtgcaaagaagcacaaggtacacttgctgatatctttcagctattcaacttcatggtgtactacacttaagcttttattaattccaatctattgcttctttttgcagctaaaagtagacaagattaagttaattgagcttagtggtgcatcagaatctgagttttcttcagtaagagacattttcctacttttactgttagtggcattagccaactatagtttttgactttcaattaaaatacgactgttattgttgattcaggtttctgcttcaatgatcgatttgtgctttgatgttcttggtatttcaaaggagaaaaaggatcctcgtgatgtgaaggggaaccgaggtatgtgtcaatgtcgtaactttaattgtggtgttactcgtgactgagttcccctttttgtgatatgctttacgtgtacattgtttaatttatatgatactaaatttacctaatgataaactaataagttgctttctacttctgcatgtagaactactagatgttttaccggaaaaaaggaagcttgaggatggtggttattcatctgatgctgatgagggagaagaggtacttgcaatctcatagtctaatctaattgctggattcactgtatcagcttatgagatcaattttactctattccaagtttgcttcttgttggttttctaatgtagttttttttttttcttttagtttgtcactttggacgtggtttatactatccctactaagccaatctacaattcttggtgtcaaataaaattacttgtaaaccaacgtagaataattctgattggtcattctactctgtaaagaatataaaaattagtgtttagtctgagtatagtatttttcatttgttttcttactagtgttgtcttccaactttctggggtcgttacccgactttagtacgtttctaacttttattt

SEQ ID NO: 314477 - DNA, 580 bp, Cannabis indica
aaaaaaataacactttattaaaaaataaaaataataatattgacaatgttttattttattttgttgaagataaaaatttaaaaacatacatttatcaattatttttattagttttgacttaatatttattcaagtcctcactcagtcaaatttctaacttcgtcactgtctgacttagaggtattatgacaagactgatcatatatttttgtacttattcatgctagaaattggcttcatgttgatctttttttagaaaacaaaattgacgaaaattgagttcgaggtctattttgtgcaattttaaaaaatacaaagtctaaattagtatttaacataatggagggtctaatcagtaacttttaaaaagctcagggtcaaaaattatatttatccaatcttatttattcttttttgaatacctcattacaaaaaatcttacttttagtcacaacaaaacttgtgactaaaagtaaaaatattgtgactaattataaattattattcatatgttgtgactaaaaggtccgtggctaaaaagtattagtcaaaaaaattacaatttgttgtgactaaatgt

SEQ ID NO: 314478 - DNA, 548 bp, Cannabis indica
tagtggcccaacgtcaatttccatcgttaccaagcaaagtcataggtaaacgagaaatttacagatagcataattaacatatatatgcttaaataaatccccacaacatgcatattctaaataataattaaatctcatgaataaactctatttatttaatagaccaatatattaacataggcggtctttacataggtactccttaaagagctagttaattagcttcgagatttagacacaaatcgttcaaattcagagttacaaaaaagaggagtttttattacttctttctaaatttatgcatctgaaaacacatgaatattttttttccaatacttttcatagcaatatttgttataattacaataacattcttataaatttttaattttttttaataatttacagtgttgaaaatcgattagaagttttttgaacgcccgtagtaaacttcaatatctggaatattatgttgtcaatactataaactatatatgtgtaattttttaaaaatttacataaataatgttgtaactatgacgaacacc

SEQ ID NO: 314479 - DNA, 1441 bp, Cannabis indica
attaaatcactaaatatatagttttacatatttatattattatttgtaattttttattttatttttttttaaaaaaaaaaaaattgaagtcaaacatgtcaaattcgtgttaagctgattgggtcatggttgacccatttcaatttcgtgtcaagtctcgtgtcgtgttcgtgtgttgtatcaaaattcattttaccacccctaatttttgtataaacctaaaaagagtataccttgttgaacctgcatactgtatacccaattcttaaactctactacaattcaaatcaaactaatctttatattctagctttattcttttaggcataacacaaaacactctttttaccattggtaagaattctcttgaaaagtatgagcaatttaccacactttttgagactaaaaaataatttttttcaccttccacaaatgataaattaaggttgcaaaaacaacattaacttggtttttaaaatgacttattcctttggctttatgaatccaacgaataagatcatccaacttatgagcatgaacattccatccaagccaaattttcaatttgctaaggcaatttgcactatatgcacaaacaaaataaaaatgttgcacatattctgctttatcctcacatagcaaacacatcttatcaatactttgattaaatctagataataaagttctagtgcgaagtttctcaagaactgccaaccaaagaataaatctatgatttggcatactaaaacaaaaaaaaaaactccatatgataaaaaattgattatttacttaaaagtactcaacatgattatatatatagagttttatacgtgagaacatttgtcatatcgcaggggcagtagtttttttatgttttgagtagtgctgtaagttcttgtgtatcatgctggctcaatctatatttttctgtatttttcaaaaaacgagtcgtgtcgtgccatgctacaaaaaataagggtcgtactgtgtcgtgccaaaatttatatagagtaggccagatacggcccgtgggccaagtattttatgccatgctcgaattcgtgctggccagtatttcttaaataagttagccctttttcatattcggagttaaatttttgttttactttttcatattttttttataattattgaattatatgtatattttataaatttagttatatttatataacttttgaataatattttacagataatcatataaaaaaattattagcatcatcaaattttgtatatttacttataaatactcaaatttttatatcacacactataaataaattaatataatcttaaattttcatgttttaatagttttaattataaaattataagattcagcattagatttaaattttattattattttaatttatttataattgataaattcatatcttattattattattaataa

SEQ ID NO: 314480 - DNA, 1786 bp, Cannabis indica
tgacattttgtcaacctaggctgtttctgatcaagtttagacaaaaagtgttttgggattttttttccttcataagaaataaaaaaatctagtaaacttggggagaaaaccacaatcctgtggctgacctagggctgggcctatcccctaggttgacaatcaacctaggatgctgccttcaattgctttaatgccaaatgaaatttgaccattgagtcttaattggtcaaaaattgggttgaagacctcatcctcaagtttagaagcattagaagtatcaaaacaaaatctcaagagctcaagagaaagggcccaacacccatgttgataaaaggcctgatgagctaggttctgcttatccaaatttgacgcccttttgatcatccatctagttttcacaattataatgatatatgaatttagaggaatcaaattcacaacttttcatttctcatttctagcacacccagaaaagaagagtttcgagtttctcatttctacaaaacaacaatatctctaagaaccggtgacgggctttgccagaacataaaaatggacaaggtggtgtcaaactatcacttaggaatattaaaggacatcccttggatgtttttacacttacccatattggaatatattttaccaggatctagattttttttttgatgaatcaggaaattgtattagctcacaatcattttacaccctaataacactcgagttttcaggcatataatatgtgtctatacattctgtatgtacaaataataataaggactccattacaatgttgaaaaccatgctttgtcatcccttgataccttttttggccaaaatagttctaccctttgaatcactctagccttcaactctttacacattctcgagctgtcgggaacttctttctcccaataacaggtattcctcatcttccatatcttgtacactaaactggtaagagcagcaactagcaccagctttttaaacttgttgatctttgcttttccaagccatcaaaccaaaacaggtaaggatttactttgagcattccattgcaaccagttcttgatgctttagaaccattgttgggtagttggacactcaaagaaaagatgagagtgtgtttcagtttgtgagttacaaatcaggcattgctgatctgcactaatccccattttagccaatctatctcttgtcttgagtcctttgttggatagctagcaaaaaacacaaagttttgttttggagtattaagtctaccccaaatccgtttactctaatgcactttaattgggtctggacagaaggattttgtatccctatgccactgtatatttgccttgtatcaccattgtgtcattcatagcagacctgaactgctctttaagcctcactatgcaggtccaataccacctagcttggctttgtactacatagctcaaaccaatcctcattgtgtaaatacacactattaatccatctcaaccataagctatcttctttgttaaccaaggcccaaacgtacttccccattccagctttattccaagctgatacatctttaaaaccaatgcccctagccgatttagagtgaaaaagagattcccaagccactggtcctggcccttggtacatggtatgacctttccatcgatagttcctgcatatggcttctataccatgaatcactttctttggcggtataatgatcttgctccagtatgagtgaatggtgaatagcatagaattaattagaattaatctgccagtaaatgacaagtttctt

SEQ ID NO: 314481 - DNA, 762 bp, Cannabis indica
aaattaatttaaaataaataatactgatatttataaaattaactctatcaaatttaaccgaataatttttttatttttaaaatatttagtaaatcaataaaaacaattagataaacatattatatataaaaatatatatatatatataaataataatgaaacccaatgaatatatatatatatgtttaagaaataattgagctagcggtccttttttgtaatgtgtggcacatattggtgcttctcagataattgattaaccatctattgtgactcaaagtttctatgtatttgctagtactggaaattgcactctgagaattgagattagttatttgtgtgtaaaatttgtggaaggagattcacattttattaatgcctttaaaattttcttccaatattctaggatgtatttataataacgtacgaacgtatatataacgtatatatacgtacatatcttattgcttcgttcaatttttttttttaatattattattattattatttctctttaagtgaatattatagccataaagtcaaggaacttattttgtatcgaagagacaatacaagaaagtgaatttgttcttgtaatatgtccattgtcctttgttatatgtatgttttcactcttatacgtatatacttttaaggaaaatttacactccagtactttaattgcattctttttacaaaaatatggtgctgtcatttatatatgataatgtaccgttttttataccgttttcaatttaattc

SEQ ID NO: 314482 - DNA, 1405 bp, Cannabis indica
atatacaaatatatatttaatgattcattaaaaaatttaaatttaatttttttaactatgagattaaaatattttaaatttttaatttttatttatatatatatatatataacaaactatatacacataaatatttacaagttttttcaatgcaatctaaatttattatttttctttacaattctagctttagtaatagcaaaacgggtcaaagtgggttaatatgatacgattttttacgggtcgagttagggttgagaaaattaaacaaagtcaaaaaacacgtcgacaagcataacgcaaaatatagaaacgagtcacataaaatatgacacaaacacgacacaaataaaattgaaacaaacttacgctattctaaacattaaagaacgaaaatcctacacatcatctgttattcattccatgtgacaaatcaaattagttatcatattctaacaaaattaattggttgtcacatggctccttcctatcatcaaataattatttttcaaaaataagttttaataaatatattctcttaatatttttttagcctaaattacatttaataaatacattatttttttgttaaataatatgctaatagagatgattttctgttagattgtacttcgaatgagattagttctctttttgactttgtttaatggagattcttttaatttattaaaaaaaataaataaaaaattaatgttaattattagcctaaattgattaaaattaaatcttattattgttgatattatttttcgattactttggaagaataaaaaaattatgaaaagaaataataaataaaatagataaaaactctaacaaatcctttgagtagcaataatgaaactgagtctaacccatacccagcaataggttacgaatagaagaacgagaaggttgcgtatgggggtggacgcgccgaagtcaccgaggtcgtcagcggtgatactgtggagaaggtcgacgatttttggagcagacgggtggtttggtaattggtggtctctaaatagtaaagaagatcctgtaaaacctctagacaaaagcacaatgaaatcttaaaatacacttgaacaaaactcatcactctctctctctctccctcgtttcaaactcttgaactctctttatttgtttcaaaataataataataaaaaggatgttatttaacaccaaataaggggcaacaaagaaaaaaaaaaattggacaagaaattatccaatgcttcttaaaacaaaacgtaaaccaacatgtcactatctaattgaatgaaaagagttcctgggagttgatggggttgtgtgggcggcatgggcggggggtacaattggggactttcaggtggcggtggtgttgctaaaattttaaacactacgcaagtatacg

SEQ ID NO: 314483 - DNA, 2534 bp, Cannabis indica
gctgggcttggctcacgggtgctctactatgcaggaaagggtaaggcagtagctgatcagccatgagtttcaggagctgggcgaagaatgtacatgttcaagtcatattagaccaagcgggttaagggtctaccagtgttgaacttttgaattctattttgccgcttaagtcggctagaaagaaaaatgacttgtaataaagtttataaatatttttgggatcccaaccgtttaaaagttcaaatgtattacaagttttattttcattctgtttaatataaaagtttaaattctgcgccattttgattagtaatcccgattagaggattagggtttcataagaattttggatagcgtgcctaattgtttaggacgttacaatttgttaattcccataaaattccacagctgtgttcttcatcaaatttgttaattcccgttatagtgcaatcatctctcatcctccgagcatacattaaccatttgcaaccttctcctttgcatacaactctaattcttaacctatcattgttaatatatttgtactgcctgtcaatgctgatgaaatgctcttttaatgcttctctcaagtgctcaacagtatggaattccattcctaattcaaacttggtattttcaggcttgaagtgtggatccaattcaatgtgtttttttttaagcactggtccatcttcttcatcactaaccaagctaaccaaatcatcatcctcttcatatcctccaccatcatcatcatcttggtaagcttgactgcataaatcattgactgacccccaccactggctagggtcagttgttccttcttcaactaatcttggatcctgggtttctagagcatattcctcttccataaaatctggatcttctattgattggttttttttttctcttgattggtcttttggatgatgtttctcttactctctttctggtttggggtggtctttgggacacactttgagatctagtttgggtggtgtttctcttactcttttcctagtttggggtggtgttcgagatacacttctggatccggtgcaaggtggtgtttgggctactgtgtgactgtttagaggtgttgtagaaggtctttgggatctggtttgagccctctcctatcctagttttggatgttgtttgagatctattttggggtaatttgttgagatatggctggcctttgttttttctagtttggggtggtgttttggatggagttttagacctggtttggggtgattggaacagttctgtttggcaactttttttcttggtttggggtggtgttttggatgttatttgggacatggttttgggtgatgggcatggatttaattggccagttgttttcatggttcggggttgtgttttggatgtttgacaactagttttgggtgatgggcagggatttaattggcctatttttttcttggtttggtgtggtgttttggatgttctttgacaccttgttttggaggataggcacggatttaattggccaattttgccttgtgtatgggatctggtttgtgctgatgttttgctacttttggctttctctggtttggatggtgtttgaaagttgttttgggcatatgtttgggtattgtgctctgatattggcatgggctgtatgggcatgttggggtgtaaatgggcctcacttgaattagtatgggcctcatctgttgggccttcatctcagcttcacctccatacatttctccaatttcatctagtgtctcaataattttgacactagaatcactatcatcagcacttcctccatcaacatcttccatgtcaaattatggcatgtacataacaaactcatcatacccatcatcataatcaccaccacaatcctctaatttatctgccaattcctccccaacctccctcattgctgctttggtcataacagtcttttggtctcgcacttacccgagcatcaacagtcacattcgcatcatctggtagctcctctattatgcatattctcagcttagttccaggtggtgtattgtccactgttgtcttaggaacttgaccataaacaactgctaattcaacactgtttcctctaaaagttccaaataaatcagcataaacatcaaccttcctatatctctttcttctcatgtcctcgaacatagccaaaaaatccttgtcagtcttaagctcaaatccatcaattacttgtttgtctttaggcttaaaccagaaataaaaaggagaaccatgacaccactgaacttgcaaaagcattccttcaagctccatcatgttgaacaaatctgtatggcacttgtcaaactcggtcatagtgccacccacatattgtttcaacccatttttattgcatcaagaacccccatggtgcatatttacactaaagtgcaaacctgccagcaacaaacaacaaaattacataaagttgacataaagcctaaaactatgtacaaaaatgctcacatgctaatcaaagcctataccccaccaaaattaaaaaa

SEQ ID NO: 314484 - DNA, 1193 bp, Cannabis indica
aacccatttgatgaaattgagaatgttgacctacaaaaagtgatcaaccgacagcgcggtcatatggatctgatgcttgctacgtgtttgaacaattaagaacgaaaaacaataaacaaaaatatttgttatacaggttcgcctcccttgcgatagcgggtaatgacctactccccttttagttgtattatacggagtgaaacacaaagatcactataggtgggatctactatagcacccttaggattacaaggtatgaattagtacaggcaaaaactcaagtgttgagattttctagggtaggcgtctgagagagatgaagagaagagagagagccctattgggcgtgagcaattgagagagagagagaagagagaatagggcattgagacttagatttagaggctaagtgacttaggtttttaggctaggtttattatactatagtgcccttgaatctaaatattattcaaccattctattgggcttctagggccctatttgtatctcatgactttccatccaccatttgggctatacatatagtcctgccaagttaatcctggttgcctagggcttgcatgatctggctagtcaaggcctgaaagacgtgggaggtcactatagttctaccaagaggaggccagcctttgggtttggagaccaaccttttgcaagttgaggatagcactgtaaattttttccctgtgaaggtcaggttcctttggtcgaacaaaagctcccttggtccgaaagtcacttcttggctggccagcttgtgcatagatcctggccagcctataggatcactctggctagcctattggcttctcttggcttgccaaggatgttggtacatctctttgagggcttgcttcactccattcggttgttgcttgatagttttactccacctgtactctatctttggcatatgttgacttgccacactaggtggaaaaaatttggaataacgtttgccccctaaatccttgtttgaacatctaggcggatagggactttctaactctcgttttgtttgtagtagtctctattgagcgaccttgtcttgccaggtgttcggtttttgcatggcatgatttttgatctttgatatatgtctcatcttctcttcttgggtatctcttctttgtaccttccattaacaagttttaagcttttggaaacttttt

SEQ ID NO: 314485 - DNA, 2083 bp, Cannabis indica
aaaagaacattatgtagggtagttaacttatgagataactcactttaatttgatcctgttttgaggcagtttttccggggaccaatatataggaacatagctaccttattttaatctcttttgttatgtggctgctgccattttatatgacagagattctcatgttgttgtttttttttttttttcgttctctttttttttattattattatttaggttaaaatgtaaacaaataattttccttctcaaataatgtaatgaacatcatgtgatcgcatgatcaccacatctaactttgtttggtgaattttttattgaattgggtaggaaaaaattgagtttattactttagtgtacttggggaattaatttgaaagtaataatctacctgctttcaaattttttgaataataatcttttaatatgaatatgatatagaatagaactgtatatgaaactttaatattattactttaaataattttatataatgaatgaactaacttgaacaaaataaaggaaatgtttaaatgggtacagtgagtgactgtgtgtggcagtctggcttcaaatccaattaacaaacaaaacttcttcttttttagaaaataaaataataattaatttaataaatggaaaagcaacttcgtgaggctaacttgagttattaatttcaaagatggaccccaaatattttttttgccataatgtttggtgtaacacatttttgtcatctatatacaattgggcacactttgatcccaaacttagtttcgatagaaagatgagttgcctaccaaacaaaagaatatatttatatataaacatatacaagttcaaggtaattatttagtcattgaacctataatataaagtcatttaaataaggatagggatccagaagaaaatctaagggacccaccacaaagggtattgcatgtgatgttggtggaggttgaatcaattaacatttaacaatttaagttagatcaataattagcttattgatagagtgagaagagaaccaatatacaataatattatttataaattttctttcttttatttaacattgtctttgatattaagaagaaaaaaaaaatatcttatggaagcttctaatgtctctacctaacacctttgaaaaagaaaaaaaaagttgaaaagtgacccccttttattatttgtgggaagggccattttttttttcttttgtattttggatattgttttgaagtagctatcactattgtgttatctttctcatgcccatctatgtcttagattgctttttgggaatgcaattcatctctttcttctttgggagattcttttttagctattttgtcttcctccatgataattctcttttttttttctttaataaaaatacccattatttctaaacttaatataacattaggttggtaaaatccaatattttgtattattgttattgttatttatataataagattaggtggatcatggattaggacaagtctagttttagaaagcatggctcaattagattggtcgttctggtaagaccccagtgacataacaatcaattaattagaggtagatgaaattcggttgtggctatgacccattgacctataatttttggtcaaatcatgagcaaaaaagcatgaacactctaaactttaaattaaattaatttggtgtagacagttggatctgaaatattatcacttttttaggtctaaaataaaggtgcatttaagtgattagaaactgttgagattttgtgagcctaatcttttgagttcagttctgattttcaagatcttccctatattcattgtataattgttttggattgtttggttttttattattattatttttttcaataactacacaatttgtcttcggaattaagaaccctagctatatagatagagattcctcttcacaacaaaaagatttgcccttacattctttttatgctcatttagcccattggtcagtagaatgattatttgattatttaacaggtgcctaaatgagtgtttattattattattattgttattaggggattttttatttttacact

SEQ ID NO: 314486 - DNA, 963 bp, Cannabis indica
aaaatatgaatgtttattatatagaaatatgacttaattcaattctcaaatttttctaaatttagtgtactaaaaaattatatatttattttgtaaattcaaaggtcaagaaaaaaggaaattcaacaaacaataataacaaatataaattcctccaaaaaaagttaatttccaatttcccatgtgtttttaataaaatagagtgaagatgacttatatgccctcataaagaagtgatttttaagggtagggcattcatttcagattgattcaattcaattccctccttcaaattttcacgcccctcccaccaatccaccactccccattacccattctccattttcttctctactccttcctttacaggttttttttctcatctttacccttaaacacccgccaatttcattctctataactcgttcactttcccccttttcaattttgtttttttattttgaaaccctaattacccttttcataatctttcgtttgttggtttgttcacaggttatgtctgttacccgggagctcatttacagcactgtaagtttcaaacagtctcggtctttatttttcggttttttgtattgattatcctttttttgttgtttagggtagttgaatttaatactacgctgccattcttctgcattggtttgataagttttcttttttgattcgttggaaactcttgtgaatgtgattctttgaatgttgtttgttgaaagttttgatttttatttctttctttccctttctgggtcgtgaaattggggtattgaactggcatttggtttttgattttgtttccatttttggacttactattttagatttttagtgttgttttaatctaaaagtattttaattttgaatcaggtttacatgacatacagtttggaagaactttaggtgtttgttgttttgattgaaccatttggggtttaggtttgtaat

SEQ ID NO: 314487 - DNA, 583 bp, Cannabis indica
gacgtgcaattaattggctttgcctgtggttagttatgagtgggaaagtaggacaaggaaagatgacaactttgtcaaaatgcagttgatagttgcaacgaaatagaatagtttctcattaaatcatattaaccttttcgaccactgctaaagtaaatactaatttcgacaactgtgtatgcattttcacattatatcacatatatctatttctttcatcaccttctttctttctgttttttatggcaaaactattagcctattaagatgtctttatatattaaaagaatctatttaataatattttttaatttaataaaatataccttaaaaataaaagaatattctgtttaatttaacattagttaacaaataaacccaataattaaactcaaaaaattaaacaatctttttttaaattaaaaaaaatacatcttaagcacatatctctctaacaaatcgtatatccatcttatattgtcacattagcaatggcactggggttttgtacgcgcttgttgcgctcccaactttacttcaaaacttcccgaacgttggtgagggtgtatccggttgtggcgag

SEQ ID NO: 314488 - DNA, 1420 bp, Cannabis indica
aaggtgatcctctttcaccttacattttcatcttatgtgcggaaggtttttcagcattgattaggaagtatgaactgagggggttgcttcatgggtgtaaagttgcaaatggcgctcctagagtgtcacatatgttgttcgcagatgatagttatctctattgtaaagccacaatggagtaagcatctaaagttcgagaactactcactctatttgagcaagcttcgggtcaacaagcaaactttggcaaatcttctatattttatagcaccaataccaatttgtctgtacgaaacagtatttgttcttttctccaaatggtggttgctgatgagaatagtatgtatcttggtttgccaagcacaatgggaaggaataagaatgcggttttgggatacttgaaggaaagagtcaggaaaagagttcaaaattgggactctaagttctgtctaaaccaggaaaagaagtcttcataaaaacggtggctcaagctctgcccagctatgctatgagcgtgttcctgctaccactggatattagtcatgatatggagcaacacatggcaaaattctggtggaaaacatcaaattctaaggagaaagggattcattggatgccttgggagaagctttgtcaacacaaaagtgttggaggtttgagctttcgtaatttgagagatcataattttgctcttttgggaaaacaagggtggagacttcttaccaatgacaactcgctagtttcgagagtttttaaagctcggtattacacgaatggatcttacctctcggcttctattggtaataacccgagttttgtttggcgaagcatatttgaagctcaaaatgtggtgaagatgggagctcgttggcagattggtattgatagtcaagtggctgtcaaaggggagtcgtggctttcaatgaaagagaacccttttatcacttccacgcatccagttttagactcgactgtggttggtaatttgatggagattggaacaagaaggtgggatatggagctactccaggatgtgttcaacaacagagatgttgcagctgttgctgctgtcccgatcctgcaacatacagcagccgatagttttatatggcaccatgagttaagtggtgtatactcggtgaagattgcatttaatttgcttcaaaaagcaaaaggagcatggaatactgttgaagcttcgaagttttggaatgaactttggatattaaaaatacctcccaaggttaagaacttgatttggagagggggaaccaattgtcttccaacaaaagtccaattgattactaaaagggtggatgttaatagcctatgtcctgtttgtggtttgcataatgaaacaaccatgcatgtgcttgcttattgtcctattgcagctcaatgttgggagaaggctgctatt

SEQ ID NO: 314489 - DNA, 1924 bp, Cannabis indica
ttttggcactatatttttttttttttaaaaaaaaaaataacggtggtcttaaataactgcaaacgtacacgattataaaaatactaaaaaaatttctaaatgccgaaatgtgtaccaaactgacctttttcggagtgtgtatattataaaaaatattttcatacgtattacatgttacaaaagttattagttaattctattgtacatcttttaaaatggtcattttgatccatttttcatcggttattgcattcagaagaattttttagttcatttttttatttcatgattatgtacgttatatttttctagaatcacatgtaaatttttaaaaaaattagaataatttataatgtcgaaaatacggttcaaatattttattacactcgtgactattttttaagtatggtaagtaattatttgaattttatttttacactataaattattcataattctttaaaaatttataagtggtcttaaaatactataacatatgtgatcataaaaaatagactaaaaagttgtccctaaaataagtaaaggtggaccgaaatagtcttttaagaggtgcattatagattttaattaaaaaaaaaacgaaaattaataattaactgcttggccccttagtaattgaatcctggctccgcccctcgagatataaaacaatattaatttattttattttattattaattatgtgaaaaaacaaatattaaaaaatttaatataaagaaataactaatttaaaataattaattcaatttacactatttttacttggattagattctagatttgaaatctccaattaaaaattggttgcactatttggaatattggatgaacagttgtgggccccaattatgctcagctcaacttctcttctcatcaacctatcaacctattaaatacgctttgaagctaaaattacaaaaatgccttctctattttacaaatttaccaatttgtttttttcttacttttttttgaaatggttttttcttaccaatttgttttttcttacttaataaccattttttatggagaatctttaatattatcattttctagttattgaaataaaattagtgatacgtttaaattcatgtctacacaaaaactcatgtgcgcacctattttattttatctcaattaagactttttaaataattttttttttaaaatatagtttattgattaatctgtattcttttaaattaaacttttattgacaataatcaaatttaatttgtattatggccaagttatcattatttttgagataatcacataaaaatactaatttttataaaaaaaatttaaatatttatgtttaaagttttttttttttactattttaataaattttaaataatttattattaaaaaataaccgatttaaaataattttaaatgattattgaattgaaattagtaggatcgaattgattctaaaatataaaatccacatttattgcgaattgaataatatttgataaaaagaaaatacgaattgaatcgaataaacagctctaattgcattttcagattcccgcttattagaaaaaaaaaaaactacaccgcgtacgataaggtttgcaatatttttgagttgagttttggccaataggcaagctccatgcttcatcattttctttttctttttatataaaaatgaaaataaagttgtgtgaaaagggtagtttaatgtgatgaaaaaaaagaaaagctaatcccacaaagtcaactaactcttatctgactggaatcctcagtttcacttctcttaatacttccaccccaagtctgtatttcattcgtagttgaagcaaaacttccctattacttacctgtccagccacgaaatccagtttggtaacattactctttacaagctatagatgaatctcatatttac

SEQ ID NO: 314490 - DNA, 3037 bp, Cannabis indica
gagctaaggaaaattctagggtttatatgcttgacaaaacagttgtgtaatactcaaaggcttttccagccataataatattgactcgtggactagaggtcgttagtcattgaaccacataccatgtaaaaatctcttgtctcgttcttttgatttatttctttagctttagtacaattataatcgatttctaaaaactcggtaaacacttaaatacctaattccaattaagtgttatttaacaatcttgtacgccctactagtttaggcacgctacagtgagttccaaattattgtgccagcctttgctaatcaaagggattacaaaaaacatgtttaataagaactttataaataaatacaaactttactgaatatagtttacaaaagtttacaaactttgagatcctgattcattttacaatatgaccaaaatgtaataactcaaaacgtcccctagcgaccaatataattaaggccatgctgtcccattgaacataattcttcaggtctattcgtcttgatatgtgcaatctccataaagcttcaggctcattttcagttcagtttcatcttttacctacacatgaaaatatatatatatatatatatatgcgagtcaacagactgagtaagaaaagcataaaatatagaaacatatattctgacttacaactaggcacccatacacctacctacaaagcttcagatgaatcaagaacgttctttaatttggtacgattgaccataatatcaaccactaccagtattataatcgcattgtaaactccacattataattgtaccgctgtgatagcatcaatctatacccaaaagtactatttatatataaaggagaggtataagacggtgacatgacactctaaaattactctaaataccttcatctattctctctttaattctctcattcttttatattaatattaattaaaaaattattctaaatacatctatctatatatttctccccaaattctctaatttttttttatttttttaataaaacattaaatttaaaaaaaacaaaaacattgtgtacatcgtaccaaaccaaaacgtatctattgtattatatataaaaacctaacaaaatagtatctatctctttcattattacctttctcaacactcacccttcattttcaatttcaaaattcaataaagcaatatggctaatattgggtaaataatagtcttaatattatgatgtgattatctaatatctatagttattattatatgcaaggatactctttctttgttgcccttttcaacactcaccattcattctcaattttaaaaattaataaagttatatggttgatactgggtaaataatagtcttaatattatgatgatattatctaatattcatagttattattattatatgtaaggattgtaatgctttttaagtgtttctatttaggttttactatattgttatgttacaccatgaaatagtgtaggggtttattagtaatttgcaaagggtatgaatcactataaatatgtaattgtatagttattatgggatatgaatggagtaaatagaactttggttcaattgggagtttggcactgactcgaagagtgcatttcggagatttgtcctgtctcgaagaggactattatctaacaattggtactttcattgagagctccgcaatatgactgacgaagagctccgcgagttcgtaagatcaatgattagatctgtagagttgcgtactgatgctatgtttaagcgccacggcttgtcgactgtagcactactggattcctcatctcaggtgcctaccacggttcaggaggttgacgactctactgaactagtgagaatcacgaagccatcggagaaggctctcgatcttgtcgatagtggcatttcagctggttccgatcaggtagatcgcaatcaatttcagttcgatacggcaaagaaggagcccgaagaacaccgaaagcggaagagatcagcgtggcttcatcagatgttgtggattctcaatctgcatcaacgaaggcagctcgaagaacatcaacagatgaggagatgctcttcattccctggactgatactgataccggtgttgtcttagccatacgagatttgagctggcctgagatccttagttcgctaggcaagttacggagttccgccgcaacaggggtacaccgaccacgatactttcgattggtggaggagctcgaacgtggtccagatcggagcacaaaagggagatgggaatcgtggtcgccccggatagcaaaagttcatcgaaggagtatggccactgccaggcggacggaagcatggtcgcgccgaattgcagaaatatatcgaagcaatggagttaacgaggatcccttgctctgtattcattggtttgtagaagaaatatacatgtatgtccttatggattattttatgcgaatatgatatacataaatcatatatggtactgtgttgaggatgaaagttcaaattagggaggtcacgaacctcataatttcgaactggaaaaaaaaaaatagaagaagacgaaggagaagtagaagggcggcgcatcatcaagtgacatgactctctttgccctatgaattgtgggcttaaacttgggctgagaatttagaaaaaaaattacaaagaaatgggctgaatattaaaggaataaaaagaaataattggaatataattagttttttatcttttatatttgtgcttgtttttagttgtaatttttatttttaccaccttgagaacaaggtgattttgaagggtgggaaagtgttacaccatgaaatagtgtaggggtttattagtaatttgtaaagggtgtgaatcactataaatatgtaattgtatagctattatgggatatgaatagagtaaatagaactttggttcaattgagagtttgacactgactcgaagagtgcatttcggagatttgtcctgtctcgaagaggactattatctaacatgttatcaactttatatatatatata

SEQ ID NO: 314491 - DNA, 724 bp, Cannabis indica
attataattttatacaaaggatttggtctttaattagtctagtttatcaatattaatgttgcaggggtcgaacatgtgggtggagacatgtttgaaagtgttccaagtggcgatgccatttttatgaaggtcagcattaaaagcttcccaattaattattttagtagctaatataataggctctgtttctttttatagtgtatagtagtactttaactaattaacgttacatacatatattttagtggatacttcatgattggagtgatgagcagtgtgtgaaagtattgaagaattgctacaaagctataccagagaatggaaaggttatagtgatggaagggcttcttccaatgttgcctgaagctagttatggtgataacataatgtccaaaacagatgtgttaatgatgactcaaaatccaggaggaaaagagaggagcaaacaagagttccaagccttggcaagtggtgctggattcaatggcatcagatttgaatgttgtgttagcggcttttggatcatggaatttttcaagtagagaatatatatggctttttccaattatgaataaaaattaccatgcatatggctttgattgaagatattagtagagggattatttactcataataatatgtgtacaattaatataaggaattctgctgtactgtatatcaatttaagagcgtacgctgttatcatattcttatcatatatttt

SEQ ID NO: 314492 - DNA, 763 bp, Cannabis indica
tttattattatttattttttttagatagaggaaagttcaaataagcatgttgtagttcaaattttttgcgtagatatacaggtacagtctcgtgaaaagttgccacgtggagccagtctttataggaaaagatgatttgccacaagtgtacgcttgtctccactcatgtacttttaactgcagaaagtgttgttgactgtaaaaagtgttggtaactgcaaaaagtattgttagctacaaaaagtgttgttaactacagaaagaagaagtatggacacaacaaccaatgtgatgatacaaagaatgattgattcacctcgcatgatgtgaacttacgagaagatgcgatcgagacaatgtctagccgcatactatgtctcacatagttaaaggataaggaggatcgagagaagttaatactggtcgcgcatataccgattatatgcgatgatcaagtatgtctctcctaggatgagtaaagatcatttctttacataagtttggtttgaatgactgtttgacgacttgtcagggactcgcacgttccaagtcgtcaacgcatagaatgtctatctatgcgatcaagggtgaacacagacattcaataaaataggtccaaaggcccatcttgcgagtagaacaccgtagagcctgcgagcagggacggacccattaacattgatgtggggctatacaaacaaaaatattgccttttaaaaattaaatgtaaatttttatttaataattatagatcaaaatagta

SEQ ID NO: 314493 - DNA, 1158 bp, Cannabis indica
catgttctggccaacctagaccacaagggttgggtccaacagaaattgtatagaaattctattttatcgcttaagttgacttgtatgtaaagacttgaaataattttacaataatattttaccggatcttgaatatgtatttatattattttgatttaggttaaagataaattatattgttacaagttgttttatgcgttaggttattttttgttttattcacttggctttttgatcctgattaacaatattagcataatataatcatgacacgtggcattcttttaagtaggacgttacacaacccttatctctttttaactaggttagtgctaatttttggtggccacgctgttttcttcatcccccttaggcatctcattaaccctatcaaagttatggtcattcagggaagttcttctttgttacattgtttgtctatcttcctagcctctgtcgtgtttcctgttgtggatacccttatcgttcccctatcattgaattatcgtgtttcattcctccttcgggggcgcactgtcgacaatctttccttagtttcgtagagtaatgagtcttccatggcagaagtttcccttaatatttcttttgtgtgttgcttctcctcaactttaagtgctacataccctcgagccattgctagagctcttatcagtgataatctcaactctactattataaccttcttaagttttgatccgtgaactaatctctgcattacaactttcgtttcaataaaataaatacactttgagatgcttacatactctccacttgatctatttatgaacctctcaagcggttcatctcacccttgatgtattcatcatatatgtatcaacttttgctaaccttacacatattgtgaagtgtgtatggaatttcacaattaggtcttgatacgaatttacctgtctccaaagataggttatgtaacctccgcaaggcaggacccctcggcccttgggtgaacattttacattttatggcttccaagtcttttaagggaaccgagattgttagcatcttctcctctaactaacataatgttgggttttgtgccctaaataaaaccgatttcaatataatcagatttacttattaataaagattagaaataacattttatgttgcatggtt

SEQ ID NO: 314494 - DNA, 1695 bp, Cannabis indica
aattaacaacaaattaacaagagtacaacataaaaagaccgtattttctgtaaataaaataaaaaaatcgtaaaaatatttaaaattccgtgaaactctatttttgtaatttttttttattgtttttgtgtatttgtgaaataatccctgaaagaatacatggttttggattatgctttcaaaacaaatcaactttaaccaatagtcttttctcctttaatattttgcccaataaataaacaaaataaattataatcaaaacataaaggataaatagtggcacaagtatttaaaattttaagtttgtaagagttataatgttagaattttttatcattcataaaatatgcaataacaagattcaatttcacatataaatatattgcatattattaaaagtgtataaatataaatctaaagaatacctttgttgatttaagaagaataacgcaaatagtggaagcatattttaatccataaatactgatggtcttaatccatcttgtagagatgatctttgttgtggttttaggtaataatcttccaataatacaagacttaagttctctagttttctctcttgatgggagaagataataataaagtgactcttgtttcttgaggaccgctactaatatataactcatggctaggttataattttaaggatttttaatttagtctctcaataaattaaaaatatctcttaagatatctacacatttaacacataacacttcaatacaatacccaatgacccacaattattttattttggtcaaactttaaataacaatacactaatatacatatgagcccatattgaagatttgagtccaacaatctcctatttgggctacatatatttcctaatagtgtgtaaccttgtaagcttaatgtttactatcataattataggtattttaaaataatctcatccattgattatattaacatatgatcaaagcagctttcgcaatatttagcgtggctaaacctatcaatgatcacatatatcaatacaactaaatgacatagatcaatcatggatacgtagcataaaaattacatacaaatgtaatattagcatacctatctctaactggtcctccttaattgagatcagttctttattctttctaactttatacttaaacttcaatagaaataatatattcaaagtactcaaaatttaagtccatactttatttacaaaatcaaactataaatatgtgtcaacttaataaaacatttttaatgcaaactctcactaaaccaacacaatcttaaatgagcaacaaactcctaaaaagctttaagtaatatattcttaatcatctagatccgaaaatatagagtttgtccatatatgttctatagacatattattagtattactctgagtttcagtttaataacaattagtttaaagtcagtttgtttttgatcttgtaaagctcatgttgttactaaacctttaataattttcaataacatttttgtagcggcatgtgacaaaaaaatcttaattaaattttttacagaaatctaaaaagaaaaattatgttttctattttgtaatgagtgaacatagtattttttttcacgatttataacccatttgactggcctctatagtttcttctgctgatgatagcagaaagagaagagagaagagagagagagaagagaaga

SEQ ID NO: 314495 - DNA, 1861 bp, Cannabis indica
ttccagtaccagctggaatggactgaagcagagtagctctaccaatcttgctttttgatgtacacactatgtacccatcttaaccacaagctttcatgtttatttgatatggcccaaacatacttgcaaatggctgccttgttccactcctctagctttttgattctcaaaccacctgctatttttgactgacaaacattctcccaggctactgctccagcaccatggaacattgattgccctttccatagaataggtctacagtttgcttctatggatttgagagctttccttagcatgatcatcatttgactccaataagctggataacaattaaaactgagttaataagtgtaattcttcctgcaaaagacaggtttctagaggtccaactcttgatcctagctgtcattttctcagccaacaattcacactctttcctaaaagttttccttacacaaattgagatccctaaattggtgaaaggaaggacatgtctcgagaaaccagatagctgcaacacctagtttacagtgtcctgttacatattactacaatacattgcagtcttgcttgcattaggttgcagcccagatgtaagtgaaaatagctttaaagcctgcaacatgattacaaaacagtagcacatcgtcagcaaatgctaaatggttcaatttaagatcagagcacctgtcatggtattggaaatcttctttctctccaatcttcctcattagcctagaaagatattccatacccaaaataaatagcaggggggacatgggatccccttgcctaagtcctttcttagattcaaaaaaaccatgtaaggttccattaaacataagagagaacttaggggttttgatacaattcataattaactgtataaaaggtctgggaaattttaaacctgccagcatctcctctaggaaaccccactgaattgtgtcatacgctttttggagatctaacttgatcatacaacttggcttgttagatttcctactataatgcctcaccaaatcttggcatatcattatattgtgccctataaatctacctttgataaaaccacattgggagtgggatattatctcaggtaggatgtttctgattctaaaactcaaaagcttggttgcaaccttataaatagcattgcaacaagcaattggcctaaaatccttaatagaattagggcatttaatcttgggaaccagagtaataattagggaattaatttctttaagaattttacctaactccaaaaaggataaaacaacttcacatatgtcatcttctataatctcccaattatcttgaaaatagctactgaaaaatccatcaggtccaggagatttgctccaaaggatactataaatagcctttttcacttcttctctggtaaatccctgcagaagcatgctagcctattctggtgtcacaacaggtcctctagccaaattctatcctcaacagatcttctattctccatttttgaacctaatagccctttatagaagtccaagaaagcctcagtaatcagatttggatcatgccacctactcttatcctgctgctcaatcgataagtgtaaagaccgcttagtttaatttggaaattagcagttaatcatgtttaattatgaaattatttatagctatttaaataattaattatactgttattattgaattctgagatgcattttatgtcattcagtagttttcataattttgcatttccgatgcccggtaacatggaactcggtgtttggctcagtaaaatcacaacttagtatgttagtagttcgggacggtttattagacattgggaatgtcgagaatggccgggaatttag

SEQ ID NO: 314496 - DNA, 625 bp, Cannabis indica
aatttctaagattgtcaaaattgatgtccacctgatagtttcacatggaacgggcttttcctacgtcatgaagtgagccttgcacaagtgcaaagctaacttgggggcaaatgtttacattgaaaagtaaccttggtgatttggacatcaatgtttggcaagaaagaaaatatcctagagttaagtagtctcgagttatagcagtcaactagggaggggtccctatctctgtgcccaggttgactttgggaactctagaatgggtgtttgaatctcgccaagttatttccaactcaccatcttacagtattcataatcaagaagagaataagaatcaagtctaaagcctcgaaattgaaaagagatgaaataacatcccagaaattaacctaggggcctagcgttttcacccagcacctagattgacatcccgactatggttctaattttaaagtctgtgctagcacaaatggctcaaattttttactttgactgaataagactagtcacaaacatatttgagacatcagaatcaaaatcaaaacacttttatttttgagcatctaaggtaccaagtgcctagggcaccagtgcacccagcacccaggttgacatattgtaaacc

SEQ ID NO: 314497 - DNA, 5269 bp, Cannabis indica
taccttccctgatcgagttctcgtacaataacagctatcaggcaacaatcgagatgactcaatctgaattgttatatggaagaaaatgtaggtcacctaatcactgggatgaagtagttaaatgtgtattaatgtggaattatattattgtataatttaatatgtgtgcattatgctgattaatgacatgttaagactccgttggtgagctaggggcatttttgtaattttgacccgagaggggtgaaactgtaattttaatgttctaccgtgcttatggactatattattatatagtattcttgttttgtccttctgtaggtattttctgacaagtcggtgcggtatagtcataatcgggtattttaggccgaaccgggttcgggaccgaaatacattttcaagattttattttggtattttattagtgattgaataatctgagaaattatttaaatgtggtgtatgattgaatgacttaattgcccttgagttgtgcatatgttatattatggccctagggggattttggtctttttgaccatttaattttattttcaataaaaggaattttggcagaaaattaaaatgcattttaattatggttttgtccagcccttaaccgtctctctattctcatctcttcaaatttctaatctttgtgaattgaaccttgaatcaagcttgtgttgtggagattttggtgcttgttttggtgaagagcttgaggtagctttccacctctttcttcctttaatttttgttgttgtaatctgaagttgaatattcatgattttctttgatgttcttaaatgcatgttggtttgattgtgatagtttcgggtgatgtgtatattgtttaagcttggaaattatatgttttgcattttgattattttgtgtgttaattatgttgaaattggggttttaattactaaaattgaagtgattttgtttaaattgcatgctaagttcttggagttattttgagactttggagtgcaacttctttttatgaagatatgatgattttagctcaaggttgagcttatttttgattgttgaggattgctaccttaaatgcttatttttatattggacgggggtttaattttgtgttcataattccctattgtggtagctataatttgtgtataatacatttgagtttctgcatccttttgagtgagttttggagggtttggacatgaattcgtgttgttgatttttgggctttctgggtttggaacccaggtaccgtggctccactcactaggcgtcgcggcccgcctctttgaaagtcctaggttttcaacccaggttccgcggccccttagggggagtgccgcggcccgtcttgtgtttctaggcatattcgaatgcaatattcgaatattcataactttgtgatccggactccgatttgggtgttccgagtatcgttggaaagctcgttctgagctctatatttttatctggatttgaattccaattttataattatgtgagaatggatttagggattaaccctatttgtgaatctcaagaatttgtgactaggattaccagcacttggtcaagagcactcggggatttggaatctccacatttgcaggacatcaagtaagacactagttagtacatagagtaaagcgcagtggcactcatgttgaatattaaatatgattacttaagaaccgagattagggttattaccctaaagtaagcggttatatggtctagggttattaccctagtgattattgatttttaatttctatgccatgctttatatattgatttaaagaattatgcattcaaggcataatttggttggactcgataattagaactgagatgaaccgatctaaggccttattgtaaatagacgtgtgagcgtaacacgtgggtctatgccacatagacgtaattaggcatgtgagcgtaacacgcaagtctatgtcaaatagacaaaaagtataatggcattatttttatatatgtgaaatgtatattgtgattattgatatttatattgtctgttgggcttggctcactcgtgctcgactgtacaggaaaggataaatcagtctgtgatcagccatgagtgcgaaagcttggcagtgctggtgcatgttcgggccacactagaccaagcgggttggggtctaccagtgattgtattttgtaacatctgattttgccgcttaggttggcacgtgaagtaaacttgtaatattttgtgaaaaatgtatatgggatcccaaaacttgtatcttttggtttattgtaaagttaaaaatcattacaagttatattttcattctattgttaataaagtttaaatttatctgttcttatctttctaataatcccagattagcgagtttagggtttctatatcggttgtcgagcgtgcctaattgttagggtgttacaatattcatctccaaatccacagataagtgcataccgttcttcaatgtactttgagggaatcacaagtttgaatggacaacaaaatgcgaaacaaccttccaacaattggaagaacatctagtgaaggccccaatactgtccaaaccagttgacagaaaatcgttgtttttgtacttggcaatgtccaaacatgtcgtacgcgtcgcacttgtgtgagaagaaggaaaggtacaacttccaatgcattacatgagaaagagactactgggcaaggagtccagatatcctatgattgaaaagctctcctttagcttgctaatagcttcatgaaagttaagaccttacttttaggcccacgccatagggtactaaccaaccaccttcttcgtcaagtgttggaaaaaccaaagtcatcaggaagacttttgaagtgggcaatggaattgagtcaatttgacatacaatatcagcccagagttttgattaaaggtcaggtcctagctgacttcattgtggagtgcactgggataaatgacgaccctgaaacatcgacccagagagagaattctggagattctacattgacggagcgtcaaatgagaaaggctccggaggtggagtcatactaatatctctgcaacacctctagcttcagagtgcacttagattttaacttgaggcttccaacaatgaagcgaagcacgaggctttgattgctggtttgaaactggcaaaggaggttggttctcaatacatcaaattgtacagtgattcacatcttgtggtcaaccaagtgtctggagagtaccagacgaaaggggagaagatggctagatacgtagctaaaattcgagaattgttgcagcatttcaagcattattttgtaaagcaaatctctagggataagagagctttcacaaatatgctagaaaaactagtagcagatccaaaaatagaaaaatatggactagtccccattgcatacataataactccaagcacgaaacactgggggtctctgtcattaatcattcaacttcctggatggccccaatactcacatacctagaaacaagcacattctcagaggatagagctgcctcaaggaaaatcctttatcaggcccccaagtatgtaatcatggacgaaaatctataccatagagggttatcgatgtcgtatcttaagtgcattgccagaatagaaattagcactgtcatgcacgaaattctcgaaggattttgtggagatcacacatcaggacctagtctttccaagaagatcactcgtcaaggctatttttggcctaccatgaagaaggattacattgaatatgtccgcaagtgctagcaatgtaaatgctattcaaaggttcccagagcaccaccaacaaaaataaccctcatgaatagtacttggcccttcacaatctgtggaattaacttagtaggatcacttccaaccggcaaaggaggagtcaaatttgccattgtcgctattgataattttactaaatgggtggaagttgaacccatcaatatagttacttccaagaaggccctagacttcgtgattaagaacattgtgtgcagatacggacttccacacaagatagtatctgacaactgaaaaaaatttgatagtgatcagttcaccgacttttgtgccaagcacgaaacaattaagagttcttatgctgtagccaaacctcaaggaaatgggcaagtggaggccatcactaaaattctaaagaccactctaaaaaggaagcttcaagcttgcaaagcacactggctagaagaacttcccagtgttttttgtacctacagaaccactaatagaacttctatgggtcacactccatattccatgacctacgggtgtgaggccgtaatcctagtcgaatccacggtacctacacatataagggatacctacaacccaactcagaatcatgctctacttcaagaatccttagatttaattgagaagctccgagaacagtcacaagtccaactttagatgtatcaaaacaaaatcgctaggaatttcaactctaaggtcaagagcaaaagattcgaaattggtgacttattttgagaagagtattccctacttctcaggagcccaaagtaagagtcttaggaccaaattgcgaaggtccatacaaagtaatggacaaaattggtgatgggacttatcatttgaagagattagttggaattagaattccaagagcctagaacgctgatcacctgcgccgatactatcagtaaattgggggtggtcaagtttctatttatttttactttacctttttattaattttcatgtatgcctcaggacaggaaccattcaaataaaaagaagaattttcatttcatatttggcctctaaaatttttatcatgtaataagttagctacctataaattatatttcagtaaactaatataattactaaaatgaggcctcaatcatttatctctattcaaccaagctcgaaggaaatcatcatttcacttctaaatacttatagaagatatattccatatctatgattagcgctctcactcaattgaactaccatattcccaagatgtaaatatctgccagaaccattggttagcatccacaaacaacttgaagaacataaataatacaactaagcctaacctaaccatatcaggattaagatccataaacctaagatcaaccattgatatgacttaaaaagatataacggtaagtttatgatatcttatcaaagttcaatatcggtcacttccaatgtatactccataaatctgatactggtaaactttgctaat

SEQ ID NO: 314498 - DNA, 981 bp, Cannabis indica
ttttctcaattggtgtgtgagtcttaccttctccatgtttttcaaggatgtgcccactatacatagggggcctccctcgcttgactttcacttcacaatctgcaccctggagcatcaacaaattcttctcaccttgtctaagaggtctcaagtttgaacctcatctaacccctttttctcttttctcctgttggtagccaagtgacctaagtcatcatgtggtcaaataaccttggttatcatgaggatgagtaactttgagtcgctctcggggccaattgaatattttttactctttggtcgagtggctctggtcgctgcaagtccgagtgactttgctcgctctttgatcgagtaatttttggtcaccacgaggctgagtgactttgagttgctcttggggctgagctactctagtcaccgcgaggttgagtgactttgagtagctcttggggtcgagggaattcggtcactacgaggccgagtgactttgagttgctcttggggccaaatggctctggtcgctgcaaggtcaagtgactttgagtctctcttggggctgagtgaaatttttaactaacgttggccgagtgactctgagggttactctttggctaaataactttcataactagtgttcaccaagtgactctgagggttactctttggccaagtgactttccctgctatggtaagtaggttttcattttgaaggagtatggctctttgagcaatctcagcctcctacttatttcttcatcattttaccggatggaaggaaggttattatacttgactatgctaccttcttgacttgcaagcgttttcttactcttgagaggcgtccctctcatttcagcattaggccatgagtgtctttcaggacctcttttggctaagtaacttttgtagggagagataggtgcatttctcttattgactaagggtagctagtccttgtcgattcgaaaaatttcctct

SEQ ID NO: 314499 - DNA, 1320 bp, Cannabis indica
tactgaccatgatatacattaggcaaccaacagccatagcatagggtacacctttcatactttctctctttgtagcagttttagggcaacattcattagacaatttgaaatgcccaacaagtggcacaacagtggccttggatgaatccaagttgaacttcttgatcactttctcaatatagcttctctgagatagtattaatcttccttcttgcttactccttatgacttcaatccccaaaattttcttgactgctcccaagtccttcatttcaaattcagagttaagtttgttcttaatggctcgaatttcagccttgtctttgctatgatcatcatatcatcaacatatagtaataggtacacaaccttaggtgtcccaatttcctcgtaatagagacaagagtcaaattttgaccttgaagaactaacactttgaacaaactggttgaacctttgattccactatctgggtgattgtttcaacccatacagtgattttttaagcaagcaaaccagaacagttttgccattttctacctgaaaaccaggtggttgctccatgaaaatctcttcatccagaaaacaatttaggaaggcagttttgacatctaactgctcaacctccaagtcattatgtgtagcaatggctaacatcatccttatggttttgtatttctcaacatgtgagaagatatctgtgtaatctaccccctcaacctgtgtgaaccccttagctaccaatctaactttgttctaggtggctcaccttctgtcattccctctttttctttaaacaaccatttacaggagacaactttcttgtcttgtggcctaggcaccaaaatctaagtcgtgttcttcttcaaggacatcatttcttataccatagcagcaagccactttttctttgatttgcatgcaatagcttcttcataggtagttggttcaggttcattctcaaattgaaccacagccaaggcataggctatcaaatcaacctcagcatacctactgggggcctaatctctcttcttgtcctgtctctagccaattggtagttggtcaaatcttgttgatcatcctgactagtttctagagattccacctcagatgtgcttgcatcaagttcttccacagcaccctgtgtttccacctcagtagatgtcgttgcttctggtgtgtgtccctagatataatgatcttagcctttccattttcaatatgacatagtctataacctttaacacccttaggatatccaagaaagaaacatttaatggccctaggttccaatttatcaagtttctagtgtgcata

SEQ ID NO: 314500 - DNA, 1895 bp, Cannabis indica
taatacttttggctagtttttcttagaaattttggttggttttttagtattttagtattgttgagctagtgatatgggttgtgtgttaaattctaagtttatttttaatcttattttgaagaatgtcaatctaatataattgtgtttttttagtttggtgttgtgatgtttttcagttttgctagctctgacaataattttataatgggaaggtatcttttcaatgtgatggggtgttgtttgattgtgttattagttttattgtctaaatttctaggggcagttttgtcccatgtggctcgggataagaattttgcaacgcatggtttggcaaagcatgcccttcggttagacgatgagctatcctggctcgaggaggtgtcgtcgtcgattgtggattgttgttttgttaatcatgtgtgattttattcaccgcgtaaaaaatatataaataaattttagggaaatttttaaaaatacccttcttttatgttttatttgcaattttacggtttaaaattttcaattacaaaaatactcttgtaaagttttaaaattacaaaaatacactttgttcaacaaaaaaaaaaaaaaaaataacgtgaaatcaaccccacgataactataaatcaactatataaaataaccaaaaaacatctcatgacaattataatacaactataaataaattataaaacaactaaaaaaatagttcattatttttactaaagatgtgtttttgtaaataaaaaatttaaaaagtaaaaatgaaaaatatgaaagtaagtgttacaaaaataactaagaattttatgaatctaatttattaagtaatctaaagtataatactctcactaaagtaattagtaactctaaaatatatttgcaaatgagatagctaaatgtatggagctatttattattattattattattattaatattattattattattttgaaacaatgtattgagctattttacatttttcttttaattaaacttacatttttgcatgaatgtcccctacgtgtgagtgtctcaattaatggctctaaggaataacaaaatttaccgtaaattaaatacataaatagttaccaattcagaattttcacattaggattaattgttttaaaaatatttataacaagttttgtacttaattttgtgtttattttattaattttagtatattattaaattaaaaagaaattgtttaatttttaatgtattttttcagcccccatgcccaacaaggtaagccctagcagactgcaaaatgaggtttggccattgaaatttttaggaaattttatacaaattagttaggtacttatttttatatttttactggaaagaaagatcagatttttttacaaatctttttagttacacttgttgtttcatattgcagaaacataatataatatagtgtaaacatacaaacataaactttttatcttttaggagtaatatataataaaatcccaattttttatttagagttaaatgtcactgaacttttgctccacataaataattctttttaaaaaaaacaaaaagaaaagaatgtagagagcagagcatgggcctaaccctaagctgtaagtccacttaggcacaagggtagtggccattttgaaggcactccaaatctcatttttgtaactggcccagaagacccatattcatgaggcccaaagcaaaggaacatcagcctattgcaatctaaacatttggcattaatcaagagaaatttagatggtatactaatttttgctatttttttatagaaatactgtcaggctgtattttttatttttttactgtatttttttataagtttcatactgcagtatactgtgttaagtttccactggtgttctactggt

SEQ ID NO: 314501 - DNA, 647 bp, Cannabis indica
actctactatttttgagattttagtgtcccattagataaatcgtcagaaaaccacttaatatcgagatgtaagttggtgttgactaaaatatgacatactaggcaactaaaccgcactttgtgcggtcttgtgatttttttttttatgaaataaattagtttataatattaataaaaatttaaatgcataaattatttattttaaagaacgtgattgactaattaatattataagttataatatgtaaaagataattttaacaaaataatatattattgttgaccgaggttttcggcaactaataaaatatgaatataataatgagctataagaaagcgagatgaagactttttacgtggttggggcgttaatgagccttagtccacgagccactgatatttatggatgtctttaatacagatcttacacttgggagaatgtttctctctttaatacaaagaatgttcttggtgagttttttctctgtttgctcttaagcagccaagattctccgaccccattaaatgagctttgagggggtatttatagtgttttagtggggcaatccctagaattgtacttacacatgtgtctgtaagtatccataaagttgggcatttccgatgaatataccatgggtgctgca

SEQ ID NO: 314502 - DNA, 978 bp, Cannabis indica
aattatgtaattattgtaataacagtcttgtctgactagttatgtaatcttaacggacacatgctttttatataaaggggtgatccacatctaataaattaagctgaaagtaattaccaaaaattgactaagcagaccgaactctgactgaaccactataattctcttatctcttctatatttttgttcttggtttgtctatttcgtatcccaaactttgagtactcacaattttaagttagtactcgcataactgctagtgagtgttctaagtttactcgaatactcgcaatatttagtgttatttaaatttttctgataatatttagtgccgtctgtgagaacgttttaatgtatcagatatcattactttgtaataaatgtataaaaaaatgtatcaaatgtgtcaaatggacataaatatgtattcaacaataattaaaaaaaaatatgaatgtaattataaatgttatatataattaaactaattttatccacataatatttttattttatatttaggaatggcaaacaggtcgggtcaaacccaacttgccactgacccgacaacactttggtcaccggagcgagtcaaacccgacctggagaatagtataaacaaaccaaatctgtgttcttagctagaaattgatggttgggcctgagcaggcacgatcaaagggggagcttcgagaatcgatttgaggttgattcgaagagagattttatcagaagcttttttagggattttaaaatcggtcctaaattactcaagtcgatttgagtcgaagagatacttgatcatttgaaattaatttattttttaattaatgaaaaatcggggtgggacaaggcagagactcgaataaagcccaattgatgcgggtcaaagactcgtcgaatcgagaccccgacccgcgaaaaaaccagtttgcttcctaattatatctatataaaataggattttttttttttttt

SEQ ID NO: 314503 - DNA, 1409 bp, Cannabis indica
atttttaccgccaaaaatacgacgaacttaggtatttatctgctactcaggataaaatttaggtatttatgccgcaaattattcgttttttaaatatatcattttgattaatagtttattttttctttttgtctatatataaaataaaaataaatagttaagacatgtgcaatatttattatacctattatagaaaatttatataatagaccaaaaaattaaaaaaattacaaaaatacattaatatagaaaaattttcattttttgctctttgaattttttatttacaataataccattcagtgaaaataatgaactattttttaaatagtttatttatagttgtcatgaattttttttatcaatttataattgttgtggggttaatttcacgttattttttatttatttattttttttttactttttgcaaaacaaagtgtatttttctaatttaaaactttacaagagtatttttgtaattataaattttagaccgtaaaattgtaaataaaacataaaaaagaatattttttgaaaattcctctattaattattatttgttgttacaacttttacaaaattataattctcatctatatattttgtttatatataattatttggtattatgttaatcaattgccattaaattttttaattttcaaaatgattttaattatttgaactaatgtaagtaaaatatcccatttcaaaaaaaaaatgcaactaaaatatataaattcttttaaaatatatgataataacaaaatatctagtactttaaatataatagtaaatcacactacacatatgccacatcaaaggatgttaggccggcaatattctagaagtatatatcgtaaaattttgactaacttttgtagcaattatatatatttattttatttttaactaactttaataaaagatgacttatagtatcacattaagtgacttaatatttattttattttttcgcacttatttttcgctgatgatagtttgatattttttgatgcgaatagggaggctgccaaattttaagtcgctactggataaatatttgattgcttccggtcaaataatggttaattttcataaattagaagttagttttggtcaaatacttgagtctacttttggttgtggggagtgttatggtcaatccccaaagcctcaaagagagggttatgggatcaattggaaatatagggtaagttcaataaaaaaactagattgttggatgaaaaaaaatggtcgggtttgcatgcgggtacgagtccaacttgatctcatgggttagcaaaaattaaacccaaacctgcctaaaatgaaacttgtaacgattatgttgtaatgaatttacattaccttttgaaagtttcattgaaatacaaattatagtg

SEQ ID NO: 314504 - DNA, 1656 bp, Cannabis indica
atgtaaggcacaaaacccaacatgatcagcaccagtaataagtatgtcatcaacatacataagaaggagaagaagtttcccacttttttggtgaagaacaagctggtgtttgattttgagttgtgaaaaccccattttgtcagagaatgtttgagtttgtcaaaccaagcccttggagcctgtttgagtccataaagagcgttgttgagtttgtaaacatggttgggaaggctggatcttcaaaccaggaggttgatgcatgtagactatttctttgagttcaccatttaaaaagacattgttgatgtccacttgctgaattttccaattgtaagtacgaatagtacaaggctttatgacagggttgtatgtctttgtgtaatctaggctaggggtttgttgaaagcccttagcaaccaagcgggctttgtatctgtcaactgaactatctttgttgtatttaacctgatacacccatttattggtgactataggagcatcaggtggaggaataacaaggtgccaagttttgtttctttttaaagcataaatttttattcattgcttcattcctgattggactggcaagcgcagcctttaaggttgttggttcggtaactggtgatgtggtggcagtatagattttttgtttgaagataccaagcttggatttggtaaccattgggtgaaggttgtgagttatgacaggtgctaaagcagatgaattattgttgaaattagtatcaacagtattgttatcagcagtactattgcttatcgtgtgtgagttttgggagctctgtgatgtagataatgagctattgggggattgactagatgactcgtttgtcgagttgatagggagggaaggtgggggtgagggaggtggcataggtgtaggattaggaggtatagtagttgtaggaatagtataggcacctctgtcaattatagttggagtaatttgagagagagattgagaagcattaccaaaaagggtgttatatggaaatttatattcattgaaagtgacactacaagctacttacaccctcccactaggatgcaagcacctgtaacccttggaattaagatagtagcctagaaataggcatttagatgatagaaaggacactttgtggctttcataagatcttaaaaggagaaaacatgagcacccaaacacttttagcatggtataattaggggcttgatgaaaaagcttttcaaaaggtgaagcaaactgtaggacaattgatgggagcctgttaattaggtatgctgcagaagtgaaagcttcccaccaaaaggtgagaggcatttcagctttggcaagaaaagtgagaccaacatcaacgacatgtcaatgtcttctctcaactctaccttgttgttggcgactgtgggggcaagaatttcttttgacaatgcctaagtgttgaaacattttgtataaagattcaaattctttccctaaatcagtttgaacaccttttattttaagctggaattgcctttcaacataagcattaaactgaacaaataagtttgctgcttcagacttttgtttcattgggaaaatccacacaaatctagtaaaatcatcaacaaagctcaaataatacctatatgttggaatttattttaccaggatct

SEQ ID NO: 314505 - DNA, 1022 bp, Cannabis indica
tcatattgtcatttctctaatttgtctactctgtcagatgagttatcatttaataacatacatacatacatcgtgcattcagatctttttatgtcccccattgggtgtacaatgtttagtatcagtataaatcaaaatagcaattataatattgcccataaaattttaacctgagtcagtcgaaggaacgatacccaagtcctcttgagtcataaccagcacttgggcaagaccggtacactcttctcctttaacatcagtctttgttaattgtaggcaggttcttcttagatggccctctactccacaataaaaattagatctagctctacattggcagatatggtgtcttttgaatcttgaacactcaagataaggtcaccatttcttgttctcaccttaaccgccatcttggtcaccctagaaccttttgttcacataattggtagtttatttagtttttgcttcctgatatgcttataagttggttccataagtttcactacatacagtggcacaaaaggaagtcgatggcagaggaatagacacaagaagagcctattgttctctcaaatctcgaatatttccccttcttgtctaattatatccttcatagcagcaattacttgttcccaatgttgaggcgatagaggattctcttccttaccatttgccctgagcctagacaactcgctaatcaaactattcagtttccttagctacctaatttatcacatttaatccacatcttctaaccatttaaaactcagacagatatcaatattaatatgcatataccatacacatattctaataataatcatcactatgctacttttcccaaaatgctttataatagtctaggctggtaatataatagcaaataatataaatacttactataccatgagtcgacctgtcttcgcatcaaatgtacatattcgaccagtcttcatgacctttaaaactatgtctactcttataccaacttgtaacgctctatctcataaggacgccacatg

SEQ ID NO: 314506 - DNA, 1109 bp, Cannabis indica
aaagtatatgtttaaatgtgtgcctaaataatctttataatttatttctattgtaggcgtttgccaaacctgagtttttagaagctgtgaagtccagaacaccgctagggagaactggagaggcaaaggaagtgtcatcactagtggcatttttgtgcttgcctgcagcttcgtatataactggacagactattagtgttgatggaggactaacaataaatggggcattatattcttaaatatgtacgaccaattaaactgggttcttttagctaatatttgatatggagaataatatgaatgcaatttttatatcttgtcaaaaatgctattgtctcatcataaagaaaaaggactatgatacattgtcttatttgaaagataatttgtgctctagttaaaccaatttatctatctatatattcatgaatatatctatagtaggtaatgatagcatagggaccttgtataatattttcttaaaattcttgatatttatgacttttaaatgtatagactatttaatatgtacttgtgtgtagtcaattaaaaatttagaataaaattactcacaccaacaaaagaaaaactcacaccttcctttcttttttccttgaaaacctgaagaagtttattcaaaagaagataatgttaaattttgtgccctaaataaattaaattttgtgccctaaataaaactcattttaatataatcagatttacgaattaataaaagatctgaaatcgcattttatgttgcatggttcacatgatttatttcatgattatgtttaatgtataaattctattaagttctgaacatatatatttattcatggttatagtgtcgtcagcacagtgaaatataatcatgattatatgtttaaaagtttaattctcatgatttgtcagttcactggatttagactgacatgataatcggcgataaggtatgcttacaccttgtataaatgttatgtcctttctagggcattagcaaagtttaccagtattggatgtatggtgtatacatatgaagggaccgatattgaaattagataagatatcataaacttaccgttatatctttctaagtcaatatcaatggt

SEQ ID NO: 314507 - DNA, 673 bp, Cannabis indica
atctaaatattttcatgctaaatcggtttgtatctaaaataatcatatcataatcaaatctcacttttgagaattttaaatcagattcatagataataattataaatgaccactaaataattgcacaattaaaaatgattgtatggaatttgagagaagatgaagaaaaaaataaaaaaactacattaatacataaaagaggttcaagcgagtcacataacacccttaaaactgaaattagcacataatattcactctaaacatccaaagacttaattaaaaacataaaagataaagatagataaaaaaaacacaattcagggactccaatgatattctctctcttccagccacctcatccaaaatcactctccaaagttgaatccccttcaaaaaaacctagttgtcattcattttatagacaaaattaggaagtttccctttttcataagagttgcgacattggatagagagtcacgactctatagcaattttagataatagtgaaatttgagaattctttgagtgccatggaattaagtcaaaggtcgcgactctatagcaattttccagaacagttgcaattctaaaatcttattgcgatgaccaattgtattttggtcataatgttaggttattttagtattaattttagattaagtttagtatattt

SEQ ID NO: 314508 - DNA, 1786 bp, Cannabis indica
taaattttcaaaatgtataagtttttaaaatattttttttgctcattttttgtaattatgttatttttattgtacatgtatgaaaaaagccattcttttaatcagtgtcaaaccgattgaaaaaacctccacttacctattccaatgatttttgtaattgaccatcttatcaatcgttggaaaaaactcattttgtagtagtaaattttaacatgttggaagatactaatcaccattgatacattttaatatttatccacaaaaaaaaaaaattagcacatacttatatgataagtacaacttatctaaaaagaacccgccacataaatgtacatataagtaattggcacacatttacctacgcaaattattttaacaagtattaacttttattgatacagtaaaatttttatttgagaaaatatatttgagagatcaagtaaattgtattttaattgagagattataactaaatagagctacactagtaaaaaaaaaatcaaaacaccaaaaaatatcaatgtagcaacaataacaataaacaatccttaatactatatcataataaaactattttaaagtaaatataattgttactgagattttagaaaccaataatttaaatatatgactcaaagaaatatcattcaaagaaaatagaatacgaacactcaaagattttacatggttaggacattaacgaaccatagtccacgagtcaatattattgtcagaggttagaaaagcttgaaggattacaatgaattgaagtatgaacactctatttttgcatgggcaagtgagccaagaatttctaactcttttcatgtagggtttgttaaaagcttatagtgcataaatgtcatactagttatcctttacccagctctaatggagaatttacaaataatacattgactttgggcttatatggtgaagcccagcccatgagatgccttatgtatgttgatgtggatgccacctcacgatactagttgtgaaaattgtgtcctatcttcatgggtaattaatgacgtattaattacttgactgccaattattttgtttccttatttaggaagatatgatctttgtccaaaattctgggaagataactcctaatcgtgtgtgatttggtaggaaacgggtaactacatgggacttctggatatacgttgcggccttatttcggctatgcgttatatgtctttcgggtaaatggcggcaaaacccccaatactttggttttagtttcactaaacccccacaacccaaatttctgcgggtaaacccccaaaaccactattctgttagcaaaaacacacttccgttgaaatttagctgttaactgccaggttggattggagcgaggacacgtggcacaattttattggtccacgtaaaaaaattatttaaaaaaattaaaaaattaaaataaaattaatttaaaattttaaaaaaataattataaataaaaaaataatttttttttcttttttctttttctttttctttcttctttttcttttcttttcttttctttttcttttcttttcttttttctatttttcacgattaccaccttcttcttcttcttcttcttcttcttcttcttctctctctttggtatggatgcaggtaaggtgcgacgaggaccaccaagctggagccgttgccgaggaccaccaagccatcgtcgttgccgaggacgaggaccaccaagccagcgtccttgccgatcgatctcagccacgtaccacgaagaaccaccgaggaccgccggtta

SEQ ID NO: 314509 - DNA, 1687 bp, Cannabis indica
cttttcatatcatcctctatattgcttttcatcattacttatggtgttcatcatcggtttctgaagcatagccatcatctttctcgttatgtgtggtgtactttggcatctcttcaatattttcatatgcttcatgattattattattatctttttcaacattggtattctctgtttgttttccagtgttttctcctgtccaacgagaagcaacaagtcgacctaattcttcccttgacaatccctcggtatttcagaagcaacattaccaccctaaaataccatcgaagaaaacaacaataaacataatcaccttcgaaacacatagtacatgactttaaaaattaaaaaaaaaaacaaaaaaacaagaaatacaaatataatgcacaaatgaatgaaagtctcccaatttgttcacatatcaatttcatccataaaaaaattttaagtaagtgactctttaaatcatataatcacaagagtctaaatcaaccataaccacaaaataacagaatttattttgtaaaattcagtttggaaaagaaagaaagaaagagatgtacacttagctaatagctaagctttactctgtcttcaaggccttgttgtgaatacttgattaattgaggatgagaaccccaactacaataagcaaagcactagaaaaccattgaattgacaatgtctcttcaaacaaaaagtacccagctaggccagatgttgacattagatacccacattgtgaggttgaagagtagtaccaaaccatatctgataatctcagaggtaaaaaccttggcggatatggcagctaaggcagccttgagcccagctgatactccccaggcgtaccctaattaacccttctcttttcatgttcttcttcatcctcaacctcaacctgcttgtttatataaactcaattcagattcgtattcaaattttcactatgttggttatggttagacaaagccacgtgaacataattttaattgtttatagctccaccaaatatgtaccaaatgtccccaaatgccttcagaaccagttatttataagtcttttatgggaactactttcccaataatccattcctttctacatatatataggtacataaagctaagagtcttcacattctctactacaaaaacatattttgtgaactactttatactcattctcaataaaatatataagaaggctctcagaatctgaagatggctttcaaccaataaagaagctgcttttaactccaagatcatttcaaaaggctacattgcagtttatatatgttcgaaaggagcaaaagaagtgacattagtacctctttcatacctaaatgagcctgcatttcaagaattggtaagcatggctgaagaagagtttggatatgatcctttggtacaattccttccagtgtagacatctttattgattaaattgattgtaaattatagaagaactaacataatttagaacagaaacaattttgtaaatcatatactttgaccatgaaaaggaaattgattggccacttgtggaacttacatttatgtatagataataatctataaaaattgaatgaagcattgaatcgatcttcaaaaatctgatgaaatgtcagtgcagcgaccaaaggtctaatagtacactgatactttttctcctattgctaaactcacat

SEQ ID NO: 314510 - DNA, 500 bp, Cannabis indica
gtagtttttttttttttgggtattaatattacaataattaattaattaattaattaattatggtgttaattttgcagaaactatattatttaggtgctagaaaatttgtggtatttgaggttgaagctatggggtgttcaccatctgcagtgcttaaggcttttccaaataatcccaataagtgtgtggatgatttgaataatttggccaaaaattacaacacattgttgaatcaaattcttcaacaattagtgtctaattttaaaggagcagcagtcattgtgggtaaaaattatgattttacctatcagatggctcaaaaccctgcacgatttggtaagcttattctagattaattaattttgaaaactattttttctcactctattgacagttatatatgcaccacattaaattcattgcaatctatttttatttatttatttattttaatttttcaagtaatgatatgtatgcactagttatgcattaaaatatgg

SEQ ID NO: 314511 - DNA, 2011 bp, Cannabis indica
agtttgaggggcatgatttggtagatatctaagtctggggagcatggtttagtacataaacaatcactgaaacagtaagattgaatgaaattagacaaaagtacttaaatctaacaatctcaatagtccagggggaatttttcacggccaaaaaagttcagggggcatgatttggtctatatcaaagttcaggaggaaaattactaattaacctagctaaaaggtaaaataaatttgctaagagcttaaaattgagctctatcaaatgctttaaacccttagctattatacctcgtcccaaactctaagaaattcttctctacatatacctcaataaatagtagaaaggtaaacatattttatatttttttctttctttattttatttctttagttaatttttctttttctttttactcatttgtgtgtttttctttatttttattaataaaatatctgtaaaaatataatatttaaatattatagagaaaaatataaagaattaaggtaatgtgtggtgtaatataaatatttgaagtaaaataaaaaaaaatagagttttaataaaatattttaaaagatagagtagagatgttgtggggagagctctaagtaatttacttttagtaagttctatcacgaaaaacaacttgtgtattttttttcgtgagtattactaaaaaaaagaaatgcctaacacgaaaataataagtgtcatcatcatcatcatattattattattattattattattattattattattattagtataattattattattcttattcgtacatagtaaatgcattgcaatcaattaaaggattgagatccatcctctagccaggtaaatgctcccttgatgatttcgtctcctaaccacatcgccaaaaattatcaatccatccacactgcaggactccccaatcttctcatttttgctattggcagtaatgatggcccgccctgccgtgccccaacgaaaaagaatcaacttgctagctcatcaggtttcaagagacatttggctactattgaaaatgagcagagagaaatgctgaagagacataggcctcaaccacgtcaagacgtagtgaaagtggcctccagtgatgaggcaggcactgtagacacacaagcctgccaagactcatgaatctcatgagctggaacacccaaggtcttgggagtgatcgagcattcctaaatctcttccttcaggttaaaatgtataagtcatctcttctttttgttatgcagtccagaatttgtaagggttatgttgattgtgttaggactaagttggattttgattttggttttgaagtccccagagtaggattaggtggggggcttttgcttttttggaacttagacttaaatgtacttattactaattttttattaatcatattcactgttatatctcgtgtgctgattattttggttttaattttactactttttatggtgcccccaatcttgttaatcgtctccatacctggaaaattcttaccaggcctggccattttttaacttagaactataaaaataatggaaacagtagaaatggaccctctagccattttttgacagtttattaagaatttccaattagaagtcttagacccctatggaccttgaatgacctgggattaaaaacatcaaagaaatgttagattgggctgtagggaacacatattggcacctaaatcacactagcaataatttaaaccatcttgatttctttggttcagatcatagggccattcagttacttcttaagccccaacaccatcctactaatcatgcccttacgaacaaaagattattcctgtttgaaaatacttggctcactgaaccaaactaggatgatgtgcttgttgggttttctgccctaaataaaacttatttcaatataattagatttagtaattaataaaagatcagaaatcattttctgttgcatagttcacatgatttatttcatgattatgtttaatgtata

SEQ ID NO: 314512 - DNA, 1912 bp, Cannabis indica
ttcttggtgatttttctggcgacaatgccaattccgaaaatttttccagtgccggcagtagctccgatgattttctcgacaccagcaactactccgacgatgaaaaggagatgctaatctaagaacccataaaatctattaatcaataaaatgaaagaaaaataaagattcccactccaacggttgatgtttttattgtaaattcttaagtgatccaaataactttgtcataataataacaataatacaacctaatataatagtcaaaattgataaaaaagaaatgatttgataatacaacttatgaaaagaaaatttcctaaaaaaaaggaaataaaaaattaaagcaatattaatattggtgcaaaaattttgagagttaacttaaaaaaataataattcaaattaaaaattaataaattttttaattattaatattattttattttttaaaataaatatataattaaatattataatatgtataaaattttaattgtatacaattagtcctattgcaagatatagaccttatattttaataaccacatgatctaaaattaatgataataaaaactttcttaccgatagggaatttatgctaagtcctactataattttgtcccttatatatatatatatatactagtaaaaagttacgtgtgaggcacgtatactaaattttatattttatgctaggtattttctactttatttaaaagtaatacaaataataattaaagaaaaatattattagttattgttaagtgacatttttctaatggggatcgatcaaaatatgatgcccctactctttgagaagagttgatatgcttgtatggtgtaaaaacttgagggaacctactctttgagaagcattagtcaacgccaatgctgctacatgtgcatcatcattatcattctcagcctatttgccttttctattgggtgacatttgattttctctataatctctcttatgtgagtatgaaactggaaagagtggtgtctacttctcaactacacggggctgactacctgatataatgttaaagcacaattaaactcatgtttcattttagagtagatatcaaaaattaatgaactttaataatgtagaactaaactatcttctgtcaaatcttgtacagaaattaagtctcttacatatttaacaaatatttctatagcaattctgaaatctaattaaaaatccacccaaattttaacactatttaacaacttacaaaaacttcttccaagtcttcaaagaatgttccatttctacatgatttgggttattttacaaaaataatagcatagcgaaagacttttgagatgaatctgcgacaacacctagttatttcagtgcacatattcatttgttaatattttgtcttgtcttttattaataaaaatattccacattacacacttccctcacttcacaaataattattaaaaacaagacaaatattaagatccaacatacaactgttacttttttttctctcttatccctgcataattctgtacaccatcaacatggctacacagtttaacctcagtgtcattaatttacaaacgaatcacaacttattagaagaaacaaacttaatatagataaatgcaaacaaaatgatcatcataaattatataaaatagcatgtaattttaccatcattgcgtttccttttgagtaatgataagcatccatcagtagaagcaactgagtgagattggaaaagatcctttgaggtgttaaaattatctctctctcacgcttgcaatttggaagtattcgaaaattcctgaaccatcattgttctcttgttcactatcactcccttcctatcaatttgagtttgaaaagtgaagccagcgtcaaatctgaattctcatcaaagaaaaa

SEQ ID NO: 314513 - DNA, 579 bp, Cannabis indica
catacctctttaagatgggatatgtatcttgttgatatacgtagtacaaatcaattcatataagctattctttaattgtatagtttcatactgacatagttttagaattatcacacttaacttttatcaggcgatgtggaattgcacaactcccggtctctccttttgcggatcacaggactctaactgtcacaatcaccccttttaggggtctgattaggtcaatgctctgatattatttgtaatgtcctcgcttcaagcctgtgggtcttccctatattcagttgggtcaatgttctgatatcatttgtaatgtccttgcttcaagcatctgaccctgcagaccaacacgagttttttcaatgtattttgttctcacttccaagaggtcattcatcatgaaattatctcaggtcaagcacacttaattttagagttcttttaagatgagatattgaaaaaaagatgcatcttgttgatataagtagtaccaattaatttagggaaatttacacagtttactgtgttttcccattttcttcctttatactgttacactcccaaaataacttttgtact

SEQ ID NO: 314514 - DNA, 584 bp, Cannabis indica
gagagagagagaggagggggagtgttaagaaaggcatgaagagtatttggttaatttatatatagtggagtaaaaagagtgaagtggggtttagtaattttgacttctaagaaaaagagaaggaagagaaaaagaaatttggttattattattaatatttttagtttgtttggttagtgagaaagttttttgagtgttggaaggaagagagagagagatagagaggggtggggtggtgagagtagggtatcgagagtagagagaaaagagccaaagggtaagttccaaggcgaagataacatgaaccaatgccgtgcttttctttttgttggttataaattaaatattgtattcggggttaagcaggggtttttgttgtttgttgtttttgttgtttttgtttctgtattcttgtttttgtatacttcaagactgtgcggcttttatatttttcaacttgaaagcaaagcagctggccgttgtgagtgacttatcgctaactttgaagactagtgtttttttacttttgaaaaaaaaaaaagaaaaaaactatcatatttatatcatgtaaacaaacactctta

SEQ ID NO: 314515 - DNA, 959 bp, Cannabis indica
atgtatatgttgtaattatttagtattatttgtaaattttttaaaaattataaataatttatagtgtttaaaataagattaaaatattttgttgtaatacataattactttttttttgtatatatatttttatatattagatatatacataaaaatacttattttaattttttttttgtaaaaggaaattttatttttaatgctagataaattatttataatttttttaaaatttactaatacttttaaataactacaatatatatatatataaattattatataaaaaaaaataaactcctcttataaataccaaaacaaattagaagtgtatgtactataccctagcttatacatacgaaatggcatgataaccattaaacctctttctttcataattttgggtatctatcttttacttagtgctttgtgaaattatttagaaatttgaatacattgatatatggcataacatacaaaaataatttttttaaaaataaaataaaatatgttcctagtataaaaatatgctactttatatggtaatagataattggtattcatctcactttcatgcaaaacaagataattatttaaattttttttctccgaaactaaactatgatctatttaaaaataatttgaaattttttaatttaattaggtagtgtttggtaatatttttgtttatatacattttttaataataacaataaaagtaattttttttttaaaaaaaaaattgtttttgaaaaacaaaaatgtgttctataaccaattttatttttcaattttaaaaataaaaataaaagtgtgttctataaatatcattttcatttcatttgttgattttatttaagtcgggtcgagggaggtcgggatcaggggttggtccaagtctggggccgggtccggggttcagttttcaagatctaaattggggtcggagtctaaaatat

SEQ ID NO: 314516 - DNA, 501 bp, Cannabis indica
tcaactcactaacaacacaaagaaacaagataattatcctcgctcaattaatatccaaaaaaaaaaaattaaatactattttaatctggatattacagatattgtcgagggaatacaatttaatagttctcaaaatctaagagataaaagtactaatttaaaaaataaactagaacgcaatctaacaaaataactacattactatcgggagaaaatattagcaacctgaataatttaagagacaatttaatatttaagttcagagaacaaaaacgttaattattttaaaaaaaaaatgtacacttatatagcttaatactttttagtgcaaaatttaacacagacacgaagcctagctcaagaaccccaaccccacataaagcgaagcccgactcaagacccaaacccaggacctggccttgaccctaactccaattttaccaataataaaagggctatttacaaaaatatgggaaaataaagataagttttgatatatat

SEQ ID NO: 314517 - DNA, 2830 bp, Cannabis indica
tattatattaataaattataaggttttttaatatatcgtgtcgtgctttttaggcttatcgcgtgtcgtgccttttgggctagtatatttgtgcttacgtgtattgtctttcgtgtttctcgtgttgtgttaggctcaaggacatattttttgtgtcgtgtcgtgcccaagccagtattttttcatgcctagtcattcatgtgccttccaggctcgtgccagtttcgtgtcatgtcaaaaagtttcgtatttacagcactagttttgagtatttagtaaattataatctttttttttttaaatagactttataaatataagtatatagtgttagaggttttatatatcaatggaagataattaagatatattacaactcaattgtaaaataatacaagaactaaaaaattgattacattaatgttacaacacatacactatatatatgtatatatatgaaaggtaaaagagatgaataggtttcgcaatattatataatatgaaaaagaaaaataagatcactcactcacaaccttgagtgtagaacagtggggatcaccatgacttgaataaggtattacacctttgtcaaaaagcttatttttccttatctctaaccactaagggaatcctctagaaaatagctttggaaattatcaagtcttagggttttttagcaatgtgcttttttgatagaaaatttagttctttccaaataagcaccaaagatctctttttatagtgtttaagtgatcacacttagaattcagatacaccacacctttctgtcatataattgagtattaatctattttgtaacaactatatcgtcattattttgaattccttaaatcaaattgtgtaacaactcttttattacactaattatgtgtgatcaacaaaagagctacaagtgacaataaattgtaactcatctccaagttacaacatgtaggctacaaagtgtaggttaaaaccataggttacacattcatttactatatatattattcacataataatatatttatcacattttaatctatacttattatattatcaaataatataacaatcccctagtagattaaaatgtgttacacacttgtaacatgcatataacattatcttataattgtatttcatacattctataaatatatgaataaggaatttttagatatttatcaattatacttctataattaatgtattcatttatcttataattgtatttcatacattctataatatattatccattaaatacttgcttttagggcataaaccctgacatttcccgagatattttatcttcattcaaaataagaaaacaagtacttcaggaaataaatagttcaacctagaggctagaagactgacccaaggcctaggttgacacttggcctggtcaccaacgcccaaggtgacattttgtcaacctcggcaatttccaacgataattttgacaaagtcttcatgatatattcaccttttagagtatccatttggtggccagaataaggactcaacacccaggacgacctagtgctagggtcataacacccaggttgatattttgtcaacttgggccaattccaagcatttttcccatgaagtctcctagatattttctccattttcatcaataattaagatacaagtgttctcgaaaagtaaacaaaaacatttaggggtcaaaatatggacctagcactgaggttgacactggtgttgggctctgcacctagattgacgttcaacctagttcatatgtttttgttacgcaaacgaaaattctactatgggcattcttcttatcttggtccaaaacatggtaggagacgtcgtttgcaatatcaaatgccatagaagtacaaaaatgaatcctaggaagctcaacaatgagcacccagcgcccaggttgacatgtggtgcattggattctgcttatccgatcccagttctgtctcaaacatttgattattttttatagtaaacgagagctacgacttgtgacaaggcaaattcgctctttgatatttgacctttccagtaaagttgaatatcgacaaactagtcacaaatcgagaagtttcgagtctacctgattttgtgaaaaagcaacatctctgagaactggtgaacaacttcaccagaactcagaaattgaataagtgatgttagaatattacttaggcataaaaaaaatataattctaggttgacgttagaatgtcaacctgggcccctattgttattgaacaaccttcagtaaaacgaccataactcattcaatgttgctctgattgatgtgattttaagtgcgtttcaaagctctttctacgcatgtcttacactcatatgttctgaagatttgaagtaaaaaattcgtccacaagtcaagtatattttgtctgtgaaaagcttgaaaataatttaacaaacgcgattcaagctctaaaaatcgagaattatcaattggaattcttttaatcattagatctccattaatggtcaacattagcccaggatgattttttcatattttttgtattattttattaagagtttaatggatctcttgcctataaaaagagagctccactagcttatttttcacattatgctaagtttccataaggttagagcttctttctctctttctagaatttaagagcttttccttagctaattgccttgttattctcgtgagaaataaaaatttgaagcagacgtagttccatttctattgacatggagagtgaactattataagtcacttatagcgttgtgatttttatggtttaggagccagtaatccgccgttc

SEQ ID NO: 314518 - DNA, 1858 bp, Cannabis indica
tttagttacaagttaattttttgttgtgactaaaagtaacatttaaagttaaaaaaaattatactataattaaaagattgtcactaaactaaaggtagtttttatttgagaaatgctaaagggcaccgtggtgcctagcattctcctacgtgtcaatatcgctattggtccaattaagtatcaggtctcatataatttaatataatagcttttagggagtattgatagccaatcacaacgcgacatatcgagaaggtgctaggcaccactaatgcctaatagcaatgctttttttattttataatgagacctatttggaacagttttctctcattatataattattacttcattgggagtaatcatattaagatcaaatgttaaatcaaatatcattaccaaatattgttaatgattttagtattttggatctctctctctctctcatatagtgatttgcttctaagcacacgtgaaatacagatgtaaatgtgggatgtgaaaggaggaataagatcatatataattatatatgtacaggctatatatctatatctatatatacatatatattaaaatatgtgataatggaggcacctaataatgggaatgttattcttaaaaagtataatttcaaacctcgataaagttattttagcatgattagttctttgtgtgtcgagatgactttgaatattcataataataagaaatggaagacaatcaaagaagggtctttaatcttctcatatacctcttgtttttcttcttcttcttcttcttaaattttaatctcttactttataattagtgctacttccattattttcaatttttgttataatgaccaacttttgcgacttccccacgaacactaatataatcccatttttatatatacaataaataaaaaattgagcaagatatgtccaacgtctcatgctttcaatttaaattcttataaatatatataattgaaatataaggcctagtttgacaaaatatatataaatatttgtacaacaccctttggtttaaattaatagtgtgtcaagttggtactttagataacgttaataattctcttcctaatgattatcaagaagagtatcatcatcatgacctagctagcttaattaatttaaatatataaatatatttgagttgtagtactagctagtagtctagtagtgctagtgtgttttgattaatgctaaaactaataattattttatttatttttcttcttcatttattttttggtgaaataaaagtgtattgaaaaatttgtaattatggttttttagttcaacgcagagatatgcatataataattatatatgtattgagtagtggaagcttaagcatgcgtaccaatgagaaagaaattaaggagaaattatattctagtattaaataataattaaccctatacatatatactatagtacaaaattcatcaaacccttttagtttattacttattaatttttatttcctaaaaacaaataaaatcttaacagtagtaaggatatcacaactaaattttgagtaaaattgatcattatgttaataattaggcaacactatatatactatagataatatcatcaatatgatgatgatcattatggtcaagatctaataaatgacaataaaaagcatgctttctttttcagcattaagttctgaaaataacaaaaattatataacaagatcaaagattggtgctccactaaagaagaatggggtccgattcacatatatagctaagagtgaataagttcatcaaagtgataacttggaagaagctggtttaattttaaaaataccatattttattattatatataaatat

SEQ ID NO: 314519 - DNA, 604 bp, Cannabis indica
ttaattaaaatcaataaatttagtcctctagaaaagtactacacacgttgatttataataataagagtggtgatatatgaatcaaataacttaacataacttttattaattgctaacaatgtcgatccttacacttacaaaaatctcatctactgaattgagaaaatatattacacaagtaattagataaactcataaacaaaaacgaacaagaaaaatgcaaactgattaaaaaagaaaaaataaaaaaagaagggatagatagaatggaggcgttaaaagatgatataaatttaagcttttataacactaccacattgtcaacaagctgaaaataaaccagaagcatgagcatgatggtcaataatatgcctcaaaacaagaaaatctgtgactaagtcttgaaaaaccctaaacacattcaaataaatgcttatcttcttcataatttcagtgttagagatttataacaatggaagaaaatcaagatttattacaactctattgtaaaataatagaaggactaaaataagagattgattaaatatatgttacaatacatatatatacactatatattctatatatatgaaaggtagaagag

SEQ ID NO: 314520 - DNA, 637 bp, Cannabis indica
agtataataacgagacaaatcgtgtcccattatatatattaccattgtttatcttggcttggaattaataattgcttctatttgttagaaaagaaaatgttgtcgttttattattattattttttttttttgaaaatgttgtcgttttattatttagtacaaagaaaaatactttttgtagttttagcttgtaggtctatatgagtgtcgtttgggacttaataaattacgggtagagaatgaaaagaatattaattattaattttttcttttggtagaaatattaattattagttggcctgaagggccaagatacaaaacttttaatgccgtctatatgggtcatggtatataataaaagaattggttaattaattactagagaaatgtgtagtgataatttattaatagattgaagataatgatagcaatgggatatgaaactaataaaaagtgaaacacacactctcatggcacataattacatgtcatgctcatgcttaatgattttgcttcccatattcgatcatcatgccccatctctaacaatcatctcatctcctcctgcgaatttcaacccctccgcctctctttaatctttttattattattactattataataatttttttgattt

SEQ ID NO: 314521 - DNA, 1299 bp, Cannabis indica
acgttccaaacgtactggcgatcctgcgagctcaacaaacggaacatgaacagtcaactcgcagatgcggaagacgcatacgttgatgaacttagtaactgtcacacatttattaatgttaacgttgtttgagtttagttattgcaattcaatgtgtaaataatggattaacaatgaatgtgatccttatgtaaccgattggacacctactttgtatataaaggggtgatccaccatgaaaatgcacctacgaatcctttgctacagtggactaagcagatcgaaatctgactgaaccactataattctttgtcttgtttactttttccagccttgttgtttgttcttgcattcccagtcgagtactcgccattctaggttgaatactcgcaattgtcatttccctaaaaattctcttgtatatcaattaaatagtacttttcggtgttgcaaaattgactcgacaacagaaccgagatgttatcttttgatataagggtccatagagaagccctatattatttacctaagtagtattttagatagaaacttatcaatttactgttaatgtgatttggggtcactgatcgctgaacgaaattctactcaggctgaccgacacacttgaattagattccaagtaaaaaaaagtgttcaaatgcacatatgcacatatttagtattcgtgtattatattatcatatagctagcatattagagataacagtatgtgtgttcgtagaattgcaccaatatactgatatctaacatactaggcaatattgaatgttatgcattaatgctactaatattggtacgactagagtaagggaattaggttggtattttggttaattatactataggtatgaacattaggatctcaatttacgcgctagatggttagtttacttatggtaacttagtgtataggcgctcagttacaagtgagatatttatcgtgtattatgcatgcttttcttgctaagtcaactcacagttgttttactatgtgtaggttatgagaaagtgaaactgaataacagtggtttgagggcttcggtgaagagtatacatatttggtcatctagacttggagggttgaaatctatgggagatcagttggcataacttttattttctcatttgacaactcttttgagattaatatattatgtatgcattttataactagaaacgagatctcgatttataaatgtgtaaacgatgtttgttttagtaatattttaattattattaatttttacttgagttactattttttttatttaaaaaaaa

SEQ ID NO: 314522 - DNA, 2005 bp, Cannabis indica
tatgatcacgtgagctagtctcaattgattaattctatgcatactttataaatatctttttcgatctccatgtatatataaatgttgattaattaaggatgtatatagtatagcccaactacttagcttggttttaatatatattttggtttaggacccagtcccagaaaattatctttataaacccctttggcattatacatacaaatacatttacatataaatgtaatttatgtgacaaatataatcatagttgtaaattaattataatttatgtatataataatgagctttttttcttttttgacaaaataatgagcttattatatatatagtgaatcaaatatattataataggttatacattttcaaattaaaattaattctaagctgcacttttaaatcatgtttcgtaaatgtaatttttttctttttatagtgagagaaaaagttaaaatgtttattatttttgttattcgtgtttttaatggacggaggacacgtgtaattttaagaaaatttcagttcagatgctctaggtccaatcgcaggtctaatcaagaaaatggattggattcattagctaagtcaagccttctaggtattggacagatgactcgtctaaataagatatacctctagcatagtgtatatccagatggcatcgaatagatcttccaaatgagtaaataatgggcatctgattatccagctttgtatcatagcaatttattgccaaaccccacaatattagggtttatttccagtattgtgaccaggattcgtacctttcaaatgaggaaataaagtaattgtcgatcaagcattaatttatctttattattcacaaaagtaggatacggtttgacaactaccaacgtgatgtggcgtccatgcgagcagaagatccaagcctcacgggcctggcctcaccaaatcgacccgaatgtcattatattatttgtatttatcccatcagtggacaaaaaccctaacgctataaatataagaaaagtcatccatgcaaatggttggaatctcattcctagtgctcaggaaaaatgtaggttcaaatacttgtctaaatcttaaagcttttccggctttaaaataataatattgaatcgtggactaaggctctttaacgctccaaccccataaaactttgatttcattttttatttttctttctttaactttatcatattttattggtttccaaaaatatcggtaaatattttggtgctttcattaagagttgaaaaaataagtgataccaacaaaagtttatcttgcaaccatggtagccaccccaaattaccgtcgacaaattcggtgtccatgatggatactcacatggacaacgtgaatcatactactgaggcgaatgtaggagtcgatggagacctgacagaagcgaccaaccgctgctaagaagactcaacatattgaaaaacatgttgatgaaaatccaatcattgatgatgacctagaagatttaaaggatgatcctgagcacgaagatcctgaaagtgctaattggaaaataaaaggaagatgagtattactatgagctagattccgaagtcacttgaatggttgaagaactcgctgaaactaagaagaaattgtcggattaggagaaaatctcccatcaaatgtgagaaactctagcaggattagaagcctaaatttaatcaagaggagtggctcatgatgaaaatattcttaatgaccctgcacctcataaaaacaatgctacgaagaaaacaaacccaaaagaccatggaacttctgatcctacaagggacaaaagaaaaagttttgtgggagagctcacaaaaaagactactctaattgttccataaaataacatgaacactaccaactaacctttacaaaaaaagaaaatggctaatgctctagagcaacaccgaatgattaatccacaaggtagagttgcattggggataagccaagtactcatgtacaaaggcctactgct

SEQ ID NO: 314523 - DNA, 1678 bp, Cannabis indica
ccgcaattttttacggtgcggtttttgcaggtttttagttttgcggtgcaaatgcggtttgagaaattagaaaaaccgcatgtgcgggtaattggtttgaaaaaatagtcaaaaaccgcaccacacgcaccgcgaacacccctacttgttattgtcagtgctggttgttttggtggtaaatatgcgcctgagatcattgaagcaatgagaatcaaaaaggcccttagttgggttaagagtcacaattgatagcgagttgagattgaaacagacagtatggttttggtccaagccattcgtagtaatcttgccatgtgttcaacttttggcttccttgttggggaatgcaaatctcttttatctacgatgactaatgtttaattatttttcataagacgatcaataaagcgagtagcacactacgttgctaagcactctcggtatcatcctaattgtaatatttcttattttctaattttaatttattctaaatattttttaatattcagaatgctgtaatttaatgaagttgattttcgaaaaaaaaaataaataaagcaaaaattatatgtaaaattaaataaacaaatttctacaaaagggtgtcaaacaagtattgattttttttaattacaaattttgagttatgattttcttgggcaagttgattttttatttttaattataaattttgagttatggtgctttataataatatactaccactcttaattacatgtttgcatacattgattaagccattgcaacatgtaaagcataagtaagtttggatatgatagccaaattaaacacaacggtatattatatgtattatgtcactcattcactataattattttgtcactacaaaactatttcgattattatataaaagtaatctctaaatcatgattaaataatttcctagttaattaatgaagtaaaatccttaactcttaataatatacattgaaatgttttagataccaaattcaatgggaagcccaaattagccttaataaaaaaaatattttggaaagcttctagggtatatttctaaaataaatgcattgaaaaattttcagcattttcttttgtctatttttttttatcacggtgtatattataattatttaagacattttataaaattttaagaaattaaaaataatttacaatttaaaaaataatgttcaaatagtctatttcatacacgtataataaaaaaagtgtgagtacaacaaattgtttgaacttttttttttttgaacaaaggaagaaaattttattccgacaaccactgaacaatacacactacaaaatagcaacccaacactcaaagactatttataatagtcattatatttttttctctagctgaaaattttaaaatattacaataataataataataataaatatattaatatgtataaaattatttagataaattattacaacaataaaaatattacaacaataataatattataatagtcaatagtcattatataaaaatattaaaaattggtactttagtatataatacgagtctatgccattatagccgggggagctttttaagaagctaaaatcacttttaaaaaatgttatgagttaatatgtgtttggtaaactttaaaaaatagctttttcaaaaatttaagtgaaatttata

SEQ ID NO: 314524 - DNA, 1263 bp, Cannabis indica
ccaattttcctagtctttctccacacaatttgagtatagtggccacaaatttggccccgggcgcacgaattcgacccgtacctataccatttacgctcatcaatccaggctgaagcagcctggactggagtccaaccccgcccgcttccccaaaatatattttccccaaaaggcccatttgagtgttgcaacgcgcagtcgtatcgccttttgttggcatacaactgcgcgtatttctcgagcttcgtatcccacttcaagggtggcactctaagaaacgcccttgcagtgttttggggcccgagaaattgctgcctcgtagactgactcacgtacttggctacattatggatgttggtggccgcggcgggttttgaggttgagataatgaagaagaggaggagaattgtggatgttatggctatggagctttgaataagcatagccatttttatgtgaaaatgtgtcaaagaggtatagttatatatatatatgggaaggtttggactttatttgtttagagtggttgttgaattggacttttggaattggtaaagtgtcaaagtgtatgaagtggcacccatgttcgataatgattgtcacatagaatttcaggcttaaattatgctttttactaaagatttcattatttctagggggtggtaccccaaataataataataaaaataactatttttatttttattaagattttaaataataattattattagaagaagaagaaagaagatagcgttaaagtaggagcaaaaataggctgtcctgaatttatgtgtgtgttgaatgagaattaattattttgttatatagtgtgaatttaataagaaataatttttaacatgagaagacttttttttattttatataaaccaaatccggttatattgttttttagaagggcaactgctttttttttaactatttaaaaaaaaatattaagaaataatccacatcaattggactaattaaatgtaaaattggatgcaaacacaaaataaaaaatactctaggagagaaaattaaatcactatatatatttgttagtttgtgtaaatttcttaaagaacaattaaaattaatatgtgtcttgatgaaaacgggttcacgatccatgtggcgcctagggattggtctttaggcctgagccatgtggatcgagagccccatttcaagggagattcataaatgtggcgtttggtaacactttcttaatcagttttttgtttttaaaagtgaaaaagt

SEQ ID NO: 314525 - DNA, 1183 bp, Cannabis indica
tttttttttactttttttatttggtaacaaaatatgaaaaatgattgatcaaacaagccccattagacttcaattattgaaatcctattctccaatccacccaaatttggctattttctgtttagcctaattactaaaaaaaaaatttcttttcttaaaatttatttgtctcttctcaagttggtgtggtttaaattcatcgtaatcaacataacaatgtatttatatgataaataaaatattaacctaaattcttattcaagttttagattttttttcttaaagagaaggtaattttgattttctgttgccattgcaaccacatatatgtgacattatgtcgttatataggtgacatttgtcttagtgctcatagtgttgccatgtaattggaacaacaaggttaaattttgtaggttgtaaggttgagttggtggttcttttatgtaatttatttttttctgactcataatcttttatgtaactctagtactataaattgttctagaccaagaaaaaagtttaatctagaacctttgaaatgataaaataatataagtagattgatttcttaacaaaggatgagttgtatggtgacatggtgtacccttagttgaaagagagagagagtaagaaaatgagttacgtatacaaatgtacaagattaattggtacacattatggataacatttgggaaggcatatagatcgtcatgaactattctcttcatatatttaatgccagctttataagtggagtgtttaaagctttatattcttcattatgccacattattaatttacttgttaattaatgaaaattagtaaatatatttggtatcagatattttagtttatatgcttaaatgagcatcttctatcaaaatagtcctctcataacatacatttataatgtgtgctattgtttcttcttatactaaatttaccttcctcatttttttaaaaaaattctctctatctttgactttctctcttcctctctcactctctctgtcgtagcccaaacctcgacgccagaaaatcgtggagagtacctttccaccattagagagcactgccgagatgaagtaccaccgcgagcggacatagaacccatcgttagggatagatccactctttcattagaggaccatggtccctgtcaattttttttttaaaaaaa

SEQ ID NO: 314526 - DNA, 1688 bp, Cannabis indica
ttttttttaactcatgtctatattcttttatttttttctaagaaaatttcatataattttttattttaattttttttgtcacaatttttaaaatatagtttatttttatttgataggtatattttttaagaatataaattggaagaaaagattaaaaaaaaacttagtacaattaaaaatataaattttgtataaaataaaaattattaaaatggggtgtctttagaaattgtttgggtgtaaataaattttttctttataaaatctatattaaaagacaataatatccctaactaatcttttatttcaattttataaaatattaagtataattaatattctaattaatttgttgttaatttatatatatataacatataattttaataaatatatatgtatttatatataatgtgcttttttaatttcttttaaaaatttctcattcatgttaaaaatttattatatttatattttattaacaaaatataagtaactacaaacccatacattataaacactgttgaataaaatagttgctcaagttttgccttcttatactatgtcagtcatcttgcttcccgttgaaacgtgtgacaaactagaagggacgatgagtaaatatactggtagggttcgggttcctctcaaaggcatggggtaaattggtcgagctagaagaatttgtgttgccataaatatcatggggccttggttgttgtcatttaagggatttcaacctggccatgttaggaaagcaagcttagatgctagtcacaaatgaatcatctcttgttagtcgtgtttagaaagcccattactatcctcgtagtacgtttttgactgtttctattggtgttaatcttaattttattttgaaaagtatttttgaaatgcaagatttgatcaagaaaggagctaggtgtttagttggtcctggtacgagcataaatgttcaaactaactcttggcttactgatgtttcttatccctggattactacaacttttattgggatggagaattggcatgccaaatgatggagtgtaaggaatgaaatttcgagattgttaatgacatttttaatgaaagggataaggagcttatcctccacattcccattagtcaagagactaccatggataattgatattggtatttagatctacatgttgattatactattaaagatgcatataaaatacttctcgaagttgatgttatggttattaatgagtttgatatgaagatttggaaaatagtttggaagttacatgttcctccaaaagtccaacaacttgtgtggtgtgctttaagtggttgtttggctacgaaagttcagctcgctaccaagcatgtttcccttgattaggtgtgtcctctgtgtcaccaagtgactgagactatattctatctttttgtcctctaccattttgcaaaatcttgctggcacagattaattttgaaatttggtcgaattactggtgtggatttttaggattggtttagtcagtccttgctgtagcattttgcaatagctcaaattggtcatggttctttgggctatctggcattcccgtaatgagatggtttggtaggaaaaaactacctcgattgctgaggttattgtattggcaagagaggtccttaatcattggagaaatgctcaacaaaggagaatggggtct

SEQ ID NO: 314527 - DNA, 1455 bp, Cannabis indica
aacaggtttggctttgatcaagttaaacctgtcaagaccccctacacaccactgttcaaaatgtccaaatcacaggcccctaaagatgatgaagaagctgagtacatgaacagggtgccttatccaagtgtggtgggtagtctcatgtatctcatgatttgcaccagacccaatatcagttatggtgtcagcatggtaagcagatacatgggacaacctgagaaggagcattggaatgtggtaaaatggattatgaggtatttacaaggcactagacaacttggattagtctatggagcaaactcaaaatctgtcaacatagcaggctttgttgattctgattatgcaggtgatctcgacactagaaggtcacaatctgggtatatttttcagtcaaatggatgctctatttgttggaaatcgaacctgcaatccattgttgctctatctacaacagaagcagagtacattgcatgtactgaagcagtgaaagaagccctgtggctcaagggaatctccatggaatttggtctggaccagagatgcataactgtacaatgtgacagtcaaagtgctttgcacttgagcaagaaccaagttttccatgagagaactaaacacatagatgtgaagctgcattttatcagagatgtcctagttggaggaaaagttaaatcggagaaggtatctactgagaataatgcagctgatattctaactaaggcacttcctacatctaaattctatcattgcttgaagctgctgaatgaattggatgtccaacaagattgatttaccacattgtttgtatgcttatctgtgtatattacttgtcaaggtggagaattgttagattaggtgtgactttgtaatatgccacataagcaaccgttttaactaactcaattagctagttaaaaccgttaccctatgtcggtctctattgtacctagagttagctcctataaataccatgtaattgtaatgtaggataaatgtcttttacttgtaattcagatcaaatacatcaataaagtgagacgattattcattcaattctatgttctaaagtatggtttatttggcattaacttttggttttcggttaagtgctttgaggagtgttcttagatgtgcattgaactctcttggtgtgtgagatcgagctttgaatctccaacaatatggagtaaccaaaagttttacactacaagggcaagaagggaaatattgataataagtctattctatggacttaacaaaattttcctgatcctagtatcataggtttgaaattatctaaacctgtgacttgtggtatgtcttgtaatttacttactctagtgcaaccaccttactttagtaagatgttggagtacctttctaatggctaactctataggaagtttttttggctcctagacatagattttatttatctaaggaacaatttca

SEQ ID NO: 314528 - DNA, 1820 bp, Cannabis indica
gagagagagagatggagggagaccttcttgttggtttttatagttcatatcagagtcgcagcagaagcagaatcattaattaaaaaaaactttggatttaataaaataattattgaatacaatataaactatatattctagatatatctcgacacaattatacataatgcaaacataagtatttatttagagattttacctctggttgcctatgagggttttcttactatcttttcatattattcaattgaacatccaattcagaagaagttattgaagagttcacaccagagcctttcaagttagcctcaatactctaagaatagagtaggctattagattcaatttagatgagtactatttagtaatcacagtgtatactcaactcatgagacactgtaatgataggcgtgtgagtgagagtgagttgcgtgagagagataaagaaagagaaaattttatcgtattatctcaattttattctcttttattggagctattttttattcatatatatatataaaatattaattctttatttaatcctttaaaataaaagataatatttattttaaattcaaattcaaatataaatatcatataactgattaacaaaaatcaattatataattttatttaatcttatctttttaatttttaaatacattatccaataatatatttaatataataattaaaaataattattactttattttgaatttattttaataataaaataattaaacaaaattatcatgaatctttatgtgtcaccctacacgtgtggaccatattttaaggtccgaattgagttctcaattttaccacaaataagatttattatttattttatcaataattaataattaattaattttcattaatctcttatttactaagattaaaacaaatattattttgatttaaataatatatttctctctttaacattatttaagaataatattatatttaactaattaatatagttttatcatataaaactaaaacgttaaatactaattacataattcataattgatgtaattattcaaaataatatttttcacaaaattactattttgcccttaagaattatttctcataaaaattaattcttattttttcttcgtcaaaattaagccttagtgttgtatagaggtgacttggggaccataaatctatatttcgaagctccaataaacacttaattattaatgatctcatcaatagaataattcaatttattaattccattattactccactataaatattgaattgtactctttgataatatagaattatatttacataattcttactttgttgttcattgatataatcattataagtagtcttccctccaatatttattagttcataattagagttggtctaaattatattttacctttctaattatctcttgattccttatgtgctatttaatgtgaacaattaatctataatctaattatagatttggatccaactgtagcactcctagaattaacactataagggaactaatatacgatcttttcagaacgcttagattctatattatataacatatttccaaccactcatgttattaagctcccaaaataaaagttgtaaaaatcatcttctctgagaaagtttaacgagtgaatcaaagaactcaatgaacacaatacgggttcatgcatactcaggattcaggctggtctactaatgataatcactgtgatatgaataactcttttatggtaaacgacatgttaatgaaagatgttattgacatatcggtctagacatatataatcaaatta

SEQ ID NO: 314529 - DNA, 832 bp, Cannabis indica
gataactttagatgggtcgaggttacatacccttacttcctcaatgtcttccatgggttctaacgctgctttagaactaatacgagggtccaattcgtcttattttgctgccaacgttagtctcgatccctatattattaggaccgacaaatgtactacaatgttataacactgtcttgcttcttctggttatccctaactgttcccactcctgcctctcaggtaggaaacttaaggcacatgtgttgaatggatgtaattgctctaaaatcaactaaggatggcctaccaagaatggcgttgtaggcagtgggacagtccactactacaaaggtgcaatatttgaacatgctttggggggtgtcacgacacaaggtaaatgggagcctaaccttatccatagggataagggttgtcccattgaatcctgtgagttgtgaaccgctaggggagagatctctgtcagtgagcccaatgtttgtgaaagcgtctttgaatagtaggttcatagagcttccattgtccactaatattctcttatttgcaattggagtctcgatgaccaaggggtcatgatgcggaaagcccactagccttgcatcttctttagtgaaggtaatgggttgatccatgagcctgggcctttgagtcagaagtggagtaacttcccatatttccttatcatgttttagggccccatcataacgcttcagttcattcatagtggttcctccaatatgaggacctccaaagatcatagcgactcttccattattttggggttgtagtccgggtgcctgtgttgggttttatgccctaaataaaactcttt

SEQ ID NO: 314530 - DNA, 1669 bp, Cannabis indica
aatcacaacataaaaatgatgatctataacgaacacaatagccttctctgctacatctgtctttgtcaacattttatttaatgtattattttggaaaaaaggattttatgaagacctcaagactaagtaggtactatggcatatgtatgattttaacaatggcagccatatgggatttatgatgatagcattgtcaccggtacatatgcagtgttgtcactttcaattcctcttgctataaccacttgtttgattggattgtctttctttttaattatcattttcacaatgatcaaagtgtgatcatgaaagtaatatttgtgtaaattaataatagcttcatatataacttcttgttttataatatcatgaataaattttagggtgtttttataatgcaactcatcaacatgggtattttagtgcaactcctaactgttttggtatttaaaagaattttttagtttaattttttttttcatgataatcgtgtacgttatagttatttaagacatcctgtaaaattttgagaaattcagaataatttacaatataaaattcaatattcaaactgtctatttcacacgcgtataaaataaaaaagtggcgcgtgcaacaaactttttaaaacctattttcagtgtgataaattttttcaaatttatcaaaattttataagatattttaaataactacaatatccgatcataataaaattcggactaaattttttctaaacaccgaaatatataaaggtacatcagtcacctttcaagggatgtattctagaattttcctaattattacactagtcatattgtaggatttttgaccaaattattaacctacaccaacaaaacaattattatcagttttaaaggtcaatttcgacctttccttagtctaaatgaatttagactaaaacgacaccactttaacccacacgacaccaaaacccgtgtcgtttagccctcgactcaaagacttttcaagaagagtctagaaacccaaaaaccaatcaaacacaacacacgctcaacactcaaacaagaaaagtagaaaccctggcagagcaagttcttcacaagaacttgctcgatatcctaagtagaaaccctgggatcttcacccacgcacacacagattagattaatcaaatgtaaaacaatagaaagggagagaaaacacaagaattatttcagagttcaccccaaaaattagggctacgtttctgtcaagctcatctcagagatctagcttgatatccactatcaacaatggcgatttacaatattttggagcttcttgtcacagaaaacgatcacgtaagactcgattctttctttgtacaatttctgattttgttcttctctgttttgttctcgatctaactcagttttctatttttatgcatgtacttccttccttctacctcctcaccacgagaacttgctttctcttctctggatcttagagcagaagtactctcaaactagggtttatactttaactcttctctcttttgttttgtgtctatgtcttcttttgcctttgattttctgtttatatattatgttgaagtcggttgatcaaagatctgggagttagttacaaaaacaattgtaactaactcctggttcttggtctagtagaggcaaagccacctagg

SEQ ID NO: 314531 - DNA, 1765 bp, Cannabis indica
aactaagcggtctttacagtaagcattcatcaaccaagttaatagccgaaaattgtgcaaaagtataaaagatagaagatgatgaactagaatgaaaaccttttggagcaaaaatgaagaacgagccttgtatttctatttcttaatgcatgattacaccaaaatttgaacccttttccaaatagaaggggtaaatataggtgagctttaatagcactatgtacaacatggtctccaccatatcaccttaaaaatcaagtgtcagggtagtgatttttttttgttagatataaaggtagtggttgtatctgtggacgatgaaaactcatcaaccacattattaccggaaaatcaacacttagatgctacacctaggattaagatggagatatggaagtatgaaaacttaaagaaaaatgtagagtagctatggagaaagatagaagtgtatatttctttaagtcaagtgtatgattttccaatctcttgtcacatttgagaaagggatatttatagactctaatggtctaggatgcattggtggtcccaagggacatggtgacatcaatgttttgaaggcggtgggttgcaaatagtggtctagtgccttgtacctgtgtctcgttttaggtggtcccgaattgtaggagtagtggttcttgtacatccttggttgggatgtcaggccttgcaagtgtggtgacttcgctacttgtacctttttgccctcagaatttgtaggagacgtggttgtactcaccctacatgcatgccttgtctttgtggtcgtatccccgttgttttcctctttaatacttaggaaaatattctctaactatcgttatgttgttgagaagagcatgtcaagtaactcatggcgtgagccgagtgacatttcaccaagtgcatgacgagtgacatgatcaattttatggtcgagtggccttcattctaaggtttggccgagtgggtttaaccttgttggaagttattttactaggattcagatttactaacaagtatgttgattataatctataatctaacaccctaaacatgaattcctaaaacaatgaattaaacacatataaagttgtagaaaaccttaaattggtggcagaaaaataatatggctccttccactaagatctctaatccttgttcttttctgtcacagagtaataacaagatctgagcttggatctccttcaagtgttggattcttcacaatcttctacactatgattgagtacttgacttgatatgagtgggcatgtactctatcactatagggatgaaattttgatgaagaaaaagaagagaactcaaaaattagagagaagagcctctcttttcaattttctaacaaaatagactaatgatgagttatcacgttacgagtctgtcatgttctatttaaactttcatctagggtaggtaaattatatgaattaaaaaaattaaatggctaaaatcaccttaagtggccacacttagccccactagttataattttgttattttatttcataattcatccttttctttcacaaatgtcttattttaactttaaaccttttaaataccaaatctatttatttaataatcaaaattaattataaaataaaattgctatttaacttatttattaattagaccttacaaatgttggaaattattttaccaggatcatagatctactcacaagtatgttgattaacaccctaaatatgaactttctgaaacgatgaaataaacacatata

SEQ ID NO: 314532 - DNA, 1505 bp, Cannabis indica
tattacatgtataacaaatcttatcacttaataatacaactatttactaataacttattctctaatataattaatataaataaatacttaatctaattaactatataattgtacttagcaaatactaataatattcatattttatttaatgcaacaataacatatcaaaacacacaataatataccaaaaataatatacttgtactggatattacatctcaatatctattttctaagtcttaacctcattaatattttgacagagctattgaagagacactgagctacacagccaactgagttgtcttgctattgcctactttatttttggtattgtcctgctactgtctctatatagttagtgaattgcattgattaacattggagcaagaatgatgcagaggaagattaatttttgatatgactccaatctcttgaactcttttcacatacataagtctcaggtatgactccaacttattaactctattgatatattagttcaatatcaatttatatataaatgtttttgaaattttttgaaatctgcttttatagaaagtagaatagtaaaatattactcaaactcaaagacacaacactattaggttagcttttagccttctttattttaccaatgttggtttataaataaagagctctctcggttaagggattaacttttattgacagagatatatatcttttcgaacttctgctattgactttgacaatagagatataatgtggttgttgtgcttagagatcatccttcaatctggctcccaaatgacagttcaagctctactagcatcacacagctgagatcatgcattttagataattttcgaagagtttgacaggcgtgtgcttccaacttctgagttggagccagattaggggcttctcatttctttttttttttggttcttagttttctttgttctttatttttggtgtagtttggtttacagctttgattcatagagtttacttttgtagtttcttgtttaaattttgtatatttcaagataggcaagaattaaattgtaattgtaatttttatgattgtaattataatttttatgtaatgaataaatgcttttaatattatttaaatacattttgaattatttatttttgcttataatttaaatgaatgtaaactctaaattaaaaattaaaaataaattttataaattagtttttaagactaaatatttgtcactaaataattaatttatataattatttatttattattgccaactaaaatatttggtcaccaaatattaattatttcatgactaaattttagttactgaagcatagttttttggttgttaaaagtgtacaatgaaattcaaatgaccaatatatcaaatttattgtgactaaatttaatatattttgtgactaaattttagtcataaaaaataacactatttgtgacaaaatattttagtcactaaattttttctacgaccgactttcagtgactaaat

SEQ ID NO: 314533 - DNA, 1407 bp, Cannabis indica
tctaccaaaattggattttgtttcaatgaaaaacgattttgaatcaaaacgttaatgacaaaaacaagtttgaggcacaggggtatgcattgcatacccctgcgcgcgcggatgcatggttttggcctaggaaagaggctgcaagcagcctcatttgaccaagggacgtgggcgcgaacacgtatataatccctccataattcttgaaagtttttagggtaagtttcaacaaacgaactaatatagttccctaaatcttgaagaaatgtatctgacttaaacttaaaccgtaatccatgaacttgcactcacatatcaagatgattaatcaccatagttcgaggatcaacccttggttttagttttacaaagacaaactgagttttgttgaacgtccacagactaccgttaatgacacatttcaaatccaactcgtgatagaattggaaaatataatgattatgctcaagttctttaacatacatacctttaacaggttgaaataaagaagccatcatatgcctcatcacatcaaaatcttttttctgagaagttaagaattgtcccacaatacaatcgttcatcttccccttcgttctaattctcgacaacatcatatgacatgatctcatcttccccttcaatttctatcccatgatacgtgcctctagatcgctaaaaatgtatattattgtaaacttcccaaataaataatacataataactcaaaatataagataaagaaactatttatatttatcaactaataaaaaactgagacaaagaactagttaagataaaatacacacaaaaatcagttaaaaaaattaaataaatcaaaaattggttccttttgaattaactaaatcaaaaattagttcccaaactaactaaattaaaaaaccagttcattgaattaattaaagcaaaaattggtttctaaaataaataattcatgaaccgtttgttgaaataactaaataaaaaactagctaagacgtaaattaaaatagaaccgatttcacaacaaaatgactaaaaataaatagcacaaaataactaaaaacccaattataattaaaaaaatataaaaggaaatcagttccaacaacacaaacacataaattaaatagatccggttccacaacaatatccgtaagagcataaaatacacactaactcacaaacttgttacaattagaaaaaaaaaacataatatacattatgtaataccctagaattatgaaatggattagcaaaaccctaattagataattatgaataattgaggaattatattatgatatattcaatatatgtgaattaatatgatttataacatggtaagaccccgttgatgagctaggggcattttagtaattatgacccgagaagggtaaaatgatg

SEQ ID NO: 314534 - DNA, 980 bp, Cannabis indica
gacttaagtaaagcctatgatacagtggattggcacttcttgtgtgcaatgcttactcgaatgggatttgctgataaatggattcggcttatttttgggtgcttgtcttcggtgaagtatcagatcgtaagtactggccaaaccatgggtcctattgtgccaagtagaggacttcgacaagatgaccttatctctccatatctatttcttgtgtgtgccgaagctttttctgctattattcgaagatttgaggagagaaaatggcttcatgggtttaaagtggaaaatggagcaccgagtgtatctcatatgctctttgcggatgatagtttcctatattgttaggcgacacatgggaagtttaaccatgttcttcagctgttgaatttgttcgctacaaccacgggacagcatgtgaattttggtaagtcatctatctagtcttcagtactaatacttcctccaccatgagacagtccatatgtaataggttgggcatccttgaagcttctgagcacagtaagtacttggggctgccgagtactgttggaagaaataaaaatgtgattttttgtctatttgaaagaaaaggttcagaaacatatttaattgtggggcaataaatttctctctcgtgccggtaaggaaattcttattaaatagttgtgcaagcactcccggcttagactatgaatgtgtttcttatcctggttggaatttatcaagacattcactactagaaaaatgggtttcagtgacacacgttgagtaactctaaaagtgtttagtgacccttcattgcgcgttactaatgagggtaactggaaagtcagtttttagtgacactcagcgagtgtcactaaacccttttacacaatcactaattgcgcgtcactgaaagcatttagagtcaggttttgttagactaaaacagtaagaacaacacccaaaaaacgtcactatatcttttttttcttttt

SEQ ID NO: 314535 - DNA, 640 bp, Cannabis indica
ccgataaagtttggcgcgacccgagaggacgaagactatagtcatgatcactccgggaaaataaaaaagcttaagaagaccaagttggtgggccctagaggggtgccgaaacacccaatctttaggaaaatatcccaggcaggtggtactggggcgggatcaaagcgcaagaaagtttccaaggatttggacattgattcaaattttatggatgaaagccgagggaatagttgtcttataattgtggataaatctggggtgaaagatgtgtttgcggaggcgagtggagtcaatgttccggaggaatccgataattgtgatgatagtggagaacaggcaaagaaggcccggttgttcttggactctttgcgatcggttgagagctctctggaagctatcaaggaaggggatgcggaaaggggtttgaatcatggtaggatgaaggcccatgagttaatgccggctcttgtggatatagagaatggttcgttggcttctgatgctagagtatcacctgttgtggggaaagggactgttgttcctgagtctgtgaggcaggattttcttatggccgaggaggcgggccgaaacatgccccccaaagcctcatgaagcttctttcgtggaattgccgaggact

SEQ ID NO: 314536 - DNA, 737 bp, Cannabis indica
taaaattgttatcattatttatatgattgttgtcgaaaactaaaagaataaaattattcaatagtaatgacttttatttagggtgatcatttttggttcactcatttataatattaaattttccatatagtgctagtggtgcctgcctaccttagaatagagcaatgacaaattattattataattatttatttgaatgaagagcaatgacaaactttaggttcattattatgataagagaggtcatcaatcaacccaatgaacaactctacattttgtttttgataagtaacgatacttttttaggcttaataattccataataataataatgaaattaattttgatatgtgatgcatgttgctattattttaagtatttttataaaagtagctagatatgaatgaggaacgtttctcctccacgttttagccaggccataaacacaagatcttaataatcttcccctattagacatttcaacaacaacaaaccttccttgtcacaatgtcacataaaccaaaattaaaatatttatttatttatttattttgatagaaaagaaaaacaaaaaaatccaactctatatgatttgttagctggtagttttggacttggactgcaccagtcgaacttgatggtcggttaattcaataccaaaaatggcatttttcacaatccccactttattgacttattgggagttatatttaaggaaggaaattacactttatact

SEQ ID NO: 314537 - DNA, 977 bp, Cannabis indica
ctcacctgtgtgagtttactacttgattgcgtatacttgcgtagtgatcataattttcgtaacaccctccaaaggtgaagaattccttatggcaagcctctacagattgtttaccaactaaaactcaactaagaattaaacatgtaccaatcgataataaatgtcctttttgccttgctggtcgtgagaccattagccatgttttgattttatgcacattttcgaaagcatgctaggcaggtttatcattgggggacccgtcttctctgcaaggttcttttgtggattagcttcatcaaatgtttgaaagatggagtgggaatgagagacttttgattagtatgttatgttgatcactttggaatagtcagaatggcttaatttggaatcaaaaaagtattgaagttactgatgtgttagtgttagctcgaactactcttagggctaatttggaacgaagagcctaccaagttgcttaccagcaaccagccgcagccccagcatcccgctgggtggctcagaagaaattcctgctgggcatactgcccaaactctgtatggtcagccgtccaatcctcgatcataggttccacctgtgggccaagtggtaggcagccaaaccttatctgacaattcatcaggaggggttatacccaataactctgcccagactagcggttctggccaattgaccggccaaaccaaccagtcaccgagacaacctggtgtttcattattcaacagactgggaacagctcatgctctcagggatgacttggatagaaggaggggtctggacgaacaatacattcaaccggccacccagcccggtatatgtatctaggatccaactaaaaaagatgttaatgtgacacaaatcaaccaagaggctgaacaggttcacccatctatgcaggcacagttggatgaactgaaaaatatgttccaaggcctggccggtcaaaaactcactgatc

SEQ ID NO: 314538 - DNA, 1508 bp, Cannabis indica
tatcatagtattataaaaatagatctcgaaattgtcaaatatgtgacctgaacagattaaacaagattgttgtaatattcgtttgtattaaatatgtgaaattatttgttgttttgtggttttatgttagttggctcgcaacaaacataactgttgcattacagtttcatcacagttgtcttgaagttggcttacaatactcaaactcctatactattaggaaaaagacgcaattccattcctcatattttgcaatggacagtttgatgaaggaatcaattaagaaaattacgaaactagtgggaaactcatctcaattgattgtaaatataatgaactaatacacaagctgacacaattacttgaatgcaactacgaaaacactcaaatacaattgaaatactaaggagaagaaaatttttaggtgcatgggaaacaaaaaacagaataggtgcagcaaatgtgaccaaaaaggtcacaaccggaagacatgtcataatcaagcaattagctattgagaaaattaatttaaattatttaatttttttttgtaaaattatttaaattatttattttttttttgtgaacttttacaagaagaaatgttactttaatatattgctattacatttaatacattattggttttcaaaaagatgcataataattgttttgtagttgaataccatatccaacatatcatcaaaatcgtaaagcattaacaacactatattcgaaacattagttagattttaaaaaacttttcttattacattgactatatattagttattcaattgtacctaagccgttcgatgatagttgtatagtcggtgttacacctaacactttgattcaaaaaattcaagtgatttctcccattactttcatagatataataattaaacatgttgaataaaaattatcccacagctgaatcaaatatttgatatatcgacataaacgagaaacatgcacaaaagcataagcattataatccaaaaataatacgttgtctcaaacaaagatagaaatctgatatccagttcataaacaaaaagaaaaaataacaatagaaccataacatcaataaccaagtcttaagatctagcattaaaataaccaagtcttagacttctcattctcactatcaatattttcataaattttccttttaccatatgtgaaagaaagcacaacaagccttgtgcgataactttgatatcaaaatctagtggaacatctgttccatgtataaagaaatcagcaaatgcagcaacaaaagcaccacagtcactgtgtaataaaatacaaattaaaatagttaaacaataatgaacacatcaacaacaaaaatgcaacaacataaataaaaatcacttgacttgtaatgattagaaacagggaatttgcattcccactcctaaaactaaacaaaaaaacatgaatgataacaagaaaataagaaaatatttccaaacaacaatggaaatgttgggttttatgcc

SEQ ID NO: 314539 - DNA, 1075 bp, Cannabis indica
tatatatatatatatttatccatctaatgaggtatatttgtgtgctacctactacaacaaggacaacaaggttaattttctttcacagtgatcttggttgctataggaaaaaccaggggttttgctctgttttggtaactccaacaggtagagagtagaggattctttgctttctttctttctttttttttccccctctttaatgaaaggggcttccattataagacaacacaaattacaaaggaaaaggttagtctgcaaaaacagcaggactcaacaacagaggggtacatccctattccacatagcacaagctttagattctaaagcagttttggctaaaatatgaacagcagcataattgacttctcgcaatagaatgacaaacagcttgtagaataaggtggtgtatatcattaataacaaccttagctcatgaggaagaagaagaccagctttaataacatgaagttcagcatccacgtttattttaaaagtcccttggttgtggtgactctcacctccctattagatagattttcgagaagagcaagactagttagtattttggtaatcatgcaagaacttgtgacatttaatgcttggttttgttatttattttcgatttaaaaattaagtcaataaatgtaaaaaattaataagatggcgaaatataataaattaactgataaaaattataatacatttactacatattaattttttaaaataatatatattaaattaagttatataatttttttaatatcgcatattaatatattatataacaaaaacgaataaatattatatcattaaatatatacaataatatttgatatattgtatcattgaaaattaatatactatagtaataaaattaaatactacaaaaaaaaattataacaatattaaattaatactcaatatatacatcacactaacaaaattatatataacgctattaaaatatatatacataccaaaaaatttatatataatcattgtataaacaaaatagaaattaaatatcatcttaaataaatgatatactatacacaaaaaaaaacatata

SEQ ID NO: 314540 - DNA, 1412 bp, Cannabis indica
atgatgatgaagaagatgaggaatcctttttcccatacaagtacattgtattcttcaaattttgtcccaatgtaataaaaatggaactgttcgctatagtttttttatttctttttctttatgacatctgcacatttttatggcgataaaatactttgttttaatttaacacaataattccatttcatctgacaatataaaaatactttgatataaaaaggaaaattacactaaattagaaaatttaagtactctctcacctaaacacaattttttctttctttctttctttttcttttctttccttttttttttttctatttttgtaagacatcaatatatttttccttttgctaaagaaaaaagtgtaatttgttgggagattgaaacaataagctctaactctaactcaacaattgcttttttttttttttgacataactcaacaattaaaacaacaataatttaaacgaataaatcgtaaaattttaaaaagacagtcaatggtaatttctttttttgggggtcatgggcagtaaactatattctcaaattttattgtataaaaatcataattcataaccatatggatgtatgcacattattgggggaagaaagtgatgagtgaatccatcacttgtcacatataatccatattgaaaataaaaattttctttaatagatacattcaaattacatttattttagcgattagatcacaattaaataattataattaatttaaaagttaaataaaataaataataaataacttacaatctaatagtataatttaatcctttatttcttataaaattttaataattatattttaaaatcaaaactttaataacttaatttttgacaaatttagtcacttgaaaatcaaaagtttcgagtctcctattttcacaaaacaacaatatctccaagaacatgtgtccaacttcaccaaaacatataaaaggactaagcagtgtcaaaccatcacttagacatctcaaagaacttcctttagacgtttttacacttatacaacatccaagttgatgtctgatgtcaacctaggcgttgggacttgaactgctttcagtaaaacggtcataactcactctttttatctaattgacacgattcaacttgcattttgaaactatttatgccctctatgaagtcatgtgttacggcccagtcaaaattgtgaagctatcgtagtcaaaattcaccacaagtgagttacaaaaaataagctccgggcaactcgtagcgagacccgctaggcaccaaaaataagccatcaccaccagaaactaatttttaccgttagatcatcatcaatggtggaaaatactttatttgtattttttttctatttttgtgggcctccatcacctataaaaagagagctccct

SEQ ID NO: 314541 - DNA, 502 bp, Cannabis indica
ttgtgaaagtgagctggaaagggtgccttggtgagaatatttgctatgttggacatgaaagtgacatggttcattttgatgcttccattattgactttctctcgaatgaggcgacagtcgatctccacatgttaggtgcattcatggtagacgggatttctagagatgtgaattattgtatcatcatcgcaaaagagtgtgaatgggagcctaatttagttcacaagttgcattggccattgctcgatattctgcttcagtagaagagcgagacactgtttgctatttcttcgatttcaaagagctgagagattgactaaggaagacacaataacttgagttggatcgcttagtgtccaaacatgctccccaatctgcatctgcaaaagcttaaaaatgtattggatcgggtttagatgcatagaagaaaaagccttgtccaggggtgccttttagatattgcagaatgcgattcgctggttggaggtgtggttctcttgga

SEQ ID NO: 314542 - DNA, 2075 bp, Cannabis indica
aaaaaagtcatatatggtcaaatgaccaaaatacccttatagtcaaatataaccatatacacataagtaagggcaatgttgtcattcaaattacacatgtataattcaataaattcagatttctcatttaacatatcaatgccacaaataaatcccaaaaatatattttgggcactaaacccggttcggcccaaaataccgattgtgattatcccgtgccgacttgtcaaaaaatacctacacatagacagaacaaacatgctatataataatatagtcaataagcacgatatatcattaaaattacaatcttacccttctctggtcaaaattatgaaaatgcccctaatacaccaatggggtcttaaaatgtaatttataagtatagtttcacatattaaatttaatacataattgaactagttagggttgctaatccggtttcataatccctagggtattacaataactatgtcagtgtcactctgaccaccatgttctgggcattcctaaggtgtttttctcattttgttttggtagatttcgattctcaaaattattttaaggtgtttggtgaagtttgataattttctgaatttatttaaaattattataaattatttagtttattttagataataattataataaatagttagattgctcagataattatatatttaattttatatgtctcactatggactataaaatattgtagaattgttaaatttaggtttttttttttaacatttttataattttcatgaatttatttagctaatatataaattaaatatgaaaaatacttaggtgatgctaaaacaataaaacgtattttttaatactattaactatttatgctatgaaatagggtttataatttattgattgatgtaggtatttattttaattatttgtgactaattaactaattaatttagtttcaattagaataaatagtaaaatagtgttcattgtttgaaaactgttaatatgatattacaacataaatctagtgtctagaattaattttagaccaatttgagatattttattatttttagttaattaatttatattttgtacaatttacagtgtaattttgaacataaatatgaataatatattatacatatttttttaagtagattgaatatattttatgatctatataaatagtaaagaaatatgatagtttatgagtttgatagtaaataattatatatttgattattattgtgtatgtaaagtaataaatactaaaaattaaatgatgatggaaagaaaataaatttctttctaagtttatcaaaataaataaactttctagctagattaaatatttaatatgtaattattgaatttatttgctattttgcacggaaatggtattttaataaaatttcaagtaaaagtgtttgtatgaactaatatttacattaaaaatgtttgtaccagtacatgtaatgtgttgatgtcaatcaaagtgataaattgttatgtttggtgtgccatgcaagtaaaattgactttcgtgttacgtagtttgacgtaaaatttcattattaatattgggctttatgcttgaatatgctttaagtgttattgtgttattgggtatttaggatcttgttctcaataaagaaactcgacgagaggtttgagggagagaaaaaagatatacttagcaactgaggtaagaagagtgaacatctatgaacagggtgtatgttgaaacatgcgattttattgtgagtttgttgtttatgtgcttatgagattttgtattatggattgtttatgttgatattattagcatgagatagagataaggtttttgattgcttgtgtgagaataacacttgtaggataagtttttctgctacttgtgtgagcatagcacttgtaagatatattttttgttgcttgtatgactttactagcatgttctcttatcatgggtaagtacaacttgtgataacggattttcccattggatgcaagtgtgggaacagcacaaggcagggcaggttacacttcatgtctaatcaacatgagtgagagtagattat

SEQ ID NO: 314543 - DNA, 1438 bp, Cannabis indica
tgctttgttgtttggcaagcttttgaacaaaaaatttctaagcaatcgcgtgcaagactgcttcaactcaacggtcagttttctcatgtgcagaagaaaaacttatcagtttcggaccatgttgacgaagctcggcctttagccgactctcttgatgttgttggttcatctttgacgggtcaagacattgttcttcaacttctcaatggtctaaggccttaaatttgatcctattgtctctagaattacatctcgaagcgattctttatcaattgaagaggtttaagcattgctcatatctcatgaaagttttctcgagcatcacaatgtcatgactgatcttactgtcaagatgcaagccaatattgcatttggatctttaagaaatggaaattataagcctccttctccatttgttcgaggaaattaccaagatgcttcaagaaccaatcatcgtggtgctcctcgtggctatccttcgtctttttctcgtctcatcaatcaagtttgtcttaaacttggacacacgactactacatgtcattaccattttgatagaaactgggttactcccaagccaaatagagccatttcaagagcctacttgattgagttggaatgtgactaccatcctcaggtatatgccactaccattcctaattttggcaatggttatgcctggtctgttgatacaagaaccacgaaccatgttccaaatggacctgacaatttggactccacagtttcctatcctaggactgagactctagctaaggctttacttattactcacatacattctgctaccttatcatcttcatctactagtccataacaattaaattttgtgcttcaagttccagagatcaaaaagaatcttgttagtatgtctaaactgactgatgacaatgctattttactgagtttcataaaaaaaaaaaattaactttttcaaggtcaaggatatggggacagttcttcttataaggcttaaagatggtctttacatgcttcatgatgattcttccaggatgtctactcatgctctccagtgtcatctcaaggagtttatgcttctttactctcgttgtactaaaacttgtgattgttcaaatgttaattaaatgaattcttgtaatttgattgaaaagaaaaataaagaaattccttttctgtatgtctcagattcttcttcacaaaatcatattagttatcaatttaagagacttgaagtgatttatgttaacatgtacttatggtttaatatatatatttaatatatacacaaaatcagttaagtccagaacatatatttattcacaattacagtattgtcaacatagtggaatgtgattgtgattatatgattcaaaaagacaaaagtctctgtttcattagtgttttggatttacactgatgtgataatcagcgatgaagt

SEQ ID NO: 314544 - DNA, 2075 bp, Cannabis indica
aaacttgaactaaggtctcatgactgcttgtttttggggtattcttctcatcacaagggttatttgtgtgaacaccctaacgatcgagtttatatatctagacatgtcacattcaatgagggaaactttcctgcattttcaagcagcaacaactcctcacaaaaccaggtaaatcatttatcaccaccccctagctttagttttcaaactactggtgttcctacatatactgactttagttttgtgcatactaatcctatgaaaaattgtgtggttcccgaggacaatgatatgtcaattcctcctgttacacaccacacaatgaccatacctactataggtccctctacttttaacaatgacacccgtaccccacctacacctatgataccaccaaataccactttcatacccattacaaccataaacacggcagccaatgacactcgtacaccacctccgcctataataccaccaaataccaactcagtacctactacaaccataaacacattagccaatatcacatgtacccctacttcacctataaaacaatcagacaccaattctatacctaccagtgccataacctcatcaaatatttatacacatgccattcccaaacctgtgtcaatcaataccactactccaacacccgttgcacaaaccaaaaacccagacacatgtctaatacctgctccggagactattatccctgtgtcaatctctttcaatgacaacacctcaacatatgtcccatccactgctgtcaatgctgaagctgctaacacctctactataactgttcaagcttcagcaagaacacatgctatgcagaccaaatatttaagtgggtcgggataaggaaacctaaagcctgtaatgctacgaaattccccttacctgagtctctcattccctctaaacctaagaacacagctgttgctctcaaaaatcccaggtggttcaaggctatgaataaagaatttgatgctttgaagaaggcgggcacttggactttggttccatattctccacaaatgactatcattggaaataagtggatagacaaaattaaactaaatgcagatggaactcttgacatacacaaatcaagacttgttgcgaaaggatatttacaaacactagggatagattatgaagaaactttatcccctaaactggccacagtaagaataattctcactttagtcgtgtctcttaattggtttgtgaagcaattagatgtctcaaatgctttcctcaatggggagctacatgagacagtgtttatgtgtcaaccagaaggatttgttgaccgcacaaaaccatctcatgtgtgttaactccacaaagctctttatggcctaaagcaggctcctcgtgcttagaatcaaacattaaaagacaaacttctagaatgggggttctctgcctcaaagtctgatacttcattgttcatatatggttcgggtaacaacttaatcatcctacttatttatgttgatgattttctagtaactggacccaatactcttctcattactcagcttatttctgacctcaacaaatccttttctctaaaggatttaggtccagttcattattttcttggagtagagatacatcgtgattcctctggtatgtatctctcataaaccaaataaaccaaatatatatatatatataacaaacttacttgttcgacttaacatggaaggagcaaaaccacgtgttaatccaacaagctcctctgtcaaactatccgttactgaaggagagccatttcaggatcatactctctatagaagcactttgggtgttttacaatatctcactctcacaagacttgatgttgcattcatcataaataaactgagtcaattcatacatgctcctacgactatccattgggaagcttgcaaacgactcatgaggtatctcaaaggcactgtccatcttggcttacatctcacacctgcctctactttgagtttagaaggctacttggacgtagattgggcttcctatattgatgacagacgaagtacagggggttatgtgatgttttttgg

SEQ ID NO: 314545 - DNA, 2115 bp, Cannabis indica
tttagggaacaaaacccaacagtctcatattttcctacttaggctgaaggtatactcctagtagcccccaaagattggcaagaagatccatatcaactgtacataggaggatgtgcaagcatagccataaagagacatctaaccaaagctcaatcatgtgatcaactcgtatccaccgaacattagatgtgagttggcaatttcagagatgaacattgttgcttccaaaacacgaagataatccctacattcgtgggattagttcacataataaaggcaataagcttaggcccattctttccattgtcattatgaaattaacatagtttcctattttttttattatagattacgggaatccattcttcatgtaataagcccctataaatagcggttcaatctaactatttagggagacaaatttgattcaaaaagaacagttaagagagaaagagcggtctaaaggagaattactcaaagtccattgtaagagctttatagagaggataatttgttatttgtctctcaagccaatacaacaaaaatggagtaggctattaccattctcacggggcctaacctctaaaaatttcagtgttctctttacttactgtttttttttctattatttatcttatttaatcgctttattttgactcactgtcgttgactagaagcgagatcaacaatcctcataaggagaaagggaaaggaaggtaaggtgaaacttcaaagaaggctactcaagctaaatagcaaaagaaatccaaatcttccaaccaacttgaaaagagaaataaaggaaattgtgcctcaaggaaaggtgaccaaacttattctagaggtagagctacatatagtgatgattctattagtcaaagtgatgatgttaaagaggtgtgtctgccatcagacgacagaagaggaagtcttccacgaatgatcttcggaagaaaccgaatgcccaaaagaaaaggttagaatcgagaaagaaggacctcacaacaacggcctaagaaatcatataaacgatcgtgttaaaagaagagaatctctatatgataaatctcaaaatttggagcatcaaattgaagagttaacaaagctcatggaaaagatataccagatgcaaaatggaatcatagatgcaaagctgctagagcactttagaatgcctcaaatggaattgtatgaaggaagaatgggccccaaagaccatttattcaaatatagccagatgctacaagtagcaaaagctagtgaagattcgaagtgcctctacttttcattaactctgaaaaagtccatggaggactggtggaaaatgttatctttaggatcggtccataactagaaggatataaaagcaatgttcaagaaacaattcatagtagaaaataattttgagctagaagttttctctttaactaacattaagaaacaactaggagaaagcctcaagaagtatatccagcgtatgatggattctgctgcaaaaacaaaggttactgatgacatgacgatggtgtctttaagatcagcaataaccactggatccttgttatagggtgcgcttcaaaagaaaagggaaaaatctttatttatcttcttatttaatgcccaaggattcatagacctggaagatgaatactctcaggcttatggagtacttctagcgccatcaacaaacacttccacaatacaaacgtcatagatgactgctccaactattttgctactgaaatctaggttcacaacacccatcgtttatggacctggtacttccatatatcaaactgaacaaacaagtttctctagctagagagtgcacaaaccgaatatagaaatgaaccaaaaaatagatttctagaattgaattcaaaccattcttagaagaaaaggagttctaaagcaccaaggccaatcgaatgtgcgaagaaaggaagaactcaagaaccaagatatgcttagtataccagcttagtggatactcatgaaaatgataataaagatacttgtaatatagttcattacaaaagacctccgcttatgtacaatggtgaaaataaaaaaaaaaaagactaagtgatatagttcattaaagcttgttttaag

SEQ ID NO: 314546 - DNA, 1071 bp, Cannabis indica
tcttgcctccctcttctcttggtgccgacagagctcaatctccatctctcgcttccagtccgacctccactcccttgggttaccaccgtagttcctctacacaactcagttcaatttttttattctttctttcattcaagagattacatatcacagtaaaaataattactacatgttggtaagatggttgaatcactatattccatgttcaattttttatgtgtacttgaggctactgatctaacataatgaactgagaaatgtatagagaagtagcaagagaagattttcttaccagaataaataatctttactgtattaataatctttactatgaaatggtatatccatattactctaaggtatattaattgtatgtaatgtggtatatcttgaatgaaagaaagaaaaaaaaagtttaagaatgaaatattaatttaaatttttgataatttgcactataatacatctttattatgtgttatgatatattaagaaaataaaaataaaaacttagaagaggtatatcgtaaatttattaagtttttagtatatttatttttgactatggtaaatttgtagtatattaattttttactatgatatatttatttagatttgtggtatatggattttatttgctatggtatatattgtgaaaaagaaaaaaataaaaactttcgatagaatattagtttaagtttgtatgtaatatggtatatcatgaagaaaaaaaaataataaaagaatggaatattaatttaagtgtgtggtatagttactttatactatggcatattttttttgtgttataatatattgagaaaaaaactgtaaaagtagtatattaatttaaaagtgtggtatattagttttatttgctatggtatacaatgaacaaaataggaaaaaaaaacttgttaatattagcatattttgtggtaaagttatatttcactatggtatattattcttatgtgctatggtatataatgaatgaaaaaaaaaaaaaaaaacttgtggaatattagtttaagtttgtgatatagttatgaaattccgtattttaat

SEQ ID NO: 314547 - DNA, 822 bp, Cannabis indica
aaatatatatatatataagtgaatgagttgctcctctcattattaattggttttgagatggaacctcgtgcagcttatttaaattctaatatggtatcagagccaaacaaaaagcttttgttgtctcccctttaatctcaatttgagacctttcaaccaatgtgtgtcaatttctaatgttgagtctttgacatgtttctaaatctacaaatttcctgacgtgtgcacccacaaattttttgaatttgccttgtgggattctttcaattgtcatcttaaaccttgtggtctcataaatgtcgttcgttatacccatactttttaggtccaaacgtgagaagagtatattagagttagtctcatattgctaatgtgtagaaataaaatatcatacataaaatgaataaactactctctcattggcaattaattttgagttgaaaccacatacatattaccatacaatcctaaattctaataaaagtaatcaattgtgtcaattttcaaggttgaccaatgtataataggatcttttgtagtagtaatgtgtgatgctttcctattgagttggctcataaatttgatctctaaatcgatgatgggcgttattccgttgaacggttgcttctcaaattgagaatatgttttatggattgtttgttactcgaggctccagtctagtctattgatgagtatatacattgtaatatccagtttaaaatagtatttaatttttcgtttggatattaattgtgcgaggataattaattcatttatttgtgttgttagtgagttgatattattgcttagagtagttgtacc

SEQ ID NO: 314548 - DNA, 471 bp, Cannabis indica
taaaataatttccaacattttttcctacctaacgtggcacctccacgtggccaaaagaagatgaaacatcgaagacaagtcaacactaatcagccaaggtagtatcgtttagctccctaaccctcaaaatctcagggttgcaagatggactaaaacaagaagagcatggagacttacaagatccacatcttaaatgttttgaaacaagttcttcctaaaatcaaaatctccagcagagctgtggggatcatgaacagtttcatcaacaaagaaaaagaacaatacatataaccaagaccctagccggacctctagttggtcagccagggatgagagctcatatgtcgggcagcctccaaatacggttggccaaccaatatgcttattaagctctaacaacctaaatgagctatggattttcccatgggctttctaaaagactacaaatcatcctcaacactcctacaactt

SEQ ID NO: 314549 - DNA, 1122 bp, Cannabis indica
gacatagttttcaagagcccaataaaacacctttcctttgagcacattgatagctatcctcgaatcactctccacaataacatacttataccctaaattcatggccaataaaacaaccaagcagcaagccgcaacttctccttaattacgatatttttcttttataattatcactaatctatataaatcataccaccaatataactttaattcatctttctttatattacatccacgaatctctatttattctatctccatctctatcttatcattataatcatatatacatgcccaattacatggtatgttggtttattatgctttattattctaaagaaacttagttatattttttcagaatgaaataacacactgaagataaggataagagaagagaatgatattataccactttaacaaaattgtagtctttaatacttttatttagtaccatgaaaatataaaaattgaaattatgaaaagatttattattgaaattgttaaaaaagatataaatcattaagaaaataattaataatataaaatatctattaaaaccagattataaaatcataaccactcttttttattttctttttttttaatctaattttttattctattctttaaattaacaattattattaaatattaattagtttttaactattacgtatttataaatctaattttcttattatactttttaaataatcaccaaaataatctaataataatgttaataaattattcaactattttttgttaataatgtaaaaataacgaaatcttaaaataatcattgtcatggtcaaattgttcattatattctctttgatttgattttcaatctatatattatctatttctattaattttataattctcacaaaaaaaaattaattctatgtcctttaattttattaattaaataataatacaaataattaaagataaggatatacaatgtcacgacccgagccctaggctgtggcagatgtgtaatatccataacttgggtggtcaaaggtcacactttaacccttgtaggaaaataaagcttataactgatccttttatttatattacaaatactaatttaaaagaatggattaactc

SEQ ID NO: 314550 - DNA, 2289 bp, Cannabis indica
atagcgaaccgagagttgtttgtctaaaatttgatcacgaacgaaatgaaggtctatctcgatatgttttgaacgtgcgtgaaacacaggattagcggcaagggccgaggcactttgattatccacccatataacagggacttgaacaattgggacttgaagttcttgtaagagagaccgaatccacttaatttcagcagcagtgttggcaagcgctcggaactcgctttcagtgctggaacgagcaactacttgttgtttcttcgcagaccagctgatcaagttgtctccaagaaacaccaagtatccaccagtagaccgccggtcatcaacacagctggcccaatcagcgtcagaataagcatgaagagttatgtccgaggaaggttttatgtatagtccatctttaaccgtgcctttcaaataccgtagtaattttttgcaagcctcccaatgaattgtggtaggagcatgcaaaaattgacttaatttgttgatgataaaagccacatcgggtcttgttaaagacaagtactgaagtgcacccaacgtgcttctgtacaaggtagtgtcgtgaaatggttccccttcttggagagagagtttagcagtagagctcattggatttggactagccttggcaccctccatatgcaattttactaacaagtctgtgatgtattttgtttgagacaagtacatcccagtgttgtctctgtatatttccacacctaagaaataatgaacttgaccaagatcttttaaagagaaagatgtattaagatcatgaatgagccatgagatgatagtaggattgggacctgtgattaatatgtcatctacatagacaagtaggatgactaaatttgtacctgagccatatataaagagggagctgtcggctttggaatcttggaaaccccatgatcttaaagttgtttttagcttgtcattccatgcccttggggcttgttttagtccatagatggccttttgtagtttgcacacatgagttggttttgtagtgtcttcaaagcctggtggttggcacatatagactgtctcatttaaaggaccatttagaaatgcattgctcacgtctaactgagatacattccagttgtgagtaacagccaacgtaagaactgtgcgaacagtagttggtttaacaaccggactaaaggtctcatcaaaatctattccagcttcttgtaagtaccctttggctactaatcttgacttgtatctgttgagagagccatccttgttaagtttgactcgatgtatccatttacaccctatgacattcatggaagaatcatatggaacaagaatccatgtgttggctttcttaagagctgagagttctgtgtccatagctccatgccactttggattagacaatgcatcttttaaggttctaggctcagtaggtaggagagactcaggcaaagggtgtttagtggctaggaaggattttggtttgaatataccactttgagatctagtacgcatagcatgtgttctagggaggcattgttcggctgagggttcatttatatgtggctgagatattgtattagataataggctttgaccagtaggtagatgtgtgtggtcactagtaggcgtgggaattaaatgagagtggttggtatcttggatagtgatgttatggggaggtgatgtatgagctgttggagtaggtacattgggaggtgatgtatgagttgtgggagtaggtacattgggaggtgatgtatgagttgttggagtaggtacattgtgaggtggcagagcaggtacattggcatggggaacatttatgggaccacggttatatgtactaggaatagtattttgtatggtgggtgaagtagagaaatgtgtagtaggtaaataagtagtcaaagaagggtgtacctttgtggcagaggcgtgggaggctggaaaaagttgttcattgaaaacaacatttctagctatgaatagtctaccttcaggactttcacataagtagcccttgtgtgaggatgagtagcctatgaaaatgcattgttttgtcttgaagtccattttgtgttgattgtatggccgaagatgaggatagcaggcacaaccaaatggttttagaatattataatctggtatttggccaaataatatttctatgggagatttatgacttaaaactggtgtgggtagtctattaatgagaaatactgcagtgtgaaaagcatgccaccagtacgaaaaatcaagtccagactgagcaagaattgtaagtcc

SEQ ID NO: 314551 - DNA, 1791 bp, Cannabis indica
acataagaaatttgtatgattatctattctagaaaatattaattagtatagaatccccacatacaaattctatatatagtataaatcatgatatatatttatccatcttagtgttgagaggtgcttttcgagggtgtctaaaaggttattttgcgaaaaatgagatgacctataaaatgaaagctattttagttgatttgctatcataacatgccataccaatggtgtttgaaatgctattcttttacacaaatcaatatattcactgatgtcttttgttatgcagggaatttacttcatgacaacaaaagcacaatcagcaatactaatctcaacagtggtcagctcagcaagaatgccaattctcatgttgaaaacaaaaccagcaaacacaaaaccgaaatgcttgtagagtttaatacctctaaaagctataacactaccaacaagagcaaccagcagaattattcaacttcaaactactcagtccccaaaagacaaggattagaagtagtttggggtgtgttggagtttagagctttagtatgtaaagttcaacaagcaaatgaagagaagaacaaagtagaaggagaagaactcaataatcgaaaagtacttcatcatcccacttatctcaatcttgatgagtttcgaaacataacaaagcaagaaaaaggccaagacactcctgcttctgcttctgctgctgctactcagctcgttaacatcactcaccggcgtgaacttgatggggccgagtacaattatgcagctgcatcaaaaggcgctaaagttgtggctcataacaaagaagctaaagggccaagcagcatattggaaaaagacaatgacaagtatctgagaaatccatgttctgttgctaaaaaatttgttgtgattgaacttgctgaacaaactctaattgatgttgtgaaaattgccaactttgaacactattcttcgaatttcaaggagtttgagttgtctgggagtttaagctatccaactgaaatgtggaccgagttggggagatttgttgcttctaatgtaaaacatgctcaaacttttaagcttcctgagccaaaatgggtgagatacttgaagttaaatcttctaagccattatggatcagagttttactgcacacttagtcttatagaggtatatggtgttgatgcaattgagcgaatgctcgaagatcttgttgcttctgctgaaccggtttcaaacaagttgttagagcctaactcaactgcaatgcctcattcaaaatcaatgtctagttcaactgatcaaaagagtgttaaagtccataatgggaaccgaaatgctggtgcagcaggcctaaaaaccgctgatgatgcacttaaaccggctgctgctgctgctgctgctgctgctgatgtgagcaagactaagttatcaattgtcacaaccaactttcctgatcctgttatggaagttagacaacaaccgaatgggagagttcccggtgacagtgttctaaagattttgatgcagaaagtgagatcacttgagctgaacttgtctgttttagagaactatatcaaagaaatgaatcagagacaaaaagatgttatgcctggacttgacaaagagatttctaggatgtcattgcttttggacaaaagcaaaagagacattaaagacctcttgggatggaaggagataatggtataactttgctttttctttttctttttcatacaattttcacttcatttttttttgagtaaatattattatagactctgtattttgcaagattac

SEQ ID NO: 314552 - DNA, 2516 bp, Cannabis indica
tctcattttatgagcttccaccattgtttcatattcaaagtttatttctaagtagtcaccattaggatgattacattccagaaatgattggagatgcacaatttcaatcaaatgtcgatcctttgaaatttcaatgttttgtagaggatgccgagaagcctatttaccctaactataataggtttactaagttatagacaatttttagattattcaatataaaagcctaacgcgggtggagtcataagagttttttttatggactagctttctcagtagagttatttccgaaaggtaatgtggtgcctttgtctttctatgaggcgaagaagacactttcatccttaggcatgcaatatgaaaaaatacatgcatgtcctaacgattgcatcctatactgtaagatgtttgtggatgcaatatcatgtcccacttgtggtgagtctaggtggaaaaagaaaaataattttgacgaggtaaaagtttgtgtccttgcaaaggtattatggtacttacccccaataccttgtttggctgggttgtttcgaaacgtcaatcatgcaaacaaattgatctggcatgccaacgatagaaggttagatggtaagatgagacatccagctgactcacccacttggaaatcaatttatcgtaggtggcctaaatttggcaaagaacctaagaatgtatgtctggtcttactgcggacgaaatcaatccacaaaccacacttagcagtaagtatagttcctggctagttttgcttgtgatgtataacttgccgtcttggttggtaatgaagaggaagttcactatgcttacactgtttatttgaggcccttcacagcctagtaatgacattgatgtgtactcagcccctctagttgatgatttgagccaattgtggtatgagggtgttcctgcatacgatgcctttgggaaagaagaatttaatcttaaggccatatactgtggaccattaatgattttccaactttcgaaaatctttctagatacagtgtgaaagggtacaaagaatgtcctatttgtgaggagaaaacatgttctatgtatttaaaacactgaaagaaaatgtgttatatgggacaccaaaggttttttctaaaagaacatgtatttcagacttggaaaaaagcatttgaccgtaagcaagaatttgagttgccaccgccacctttgcaaggggaacaagtattagaaaagttgaataaagttcgaatccacctgaagaaaatcaaaagaaaagaaaaggtcaccaggataaaagtgacgttgtcacaaataaagctcaagggccatggatgaagaagtcaatattttttgagctcgactattggaagcatttgttgttatgtcataatcaggatgtgatgcatattgagaaaaatgtgccagacagcttgcttaatacctttttcaatattcctgggcgtagcaaagatggaatcaaatcttgcatagatttgaaaaagttagggattttggccaatttaccccacaagttgctggtcgacaaacattcttaccaccagcatttcatgctctaactaaagcagaaaaacaatctttgtatggttctatctcccaggtgaaagtatcggaacggtactcctcaaatgtctctaattgggtagatatgaacaaaataattttgagtggtctgaaatctcacgatcatcataaattgattcatcatattctatcagtgagtatctattctgtgttgcctaagaaagttatatatgcaactacgagattgtgtttgttatttaaatctatttgttataaagttgttaatgtgactaagttacagaatcacaagttagaaattgtagaagttttgtgttatttggaaaaaaatttcttgctttccttttttaacataatggttcacctaacagtgcatttggtgacaaaggtgaagttatgagaacctgtgtacttgagatggatgtacccatttgaacaatacatgaaaatcttgaagggttatgtcagaaatagaagtaggccagagggttgtattgttaaattatacattgttgaagagatgatagaattctgctaagactacttgttagaggttaccactgttgtctctcgccctactgggctcaaataagcagggggtaagggttcttctatttgtggtgtaagccgagctaattgtgaagaagcgcaccgacttatgttgcaaaatactgacgtggtcaaatcgtacattaagtaaatttaagttaatttttcacagttaaaacatattaataatattcaattgaaacaaaaatttatccattgaatacttgaagggaacattttaattagatcaagactactaatccgactaaagcacgtgttaacgcagatctttgttaattaaaatcaatcctcacaatattgatctcacacagaaaaaataaaagctatagaaaagtaaagaatatgaacacagggtttttttacgtggttttgtaattaaaattctgcatagtcca

SEQ ID NO: 314553 - DNA, 946 bp, Cannabis indica
ttttttttttgaaaaatttgttctcagaaaatgacatgtagttttccttaattaaaggcaaatgagattcattttccaacaaaaagatgacactattaccttaaatgacaagtcgtatggaccaaaacaatgggaaatgacgcatcatttgcgtcatcttctctagtaaacctgatcgttttgactagaatatttgcgcgtgggtcaatcagacgtgatcaaaaaattaaattctgacgtctaaaatgcacgaaatcaagtctagatgaatctaaatgacgaaatatctaaatgacgaaattaagagattcatattgatttcatgcataaaaaatatgtgaaaattagactttaaatttacaaataaaaaatcgggtccgaacgtgttcttaaaatatttttacaaattttcaagatttttaaaatcgattttaatgctcaaattcgatctataacatttcatgaatgtgataatgtctaaatgatttgaaataaataccaaaaaataaaaacaaaaaacatttgtatataaaggactgaaacgtaaaaattgtgtatatatacacaataatatactatgattttatcacttaaaaatatgaggaataaataaaataaaatattcaaatcaatattatgtaataaaattactgattttaatgaaaattttatataaacatatatagaaaaaaatatatgtatatatagtgtatgaatttatatatgtatatacatacaaaaactcatttaatacatataaaacattagaattgaaagaatatagcaatcctaataataatatgtttcaaaactaattaaaataattttaacaacaaaatgaatcagaccaattcaaaagaaaacattctttccaactatcatgaacaaccaaaaatgagagttatatatatatatatatatatatatatatgcatatacacagaaa

SEQ ID NO: 314554 - DNA, 1059 bp, Cannabis indica
ttatatattttaaaaatatatttataaattttattaacttgtatcttattattatcttataaatgtcatgttatatatattaatatgaaaattaaacttaaattggctaatataattgttattagatagatttatttcagtttaataaaatcagttaatccattaaatggttgaaaacgatttatttattaaatcggattaaatcaattaactcaattcgattagattaaatcggttcacaaaatacaacatttaaaattagattagatccaaatcaattggatgctattgaacaccctaagcaccttaaaattttccaaaagtctcaatttcatccattttgttcggatttgacttgttgaatgtttacacaaataaatatatcaattttaatattttgaactagttgtactttgtcgagagtatgcccatattttatatcttcgattctctaatcagaggcaaacaattttcttgatgaaatatcaattctaactaaacatggttgaacacatcctaaccaattaaactcattttttaacaacaatgttattttaaccagcaaactcatttcacttattttgttatttaccaaataaaattttactaatatagaatattgagtgattctataaagcaccccactaaaatgataccatccctagatgtttcgtcatatgaataatgttttagttcaattttttcatagtcgtatacattatatttatttaagacaaataaaattttactaatataaaatatttagtgcttctactatgtaccccacttaaatgagtacctaactgtttcggcatttagaataatcttttaatctattttttcataatcatctatattgtagttatgtaagataaataaaattttactaatataaaatattaggtgcttctacgatgcacccctaactgtttcaacatctcgaataatggttagtcatttttttttttacaatcatgcatattattataactatttaagacatcatacaaaattttaaaaaaattcgatataatcaatatcaatatatatatatattat

SEQ ID NO: 314555 - DNA, 386 bp, Cannabis indica
aaactaataaaaattagtgctaattgcctttactaatccatatactaaagcggtcattacactggggatctctctaaagcctggattaggtaagcaaactttgtagtaaattgaccatttgacttttttgtccaaacccacttatctttaccaaggcaactaggtctcccccctttaatgatgttacaaatagttttcgaatcaaagagggttcgaagtttaggaatgtcccaaaaaccgctgtctagaagaagctctgcaaccttagtcacccttccatggttgggagtaatggccttagggtagaactgttgtaaattattttaccaggatcttagatctactcacaagtatgtttattaacaccttaaatatgaactttctaa

SEQ ID NO: 314556 - DNA, 1071 bp, Cannabis indica
gacctagtaacaacttactaactaatcaaaatattaagtataatcactaagtgttataaattatcaaagtcatgtctcaacccaccaatatatatatatttttaattaaacaaaaaaaatattaattaaaaatctaatataacaaaaaattaacaatacacaacacaatcgagcaataaaaaataaaaaattaaaaaattaccgagggtatcaggccatatatcaggccctatcgagccccatatcgggtcaacactaattatatattgtagggccatcgggccatatatcgggagacatcgggcctaaaatgggcccgatatataaaaattaataaatcaataaaaaatataacaattattaataaaacaataaaaaataaaacaataattaataaatcaataaaaataaaataataattaataataaaataataactaataattaataaaaaaataaaaaaaaataaaacaataattaataagtaataataaaactataattaataattaataaaaaattaaaagtaaaataataattaataataatatcataattaataattaataaaacaacaaaaaataaaacaataattaataattaataaaataataattaataattaataatacaaatttcaaaattaaacaaagcaatcggaccccatcggactcataatcggacatattgggcattatcaaaaaattgaaatgaaaatacgaaaaattggggaccaccgggcctgcaatcgggcccatcggaccgatcgagcataatcaaaaattgaattgaaactacacaaaatcatggggtaccatccgacccatcgggccccttgctatttgaaagcaatagggatcatcggacccctatcggtccgagcatcggacccatcgggtcttcctcttcgccaagcaaaataatacccatttcttagatccgacaaaaatttccctaaatctaacaaaatcataagtttcacaaacacaatcacaaacaaactcaatctttaacactttctcaacaaaaaaaaaaaattaaaaattataacataccttggacattgtgggt

SEQ ID NO: 314557 - DNA, 1326 bp, Cannabis indica
agtttaattgagtaggaaattgtagtactagttagttcttagttattataactatattgaaatgatgatttggtagttgtgtatatatacatttaataaataataggattatatgtaggtttacatttcagaatgaataattatattttaaggaagaaaaaaaaacacggagtttggatggatgataagaagccaggctgggaaatactgtcccacgctttggacaaagagttaacgttagtgagtgtgatggggaagagcctcttacatacttggccagctggatggagccaactagccaactatatgtttgcttaagctgtgggctttagacacgtgtgttagttgacaatatttgtatcttgggaaggttttgactgactcaaactgatagagtaaaaggagaaatccatgaatctctgtgcacgtacagcaagtataggtcaaaggtcggtctcactttctgtcatttcttatatattttattgagaaccttctaaactcaacacaagggactttctctttatcaatatgattattttaaaaaaaaaaaaaaaaaaaacacatgagacttctcattgaaaaagaaccaataaaaaaaatgtagtgttttgtactagccaattatgcaaattgttgaacaaacaaatactggaaaatgaaaaataaaagagaaatgatattactgaatgaaaattttgagttaaatcgcgaactatgtcgctctctttaagacgttcgtgacactatccgaaaatgttcaagtagtcaaaaattgtcagtcgtcgtcaggataaaacatcctagtcgaaataccacgagatcagagctctactgcacgatagaaaaccgtcgaaacaccaccaaaaactactgctcgaaatacttttataatataatcgtaaatataattgtaaaggattttttttttgtgtgtgtgtgagaaaagatatgtttctcctgttaattctgatgcattatatagggatgcaaagaaggtagcaacgagaaaaaagacattgatcatgggaacgttaagtgagatcgtgggaacgatgctaaaaataaagaggagagcacgtccccttttaccaattaatttgaacacggttaaaattgttttaattaattaaataaatataataatttaataaataaattttctctaaaaaataaaatgacacctcaccacacggacagtagttgcacacgtgtggtgattcggtgtgtgagttctcacccatttgcacaaaattgggtaccccttggggccagggccggccctagggcccaaaataaaaactaaaaaaattattaggcttttat

SEQ ID NO: 314558 - DNA, 1206 bp, Cannabis indica
agttcatgctatagataaatgttattgggataaattttctctccccgcgagaaagactatactaatgatagacctcacaatattaagtaaaataggtactttgcattatcgaaagagacctctctatatttgatcaaactgcagtatcatctaggaaaagtgcaaatgcgcattaaatcaacaaagataacgatcaaacattcaagtatcattaatcaaggagttatagaactgttataaccgttgtaattagtacaattaaatacttactattattattattattattattattattattattattattattattattattattattattatttataacgatctcataatgaccacaatttgtaaccattacctattgttaatcctgaaaaattataaggctaattctcgaaattagtcaacgattagtctcaagaagtgaaagaaactgactttaagaatcacccaagcaatgaccaggtcacgcgtatatcctgtgaccactcaaccaaaccctagcttgggagtcactcaacaaagtagggataaaggtgactcggccaagtagggttgaaggtcactcgaccatgtgaagaaccatggtcactcaaacatgtgagcatcaaggtcactcggccatgtgaagaaccatggtcactgggccatgtcaagactaaggtcactcggccatgctaagatcgagatcactcggccatgtgagcatcaaggtcactcggccatggatgtgcaagtcacttggccatgtgtcaaactttcacattccttggccatgcaaacatgaaagtaacttggccatggatgtgcaagttacgcgtccatgtgccaaacttgcacatcccctggtgtcacgggctcatcttttcaggtagcggatcacccgtgcggcaccttgacttctctaagacaaggtcagtcttccaaccatccgagtaataatgggctcattttttgcgcgatcgtgtgcctcgtgcacacttctgtctctcgaacaactctccccgagtcatgctcgcaagcatccatgagtgcatccatgcatcgagactctctagccaagatactcgcactgtccataggttcccactaagataaggcaaatcccaacatcgacgctcacctagtcactcgtgaccaaggtagcatgtgtggcaagatgccaacactaagctgacgtgccaacgcttc

SEQ ID NO: 314559 - DNA, 618 bp, Cannabis indica
aataataataataataaaatgaataaaatgcattcacatgctctctttctcgcatcataagggagtcaaacaaaaaacaaaaaaaaaaaataaaacctgaatgaatgactttacatttacatgtataaattcaaataataattactttaaagtaaatacatatataaagactttcaaaataatgccttactttgtgtattgtttcaaaaacagtaaaacttttttttttataaaaaaaactgatataatgaatgaattaagtcatatcaatccaatctgattgaaacattgcatgaatatctcaaatcatcattatttataaataaaatagaacaaaaacttaatcgcatctaatctttcatcgtatatatattcatatatatgaacgattactccaaattatttcttcggataatacaaactgaataaaagtagatttactcctaaatagaaatatttttggaagatcattaatatcataaattcccaagaattaatttaaggatgctctgttgggttttatgccctaaataaaactacattccaatgtaatctttattatttaaatatcaataaagaaacagaagtattttcatcacttattgtgtcatttggttc

SEQ ID NO: 314560 - DNA, 764 bp, Cannabis indica
ttaaattttaatccattccattcctattttaattcccattcttatttctatatttttattcctcccaactcccaaccaaacaccaccaagtactcacttttaacaaagttaacattttagagttgtattagagatgatctaataatataacccaataacttattttgataatatacatttttttagtaaggtataagttttgaaatagaaagggccaaggaaaaaaaaaattatggctttgaggacttaaaaaattactttgttgttaagaaagaaatgccaagaaacaaacaaggcttttgcttgtattgtttagataatttgcattttggcttttgcttcataaataccaaatcgctctacatatttatatttataaagttagttaaatattttgtgcctaattatgtttatgcttcctgaaattatgttggtatcaaaatatttaacttgtatttaattacaacactaattacaaatgacagttggtagagagaaaattttaaccaagtttattgtcttttatttttctacctttactaaaaaattaaaataaaatattagtaaattctcaagtaatgaaacataatttagagttctagtgttttttatacggctgtgtacaaaaatattttgaatttatttaaaacaaaaacaatttatttagcattattttaaaataatgggagaaagtaattttagtagtgaaaattacaccaaatatgggaatctataaaaaactttgataaatatggcttttttaa

SEQ ID NO: 314561 - DNA, 676 bp, Cannabis indica
taactgttctcttcactaacaataagtagccaaaacgttatccaaccaaaatttacagaattttgaaaaggccgaaatcaagaattttagtacaataatattaattcattcgtttgtacgccattttttttcttctatagaacctcaataatacatttgagacaaaataaattatattagattataactaaatagagttacactaaaaaaaaatatcaacgtaacaatcataacaataaataatcattaatactatatcataatagaaatattttagaataaatataatattcatacatgtactataatttaaaataaaattattaattttacataaataaatttacaaaatacatgtatatattttattaagagtaattattcttatatagaggtatactttggtaatatgggacttaaaaaatgtataactaattacaatttagaggttattcttatttataactggcccaaattaggacttgattttcttataacaaattagagattattcttaaatagaggttgtactgtaattaacaattttaccctaaattttgtatgctacaaagttgtattgtacggaggcgagtgactttgaacattcctaacagcttctttattctatcttttataatattttactaaaattttattttttttttttattttacct

SEQ ID NO: 314562 - DNA, 862 bp, Cannabis indica
aaaagttatatagaaaagattaattatcaatatattaaaaaatccacatgttaaaacaagtaaataaataaatgaaaaacagactactattaaattagagttcaacataacacattttgtactaaattacatataatctatactatatctaataatgtttaggcctaagtttgccctgatcaattccaaactatatatagggacacgattttttatgattacggtagccgttaaatcaaaacaattatttgatctgagagtttatagcaagtactagtacctacaaattaaaagaaaaacacttttccttcctgcactttcaagtcgaaatactaaaataatatataattaatcattataactatacaaatacaatgaaaagtaatattatatatatcactcaaaaataaataatggctaaaattagagtatacatggccacccatatatgtagtttatctggaccttgtaaattttcgaagcaccttatatttcgagggttataataatacaacttttatgtttatttatatttattggtcttccattacttataataattaagtgataaaacatttaaaagaaacaaaaaatattaagaaacggcaccaaacccatttagatatgtcgtatggatttgtgaacaaaacataagttataactaaagtcggccattttcgttagtgtggtacaaccattttcaagctgtaattttcattttaaatctgtaggaaagtatttccttaataatagtcattgaggcatattttttagtgcttgcaatatgggtcctatgacatacaactcgaaaacgacataaattaaataggaaaatttacaaaaatattagaatttgagttaa

SEQ ID NO: 314563 - DNA, 759 bp, Cannabis indica
acatgaaataaatagtaaaatattaaaccatggaacttcatattgtcattactccctaatagccatcctcataaatatattcttttcactttagtttttaaacaaatacctacttgggaagtgtggcattattttcttgacaaaatataagaattttgattggatttttcttttcttctttttagtattttatggtaacattacgataaagctgataaagacaataatcagaacagtactacagtgcatttgtaaagattagtaggtaatatataagaaacaactatacataatatagagtctagaatataataatgttttagagtggagaattgtcatgcaactttagtacttccttatattaaatgctaatttaagtttggtcaattttggtatctaatcaatttgaacctactctcgtccaagtatgcacatgcatgaaggagtggaaaaaaggtaataataataaggtattaagtcatatcttaagtaacaaattactattgtataattcaatatttagtctaatatattttaatttaataaataatataaaaaattactaactactcataacgcgctatattattatagtgttagacactttgagatatctaataaaaatattctaattttaataagggtaaatactattttggactctgtattttacaaaagttaccaattagatcctttattttgttaaatgacaaaagagatcctgtattttttaaaatagtacaaataggatcctgaact

SEQ ID NO: 314564 - DNA, 1011 bp, Cannabis indica
gaccaaaagaggcaaagacatgcccaaccactatttgagtcggttggtcccagaggtgaatgaacagttggctggggcggataatgacttgtctttggagctggtcatgggaggatttttgaaagagccttcactagtaagtcttttctaacatttcactttaactagttttgattttaatgacttttccccacaaactggtctgaagatggcctacgcctattcccgagctaagtcggctggtactaagaaccttgccatttctaacacaatgcgaacggaagtggacttggccaaaaagaatgtcgaggatgcgcgagttaaacttggggttgtgcggattgagctgggagaggtcaataagaaacttctagcgattgagaccaaagttgctgagctgaccaaggaactgcatgacacgccatcaaccgagtagctcgaggctgacattgcttctttgtctcgggacgttactagaattcaagatgaaagagagggtctccagactcttcttcgcaggttggaggattagaagaaagccatgcaggaggaactcaaggctgaggttaagtaccagatgttgaaggtggcaaggctcggggagaaggtgaatgccttagagacaactagtctcgagatattttatgacttttggaaggccaatcccaaggaaaactttaataatttgggcgcttccaaagatatgtttctcgactactacattgctcaggcggcctacgaggaacccgaggcaaccacttcaacctctcctactgatcagaatgttgaggctccctccacctaaaatgatgatcctctgactccttcaaatctagctgactcgtacgaggagcctgggaatccggctgtttaattgctttccttttactatctttttttatgtctgttcggccaatatgcattcttttaagacaaggtgacttgccaagcagtctttaaacttggaatattatttttcattttttgaacaactggctgactgggcagcct

SEQ ID NO: 314565 - DNA, 1883 bp, Cannabis indica
ggggggctgtagttgctggttttctgcagcagcagccgctgggagttttgtaggcttttgccttgtgtttgttttggttgttttttggaataaagctttccctttttcaaaaaaaaaaaaacaaggcttcgtattctaccttgttgttcaaagcatcaaattggaatcttagtgcataataaaactagaaattttcagtcgacactattattactcctactcccaagccattctcatttgaagctccatccgtaaatagtttccatacatcattatcatttcctgttatggagtcttctcctgagtttattccttccaccaagaagtcagctaaagcttgacctttgatggcgacccttggatggtaggtaatttcaaatttcacaactcgattgaccattttatcaaccttcttgatgcatctggttttgatgacacttatcgcaatggttggtctgtgaaaactttaatgggatgagcagaaaaataaggtcgcaattttttggatgcatgtaccaagctgagtgcaagttttttgagtggagggtatctcggttctatccctagtaacctttttctcatataataaattggttgttggtttctaccatcttctcacatcaatggatcactcatggcattttcgaagatggctaagtaaatgtacaactcctctccaattatattgatttggccaacactggtggtgtggaaagatgcttctttgaaaggcctgctcgcactcttcattccattcaaaatttttatcgccttacaaaatgttgaaaaataggaggtatttatcagttgatttcaaaataaatctagtcaatgttgccattctgccacttaatgactaaacctcttttggtttacttggcgaatgcattttgagcaatgcctttattttttgggaatttagctccaattcctctttcatttacaataaaaccgaggaatttccatgaggataccccaaatgaacattttttgggttcaacttcatattgtattttctcaatatagaaaagcattctgtgaggtcttttgcatggtccttgcttttagctgacattacacgcatgtcttccacatatacttcaatattccaacatacatggttttcaaacataccattcataagtctttggtatgttgctccagcagtttttagtctgaatggcttggccttgtaacataaagccgcatattagtgacgaagcttgtatgttcttaatctggaatgtgaattttaattttattgtatcaagaatatgcatcaataaaggtcatcagcttgtgccctgttgtcacatctactaattattcaatttgtggtaatggaaaaatatcttttggacaagcctggtgtaacgcctcaatttctcgagacgtcatactcgctagtccatttaaaattatttaagataaagacaataaaatacttctttaatgaaaaataactaagcatgagatgtcattatttttaaaacaaaacattaatttattcataacatttaaaatataaatctttacaaaaattatttgaatcataatcttcaacgaaatgtttttaaaccaaaacatcgtgataatcccctaatatgtaatccacacctcgagctcatcattcttacttttgcctttacctacacagagtatctgtgagctagcccccagtaagaagagctatgtaggacataaccccccaaactagataacatagccataagtataacaatatcacaacatcaaattcaattcataccatgcttgcatacataaatctacataccatatcacatattattctcagatacaatataacatcatatcacagtgtaattttaatacatgctatactcacacacataacacatagt

SEQ ID NO: 314566 - DNA, 753 bp, Cannabis indica
ccccactaaacaaaaattctgggcctgtcactgatttttggacggaggtgtgcaaagcaaaacggaactagggttttcgatttttgtggttaagtgttacaaaccgtaaagttcaggtggtttagccgccaatattcctttccaaaatggtaaaaataggaccctaaactcaattttcaacaattttattttttaatataactaactttaagataatttctaacacaaacagatacaaaaaatataaccagatttgtcgtaacatctctagatcagattattattaagttttattttgacaaaaaattaattctaggtcctatttgtacatttttagataatataagatctatttaatcatttaataaaatagagggtccaattagtaacttttgcaaaacacagatctaaaatggtatttacccttatttattaatctagtttttcccttacacccatttgacacctaaactcaattttttatcctcatcatcaccctatagtaaatcatcctagtttgatcaatttaaaagcaaataaagaaaacctcattccctcttcctcttcctttgtttcggttgagtcgaaccacacccacacacacaatccaatttctcttaaattcctcctgttgaccgaggttttcggcaaccaataaaataatataagattagagaactgtaagaaattaagagaaggatttttacgtggttggggcgttaatgagccttagtccacgagtcagtgtattta

SEQ ID NO: 314567 - DNA, 1157 bp, Cannabis indica
ttttttttttttttgtaatgtaacatcgaatttttttcttttgaagagacttgaagtttaagttgagtttaatgatagatactttattgagtaaaatgacagaaaacatgcccctcatgtttgacaagaattgggaattttaaattgtagcagcatattgcttttatcttggatctaagattcaaattggatttattcataaggttttagttagctctataatccaattttcagctgaaaataataataaattgagaatgtgatgacaaacttatataaacgctataagaatacgatacctctttctaattcttctacgaagcaacaatcaagtggattcacaccttttcttattaagcaacagtttgcctccaatgaactaactagtgatgattgagatgattatcttgctgatagaaaagaaaagttgatgaaggatggagaatgaatggttactagcacaatgatgtctttccacattgcaaagagatgtttgttaggacaggaagtaataaatttataggaattgatgactaagagaagagagagtgtgaattagtgttggggctgttagtaataaaagggagggggagcagagtgcaaggtgtgaaggatttggattagtttgtaactgtttgggagagagaacagggctctcgaagtccctgatatcaataccagtataatttcctctatttctactactgtgttctttgatttgataggaaattcctatcaatgacttggttgttcaaatgtctacagttgcttctgaatcaatttgttctactagagcagagatactcgacctatttaaaagttctttgcctccaaaaatgtttgaagctttagtgcatgtttggcatcataactaaaaaactgtttttgtttttaaaagcagaaaattgtttttaaaaacaatttggcttgtttggccttgttttttaaaaacaattttcagaaaacaaagttacaaaaaacaagaattttgaaaacaacaaatgttttgaaaaccaattcacttttggtcaatattgtttttaaaaatcactaaccaaacgtgacttgtgttttaaaaacttcaaaaactattgtttgttctcatttctaaaaataattttttaaaacaaaaaacaaaaaacaataccaaacatgct

SEQ ID NO: 314568 - DNA, 450 bp, Cannabis indica
gggctaggtctgaggtcctcgacgtgggtccgagggttgggttcgggtcttggtccgagttcacgtctgtgtcgacatcgtggggttggggtccgggttgcggtctggggtctggtttctaggtctgggtccagggtccgtgttggggttcgagtctgagtctagtgtccaggtccaagtttggggtcagtatatgggtcggggtctgaggtctgaggtttgggtcggggttcggccgtccggggttcgggttgggttccagggtctgggtttgggtttgggtttggggtctgggttcagtgtctgagtttggtccgagttccagttcggggtccgggtctgactccggtgtctgggtctaggtttgagtccggttgcgggtcctggtctgggtccaaggttcgggtccaaggttagagtttgggttttggcctgggttcacggtccgag

SEQ ID NO: 314569 - DNA, 1734 bp, Cannabis indica
atggcgtgaagcctcaacccatgcatactaattgtagtaagattgggttttataacctagagaggtactcagatgaacattgccccagaagatttaccttacgctccccaaacatccgggaacactggttcttttccattggtttcccaatgaagagagtgcataccctctcattaagcttccagagcccaggtaaacatttttattgttgtttttccttctttcaaagtcttttctagtctaagtgctaattggaccattatacttgtagcaccctactagattaggcggtgttaaagtgatttttaacttaacagtgcagctcgttgctaatcaacgagtttattgaaaatcgtgatttatgaaaactttacttatttaattattaacactaaaataatatacttataataaatagggatctcgttttacaaaatatttacaactgtttcataatataagttacaaaagtttgtcacctagcgactatacaaaataagccctgctgtcccaaagatcgtacgctccaggtctaaccgccccgacatatacaatctccatctgctcgctctcacgactgctcaaccttagcattgcccttacctacacatgcaaacaataactatgagtcgacagactcagtaataaaagaattattacataccaataacccagattataatcaggcgcccatacacccaaccgtaaccctatcctcgtggccaacacggtgttgagtctagaacatttgtaccacagtactactcaccataacatcagcctatactcgacgcgctagtcgtactgatgtgatactctcaagtaatatagtactaccgaccatgatatcaacctatactcagtacgctagacgtactctagtcgtaccgatgtgacattgtcgaatagtagttaagccaacatatatttatcgatatccaatataatactaaacatactcatatcgctattataatgtaatctaacagacttaactaacacgcacgctaaacatgtaaatacatatgcatatcattatactaatcttacctcattaccgaattcaagtgtgttggcaaacctgagtggaacagctgctcgacgaattacaggcccctaaatcacattatttgtaaaactagtgactaacacgctaacacgctaaatcactttttggggacttaaaactctaaactaaaagtttccctatcgataaatgacatggagataccctatatattgcaaaaataagaaaaactagggttccctaaacatccccaaccagtagaccggttccccaaccagaattctgattatgtggggtttcttgacgaccaactagtcgaccagttcctacaggtccccatgaactggaattctagttcagtgcaggaataacacaaaataccactacaacctcaattaaaccccaaactctactaaactttccaaacctgctatatttaccataataaacatattccaagcaacaaaacaactaaataagctcagaatcaaaatctagtattaaagagcaaagcttgagttcttaaactcaaagcttgctcaaacactacaacaacccttaaatccacctcaattcaacctataaaatcttaattcaactttagaaagcaaaatcaaacaaccctaatagctacaacacccaaactcccaaaaatcaagcaaaacttaactagaaccttagaaaactaaagagagagagagagagag

SEQ ID NO: 314570 - DNA, 1426 bp, Cannabis indica
tacatgtcaaagcagcgcgacctggagtgtttggtctcgggacatctggggattgtatttttgtagtcgctgtgcgacctataatttgtgtattttggaatattaacttttaaaagtttgaaaacgggatcccgatacttgtaaatattttattatatcataaagttcattaattaatataaaagttttaatttgacatgatttttgagaaaagttctttgattagcaaagactacactgtaattgaaaaatcactgtagcgtgccttagcattagggcgttacatcgtgcttctgcaaattcttcatttttcctaggttactatcgatggaggagaaacccactgaggtcctactgcaccttgtcttctctgaggaacagcgtcggtgtattccttagtaacatagtcttcaccggcctccaggattttaccgacctcgaacacaggttgtccatcctcgttgaagccaccaaagggcaacctccgagctgcatcttcgtcctcaacttcaaaaggagtatcaggacggacctcgccttaatcctccatctcttggacttcagtgtccccctcaatgtcttcctcctcgatagtaggcgtgtcttgctccgcactcaacattgtggcgggccgaggtaggtgtgggtcagttagacaacactttcaaactatttttttagtgcgtgccatcatcctattcctgaaccgagcctgattggtatgtctggcaatagttacggtgaatgtagcaatgggcatacctgcagtagcagggtttggatggcttataggcaaagtatcaactgtatttggtcagacaatatatgtccagatggacggtaaatatcgcctacagcacttcctatgctcctagataaaacgtccatagccttgaccttcgatctggccggggtaataatggtgttgcagttcgggttccagggaagatgtatgttcgctacttatatcccaatcttcaaagcttgaattggagagaccgccactagataaggacaaactatcacgaagaagaaggtgatcctcgtacagaagttgaagaagatcctagtcgatatgacgttcgcttccctaaaactcacgagggctcatctataaaaggtaggatacaagatgagtatttggctgggataacaaacagaaacagattggctatattgaccaggtccgatcaaggatcaaaaatagaaattttccatgatatataggtttacaatctagaatttcaaaacttcaaattaagggttgatcttcactaagccctgaatgggcaagtgaaagtgaatatcatggaattgaaatcaaaatgcagttataacgtagttaagcatagtaaagatttcatattcctaaacctaaggttttctaagataatgactaagtcagaaaataaagtagaaaataaag

SEQ ID NO: 314571 - DNA, 2017 bp, Cannabis indica
tgcacagtacgtttaaaaatcacttagcacgcctatgctagttagggtgttacatcatagatattgtttacatgtgtatgtatgggcaaagctaaggttaagcatccgtgagagcgagcggatgaagattgtatatgtcagaatggttagacttggagcgtacaatctttgggagaggaggatgtattttaaatggtcgctttttgtattgaatattttataaaccaattataaatattttgaatgttggatcccggctgtaaaatattattttcatttaaagagtaattaagtaaaagttttaattattcacgatatccaataaactcgttgattagcaatgagctgcacagttaatatcaaatcacgataacatgtctaaactagtagggtattacaatttggtatcagagctgccaggttatctttcgaagatcgtcacgacatgtacaatcatcatcaacgatcagcttgactcacggttcagtaagcctttattgctttagtagtttatttaattagtatgttataagaaatcatgataggaagcatgttagtagcctaatagttgagtaggcacatgttttaattttcaaaataagccgtaattaataaattattcttgaccgcaatttgaccaggctagttcttggttttacaggctgttttattagaatgaatgctaggaaaaatgcgagaagccaagaggaatggttggttttagtggcagtcagggagtttagtctcccccaaatttacgtggctgaagcagagactagagaggcaagggacgcggtcagggaggtgttaagatatcgttgattgtcaggatcaggaatataggtttgtagcaatgcaagccagaattaatgaacaagataaggaaatcaaatgcttgaggcaccagggtgctcgcgtaatgcatgctctagaaatgcaggtggctcttgcccttgctgtgcaggcagggccgattgctgtagtgaattggatagaaccatgtatgaaaggttccacaagcaggtacctccaatatttttgggaggtcctgatgtgatgaaagccgggcaatggctaacgattattacaagaattttgaatttatgggtgtcaccgacaatgacagagtggcctgtgccacattccatttccaggaggatgccctggttttgtgggacatggtgtccctgactcatgatgttactattgtcacttgggaagagctctaggagttgttcaatgcaaagtattataatgaggtagttagaagtgccaagaaaagagtttacccacctggtcaagaaggagaatatgagtgttactgaatacacaactcagtttgatctattggctaggttggctttgggaattgtgccaaccaattttagccataaagaaaagtacttagatggattaaatccaaaaataaagcatgatctaatgattactactgacgacaataccacctatgctgacatggtgggaaaggaactgcgagttgagggtgcagttgagtgcactcaggagtcttgagggacttaggttgctggtgaagcccctactcctcctatcgttggtcatggtaggagtggtagtgactcgaccaccgaccagaaatggaaggcaccatttgcaccatgtggctcaagtcagaacaagagcttccgagggaactagggtcaaggtaatctttagggtggtttcgaaacccaatatacttacgcaaaatgtcgtaattgtgagaagcatcatctgggtgagtgtagagggcaagaatatttctagtgtggtttgcctagacactataagagagactgtccgcagctcaagtaagaggaacaaaaaacagcagcaaagcccgctctagcaagggtgtttgctcttactcaggctaatgtagaagctgttggaattatttttaccaggatcttagatctactcacaagtatgttgattcaacaacctaaatatgaacttaaaaaacgatggaaaattaaacacataaaagtaagagaaa

SEQ ID NO: 314572 - DNA, 839 bp, Cannabis indica
gtgtatattgattataaatacacctcgtagcgactagggcatgtatcttttttcacatctttgtatttcattcatatcttgtaagaaagagtgtctttattttttagaaggagagtttgttcacctctttctctgtgtttatatattttgtattgtcttgagtctgtaatcaagtctacaaaagaagaagaataacagtgctaccttcgggagaaggttctacaagctttcgagagattatttttcaagtcttacctcgggaggaagcaagcactcttcaaggaaatccactattataaacagtacctttggtgttagttttaaactaacacttatacctttagtgtaacttcatagaactgacacctattctattaacaaaaagtcaaatttttggtctcgattctaaacttccactattgaattttagtatcattttacaactgacacttaaatatacataaatgttttttcatttaatgccggtttaaaactgacaccatagagttttggtgtcgttttataaatgacacttaaggattctttagtgttagttataaaatgacaccattgctcagttttttgtaactgttgctttgcatacaactgaactaaagtcatcgcccaagcataaagtgatgccacggtcaaagaaaataatgaggaaatcttcaaagagcaaccacatttcgccagattgttcgctacagctggagttgaacaggcccgtcctgaggtcgaggaaggagacattgctgatggggactttgaggtccaaggagctgaggactagggtgttggaattaattttaccaagatcttagatctactcacaagta

SEQ ID NO: 314573 - DNA, 562 bp, Cannabis indica
acttaattttggataaatatatgtataatatgtatgtgtatatatatacatgtatagagagagatatggaaatatgaataattactttacaacaccacgaaacctggattttcctcttgagaagctgttacttgacctacaagtatagtcaatgcatgcatgtatatgtaactaatcatcatcaatataataaaatatatatactgtatatgaacagttctctgtattaattaataactattcaaaatgttaaattatactagtaaaaaagaaaatatatagttaattatttgaatcttgattttgataatatgtaaattatttgatttttttttttaaaaaaaatgagtgaaaaatagaaacagctagcccagataataataaatttatatatatgatatacaaatttaagtggtattatctaactagtgacaattgctaagttatagtactactgctgtaagaatattatcgatattttagaatggataattaaattaattataactaatttttatttaaactcaatatttagttttttttttttttgtttagtaagctg

SEQ ID NO: 314574 - DNA, 1100 bp, Cannabis indica
atatatatatatatttggttatgtcatataaagtgttgttaaagaaaactactacttcatgaagttatactactaatatatagggtttcacttagtctttagaagagtacttgtaacctttatttttctttatattaatattacgtaaggttatatatatcatgcatgcatgtaatgatcatgcaaatagtactactttgttttatttattaattaaatttcatgatgatatgtatatatacaaaaacaaaaacaaaattaaagttgtgaaaaggatcgatgggtagatttctcaaccgtttaatcttggtgataaaggaatgatcgtccaagggttgctatcaattaaagatgtgtagtaatactccatccattcatttaattatatttatttatatatatatatatatataatatcaaagatggttttaataaacagtgcttaattatcacgtacacgttcaagatcaatgtgtgttgtatatgagagagttaggaagaacatgaacatcatatatttatatatagttatatatacatatatgtatatatttatatctatggattgatgaataggaaggaaacctctagtttgacgcaattttctctttaagcaaacaatttaataattacacgatatattataatgctacaaaaaaaaaaaaatgaaaaaatacagatcgttcatgtgctcaaattaaacagttgtaaataatcccaaaaagtgaatatactaatagtttgacgataaaattatacatatttatatattggaggatatatactctaaattaactcatgagaatataatcctaatatacattatacatgtggttgcacctactactggtgggtcagctcattatttttttcgtgtgagagaaaattaagtatatccaacatatatctctataaattattaaaatttattttttttatacctaaatttaagttaaaatagccaaatagttaaaatatatatttttttgagtgtagcgtaatggtattttacaatcatttaatagcttaatagtttcaaggtcctaggttcgaacagatgacctctccctttttcccatccctccctcaccactaagcta

SEQ ID NO: 314575 - DNA, 825 bp, Cannabis indica
aatggatcttacttttaatctcacaatttaattatctaaatgagcttttctttgtaaataaagtagctagaatgaaatagagggctataaaaatagtgtattgttatattttaatttaaaaaaaaaaacttgaatggtggtgtaaaaggtgtatcaaattcgacacttgctaaaaattagaccaaatttgacacaaaatatacctcgggcaaaatttacaccagaattaatattatattttttatttactcatttgccactaattagaatatttttatattcatctaaataatttttttttatatatatagtttcaataaaaaaataataactatgttgactttgagatgagttaatctaaatcttgtccattaaagtataattgtaaaatttgagctaaatataatgatattcaataatggatgtagcttctcatctttcatagtgatggaagagaaaaagaggaagaaatataatgataggagaaaaggaataaagagtgggatattataattaggtctctaattaatcaattaagcacaaattataagggaaatttcatttttaatgcttaataaaataccttctaacaaaatttagactcataattaatttatacaatttaatgctattgttttcaatttctacctaaaatacccccctttcattttccttctctctttgtctctttctcttcctcactctctttccctcaaactcaggcagaccaccaaccaccaccactgaacctcttctcctccaccaccgaatctcctcatctacccaaaacttaatccaacaaccccaaatctcaactacccaaat

SEQ ID NO: 314576 - DNA, 687 bp, Cannabis indica
ataaaacttaataataatttaatgtagacatattatgacaaaattaattatattttttcatgtaaaaaattgtcaaatttttttacaataatattaaccctatatttttttaattgatgtgactagaaaattaaatttcaaaagctgaccatatcatactgaaacaagatgaagtactaaaatcctaccacatattatttcatatggtaatatggggctaccaatgaatagtatagttttgttattatatataatatatttaaaaataaaataaaataaaattatgtggtccattgttatataataagatatttgataatcccaattatatatgtataaagaaaaagtttctatatttgttaggagagacaagacaggtaacactattgactattgtaacactttatttttattattgagatttgagatcctattactttcactagttggagcaacttgtacattttttttataatttagtgatatattaaataacctaatatataatatgatttgtaatgagaatttaatcaagattttcttttatatatttttaaataatataataagatatatttgcctaattaaatcaatggttgtgacaacattttttgacataatgtctattgttctttatactttttttttttaaaaaaataattttattttaaagtttatttagttgtt

SEQ ID NO: 314577 - DNA, 1038 bp, Cannabis indica
aattaaaaaataaaaaattaataaatgttttgattattaatattattttatttttttaaataaatatattattaaatattattataatatgtataaaattttaattatatacaagcagttctatagtaaaagtatataccttacatcataataaccacaagatctaaaatcaacggtaaaaaaaaagttcctatcagtaaggaatttttactaaatcctaccatagtattactctatatataaatacaaattctaataggtgccaatactatgagcgacaaagtgaggtattagaatcgaacttgagcctatatatatcttgactatagtatataccttaattcttatttcttatagtaaaatgacctattgatccgctcatataccttgagtcaatgggggtgtgttggatcaatactatgagcgacaaagtgaggtattaatgacgaatttttgtgagtgaaaaagaaatacttaattttattctcataattaagtatatgtacttatgtgtcttatttcaaatacaccaattataatagtttaattggtgaaaatattaatcaccttgagatattattatgtttattggatttatatgtgacattgtttaagtattacttatctttctttctttttttgcaaattaagttttacttacttcaaaagtaatatagtgaaattatttattttgactgcatatataatatgtattttacgtggagttgtcactaataatttatatttaactataatattaattaattattaatacttttttttttgagtgtattaattattaatacttaatgtctaattatatgtagtttatacagataaggaggcgtttagttggagataataaaatggaatggaatggaaatgaaataattttcatttcattccgttgtttagttgtattttaaagtattttaattttcacctttttggtggaatgactattttatcttaaaaatgaaagaaaaatcattccaatgtaacaagaaaaaaaatttaatgatttttttatcaaatttt

SEQ ID NO: 314578 - DNA, 1551 bp, Cannabis indica
gggcataaaacccaacattcgcgacactgcccaagaatgtgcaagcagttggaatttgctactcgtccgcagtgacagacctattagtgttacgccccactaacaaaagcattgccttttaaaaaattaaatgtaatttttttaatttgataatcatagaccaaaatagtagaaaagctcccacaaaattaaataaatctagtaaaagtgatcataatataaatatatatattttttaatgataaataagcccccacaaagtaaaaattctgggtccatcactgctcgtccgtaggataaaacaatccagttgtaatgtatcgaaaccctactacactgtagaaaaccgtcgaatataccttaaaatttatgatatagcagatggatttttgttgtgaaaactgtgtttatttttcgatatgaaaaagatgtattcttcccatcagttcaatcacattatatagatgaatggattaaaataatataacagaaagaagaacgtcttttgaatcgtggagagtagttggttgaacgtgtctcattaattggtacgaataagtaatcaatttcaattaaacatgttttttaattaaattaaaaataaaaataattattttattaaataatttttctgtaaaaataataaagtgtcacaccacaccaaccagcccgaatcaaacaacgtgtgcgcatctgtggtcaattaagtgtatgagtcttcactcattctcacaaaattgggtatatttgggaccctaacccaagtgccaaaattacaccttatatacccttgtaaatagttactcatatctcatgtggaactatttttacttcacacacactaaaacactttcattttttattaaagtatttatcaaagttccaccaattattgattttttggagaagggagaaggcaagggagatgcgctacagagatattcttgccaactacgagaacaacaaaattgggaaggagtggaaggaggatatgtcatttttggttcaatattttcagtttttatacctatttctgggtttgataaagtgatgatgatgagggaaagaataatttttttaaaaaaattgtttggttttactttcaggtacttgtggggtttgagataataatgatacaatttttcttttcagtgtttaattttttaggttagttcgattgggattttttttttcttgtggagcttttggttttaattctagtttttattaaaaaatattcttgtggagctttgttttgtttttttggcaccatatatttattttttatgttatgattaatcaaagatgtttgtaaagtgcttctccatcattctgatccccaacaaactatcacggtaaatacctctatctgattttctttttttcttttatcgtagactgaattcattcgattttatatagccgtattttgatattatgtgatttgtgagagtgttttagttggtgtatatactgtttgatataatgtctgtgtgattcatgaaagaattggttattttaagggcctgtgatcacgattctgaagcaact

SEQ ID NO: 314579 - DNA, 2250 bp, Cannabis indica
gcacaaaacatataacataatattaacttgtatcaaggcacccatacacctatttacaagacattagatgaatcaagaatgttcttaatagaagctcgacccttgtaccacatgcactaagtactcgtcccacactagtgtttgtagggctaaactacacctcaagtacaactaagtgttggaccacatgcactacatacttgtcctgtactagtgctcgtaacactatgtcgtatcctttgaacatcatatattgtaccaatgcactctgtactgcaatcgtactagtattagtagtatacaaatcacataaaatagcatacaatttacatccatacacatatcttatgctaatcttaccttatatccaaattcaagtgtatcggtcaacctaaatggaaattcacacgctgaacggaggtcttatatcacaattcacggaaaatgggttaacaacttgctaaaatctttttggagaccaaaactcaaaattagaagtttttcaatcgataactagtatggaaataccctaaatattgaggaaacacaaaaaaacgagactatggaaaaatggtaggtcgttttgaaaaaatagtagattatatttctgtgtaatctaccagttaaaatggtagaccatttcctcagaaattgtaaagaccgcttaaattgaatatgataaattattaaataattagggtttaattatgaaattaagttattaatcatgatttgtgcatttgtggatatttatttgaatttagaatatgttaattatgttatgtatgaaatttcttgatttctgtaattgtgctcggttgtagtggaacgtggcgttgggcctttagagagtcacgtcttcatatggtttaagattttattaatagcagggccatggttagatattggtggtctcaagaattttttgggtttcgaaatgaccagactacccttgaatattaataaacttttggattatgtataggggcaaattggtcatttttctagggattctttttgtctttttgtgagtttattttgaggataatactcagattttaaatcaaatttattaaataatgggttagatttatctttatagaaattagaaggaaaaacatagaaagagacaactctctctctctcgaattctctaaggaacaagctagggcttggatttctcagcttcaattgtaagattctagcaggttttgagtgtcctaattcaaggtaaaatccttttagcttctccctctttgatttccttaagctcaagttaagtttaaatgtttgaattttgatattacgttgttgtgttgtagattagtgtttgatttggtgttctgaagttcaatcggggttgttaggtttaattaagttggatttattagttgtgttgatgtttgaacaaagttttaatttaagaactaaaacctcgctttctaatggtgatttggatttctgaaccaattgttgagtgttatttcttgatttgagttcattgaagtataagcaagtattctagaggttattgtgcaatttggggctgatttgaggtacaagaagcatttttggggttccgtgcactgaactagaatttcagtttagggggacctataggaaccagaatttcggttggtccccaggaaaccccaccgaactgaaattgttgttggggaactggtctaccagttggggaagttttgcaaatcctaaattgtcttgtttttgtaatatttagggcatttccatgttatctatcgataggggaaacttcagctttgatttaagtccccaaaattttttttagtgtgtctctcatcagaattacgaatattttgatatagggccttgtaaagggtcgagcggctattctactcaggcttatcgacatacctgagcacggaaataaggtaagattagcataaaacatattatatatgcatgttgtgtttcagattgtatatgttttgggtgatttcatagcgacacaaccattgtgttaattcggaagtataggcaccatactgattaagagtgatattcaccccaaaaaatattaattggcactatcatagaggcacaaccattgtgtcagttcggcagtacgagcatagtactagttaagagtgatatcatggccaattatacttttgggtgttattgatgctatcaaagtagtacaaacatagtgtcggtcctgcagtgcgaccatagtgctggtagtgggtgatattatggtcaatagca

SEQ ID NO: 314580 - DNA, 541 bp, Cannabis indica
atataaaatgcaatgaacatactattttttttttttttttgaaatggaaacaatgaacatactattaaatgataatattaaattaaaaatgaatttcaaattaatgaaaaatattatatctctcgagctaaacatgttatagatactaaattacaccatgaaacatctatacttttgttcttagtttgcatttagttgaaggtaataaaataaaataaaataggaaggaaacaaatttaattttattattttgtttggttgcattttaaaatattaaaatgtaatttcaatataataattttttttattattttagtagaataactattctatttaaaataaaaagaaagactatttaaatagaagacgagaaaaaaattaataatattttagcaatttttttaatgaaaatataaaattactcgtgtagatttttattaaaccaatataacagactttaatttattaattgagaggaatataaaataatactcataatttacctgggatttttcaaaaatattttttttatattttattt

SEQ ID NO: 314581 - DNA, 1224 bp, Cannabis indica
ttgaagcggggacgttacagtacaagacttgttctgtcctcccaaattattccttgggtcataatgatgccaacgataacctcctgaataggcttggtgagcctttagagcttggactggatcatgtctaagaacagtctcctgagttggagacattcgatgtgagatcacagggagacagttgggtctctctcgcttccactctttcgaatgaggcctttagcaagattcttgctcgtggcctagtaaggggtgtccattgtgagattcctcgtagaaattattgggcgaaccgactccctctaggttacttggtgtggtttgagggccatattttgcatggggcagtgttaccgcttcatcagtattttctggaaatcgttgcttatttttgcatgtgtcggacacaactcccgccaaaaagcatcaagtacttttcggaaatgtacgtcttatatagggagctaggctggcctcatcctacaccctatgagatcgaatactactttgatctgaagtcttcactgaagcaaaacaagactagggatttttatttcagtgatatcggtctccaattgttgggtggtaataattgcacagccatgtcgaaggtcggtgggtaaactaagaagtactttattgcctatgtgctccgtaggattgggtactacgaattttggccagtgccattctttagacgctctatcactactttgcaaataagggataggggaaaccacatccggtctttctcggcagagcaaagaaatatagtctggttgaccagtgttcccaatttctaaaagtatagcttaaatcctcctgctcctagagttgtaggagcactagctgtagatgaggcatgccttggagattgtgcaagctcgtgacttggatgatgaggtacctttatctcgcagtacacataatctagagaggaaggagaggtcctaccatcggcgcctggccagcaggggtgcaattggtgatgcttctctctatattgggcttaaaggccaggcttgtgagagacctactcgcctcgtgcctggatctagagacaagggcaaggcagttgttgaggactctgattgttcctcttctgatgatgatggtgtttaatagttgataacaccatgcttttatcttgtattgactgtttatgattactttctaactttgttactttctttctgcaaatatgtcttccaggctgagaggtct

SEQ ID NO: 314582 - DNA, 1282 bp, Cannabis indica
ttgcagtaggttcattcaatctcgtatcttgagcactcaactattgtgtatataactgcaatactaacaactcctttaatcgcaaagaaattgttattactaaccaacattgatatgatgacgagtcatcgaaaaaataagaagaaccaacaacaaaaaaaacaaaacaaaattatgttatacagacaaactaaaacactcaaaactatgtcacagagttaaactaaaacactgaaaactatgtcgtagagataaaactaaaacactcaaaactatgtgaaaactaatcgcagtaggaaaaatcgaattatagtagcaaaacataaccccgaccaagccgcactttagcccaagaaaggcgagggctagagaaaaaaaaaacaacctctattatccatttagaaatcagaaaccctaatttttctttaccctttggatataaataatgttagttaagaaaaacggtgaatattgaatcatttattacatatatgtatgcaaaacttcattacaccacatacaaaattatcatggctaaattgcaaggaggagatcatcatgataaactaacatgtaccaaaggaagaggaacgagcaagaatagatatctacaaatactatggtaaagaatggctaaacgatgaaaaagactttttcttttatcaacctcaaatatttatagaactaaaactaaacaacgaaggttcatagatggagacaggagctccaccttcttaacaaaaatgaaaccaacagaacttagggaagcttccttagtaggcaataagagttacaatctctagaaatatccaatggacgcaattatataaagtaaaaaactcatatctggatacaaaatcacgggtgtgccaaatttttttcatgtataatatatgattttctgtgtttactattaatatacttggaaatattactaaatgtagtttgaatatgaggcattaagtctaattgtagtcttaattagtatatgtttcttattcactagaaaaataaaaccaattaagaaaaaaggtgattattcaatcatttattatatatatgcatacaaaacttcattacaccactcaccacatacaatattatcatggctaaaatgcaagaaggaggagatcatcatgatgaactaacatgtagagcaaaggaggaagatgaacaagaagaggaacgagcaagaatagatatctataaatatgtatttgggttcgtagaaatggctgtagtgaaatgcgccattgagctgggaatagctgacaccatcgaa

SEQ ID NO: 314583 - DNA, 678 bp, Cannabis indica
caagcacatgaattctctataaatagagatagagaattgagggcttattattcaatagtataacataaattatatatgcatgtcaactagtctcaacgtttgaatcctactcagaggtccactagagatcagaaattattgaagaaagaacaagatgtttcttttctcccttccatgtgattaagaaataaataaatagttaaaatattcaacataattacacactcacaaaatatcatctcaaatagataattcaagtcagcaaggtaagctctatctcaggagaaggaagcttttaggtcgttaatctttgttttcattgatcagagttagcaccagtaaatgtcacttttgcaggagcaattttgggccaggaaacacttacctaagaaaattttggccctattttgggtaccctttgccagaaacttttgtcgacgcacttgaccaaatgagccagaaaaataacaattcttgtagtgttattgttgacctcgattttagccaacaatgttgagtcagctaaagtgatgaaataataaataataaataataaatttaagcaaataagaacataagatttatagagatttggtcccgtgattatggtaatagcctaatccccttttttcctgtattactgtaacaccctaactagcataggcgtattacgtgatt

SEQ ID NO: 314584 - DNA, 1221 bp, Cannabis indica
taaacaactgctaatttccaaattaactaagcgggctttacaatgtgattgcttctgttatggatatgggacctactgttacagcatagcaggttgaatttctctcagctcactttacttgtgaggaagtgaagaaagttgtttttgatattcctgggattaaatcaccaggtcttgttggatttgctagtttctttttccaagataattgggatattgtgggacctgtggtgtgtgatgcagtactttctttcttggagacatggtagattttaaaagagattaactttgcagtcctcactttggtgcctaaggtcaagtgtccaaacacagtgaaagacttcagacccattgcatgttgcaatgtcatttacaaggtagccacaaaactcatctgttctagacttaaacatattctccctaagcttgttgcacaaaatcaaggaggatttgttaaaggaaggtatattggccacaatattatgatttgccaagatttgctcagacattatggaaggaaggccaacaagcctagctgcatgatcaagttggatcttcaaaaggcttatgatacaattgattggggatttattgaggaaattttagtagcttttaaatttcctactcaattcactcaacttgtaatgaaatgtattaaaacccccaaattctccttaatgtttaacggagctttacatgggttctttgcatcccagaggggtttaaggcaaggagatcccatgtctcctttgctttttgttttgggaatggaatatatgtctagaattatgaagaagattggaaagaaaattggcttcaagtatcatgacaggtgtgagaaaatgaaattgaatcatcttagctttgctgatgatgtgcttttattctgtttgaagactatagcagtgtgatgtatcttcttcagggtcttaagcttttctcaatgacatcgaggttgttcccaaatgcaaccaaatctgctatatattgcagtaatatgcctgatggggatttaacaagaattctttcagcttctggcttttccaaataggtacttccttttacatacttggggattcctattggggctcaaaaaatttcgagtgaagactgtgcaatactagctgaaaagatgaaagggaggatcagaacctggagtactaggcatctttcttttgcgggaagagtagtgttgatcaactttgtaaagcccgcttagtt

SEQ ID NO: 314585 - DNA, 818 bp, Cannabis indica
aaatatattcagatgtgaaaacataaattgtccagtatttaaatttagatatgacatcttattaacatcttattattaagatgtgcattcagattcagatatctagatcttaaaaaaaaactaatgcatcctaaattagttataacataaataatttactttttcatactcaaatgtagtgattttttttaatattcatttagatcaatattgttaacctaactcgttgttagaaaaaactggaaattaaaaattctgagcattggcccaagagggcttgtaagatttgtaagttaattaataaaatagatgctttagccaaaggacaagaaacatatgttttgaaataatgaaataatttcacttaaataagttacacatacaaaaggcttctctatataatcgatgtggggctagatgagtagaaagcaacttgtttttacctagaaaataataaagtgaaaagataatagtctctcagtgatgattgcaatagcataaaatctagaaaataaaaataaaatgggatgagaactatgaagagtggtttaaggctatctccaatggataatatattttatgttaaatttgaactagatatattataaaattatatttggtccaatttttatatttgtattctaatgcactaagtgaaaattagttataaaagtcaatcttatcatgaatgcttgttgaaaatatacaaaataattaatttatttatattattttaatatcttataaatataaaaatcttttttattaatgaatagtattaataagtgacaaagagataactaaaaaatatggtattt

SEQ ID NO: 314586 - DNA, 877 bp, Cannabis indica
ttatttattattttcataagtaatttttttaattattatactaaaataaaattaaaatagtcgcgcgaaaagcagctatattacctagttttagatataaaatccttattttttctttcttctttagtctatctctcaccgctcctaaatctctattttctccgtacactttcatcattttttctttcaaattttttacttttctcactcaaaaatacatatacactataaatgtaggagtttatgatataatacactaaattattatacgacactataacattagttatgatataagtatatattatttttgaaaatttttttatacattaatttcattattattacttattattcctaccggctaactattgctaaattgtacatggagacgtggtcaaattattatcacaaattgctaaaacttactatttcacattgcatgtatcacatcacatatgatccatatattattaatagttgaagtttagaaatttggtcacatcctatatttatagttgtagttgatccatatttatcatcgtttcttaattacaataattttttttttggatagaaaataattaattatttggtcaagtcaagtttggagtaagcactacaccacaccaccatgctagcttagggggggaagtcaaaataattatcatggccgacaacataatttatttgttacagtaaatctttcctttttttttttttgaaaccaagtaaatctttcttttgaaaaagataaaataaaactctttccttttgataaattatattattctataatttaaattagtgttattaatttatggacattttacataaatgtatacattttttttaataattacaaaaaatgtgcaaa

SEQ ID NO: 314587 - DNA, 2186 bp, Cannabis indica
gcaaaccgacagaatgctgagttggaacgtgaagaacccgcaacaagggtggcataggagaataatgcacaaaatgaacctgatcctagagtgagaagaccacgaggcagacctcttggttaatgaaccaggagacaagagacaactcaggagaacccttagaaccctctggaggaacaacttggggaaactgagggtctccttgaaaatgaacaaccaaatgatcaggccaagccttctcatagaaatgagaacagaaggcgacccaaaacaaagacataggaaatccctcatcagaatgagggaaatcttgggactcaacctgggacacgaaggtcaccaacgaggcatcacgaatgtccttctcaaaccaacattgaaggggcacgtacaaatcccagcaaaaggcacacaacaaaccatacccaagggagaaggacgagacgtgaaaaggcacacaagaactcgtaatcgataaacgtgaggaggagaaagtagtcgtcgcaacaatgatcgagaaagcaaaggcacgactaaaactgaaggttactcaatgacaaggtccatgagcaggacaagacccatgagtaaggacaaagtccgtgggtcggacgaggtttgctagcaattataaccaactgaatctacgtgatcacttgaacctaaaaaaacctgatctttgccaataactcggtccaaagcaagaagatcctatccaattacgactagatgagttggaggaaaagttcaggaggtatcaagtcaaggaacaaggaaagcagtctggatgtgactcagatgaggaactcgagctattccatccagacttcatgaataatccattcccccagggattcaaaaaccctcacgtctcgtcatacgatgggaccaccgatccaatctcgcatttaaataacttcaatactataatgcaaggcagcaatgttacaaacaatctacgctgtactttgtttcctacttcactagttggagtagcaagcatctggttaaataagtttacttataattcaatcatttcatgggaatagttttctaaggagttcaaaaagtagttccaagccgcaagggataggcgacctgaagcgtcctcactcaccaacataaaacaacagcatagtgagattcttaaggcatacttaagtcattttagcacagccactgtgagagagagaaatttggatgacagtactcagcttactgctcttcgggtagggatcactactaatctctccaatgctagaggcaaactatgggatgatttatagggtcgtctagtgaaaaacatgaccgagttcaacgaaagggctcatgtgttagttcgaaaggaagaagctcaaaaagagatgaacttgttaaaaagttgctcgggaaacaaacccagcaacgtctcgactagtaccgtcttgaccaaagctgataacccaggagcctctggttgaaataggaaagacgactctaaggggttagctaaacacaaaaagaagcaaaagaagcatgacaagtacgtgcccatctacaccgtttataccaagcataatgaaactcgggaaaacatctatctcacgcatgagcacaaggttgcatttagtagaactgagcccatgagacacgtgaggcataaaagtgatccaacaaaatattgcaagtatcacaaagacatcgggcataggacagacgagtgtcatcagttgaaggatgagatagagagtctcattgcgcgaggccaatttaagaaatatgtgaaaagacagggcaatggacataaatagcccaatccacccaataacccaggcaaccaaggattacaacctcctcctattgtaggagaggataccatggttatctcgggagggccacatattgcaggagagagcaatagtacccaaaagaggtacgtgaaggaagtgaagattaagcagtctgcctttaatgccgaaccttccaataaagtaaagactgaagaacctccaattatattttcagaggaagatgaaaaggacgtgcgatatcctcacgtcgagccattagtaatcaacatccagctcgccaataagagagtaaaaagggtgctggtggacaacggaagtttattgaacatcctttatagggaaccactgaagaatatggggcttgaaaaagctaaattaagaccttgcatggtaaat

SEQ ID NO: 314588 - DNA, 876 bp, Cannabis indica
ttgaccatcaacttaaatacatttcccctcaaacatcgtgggtactgggtagtgaagagataccctgtttattgacagtccattattctggtcaaattcttcaacttgaattaaaaggaaccattttgtcttcactaagaacccataccctcacatgaaaaccatattcgtaccccgattaattattgtatcaaaaaaatcaaaattaaatttaacagcataccatttcacctctacaaatccaacaaaaccgaaacaatgtccatcatactaaaagtaaataaacatgcaatctaaattcgaaattctaccaagtaaattaaaaaggaaaattcccaagtaaaacaaatactcctttcaataaatgaaaagaaattataatccagagtctaaacatgtgtaaaataaaaaatagtggtgattgtgaatttgaaattagggctttgaagaagaacacttacggtagaaaagggaagaaggaaggccagaaattccaagcagaacgctacgttgcggagttttggtgatgatgtgttattttgcgctttcgaatattaacaaataatttttttattatttaaaaaaaaaataaaatagccgcggaggcgacaagagaatagaaaatgacttctatccacctgtccagtgtgcgccacacctagttaccacgcgcctacttttgatgcatctccctccaaatatttgtaatttttttgtgagaattacctatatattacttttttttattttttttttaaatttatggtttgagtttctaaagtggttgcagtgctagttgtaatagaaatttttgtgcgattttttattgcaatttagattgcagtgctagttacaatagggatttctatgtagaat

SEQ ID NO: 314589 - DNA, 1152 bp, Cannabis indica
gataactaatcagattgtaaagagttttatttagggcataaaacccaacaaactcccacttgcatctgtaggttgtcaaatggtgcctctttccttagtacccttgctatttcaaatgttcccaacaaatcacaattgtctcaaggggagtacagattgaatgttgatgctgctcttgattttaaaattttttttgtacaggtctaggtgctgtggtcagagactgggatggtaacatggttgctaccctctcttcacccaaactaggagcttcttctcccatctttgcaaaaactcaagcccttgatcatggcctcaactggtgctcaacaattcaattgccaattacctgcattgaattggattatcatcagcttgtcacgaagattaacaacaaatagacagatcggtcagctcttgtaggtctcatccaaaggataattcactccttatccaccttttctaaatcttctcttcatcatgtgctacgggaccaaaacatgtttgcgcacaatgaagctcgagattcttcacgcaaagatagagagttaattcggagagttgaaatgttctcttagtattagttgtaattgtaactcatctattttgcttttgctctctttgttgtaattactcctaaaaatgttgtagtataacttaatttctacctttctctttctcttgtgtacgttctttcacttttttttttaatgaagtaatgactattattgactattgtagttgaaaaaatgggttgaagtttcttttcaaatttgtcttctctctactacttatctagtctgctgtaagtcttaccattcatcacgtaagaaccagatcatgcagttgcaatatatatatatgaaaaaaatttcaatggttatatcaaatgtaaaatcatgatggttacatttatttttagccattaaattactattgaatagttgtgatacatttagaaatttaataaaaataaataataaataacttgtaacctaatagtaaattgatattttatttccatattaaactttaattaaaatcagctatatttatttttctcattgtcacatcaacgtcttcttttgtgaggggttcgagagcagtcgtttgagggtggttcgattcggctcaacgacgtcatccgtttca

SEQ ID NO: 314590 - DNA, 703 bp, Cannabis indica
gtcttttcaccaattagtagaatttaaactctaatacctgggacctgaaacaagtaaaatcaagtataacaccattctaaaaaataacattaacaaaagaaacaactctaaaatcgactcgaaacttagactaaagatagccttaacaatatccactcttgaagacattctattagtttgattttgctcattacgtattcaatacaataagaatagactcatatcatcacttgttgtggatttcgcagtggtttgcgatgagttttactgttcctttcaaaccatattatccaagttgcaattaacatttctttataagattccttcatttctgatgcatacagaatttcctttcaaaagatatgctaaatcaagttgtttaaagtgtactttcaagtgaagtgtagaaatcaattgggtgtagtagcttaagagaatcacaaactcacaaacaccaataacatgtacaaaaccaaccattttagtcttcatattgattaagtgtcagttaaagctacctaccccaacaaaagaaaccccttcacatgtggtaaattgtagctaaactaattaattacaacagcctattcttgagaaatcccattttgtctaaatatggtaactttaatctcaggtttattcttgttgatcagctcaaagatgcattcatcatttggctgaagagagttgtctcttgcaaatg

SEQ ID NO: 314591 - DNA, 969 bp, Cannabis indica
ctctctctctctctctctctctctctctctctctctctctctctctctctctctcaaacatgagccctagacacttagtctgtctctcacttgttcagaatttctcatacatcattctcaatattgtaacattcatagagagtcatactagaaattacaaagtaaaagcctctaatatgtgtggtgttatctctcgaaataatacaactacaaggggaataggtcattacccgctaaacaagggggtcgaacgtctataaattaatgtgccaattcctttatttccttatattatttacacgtggtaattgtcaatcataaataaagctccactattagttgaccaaatctgaggtcaagaagagaattaaccagatttgggaaaaggacttcgaatttgggcttttgaggctttatgattgcggtactgaggttcgtttggaccataggtgattgggaattagtcatcgggttaggctaccatgaatgacgagctcaaggagagagaaggattgaatgtctaaatgagcttttatgatttttatgtggagaagatgaaatttgagtttgcagttgttttagtgaaatgaactttttatgtagttattttttttcctttttttaattttgatttttgatttggtaagtctatacgaagcttaataatttaatttttaatactctgtaatttatgtctgggtttatgtttgggtttaagattgttattttactatttatgtatatatatatatataaatacatatatacttttatttttaactatatagaaactcagttatatgtatttattatattaatataaaaatgttcatattaaaagaaaaagaagagatgaatgaggataaagaagaaataggtgaagaggaaaaagaatagtggtcaggtttgagatagggttagtgtgtgtttatatatatatatatatatatatatatatatataagtatg

SEQ ID NO: 314592 - DNA, 903 bp, Cannabis indica
ttactatgtagatttgtgtaaacaaaaacactactttaaaagtgaaaatggaaaaaaattcaaatatatatactaaatcagtattttattgataaaatcctaataattatctagccaaaaatttatattcactaatgatctatatacacacaaattagagacacttgcacactatgacactttatttaatatgagtcttaggcctcgtttgatatgttgtatattaagtcttattatattgtattgtattatattgaattaaattatatatcatatttttatataatactatgttaaattttaatttatactaaaatattatatatttaggtgttcataaaagtcaataccacatataattttatataaaaatattacatcaaatataatttaatataataatatacagtacgatacgatgtaatacagcgtaccaaacaaatcctcactaaataaaataatttgacatataacttatggatgtacatgttatcatatcctaattttacgagtattgttattaggtatcagtatatcatgatcgccaatatttctataagatgatatcttataaattgttaattagcaattttttatatttattattaaagtaaaataagtataactaaatattaaattacactaataacaatacgacacctctaaatattttaggttacatattctctagtttcactttcacatatgctagattcttttaaactttttcttaattgttttttatatgtcatatatcatagagtatcaaataccctaaaatactttataattgatatatgagcattgttattagcagggccggccctgggcataggcgggctaggcctgtgcctagggcctacctagtccaggggcccaaaaaaaaatttttgcccttttaaa

SEQ ID NO: 314593 - DNA, 785 bp, Cannabis indica
ggcaagagatgttttgtttactatttagttttagacaattatattttatgctacctttcgattatgtttattccaacccgtaattgaaaatactatattttggtagatgatttaattttattgaaataggataaatgaggatatcgtgtgcaccaattgcagtattatattcagttctttaaagtaaatcatgatattatagcttaaatcaatgtcattcaatcaagcagcatatatttcactactactagataaattacttgaaattagagttatgaaatgacttaattttttttttaaaacaaatgactcagctatatgaaactaactatgaagcatatatatatatatatattataggggtattgaatatttgatatatgtctatttgatttgaattagcatgctctcacttgttttttttttctttaataaagttgtgtaatattaatgtttaacaagttacagaaattaattttatattatttttaaatttaatatatatatatatttgaaaatatatgtaaaacttaatggcattataattttatttcaggtataattctctcaatcagcattaaagtggctatttactaaaagtgtgagcttcctatttttatagttcgtagtggctcacctatgaaggtatgcatattttaaataaaataattatttttatgttagagttcttagtttatttgtataattgtttgagtaattataagttgagttgtagatttaaaatgttatagactaggactgaatagttgtttgtataatatatt

SEQ ID NO: 314594 - DNA, 1374 bp, Cannabis indica
gtgatcagaaaatttattcatccgattaaatctgtaagcccactcttatcctgagtgttgaggctagtctgaaaaaatgtggtgtgattcttcatacaagtccattactggattggatgatcgatataatacaaaatgattcaaggaaattctgataggcaacaagagataatttcctaatctaactagttatttttttttcttaactctaactagttaaattaaatttatgcaatattgtgttgagattcggggtttaaggttcatatcagattcaacaaaatattttattttttttaaacctgaatccaatttttactggctgctactctcatatgaaccctaaaaatcaataaagacagcgttaatttcattctgataaaacaacagtctgtaaaaatatctataaaaaaattaatttcaagtgttttgtattaatttctcatataaaaaataagttaaataccattttagactctatgttttgtaaaagttattgactgaactctcagttttgtaaaatgacaaactagaccttgtatttttcaaaatagtacaaaatagtaccctgaattgaattttttgtaaaagtaaaatttaataataaatcgatatagatatgttatgacataaatgatgacgttttctacatcttttcgttttagaaattgtcgaaaaattaaaatcaaggtgttatttgtactattttagaaaatacatgatcctttatatcaatcaacaaaacagagagtctagtcaacaatttttgcaaaaaacatattcaaaatagtattaacccaaaaaaatacacaaagtcttacatgcacaatcaaataactcatcgaattgttaatagaatttgacaagatatacattctaatatggggcatatttataaaataaaccaccttaaataataaacattacaccaggtaaaatatgcacttcatatactttgggtaaacttttccctcccattcaaacaccctctctatctatctaaaccaaaacttactcaaaaagtacacttaaacacgtaagaattttaaatacttttgataatactagtaaaaaactacgtgcgaggcacgtatactaaattttatgttaggtattttttattttatttaaaattgatacaattaaaaattaaagaaaaatattattagttattaagtgagattattattatgtatatttaaataatataatttataattttgacaattaaaagtaaatactggatgcaatatattagtgtttaagaaaatttgataatttaatgttcaaaaacttaaggaaacacaaattaaatgtgtgtaagataaaaaaaaaattaaaaaataaaatctctaaattgttgataattgaaga

SEQ ID NO: 314595 - DNA, 1622 bp, Cannabis indica
ttttataaaaacacaatattttaggaaaaaaaaaaaaacaaaatctgtgtggcagtatttttgcaaaagttaacttaaattcagtatttttgtaagtttctctaaaatttatgatcgtaataatttctaatacaatatatatgaatcataatatttaaccattagaaatgctctatattagcttgtattataatatttagtaatggtcgaggtcaaggtcagaaaacgggatcggatccattttaaggtacaggatttggttctgggtcaagctcaagattggactccaaggtttttgagttcagagtttgacggtcaggcgtggtcaaggtcaggttataagaatatcttttaaattttatacaaattattaaaacaagtcaatatcaaatataatatgatattaaaataatattatataatacagtagaataaaaattaaaacaatattttttttttgaatgaaaataataactttattaaatcaccatctttattaccaaattaggcaacaaatcagttgcaatcagactccaaactaaaacaatattattcaatacattacaatataacaatttaacaaggcagtgtgcttaacagactaagtggtaatttaatttgccattagaaataaaataaaattataatgattagaactacttaaataatctccactaaactacatataaattatatacatatggtcaaatataatataaaaagatggtatattttgttaaaaaaacatatattagtactatttaattttttatatatatgtttttacattatttatttttgcttcacctttagttgacacgacctccatgaatttccacccacattttttttatcatcttatattttcaaaacatgtttattctcacatttatttccatatatttattttaatttttgaagttttattttattattattttggtgaacattctttttaactacctaatttgtttttattattaacaatagccacatgcaccgtaacttaaaacttatgtaagatgatatataaacaaatcactaatcaattattacacagttgtgtcttaatcgaattttaatctccatattcatatttaaagagacattgacacaatactacatgaattatgtgatttgtgatacttaacttacaaactaattttatagtccaaactcacatttccttttggtatttacttttacatccaaaacactttaagtgttgttgactcctaaagattacttaatgtaatatttagagtcattagtgatatgtcccaaaagtttgccaaggggagctccacgccgcccagcccgcacgcccagcacgcgctaggcaccagccctgcgcgcccagcctaccccgcgcctggtctgcccccgccccagcctgccccgcgcgcccagcctgcctcaccttcctgacacttgcagaattactgagatggtgtcagggggacaacgacaactcaacctacttacataataggaacaaattctagttcgttcgagttacaaaataaaaggagcttttttggtataagttagggtcctagacatgacaggttgcttaggagatagtgtaatgataggtgaaagtgatgttgggttttatgccc

SEQ ID NO: 314596 - DNA, 634 bp, Cannabis indica
tattcttgtgatcaattatggcggttctttaagagcccgccgagatagagaccaatctcggcacacacacgcgggcccgccgagattggtgtgtcgaaattgcctatttttcttgtagtggcagatattttgtgtcctatgttctcgcgtataaaaatatgcatataattctgtaatttaaaattgtgcataacttaaaatttagaattgacctaacacatgtccataatttgttctgatctcttatgtatgtttaaggtaggcatggcaggtcggttgcaaaggaactgactttccgtgtacacttagaacactactataacaataggttttagaggcccttatttttgctgaaaagtaaaataaggaacgacataggatcgttaatctgttaaagggttgtaaaatccttatggcgtcagttttttagaaataaccgacgctatatatagtgttcccctatgtcgtctgtaaagtccttttttggcaagttaggtgtcaaaataatttttcctttttatggtaagattgctttgcattaattttcgaaatcttacctcttttattcggttataagttgcctctttccttgtttggaaagttgcactttcagctgaactttcctttgttgaaa

SEQ ID NO: 314597 - DNA, 609 bp, Cannabis indica
tttttcctcatgtcattcaaccgcaagaggcactcatcctttcttgctaagcacgctttgccatacataaagaggagcagagaacacctccaggcataccgtgtggttagcacgcaaaaggaagtaaataccataaatatccctcgaagaatacagctcattaaggaaggtatccttgattgcaaaatcgtaacacgtgtccgggatcaacattcaagacaatagcaagttttcgtgatccaaggtgtctcgaaagcttggggggtaaatgttatctaagttgtccttccctagatacatgggatgatcagggtagggaaacactttccacatggggcgcccaagagaagtaaaagaaatgactcccggacccaggaggcggtaagatgtaatggcttctgggagtggctgttgggttttgtgccctaaataaaagccattaacatatgaatttgttaatgattatattgttgtcatcaaagtggaatataatcttaattgtatgttcgaaagtttattccctgatttgtcagaacaaatcaagcgtagtagtagtaaactcctcataataggatctgaaaggttgaattaaacacaaccttttctcca

SEQ ID NO: 314598 - DNA, 2011 bp, Cannabis indica
ctcagtggcgaaacaatgccccttcgaaaaagaaaaaaaaatctctattattttaaagtgagactgcatacattggatagcgacaattcagggatcgtcagatattgttttatgtgcacaaatcaaataggattcttcaatgtgattcaaaacagttatttgtatttgtaagttgaatgttgaataaagatttattccttttacaagtaggcatgccatgatcaatcaaagagattgagaactggtaacaaatatagaaatttattgaacaaacactgaacatttgttacttatcaatgtttatttgattttaaggtgatttataggacacatttttctcatgttgattgcaagttttggggctgatgacttcaatttgcatacatatagacaatggacttttttaaatagaaaagatcacattccaccacactagtttatttcaatcattatgtgatttaatcacttttcaaaaaatagaagcaagaacatacatttagtcgaaaactagaaaacagtgacttacaaaattcagaagatctgacttttctccagcaagatgcgtatcatgattctttctaccacttacaatctctagaaccaaaatcccgtaactaaacacatctgtcttcacagataaaaatccacgcattgcatattcaggagccatgtaaccactgcaaggcaaaattactatataattagtgaattttaaaatatttgtgttcttggttgacagtacaagccaaagatgtaacagaacaaaattggaataatcgtctaatacactatggcataacgttagagttttgatctaaagcaaatacaaagcacaggcaagctcgagaaactactcaccgagtaccagaaatcctaaatgtatttacatgggtgtcctcgcctgggaagagtctagccaagccaaaatctgagattttcggactgagtttttcatccaacaatatgttactagcttttatgtccctatggatgatcctttccggagcttcttcatgcaggtagagaagacctctagccacacccataactatccgaaatctagtcgtccaatccaaagatgcagacttttttttatctgtaaatatttcacaacacctgttagtattagcttttttcacgtgtgccaaagcctatatgaaattctttcgcagcatacaaaagtctcaaacattaagtatctaaccaaatagaaaataatcaagacttttgtttggcaaatactcgtaaacgagcatcttctctggtccttccacacagcatcccagcaatgtcaccaagttcttgtgctgaagtctcagtaacaatttcacctcatttgtaaattctctcactccctgtcttgaagtcagtgatagcttcttcacagctatttcttgtccattggacatcagtccctgcacaaagttgatatgatattgagggaccataaaaagtgaaattgacattatctattaatggcaacagaacaaaacatttcttatacaagtaaagatgctttaaaagagagctaacccaagagccatgtcaaaatggtattactattaaccaccaacacaagttcacaatatactaaggctttaaagaacacaataaagctattttatttttatttttttgtaagaaaaatacatacatagataaagagagtaaaaccaccttcaagttttactctatttttttcgaacaagtgttactctttattgaaataatttccatgtaattatagttttattttattttttgtctcgtgttataaataaaattaaactccgcattgtatgtaataaaaataacagttgaggtattacctctgcatggtaataattatctaagaattataaaaacaaaaatacaagttatgttaaaataaaatatttatatcaaagatgcaatattgggacttccttgtactatggggaggaataaagatgcaatattaggttttctgaaagataagatgctcaagtgaatacagagttgggaaggtcgt

SEQ ID NO: 314599 - DNA, 934 bp, Cannabis indica
tataataatatatgatatgaaatgggtcattaaagcccacaagtgggggctaagtagatgtattataagcatgaatgaatgcgtaattattgttaccatattttacatttcatcattaataatatttgcctcttttgttaaaacttaccaaatgagtagcaaacttaactctttaggatgtacaacttattaacaatgcattaaatggctcagtgggaagaggttactgttatacttaatatggaagttttttatggtaaatagtaaatagtaaaaatgtgtagcaaaccgtttttggtttagacaactgtaagtattaatttcctgttgaccaagtaaattaactccaccaaaatataacgtttgaaaacaagttcatgaaaatgatgcatttcaaatcttaaatggacaataaattaaaatgataatgctagcccccacaatatattaataaaattaaattaatgttgtacacataataaattgttttgtcaaaaaaaaaaaaaatagtaaaatgtatgcttattgaactgattgctaagaaaattatttttcattctttgggttataattaaataaattttgaaggggggaaaacattttaaagaaaaattctcaacactttaaggtgtctgtcttaccttacctaatataattccgtggtgacaaacaaaatacattttattaatttcacttgtttcagttatagatattaaatgtaatctcctccttacattacattgacctaatatatatatatagggacatgattttgtcccgtagtgtattttacggaatgtattccatgaagtcattaagtgatgtacagtagtctttagatgagtttcagagtacgtaataatgggtgttagggtacattaccattttttaactctaattacctctagatcaaccccaaccctcagatcaaata

SEQ ID NO: 314600 - DNA, 1686 bp, Cannabis indica
tttttaaaaaaaattcatgaaacctttgtttatacactgatcaatacatttatcagggtaacaatatttcatcatcatcaccttactcattgttcagttgcaacaaaagaaaagaggggcaaaaaacagcttcaaaaagacacacacacttagaacaatcagagatccactcactcaaaatcaactctttcaatcggatttggttcaatcaacaatcgttatcggtaggaccagtcctaaggtatatgaggcctaaggcaaaatcaaattttggggcatctatatatagtttaattattatcaaaatgatagttttagtactttagtgtaatggtaaaacttacaaaactctaaagagctctaaggttcaatccttcatagctacacattaaatattctttaaaaaaatagaaagtatccttgactcttaagaccctctaccactacactaaataatatttttttctattttcttcttatttatatattaatattttttttttcacaatttttgaggccctgagcgttcgacggcctaaggcgtacgcctagctcctctaccagggtctgccctggtcattggcaacccctaacaaaatgatgaagtttcagctcgggacgatggcaccagtattgcgagcatttgagaaccccaatgttggttctccttcgcgttcttcactctctctccatctctttctcgacttctctcttcttaaagttgaacgaagatgctctaatcgtttgtgacctaaacaaacttcaccacgaggttcgcaacccttaaaaacccctagatttggatttctaccgctctgtctccctcatcgcagtgtccctctctaattgtttctctttgcttgattttggacggagcatcttgacggagatctaggcaaggatttgatgggacacctggttttggcagagatttgggcaacaccgttattctcggcacggtgaagaccggtttagggaaaagtctttccttcttcgtacatgtgagttaatttttattgatggtatctcatttaatgtttcagtactcaataatttagaaatatgaataaaatttgagaaaatttttgaagctcaagtgtgttttgtattttcttttttttagtgggttttgttactattcctatatgttcttgttattttgggaaatttaggggaataacaaattaggaagaagttatggaagatgattgatgatgaaattattagagtgggggttcgtaatttttaagtatattttttaaattatgtttaattttattttttatatatctaaaatgactattaatatatttttttaaaaaaattttaaaatgattgtaaaaggtttaaattgatttttaaataaaaaaaatttaatggttagagtgacacgtggacagtgacctgacatttaatggccagaacttacagaagttccaagaccgcaaaattttttacttaggcatcaatctgcaaccgaaaattaaatttaaatattttcaccgtaaattatttttcttggatactttcaccgtaattttactacaaatattattttaatttaagtaattttacttactaaatttcactaaaatatagataaagctactcttacttttcaaaaataattttatacattaaaccgttacaaatagtaacctagtacttctttttttttcttttttt

SEQ ID NO: 314601 - DNA, 1009 bp, Cannabis indica
gtgagcggctacggacgggaaaatatctagaacgccggtggtgtctgttttattttaaacaattgataaatctaaacacaaaggaaatgtattatttaaaatgatttacttatcgtattttgctttacaaatgaaggatccttctctattgcattttgatttctaaaactcattattgtattttaaggattttttttatattctcaaattatgaattcaaaatagtatttttgtaaaggaaggaaaaaatatcggggcgctacaattggtatcagagtcaatcgtccgttagctcgaagaatactcatagtatacatacacaaaatcaagaaagagccctctcactatgtcgtcgtaagtattctatgattagttagaatttatgctgataatgttgtatagcttgcacgttgaactagtagcttcttagaattagtgctcctatggatgttttacttagtgaattacgaaaaaaaaattcttcttacagatagcttatgtagataaaggaagggtagcacataagaattgtttggtccatactcaagaaagacaatatcaacaccattataaactaaacttccggagagactaagatgggatacacaaacaattttgtgcctaattataagaaaacatgtaactaagataatatctaatatagaacagttctcaataattttctgatgaccacactttgatcactctttgcaactacctaatatgatcactaaatcaatgttcttaggccttaatgagagggactacacaaaaactagatatcagaattacttcatgaccaacgaagacaaacctagtataacatattgtcgaattaggaagaagatcgttgaagaatggagaatagagtcatgtaaaaaacgaaaaaaaaaagaataaataatttttagatttctttattgtcttaaactaaaattaggaaggaccttgctcctttcttaaaaatttagaataaactatattaggaattcataagactttgtttgat

SEQ ID NO: 314602 - DNA, 2003 bp, Cannabis indica
cttagcactatgtattaaatattgtttatttttaactttgacatttataaataaatatatataacctaaaataaaactaaatatacgtgcattgcacgtaaactttcttctagtatatatataaatatagatattcattttattgaaataatgccttgtattggccgctgaatgttattgttcagagattattatatataataatataataatatcagtgtacacaacaaaataaatatatattattatagtgtaacaattaataatatgtagagacatattatgacttaatattaattatatgatatgagacatattgtaataatattgaatcttcttcctcggaccatacacctctgtttctcgagccgtgtataaaactacaagtagctccaattaaaacttctaggtttgaaaacgcatggcttatggaagcaatgtgttatcaaatagtgaaagattgctaaaatgagattggcgacggggaaatttttaataaaattaaattgtgtgctgaaaagcttgaagagtgggggcgacattacattggtaactttaagggacggattaaatattgcaaggttgaattgaaagagttacagggcaaaaaagatgcagtatcagttcagaaatatggggaatttaaggaaaaattgtttgccattcttgatcggagagaaatattttggaagcgaagagccaaacaattttgactaaaagagggagaccaaaacagcaagtactttcacctagctgctagcaatagtaaaagaaacaatcagatccacaggttaaaagatgacaatggtgcttgggtggactggaattcggggatctccaaggttgtggtcgactatttttcaacacttttttttgcatctaatgttagttgtgatgaggtaattgactgtgttccaaaagtggtgatagagcatatgaacttggggttacaataaccgattagtgaagaggaagttaaaaaaagctgtgtttcaaatgcttccagataaaagccccgacctggatggtatgacactagctttctaccaaaaatgttggtccattataaagaatgatgcgatcaaggtggtacaacagttctttcaaacaggggtctttgcagaggattggagtgtatcaaatattgtgcttattcccaaaaagaaaagccctgagcatatgaccgaccttagacttattgctttgagcaatgttttgcacaagatcatcaccaaagtaatcactaaccgtatgaagccaataatggatcttattgtctccgagttgcaaagtgcatttattccagggaggctaatcactgataacatcatggttttctttgaagtcttgcattacctaaaaaggaaaagacaaggaaaagtgggattcatggcaatgaagcttgatatgagcaaagcttatgactgcatcaaattgatttttttagaatcaatgctttgtcgtttaggctttgatcaatggtggattcatttactgttacaatgtgttacttcgacaaggtatatggtgacccataatggtcgtgcaatggggtcgattattccaactagaggcattcgccagggggacccattgtcaccatatccatttattatctgtgcaaaaggcttgcctgctttactgaaaaaatatgaacatagagggtggctacatgggtataaagttgtgaatggagcaccaagggtctctcatttgttgttcgcagacgatagctacttgtatagtaaagctacggaggatgaaaccttgtgtgtgcaggaactacttggaaaatttgaagaggtctcaggacaaaaggtaaatcatgcaaaatcatctatcttctacagttccaataccactactgttgttcaagatcgggttagtactttgttgggtatgcgggaagctgaggagggaagcttattgtaacgtccccgcttcaagcctccattgggtccttacacccacggaataaatggctcttatacacgagtacgtca

SEQ ID NO: 314603 - DNA, 1086 bp, Cannabis indica
tttgactttgaaactaaaaagaaaaaagtttggccagtttgggcaggttaaccgaccaaaccgcctaaactattggtcgttttacagatttttttttttaaattgggcagattgcacttaaattttagcaacccgaactttagattagattagaaaatatataggataaatcgcacaaaccgaggtaaagtagcaatgctcttttagtagaagttacttcttgtaaaggacgagatattgatcatacatgggaaattgaattgaaatgagatgagatgatataaacaaaactatttcatattataaagaattttattttgttttatttatttttggtgagaataatgatatgatataaatgttagagagagaatgcataaataaaagtgaaaacaacaagagcaaaagaataaaagacatctcctcttttatggggttggacttattcttgggcagtgtttttctgctcaactaaggtgtcactgcctcaccacttctacctatttctatttggttttctttcttttaaaatgctaaggacaatcaaagaggtgattaacactataatttaattagttaattgaaaaatgtcactttataataatactacttaattttattttattttttgggaaaaagcgagaagcttatcgatattgcaaagggctagtttaggatagttatattgtggggaaaacagtatgaaaaaaaaatagctatagcaaaattgtgaaaaaaaaattaagctaagtatagcattagtaaataattaattttaaagtgaattgttaaaattttattataataataataatgttataatctagtttattctaatctaaatatacaaaaaaaaatatatgttatataaatttttaatttattatatatatatttttaattttttttctaatagtaaatatttatatgcatttaataaaatttataatatttttaaattatatttatcactgtaaaaaaaattataatttataaaaaactttaaattgtgtggtttgttaataataataataataatataaatataaataatttttaaaacaaaataaaaatcaagaatttaaa

SEQ ID NO: 314604 - DNA, 628 bp, Cannabis indica
gcccaaagcaaacaatatcatacattaagtagagatggttagtgtccgatgatccttgacaaattgttatcacagccaaatcccaacattagccaatgtgaatgattccttttaaggtgatgtgcctcggtgtactctcatgatgtctatggatgtgcttagttaggcggtgaactctgattccatctggagttagcctagtgaagatcaagaaactctcgtggtagtggtggacctccatgtaaggcgtgcattccaacacattagagaaaagtacactaattagtaaagagtttatatatatttataaaattaatcatactgacaccgttaaatttaacagaatattcttatattcttataatatttttttgaaccaataaaatattctgtgacttaaatttaactaaatatattatttttgattaacgtcatattgttaaaaaaaaaaaataacatatatcattttatgatatgtctcattacttaaaattcaatacattcttatttaaaggtaaatgttgataaatatgagaaaaaataagtttacaaaaattaattaaatttaaaataagatagagcataaaattgaataataatttgtaatttttttttttatttttgtttc

SEQ ID NO: 314605 - DNA, 964 bp, Cannabis indica
aatcaaaatgtgtgagactcgatattaaattgcaccaataataatatgtcatctcttatgacactaggaatcttaaggtatcccttagcattttttaatattaaattatattaatataatatttttagatagattggacactactagttttatccattcatttatattaatgatgttatgaacttcatgggttgtgggcctatgattaatgacacatcaattgtgttagtttggggacatttctaaagtatatttgtctagcaaagcaatggctatgagtatgacaattattgtggagcaatgtgtcactttctcatacatacctttttttagtcttaatccttagtattggcttgggttggtgttttgatgttggtttttactctccatcaatcctctttgtttgaatttgacacttctaagttctaacatacttttcttccttttaggctacattgacacctttattacatataattcttactacttaatttagtagaaataatttacaccaaccataaaatactttgaaaatgagttttaaatattctcattaattataattttatgtcttaagatgttcttaaatattaaataattatcttgttttgattaaatagtattaaataaccaaatacattttatgaattttcaatcaattatactattatatcgaaaaaaaaaaactttttattcaaacaaccactaaacaatacacacctagacaacaactaaacaaattagaatttggatatcgattgagttacattacttctttttttgttaagcttagaaagattacaaaatataattctatccttaacaacaatcttaacttggatactaataaaactaactgagctacatactttttttttgtaaaatgaaatatcaacttcaatgaaataaaagtattctgaatacaagagggccttcaaatcaggccaaacattatactcaaaaa

SEQ ID NO: 314606 - DNA, 818 bp, Cannabis indica
ataaaaaggcctgaaagcaggcgataggcttggggaatcagttggtacggcgcaaggccaacaaatacaaggaaatttataaaatactcctggaggggaagcatagccccagacatcaggtgggtctggctccaagctccaaaacccccgtaattatggttgggtgtctcctcgtccctaggcagtcggtgataggtcccggaggtcgaaggcttgatgccggccacaaccacaatcttctccagctggtgggcgcaggtcaaagtagagtggagctcagccacctcccacccgttggcacgggacttgtacgcttcctgggccacaggaccctgcatgacctcctccagggtggccaaacgtacttcccctttctttgaagacttagaaccggatgcgaaagtagacatttttggttctcaaaaaatcgaaaaaatccagcagttagacgctgaaccaaaccctaattcaaaaagggaatgggggtcccctaaccgctggaaagaggccccctccagacacttgccaaaaaagaaagccccaaaaggttttccttgacaagagttggatgcaagaatccgaaaggtagtgacattgaaaaaaactaaagagagaaagggaaaaaaaaggggaaaactaaaaaggcgaggtctactctaagccctaaagctgtcattacatgaaatgagaatgatgccctggcaaaaacatagaagtaaacgcaaaagagggagaatttaacacatcattcagaaactcaaacaaaactattcccaaaagttcaacatccaacctagaaaccgtaaagcatgctatat

SEQ ID NO: 314607 - DNA, 793 bp, Cannabis indica
agcttcaacaaatcgtaactgcaccctagaatatagggatatttattatttgtttgctcttttttacggagcccaatgtaacaaccccctataaatagtgaaagcattcaccaagggaggagaccgaaaaatcaagagctaaattgatactcacacatctaagagtacttcgctgaaagagattttctgtaaacactttgagagccgaagctagagaacactttgtgttccttagtgatctgctcgatattatctcaaaaaagtaatacaaccaaaaaaagagtaggtcattacccatacataaggggaccgaacctctaattctatgtgttctttatttatttgttatccttacctccaccttgatgattaatcaacatttatttgattctgacttaggtggctatttttccaatcgacagagctattgattaagtgtaattttcaatagaagcactatctcaataacaattagttgttgctaattccaaatcaaagcatttcagaccctccaaataatctaaaataacatagccaattcaatagtctacttcttattatatttattcgttcctcaaaaaaaattgcaaaagtaatatctccggaagaaaagagtctcaattcagttaaattttcacaagatttagcaaaaataattctcaactattagttaaaagtacataaattttggttcttggactcgtaccctgaaccttgacctcgaccgccacccttaacctgaactttgacatactaaattatgttccttgaattttcatcaatgttagatttt

SEQ ID NO: 314608 - DNA, 2456 bp, Cannabis indica
agtgacatttcttgtagtgttggtcttttcggatgaacatggaacaactcgttcaggcgagatctcattcagcatgatcagtattcaaaagacatagtattctataatcggacaaagccttcagcgtgtaactagaagcccaatataatatccattaccagatgacacaagatcatgaattacctttctataatctaggatggaagatcatatctcactaaataagaaaataaggtaatttgcaatcaagcaattaaagtgtcattaattttccacgaagataggacacggttttgacaactagcatcatggtatagcctccacgttagcatcccatgggtcgggctttgctagataagcttaaagttaatattatatttgtaaaacttttcattagaggaaaaatggtaactaatatgacctctataatttataaataccacacaaaccttacatgcaaagagttaaaaattattggctcatttgctcatgcaaaaatagagtgctcatatcttattgtaatcccttaagtttttctagtctctcttaataacactgacccgtggactaaggctagttaacgccccaaccacgtaaaaacattgagtgttcttattttattttatctgaattatattttattggctcatatatttaaattattgatttccaaaaatctcagttaatattttggtactttcattgagagttaaagaaagttgtgataccatcaataattacacactaattttggtactcacccgaatcaaatttgggcttcattagcacaacacgataagcaagatcttcacaatgatatttttgatgaaggagaagaagaagatatgaaactgaggatcttgatcctatagatccgaaagacaactacatcaataagggaagtgagcacaatgagccaaatcctgaggtcattgtgatgaccaaaaaataagaagcaacagaacagaatttggtggcacaagaagaattttcttgtttaatgctggagaaatttgcgatgctgaaagtaatatttagaggacgaaatcataatcttgacgagaatatacctgataatgttgctcctcaagataacaatactaagaaaacgaatcctaaaaatcctgacacccataatcctccttaggattaagagaagggaaaaatagtagagacttctaagaaagctactcccaatgatcatcaaaagagcaaaaatcccgccagctaacctattaagaaaaagaaagaaaccaatacttcaaggcaaggtcactagactgattctagagtcagaactgcgcgtaagaaaaagtctcatgctcaggcacgaaatcccaccgccaaaaaagataaaaatcatcctgagagctctactagctggagtgatgatgtggatagattcatttagtatcagatgatggaagtggacgtctttcaacaaatgatcttaatttgggcatgattaaatgctaaaagagcagaagctagaagcgagaaagtgagaccttgtagatatgatttgagaaaccatatgaatgatcgaatttatggatgagaatctcaagatgaaaccatggcatttagaataaaaaattaaaaagttttcaaagctcacaaaataaatttctcgaaagcaaaattgaattgtacctgaatcaaaaaaggaggatatagaaccatgtgtgataaggataatagaagcacggttgctgaaacatttcagaatgccacaaatagatttgtatgaaagtaggacagaccctaaagcccatctatccaaatacacctaaatgatgcaagtggcaaggcaagtgatgatgcaaagtgcctctgtttctcattgactttgtcaatttttgtaaaagattggtggaaaagattattttccagatctgttcataattggaaagatctacaggtaatgttcaaaaacaatttatagttgcgaaggacttcgatgttgaaatcagttccctgactaacattaagcaacaaccaaaaaaaattctcaagaagtatataaagagaatgatgaatgttgtggccaaaaaatgttaatgatgatatgaagatggtggccttaacctcagggttatttattggatcattcttatggggagaataacaacgaaaaagtgttgattccttgtccgacttcttgtctagagcacaaggattcattaacttggaagaggcttgttgcgatattttgcacacgcaagtgtacgtatcgtttcaagtagtagactcactaggagtgaggtcgatcccacagggagtgtagttaagtacgttgaaattaaacttttacttctatttgattaaataaaagataggaaaaaaaaacaatgaagtataagaaagtagttggaagcaacgattcgagaaaattaatagttaataaactagggtgtcgatttcaattgtttttattgaatatggtctaatatgat

SEQ ID NO: 314609 - DNA, 2227 bp, Cannabis indica
tgacataatcatcacattatttaagcacataagtgaatcagtatcatactccaaaaaacagatcaactacttagaaacaggccacataagtcccaagtccaaaaggcctgtcccaacttgtgtcaatccattatttaggatcaacaactactttgtaaaaaaacaaaaacaaaaaacaaaccttctcatctaaattaattggaaaatttgacaaatttcacagtatccactcaatattttacattctgctataaagggcatttcgtaaatataaaaactaacaatgacagtcccataaaaaagccttccttttgatactcatatacaaaatccattaatacatcaaacaagaaatatctgagctgaatcaaagcatcccgatctcatattttcttaataaaaaacaaatacaaataaagaacatgaaattcctaaattaaaatacaatgaattattgtcagatccaaaggtaccttgcttgtgaccggcccctttatcaacagtgtggcattgagcgcacttggtcctgaaaattttctcccccgtcttcgaatttccgggaggagcttcgtcgaaagacgccattttttttttttttttttctctgtgcaagaaagttgggagctttgtgtagggtttgtaaactggaggaagaaaatactcagcacgggcatgtattctgccacgtcatcctaacaagtttgggttttataggtggtaggctctccttgactaactccttagtcgatgtgggattaaaggtctgaaaaacgtatataaagtaatgaattgaatatgataagatagcttcacatttcaaagaaatattaaaacaaatcattaactataagtatttaattaactcaatgtctattactattattagtactatatttacaaacttgagaactcattccctataagtatttaataaaagttactcattggtttggggagtacaccatttaaagaattgaaaaatggaatgaaaaaaatcaacatgtatagatagagctcattgagtttagagcaagaaaaaccaacatgtgcaattcccttatcagttatgtccaaacaaattccaagttttaaggttgagagtttagagcatctagggagatagatttcatacctgcacatatatataaacaaagtatgagtcacaaaattattgagtaaaatcattctgtatcaaaatctaggatttatctttgtttgtttagtgtggattcctttgggataggcctcaaccttttaagtgttttccacccaagggttagctttctcagccactcattttcagggcctttccaaccattagtgctaaactaaaacaatcacaagtttaaaaagtaacatctcaaaaaaaaaaaaaaaaaaaactagaaccaactataaattatgcattttgttatttggtagtaagtttacatgtattgtcaatgactcttttaagttattactccaaagaattttcttaaaagattctattgtactattacggtcttttgtctaattcaagttaattttgtcaatgtactaatatgttaccgaactatgagagaaatttatcaaactaaccatttgaaatactaaaatttataaaataactttacttaatttactctaagggcccgtttggtacgcaggactggattggattagacaggctaatttgtccaatccagtgtttgggcatgttacaagtctggataactaatccagttaacctcatctgtctgggattatttatcccatccagcagggtgggataaataatcccatgcaggtgagatttttttttatcgtttttttaatttaaattttattaatatattttaaatttaataagaatttaaaggaaataattatcacacatttatttatacatttttttatcaaaaacttattcattaaaattagtgaaaatgtataattttgaattattatacataagtttttaaaatttagaatattattaattaaataatagttacttaaattgattctaagaaaaaaaatatgacaataaaattatatattatttttaaattactaaaaaatttatataaatattttaaaaaattaatatttatattaaattagtgtttaagataaacaattttatattattcaagtatttttattttactattttaattatttattaaataaaaattatgacaaaatattttattatatatttatgatatattcttaattatat

SEQ ID NO: 314610 - DNA, 1175 bp, Cannabis indica
aagaaatgccgttagataggcacttttaatatataaagatataagaaatatataaatatagataaaagggcaattagatgtctttgttgtacatttaacatgattgattaaaaaaatggtacatccattatactaaaaataattaccttatgttaattaattactgtttatttttattattaaattaacatttaaaataatatcattgatactaacttcttgttttctttttaataatttgtttgtttaatagatactcaattattacatgatacaaaaaataaagatgtaacttaattaataaattaaacaattgttgcatattcaaaaccacaataaccaaaactgttccattattaatttatttatttattttcttacaaatatatatatatatatataattttatgttggtaaacactaatagttattaacgaagcttgcgctgtcgctgagggtgacgagttcaaactttttctttccttctagatttcaatctcttattcccaaccgtaaaatttttcttcatattaattatatatttatatcttgttgaaattatagtaaaataatataaatattaataatgataaaaaataatgtaaaatgagtagtattatcataattacatataaaattaaaaggtttgatattggtcttatttcttaagaatattttccaaaaaaaaaaaataataatagttgttcgatgaaaataaatataaatccatttaaaaagatgtgtcttgcacgaaatacgtcataaacatgttgaatattttgatgagcttcccatgcttctttctttgctaactacatcattaaaatatctacataatcaagctaatgacatgaccattagatagtttttagcatagcctagcttcccaaactacttgtatggtcaatattgttttgctgaagaacagctttagcttaagttgttgcaaatattaaaaaggataaatggcggcaaaatctccaatactttcgttttagtttcattaagcccccaaaacccaaatttctgcgggtaaacccccaaaaccaggaaactgttagcaatttaccctttccgtccaaatttagctgttaagtgtcatgttggcttgtccacgtggacacaatatacacgtggcaccatttgattggcccacgtaaaaaaattatttaaaa

SEQ ID NO: 314611 - DNA, 786 bp, Cannabis indica
tctaatgtttttaggcctattcatactcgatccgattcatataagtcatccaatcgatctagcatacattgaatattaaattggatcgattttattcaatagatatattttatatatatctattgtagtaattcttgtttattaaattggtcatctaaactagataaaaatcactttgattagatatttagacattctattcgacatccgatccaatctaattaaatatttaaaaataatatttaatctaatctaattacaattaaatataaaatttttaacgattacttataactgaatcaattaattattattaaattagattaatttatacacagtcatagaaaatttggccaagaaaatgtacattgaaacttaataatgagggaaagtgtaaaatgtggtgaatcaaaatcctttatcgtaagattgtcaaaaaaaaaaaaaaaaactcctttaatggtaagagaataggaaattaggctacgtgtatgttggaagagtagacagacactaaaataatttaaaaataaaaaataaaaataaaaaaacgctagaaactaatctctattctctattctctatatcctatcctcgcctaaccgtcaataatacctaatttaattcctctcttcctttctctcaaccctcaaaacccatcatcatgacggtacgtaactccttaatcataatcttctctaatgaacattacatatttggaattatttaatatccattcttgttcctctctaatattattgtcataatatatatatatatatctgt

SEQ ID NO: 314612 - DNA, 1257 bp, Cannabis indica
gtttacaaaactttatgtacaacactaattattacatgctacaataatcacttagcttaagtggcaaaatctcaattgcccataagaagatctctaatggatggtgtatattttgagttaaatttggctcaatttttgtatttgtactccaatgcacaatgtgtaaattagttataaaaatcaatactattaatattcattgaaaatatacaaataacatataaatataaaaatattttttttattaatgaatagtattaatgagcaacaaatagttaatttaaaaaaggtatcatttattgtgggctaaaatttagcataatttttagctagggccaaatttgacacacattttacattaccattggagttaattttttgcaaaatattctaaaaaatggcagtacaccacatttatagctctatattggagatactctaaaagatattagagtgtgtgagggtcatagcctcataggatggattttcaaaggaaaatttcattatatatacataaaaatatatttattatcaatttttgaacttttaattaatgataataaaaaataaaaaattcacataactatggaaatcatcgagaaaccatcaatctaccattgaaaaattgttgataagagtcttctccaaccttggtaagcttaccatcgataaaacatcgacatattatcgatataatgtaaaaaatccaaatctcaccggaaaaatcagattctgccatttcgtaaaaaaaaaaatataagaacatactcttcaaaatgttttaaaaattattgtgtaaaatacttaaccattattgttagtgcaacgagtttcgtacggttattgtgcgtggttcatgattttagtggaatctccgccgaccgtcgtggtcgttaatagggttttttcttaaaaaaaatagaaagagaaagcagagagatatcagataagtgagttagagagaattttttttaaaaatgtaattattaataggctgattaggatttttgccccctgaactttgacatgtaccaaatcatgctccctgaacttttaaggctattgaaaatgcccctctgaactattgagattgttggatttaaggacttttgtctaatttattcaattttactatttcaatgatttttatgtactaaccatgttccccagactttgatatctaccatatcatgcccttcgaactttgacatgtattaattatgctcctgaactttcatccatgttagagttttttac

SEQ ID NO: 314613 - DNA, 531 bp, Cannabis indica
gaaacaaccccatttaagaactctagaaaaattttaaaaatggattcaacaaccaaccatgggattttcaatagtgccggacatgagaaataccaactccgtttacgagcatcgatggcactgtcgcttatgacgattgcagttacccatctttgatggtaccgaccatgacgggtggttgctccgagctgacaagtatttcaccctccaacgattgagtattaaggagatgttggaggcagctgcaatcagtttcgaagggaaggcgcttacttggtaccggtgggagttgcggcgccgttagttcatcttgtgcgaagacctacggttgctggtcttgaataaatttcgtaacacttccaagggttcgctccacgacagttctgcaagttccgacaagaaggttccgtggaagaatattgtgaaggatttctggaactgcttgcaaccttaaatgatgtctctgaggtggtggcgctcagccaattcttgactgggttaaaaaagaatattaaggaagagttgaggtta

SEQ ID NO: 314614 - DNA, 798 bp, Cannabis indica
attatttaaatttttacactttaaacggtttgcttatgtcatatgtaactgcttacacgtattcttctattgtctccaatcaatcacgattctctgttagttattcactttataatccactatttgtatcaccttctcttttttttcctttttttattttaatttttttccccttcatccttctcatcatcgtcttcttctttgtttttctttttcttgtttttttgcatgtttcttctttgtttttgagtaatgactatatcctatatgtattgggaataagttggaagggcgcgaccctaacgtaattgcaaaaatccttaaagtattgattaaggggaaggatggcccccactttaatatgctcaatgctccatgcaactatcctcaaagaatcgcttgtgttgtagccttcctcatttggtaagcgagaagcagggaaacatctccattcaccatgctccactgagtaaactcggcatccatccccaattttgataccataagaccttagaaatagtcccacatacagggtgattgttgtggtatttttgcacacccaagtgtacgtatcgtaacaagtagtaaactcaccaagagtggggtcgatcccacgaggattgtaattaagtactttaaaattaaatctttacttctatttagctatataaaaattaagaggaaattaaaactagaataaataaaaacagtgaaaggagaagcaattcaactaataaaggaaattaacagtgaataaaagttagggctttcgatgtcaattgtatctattgattatgg

SEQ ID NO: 314615 - DNA, 1975 bp, Cannabis indica
tatcaattttgtttcccttattatgaaatgtgtcactacctctagcctttcctttttggttaatggtgttgtcaaagggtcgattaggccctctcgaggccttaggcaaggggatcctttatcaccctatctctttcttctttgtgcggagggactttcttctcttcttcgtgctcatcaatctgaaggtctctttaaaggtgtagcaatttccaggagggctccttctatttctcatcttctttttgcagatgttagtcttattttttgctctcccttgggattcatgtagctctttaagggatatcttttagctctattctcaagcctatggtcaagccattaactttgccaaatcttccattttattttctcctaatacccctcaagatattagaaaccttttcttcactaattttgaccttaaagataggcctttcattagtaaatacttaggcttgcctcaatgtctttctcaatctaagtatcattcttttacttttcttaaggacaaagttctttctgttctgactaattggtctaataaatggttctccaaggctggtaaggagattcttcttaaggctgtgattcaggccattcctgcttatgcaatggcttattttagactccctgttaaattatgtaaaggaattgaagctgcggtggctagattctggtgggattcttctggcaattctagaaaaattcattggaaatcttggaaaaaagtttgtcaatctaagtatctgggagggttgggttttcgttctttaattcaatttaatcaagctatgttagcaaaacaggattggaaaagatactttaaaaaccccatctctttattgtgccaagttcttaaagctagatactttcctaattcctctattttggatgctgttcctgatcataatccctcttttgcctggaggagtattctttggggaagagatctgatggcttctggtcttatttggaaggtgggggatggggataatattctaaccattgaggactattggcttccaaacaatatacatattttctataagaatgactattttcctgctttgcctaaactttcatattttatctcaagttattgggatgtatctaaattaagaaatcactttgaggaatccattatacatgacattctgaaggttccgttacgggtttttcaggtaaagatgatattgtttggtcttgggagagctttggttttttcagtgtcaagtcagcctatcaattagctctttctaatcaggatatcccctcttcttcttttgcttttaattcaaaaaagttttggagtaagatatgacattctacagttccccctaaaattaaacattttgtttggagggttgtgtcctattctattccagttgcttcctccctttttgctagacatattattgattccccactttgtcctctttgtaaaagcagtctagaaatagttcatcatgctttgctagggtgttccagattgaaaaaagcctagaaatcctctaagtttgtggatcattattataaatataaacaccttgatataagtgattttttattatgctcttttgatgttgtggacaaagattatattagcatactgttttgtttcttatggactctttggaatcaaaggaataatcatttacatcataacaacatcttacatgcctctgatgtttttgattggtgtatcaattatttttttaaatacttagatgcacagcaggctaatcagcttcctagtgcttcagttcagttgcaaagcaaggttttggatactgtggaggagggatctttacaggtttacactgatgctgctatagatcctcacagtaagaagcacagctacggtattgttcttattgatgagtttgatcaagtgaaagccggcatagccaagccttgtgttgggagtgctcctgctgtcattgctgaagccaaggcaattcatcttgctatc

SEQ ID NO: 314616 - DNA, 1599 bp, Cannabis indica
gaaggtgaaatttttgaagccgtagatgagactggaaatcttaagagttattaactagctagagatagggaaagaagagaaatcaaagcaccaaaaagacttggatatactaattttatagcatatgcccaaattgttacaaaacaagaaattgatatagaccccaaaaggcaagaagctagtcagttgcaaatggattttgaaatggaaagagggaatccttgggtagagaaggacaagtacaaggccaagcttatagcaaatggattcactcaaaaagagggcatagactacactaaaatcttctctccaatagtcaagaaaacctcaattagagtaattttggcttaggaaatcgtggataggcttgaggtggaacaaatgaatgtaaaaattacatttctacatggctcacttgaagaggaaatttatatgatacaacctaaaggatttgaaaatggaaaaccaagatgaattttgcctcctcaagcaagctcccagaaaagggaacaaaatatttgaccaattcattactcaaattggttttgtcaaaagcaatttcaatccaagtgtctattttaccaacaacatattcttgttgttatatgttgatgacatcttgatagtgggaaaaaaaataaagattaacaagctaaagttgtagttgaacagttaatttgagatgaaagaccttagcagggccaagagaatactgggagttgagattgaaagaccggaataaggtataatcaagctgcatcagaagaattagttggagaaagtactataaaaattaaagatggacaaggtcaaagatttagccactcctctggcagcacatgtcaaattgtctcaaacttagtgtccacaaaccgaaaaagatggcaattgaaaaggtaccctatactaatattgtatgcaacttgatgtattctatatggtttgtactataccagatctagcacaagccttaagtgttgttattaggtacttggctgatcttggagaggatcattggaaagctatcaaatagattctaagatatgtccaaaggacaacagatttgggacatgtttttagaagaaaatcaggtcaacaagctgaagtgtatggctatgttgacaatgattatgcaaccaatataaacacaagtaaatcacttactagttttgtattttgagtgtgtggaaacacagtgagttggaagtctaacatgaaaagggtagtttctctctcaattactgaagttgagcacatggcaacaactgaggccttcaaggaagctctctagttgaagggtttaactcaagagattagtttcaaggaaaaaattgtggatatcttttgggataatcaaagtgctctgcacttgattaagaaccctatgctccatgaaagatcaaaacatatagatattaagtaccattttataagagacattgttgccaaggtcaagttcaagccaaaaagacacgactataaacaaccatttaaagtattttcgtcagtttctataatcgtcgcctatacgactgtcgcaaaacggacaaaatatgcaacgattaaaaaccgtcgctaatgtggacttcccgatggttt

SEQ ID NO: 314617 - DNA, 1959 bp, Cannabis indica
aagcggctaggtgacaggctctttgtcaagcagtctgcaacctgatcatgcgaggaaatgtaacggatttcgagtttcttctgcagcaccttgtctctcacgaagtggacatctaattctatgtgttttgtacgcgcgtggtacacaggattagaagccaaagcactcgcgctcatgttgtcacaccaaattatcggtgttgttggcatttcaaacttcatttctttcaagagttcttgcagccaagccaattcagcagcaagatgtgccaacgatctgtattctgactcggtgctagagcgtgcaaccactgtttgcttcttcgacgaccacgagatcagagattcaccaaggaacacacaatatccagcaactgatctccaatcatcagggcaacatgcccaatctgcgtctaaaaaaccttgtaagctcagattgtcactcggtgcaatgtgaatgccaaggcgcatggtgcccttaagtatcttagcactgttttggcagccccccaatggacagaagtaggacacttaaggaattggctcagtttattgacgtcgaaggagatgtcgggccgcgccgattatgcttctgtagagagatggattttcaagttgaactccatcattaattgagataactctccctgctgtcataggtgtcgggcttggcttgacattctccattttatatttctgtagtatctctgctatgtatttcctttgggatagataaatcccagtgtcatccctaaacacctctatcccaaggaagtagttcaagtcacccaagtcttttagtgagaacactttgttaaacctgtcaataaactgtccgatttctttggagttgttccctgttattatgatatcatccacataaattaggaccataataataaatttttgagtcttcagcatgaatagagatgagtcggccttcgaattaacaaattcccagtcaagtaaggttctttttagctgatcgtaccaagaccgaggagcttgttgcaacccataaatggacttctttaacttgcagacatggtgaggtttagtagcatcttcaaagcccggtggttgcatcatgtatacatcttcctcaagtaccccattgagaaatgcattattaacgtcgagttgtcgaatttcccagttgtgagagacagcaattgttagaacaacacgaacagtagcgactttgatcacgggactgaaggtttcaccaaagtcaactccaggacgttggtggaaacctttggcaacaagacgtgctttgaagcgttggaagctaccatcaagattaagcttgatcttatggacccatttgtagccaactatatgtggaacatggatggtatttaggtcaacaagtatccaggttcggttgcgacagagggctgtcatttcttcgctcatagcacggttcaacccctcatgccgaagtgcatcttcgagagagtatggttcatgaagcgagagatcaaatttggcgtggttgagatacaccttcggcttgtaaatgccgaccttggccctagtaatcataggatgagaaggcatcaatggtgatgcagcagcaggagagtttacttgtgatgagttatgagtggaaattggagagtcttgagcctgtgaagcaacagaagaggactgatagtgtggtgagagaacagagtcagtatgatgtaatggagaagttacctgctgttgtgtgcgatcaggggactgtggaagtggttctgcagtagaagagtcgtcatttgtgtgagtcgaaagagtgatatctggtgtggactcagtagaagtgtcacgggtgacagtgggaagagtgaaccatgagttaggagtgtcaagagtgacaatttgttcaggctgatagttgttaaagaatccatgttcacatgagaactcttgttcattaaaaataacatgtctggagatgtagatacgaccctgg

SEQ ID NO: 314618 - DNA, 669 bp, Cannabis indica
aaaaatcaatctcaccttctctttctctcaacgaaagcagcaacaagctcagaatcagttgggagtgaaggaaatacggcatagttaagagtatcactatcaggtatagcgcaagtgaggttctcactcctgcaagccgctcgccaccgtttctccaccaccggaaacctcctaaattcattcaacatagcacaaagacaaggattcaagctctaactaaataaaattcgattttgacttttgaaactataaattgaataaggagaaattttgggaacacgatcgagtgaggtcgaagtcgcagtgttggaattagaggaaacaatggaaaattgatgatgaaaaatatacctagagaagacgacggtgtcgaggctactgaggatccatacggctctgatgctgcaaccacccgccatggctttcctattcctcactagaattgcactctgccaagaaccttttgtcgaaaagaagaaaaagagaggcgaccaatttaatatttggagaccaaacgacaccgtctcattgttcaaatgtcaattattgaattattggataaattttttttaggctaattagcaatttttttcccgacatgtactaaatcatgctcttgaacttttttggccgttaaaaattccccctgaactattaaaattattagat

SEQ ID NO: 314619 - DNA, 850 bp, Cannabis indica
caataacaatgacaccaaagtttcaataaatgcagtagtggaagtagtttaagtgtttgaggccttgagaaatagtagaaattgtaactgaaaagagagtttatgaaggtacctttttttttgcactcaagtgacgagcttgatttttttggttggcaagtgaaatgatacagcaatgttactggagagttcgaacagatgaagtgggtagaaaatgaaggatacacatcttctagtaaaagcaaaaagagagacacatgtaggtttgtgtgaatgatagctatcaatttttatgactactaagtgtaatagaaccttgtagaaattacagtaataaaaaaatgaaagattagttttaatttttgataatatattccaaaaaaaaattaataaatattaatataataaaaaagataaaataataacttaccaaaacaattatattgatgtacaagtgtagttaagagtcatcaatatatgaatgaaaatttgagaaaagacaaaaaaaaaatatgagaaaaagagacaaagttctaaggaatcatgagggaatattctattattgacacttctatattaatagtaagatatgagagttgtattcataatgtgtatatatatatatatgaagttgtttgttattgtagtagtattagtagtactgtgatgataatttaaaaagaaagattaattgtaaacacacactagttattacaaacttataatacaagattttaatataagattgaatattatagttacaatacttagtttgagttttatgtttttcgatcacttatgttttactgtaatggggttgcttcatttttttattgttttttgttctttt

SEQ ID NO: 314620 - DNA, 1251 bp, Cannabis indica
tgattgaagatatcgattgttctgtcaatttcgaagatcgaaacaaggctgcagtaacagaatctgaagagaataaggttcgatttcttagtactaatcttaattaagtgttcttttttataaacaccataagtattaatctaaattttatgataattgtgtacaggtgactttgtctggtttgttaaatttcatagacggactatggtcatgttgtggggacgagcgtatcataatatttactactaatcacaaagagcgactcgacccggcactggtgcggccgggtcgcatggatgttcacatccacatgtcttactgcactcctgatgggttcaagttgctcgcctcgaattacctcggcattaaacaccatgtgttgtttgaggagatcgagcggcaacttgaacccactgaagttacccctgctgaagtagcagaggtacttatgaagagtgacaataatcctcaagttgctttagaaggtgttattgaatttctcaatgtgaagagaaaggaaaatgaagaagctaagttgaagaaagaaaaagaagaggggaaatacgatagaaaaggaattagatgaaggaaataattccacaaagtataagactaagaggtcaagcctgtcccggccaaaaattaaaatttattttgaaaaagtacataaattaatcttggtcagcctggacaattgatgtagtaatcccatgctggggagttgggggtcatgtgttcaaactcgtgttatcttgacaaagagtaaaagaagaggtcttaaatgtgaaagttctacctgcgaatgagaaaagggaaaaactgtaaaatagggaggggtaaattgtgaaaaagataattctaaagggcaaataaaaaaaaataagcaagcaacagcttccatagttgattaataagtgcctctactagaaatgctcctaaggttttagtaaacatttttgagggggatttgagctctcatggtggacccatataaaagcaagaaatgagaaaaaaaaatatgtagatgtatttcaattaattacaatatacatttgtaattaaaagtgataaatattaataaaaattcaaattccatcaaagttatttttaattttaacatttaaagtttatttttagtctttaacaaaaaagcagagtatgcctcccccgacattaattctgaatctgatactggtactcagggccggccctgggcataggcgggctaggcctgtgcctagggcccaccta

SEQ ID NO: 314621 - DNA, 2321 bp, Cannabis indica
cgtttgtctatttcaaggcctagtgagtttgtctggctaccttattgggcctaataatattgggttcattactgataggcccgtgtgacttgcatattggacttctcaaacatgttgtaaatattaaacaactttttcaccgctacagtacccatattcacatcaaatataatgttgatcgaaatcaaattttgattcaaattgagaaagtcgtgtatcttatctaccaaatctaagaatttcatatctttatgcaccattacgagtttgatttcaagataagtatctttgttgtttgcattctatctttcattaaaaactatgtccaacatccttgattcttcttctgcaatattacaaatataaaatcaattaggcttgacgatttccattcttttgcactattgctcacatattagattaaaagttattgacatgattacttttcaaaaatttactccaaaagctagcttctagaataactgtatctgattaattacaacaagaaaaagaaaaagaaaatgctatatatataggtgtgtatacctataacacagggagagagtactaactttatcatattagctatatatatggttacctttaataaaaatcatatgtataaaatgtttgtgtcttttgcacaccttagaaattgcaaaaaaggcaccaatacaagctagaaagtcaaccttatcaagcttccaaatatggtaggttgcgttgaggttgatgagtccaggtagagctgagagaattatggaagcaagtatcactatgtgtctataatatagcagctacgtcaaaaattgcagagatatcagaattataatacaaatatttaagagtgaccacctctaaactaccacttgaacaaataattcacaatataatttttatttatatttatcactataaactacattcaacaacaatataaacatcttcaaccaaaaaattatgcacttttattctttaaggataaattatttgtaaaaactaaaaagttgtattcaaatttctttccaacaaaaaagaattgacttcaaaaatgaaaaacactataacagtgattgctctcaacattgaacaacaccaaatacaagtgtttgaaaatagagagaatggacacaaaaaaaagaggaaatgaatggacactagaccatcaatttataacagtgattgctctcaaaggagatccaaccaaactctcatcaaactatacattccagaaaaggatatgaattcaccaataaagctctaaaggtttctcaactgaagcagtagcttgtagagcatgtacatctctggggagatgctaatgtcccttggatcccctgaattaattattgaaaggaaaaattactaacagtagcacaaatccatgatgaagagacaaaaatactcaatccatacatacccctctaattcttcttagactcttatatatagtatacactattttattcccaatcaataccccttaatacaaaaggtcacacacccttatatttattaatgtctgccgcacccttctaattctgaggattcctgcatataaaagaggaacaataatcaccaaaacaaaataaaagaggagcctaaatctattgaagaaattagaaagaaggcatttcaacaaacacttataatgcatttcattttcgacatacttttatatataaattttaaaccaactattaaaaaatactaaaaacaattctcacaaacacaatgaatctaaaagagccatcaattacatgagcaactattaaaaaatactaaaaacaatactctcaaacacacttaaactcatatatatatatatgtacgtagccagttcaaagaataagaaaaaagaatgggagggagaaacctgacgaaagattgaaactaatccaaaaatattgaaagttctcactgttgagattgcaactgttgaggtctagtgttgatggtggtgatggaggagacagaggcggacgaacactagcagtggcggaggaggcggaggcagacgaacgctaacagtggcggaggaggcggaggcggacgaccgctggcagtggcggaggagtcaggaaaacgatggtattggtaaactctcgttgtgggaaacaatggcattggtgaactctcggtgtatgctgaatcacatttgtcgaggtggttgttgaatagctttaggagattaaatggtgatttacttatgtggggtattttaggtacattactaataaaagcaggtatatttcaaattattttaatatgctgctattttggttaattgtaaaagaaagaggtattcctcaatttctccc

SEQ ID NO: 314622 - DNA, 662 bp, Cannabis indica
caaacatagtaaactttcagatttctattcccacttctctcattaccacataccaaacaaccccaaagtgcctctattttttgttagctttatcgaagtctagcgaagactggtggaagaaattgtctcccgactcaattcgtaaatggaaagatttacaaaccatgtttaaaaaatatttcatagctgctaaggattatgacatggaggttaattcattgaccaatgtaaaacaagaaccaggataaagtctcaaaaagattatccaaaggatgatggatgcaatagccaaaataaggtcaacaatgacatgaagtttgtggccttaacttcagggatatctactagatccctgttgtggggagatttgcaaagaaagaggtctgatacattgtcagattttttatccagagctcaaggcttcataaatttggaagtaggcttatgtccatgcttatgaagtgcctcttgcatcgtcaacaattgttagtagttcaactctgacacctcaattttctactttaagcataactcctcccgaaagtgtattcataagtccaacagtgtatggacccaatctctcaagaaaaacttctgcacagactagtttttctagctcaggggtggtataaactagatgtagtgtctgttggaaatatttg

SEQ ID NO: 314623 - DNA, 1369 bp, Cannabis indica
tatcaaaattggatcttcgagaaaaatcaaacacaatttctaaattatacataaaatagataattagaaaatgtggtaaaaaaaaaagaattgtataaaataaagatcaaggtaaggttttatttcacatgttaatgtatccaacctattgaaaaaacttctaatttaaatctcataaccgatctcttaaaataaaaaaattaatggtaaaataaatagaattcaatagctgttaagagtaatttattattaaccctagataattaagaaaatattgtagctttgtaaatatttatatatatatataatatatagttagaggtttcaatggttactttcaaaatgtaactatgataatacatttttctataatgagttgtaataggtgattattaaaaaaaattctatttataaaattaaattaataattaattatgcaatatttaaaataaattattattttttattcaacatattaaataaaattttcttagcaattaatatttatttttaggtcccttgatatttatattttttagttttttttccttttctttttgtctatgtgtctacataatataaaatattaaaattagtgaatttcaattacagaacctcaaactatcggcaatggttgtgggacttaaattaaaggaaaatgttaatacaattgtaacaaagtgaatattcagtcttttttgttcaaaattcatattattgaatagaacttttttttttttcaaattattaataacttttaatgttattttttttcactagtgttttaaagtttctaaagggaataatttctttgtgatgctatttaattatgaatgaaatttaaattaatggagatatttggaatggactatggagtgatagtcaagccatatttgtctttgctgtaaatcaaattaaatggtacaatacgggctggtatagtttttgaaaaaattaaaagctccttggcacattggcagatttatttgacacttaacagctaaaagttcacggaaggagtgttgatcaaaacgattatggagattaagaagtttagccataatttttctaatataatggttaaaccatactaaatttaaaagtctaagagtttgaccacaaattactcgttttatatattaggctaaatactaatttgatacattgggtagtaatataacattatacatcactcctacatgtataatttaaactaaaaatgtatatttttaaagataaaacttacaataaaatgctaaaattaaattaaatgtttaataatctaaactattataaaagaattgtcactaatttattttctttttattttttcacttaaccaaaaaaaaaaaaacgaatttagttattt

SEQ ID NO: 314624 - DNA, 871 bp, Cannabis indica
agagagagagagagagtagatataaagagagaaaggtctctgcaatgggagagatttctgaggcaagacctcgtttgttttttaatttatatgaatctggaaaaaaacgtttctttccattttaacttgtgcttaaagaaaagtatatacacataaatacgtaattttggtaatgggtaaattggtaattttgataagtgatgccgtgatgccgggaaaggatcgggtgttgctcgttggtgctttatgtgctatttcatgcgtcaaatttgtcaaatttaataaaatttataaaataatttcacttaatttattttataggattatattagtcatacaatttaaatttatgattattttgtgattataatagtcatttatattagttttaaaaaacatagttatttatatggtccagaatcgaccctaagtaaaaataggccataagtaaaaaaaaaaaattaatacccttactaaataaataaatagtatttttaaaaattattaaaaaaatatgtatattctttaaaaaaatatttttttatttaagctcctaaaatgagtgggccctaagcgcgggtaggctgccttagcctagggccggccctgatatggtcgcatagtgtaactcttcatcgtttgtgcgaccatacataatatagtgtaactcttcatcgtttgtgcgaccatacatacttattttgctaataaaaatttttataaagttattttactaataaaattttttataaagttattttgctaataaaattttttataaagttattttactaataaaaaatttcataaaatctatttttaaaaaacactcatttattttactaaactttccaggagccaacttgaaata

SEQ ID NO: 314625 - DNA, 1479 bp, Cannabis indica
ttatcaccactttaattacttttggcttcttatttttagtttatttatcttaacatattatttctcaactctagaatttaggttaagaatttttctcttaaattaattagtgactttgcttttatttttattagaaattttggaattgcttttagttgattttgctttatttagtgaaaagtccctgtgaggacaaactttgattacttatcgaatttcttatgtttaatctttaagaattttttttatgtgttcttgggaagttattgatgcatgttgagaatttcaagttatatcttgatgggttttaggtgtttgaatcattggaaatatgagatttttttttatgttttggttaaatttagagttgagattctgggtatttgtgtgattgaaaactttgagcttagtgttcatgtttgtaattagtggtgattttgatgggtttgcttaaatggttaattttggtgttattgtgagcttaagttaagctctatttggtatcagagtgccaaggattttaaacttcctagagactggcagaacatgttcaattatcgtcagagacaagctcgactcatggtacagtaagtgttgagagtaaatgcttaactgcctttgtgattatgcatttaccggtttttgttttaggtaatatatgggcatttagaaaagaatgttatatggaaagcatgattagtgttttaattgataaatatttatttaataagagaaatagaatgtatgagttagggtttaaggcaataagtgtgtaagtgtggtattggtgcttgactcgccaaggttgttaattttaggactatttttgataaaggaccctccacaatcatctagaccacagggcgagcacgtagaccttggtaatgaccaagccaatctatcagcaccgcctgcgcctctgtagaatctgggggataatgcaggggttaataatgataatccacctgccgactagtagaaaatgttcctcgaaattcaaagcattatacttcgtcaggaagatgaattgcgttactataggcaaccggcaccggcagcttcagcagaacacgtgttaccacgagctctagatccagtggtgggtagcctaagatttattctaccatattgagattctatgtttgaacgtttcgtgaagctacaacctccaacgtttctgggaggtactgatattatcatggctgagcagtgaatatgcactattacccgcatcataaataacatggggctgacaaggacgaaacaagttaattgtgctacattcatgtttcaagaatatgctcgcgtctagtgggatattgtaaagcccgcttagataatttggaaattatcagttgtttatgattaatcatgaaattatttatagctatttaaataatttattgtactgttatttatgttattcagtagcttgcatattctgcatttccggtgtccggtattttggaactcggcgtt

SEQ ID NO: 314626 - DNA, 1329 bp, Cannabis indica
ataataataataataaagccctcagaattgagaattacaaattaaatttgaattggaatttttttgtactgaaccctgctttcttttttatatacatatttttcattgtgtggaatcaacttaccaactccaccactgaggtgggtaataacgttacaatttaaaatggtaggtgagatttgagagtctcatttattttattttatattaaaaagaggtaaaatttgagattctcattatttgtgattacattattacccccacaggacaaaatctcaaatcagggaaattattatttgagcatcaaaagttatctatgcgtagtttgtagtaataaattaaaagaagttaattttcccagcgatttctgacacaaatagtagttagtagtagcctcggaatcaaaaaatcaaatatgcttcatactatgcggtccacagtagcatgcattatttagttaaccttaatataaggctacgtggaagcccataccaagaaaataaggccagctcaacccagccaagccaaatacgtctttcttagaaaaagaaaattatataatatttattaatttgtaggattttgatataacttctaataaattttactcatttataattgtttttctgaaagcactcagtttaatagttttgaaatctaacaaatgctcctttcaaaaaaaaaaaaaagaaatctaacaaatgcttattaatttgtttgaccaaagtaaaagaacatttttcaatgggactttaattgtggacttaaacactagctactaatactttttatagatagacgtgaagaaatataaacacagatccagctagattattttctcaagtacaatgcttataactctcgacctagctaaatagtcttgatataaatatatttccgtatgctaaattaatttgaagaaaagtccgaacagaaaagaacaaaggcattctaataaggttcccaaactcagcctagcttagctctaccgctgtttgtaggtttagccaagtccaaatcaaaattagcattttctggaaacagccaaagaccaaagacgatatattgttccccacgtacgtagaatgagtaataaatcaatagcacatgattctcatcatctcgtttttcgtggtttattcttgacttttcagtgattaagatcattgtttcatgtaacctagtttataattttggaattatatatgtacataatatactataccaaaattatctatcgtaattaattcggtgccgtttggtaatatttttattttttaattttttaatcactaaaaattttatttttaaaatttttgtttttttttt

SEQ ID NO: 314627 - DNA, 639 bp, Cannabis indica
ttattaatatatatatatatgggaggtttatagtatggcacggatttcgtgccgcattggtgcagttcacgattgcccgcatgtgaaaaattaaaaaatggcattatggtgtggcttcccgcactagaagccctttttgttttctttaaacaattaaaatgttcatttcaatctatcagttgggtcagaatatgtcagttggttgaattaaataaaaaatatatatacaaaatgatgtcatgcggtctttctatcgtctcttattcactttccaccatcttttccatcgtatttttttttactttccaccctctttttcatcaattgatgcaaaatgcacatccaatcacgctaccttcactcatcaaaagtgataaaatatggctaggtaattttaaaaaaatttgattttgattttatttagatttaaaccaaaactctgatcaatagtacataatatgaatgagcaaaacataaaacatttgattctggaatcaatgaagaagagactatgcaaaagagggaatagaagaacagagagaaaatgaagaagtggcgatggaaaagagggtggaaagtgaagaagagaagataaaaaagaaggtggaaagatcgtatgacataattttctacatatat

SEQ ID NO: 314628 - DNA, 1256 bp, Cannabis indica
ggcataaaacccaacagtgacaagaaccgaacccaaaccatagcccaaactcagaccaaaacctttacttagacctttattaggactgggacttgagacatgggacccggaccgggaccctaacctgacctggtaacccttgtgggacctgagacccgcgacccacaccaggatccagaccctaacaaggacctgaacctgaaccttgaccaagatgggaactagacttggacccgatcccagaccgagacatggacgaaaacattaacacgggacccgaacaaaaacctggacccagaccatgacctaggaaccggacttggatggggggccctagaccagagaactaggcccaggtaccaagacccagatccaaatccaggactcgaacacaaaccaagacctgagctggacctaagaatatgaagtcggacgcagaccctaaccagaaacatgctctagagcaaaactaagacaggaacctagacacgaacccataccaggaccaaacccgaacctaaaaacagacccaaacctggtacccaaactcggttcctaaaatcaaacccaaacctagacctgcacccggaaccgaactcgaacccagaccgggatcggaacccaggacttagacccgaaacttaacccaaactcagatcgagatcgaaacctgtgactcgaacccaatcctggaccaagacccaagaccctaacccacacccagagcccgatccggacctagaccgagatctggacccgaacccaacctcggacccgaacgcgaacccgaaactcgaactcggaatcgtaactggaactggaaccagactaggaccaggaccaagagcaagacccagacccgaaccctaacccaaataaaaacccagatcgaaacccaaactcgagccgcgactaggacccaaaactgaacctagatcaggacccaaacctagatcagaacctggacctggacctagaatcgagatagggacctgggcaacggaactaggaccgtgaccctagacacgaccctagacccgtacttgaacatatgaaacagctcatgacccaacacattaaatggaaatagattgggacctgagattgggattcggatctagactcggggtttggaccgaacccatagtcgattttagtatttgggacccatccatggaccaggacccagactccaacctagacctagacccgaactgggatccggacacggatcccaacccaaacctggactcggg

SEQ ID NO: 314629 - DNA, 540 bp, Cannabis indica
ttcatttttagtcacaaattttattgtgactaaaagtaaaattttttatagtgcgggttaacaatctaaggccgtcccttattaagtttcaagcaaaaataaaggcttctaaagtccattattgatgtttcatatcttatatttgagtagtctttcctcttaaatatttttaaatagaatagtgattaattttattaaaaataatgaaaaaaaatctatttttatgctaatgtcaatggagaattgtctgtatctcaaaaatttgagttgactagaaatttccaataaccattttcaaaaagtggaaaagtcttggagtcttctctcacttttacaataactaagtatatttccacaatacatataaatttagtggctctctcccaaaaagtcttctttatcaaattggaatgtatctttctactgatacaaattatttgaaagttcaaattattctccaaatgatggatattatattttaaacttggttattaattcattattataactaagaatcatatacttcatatgtcccaaaaa

SEQ ID NO: 314630 - DNA, 1154 bp, Cannabis indica
tgggagattgttggaactttgtatgaaattatgtaaaaatagaaaagtgaagtgtgtgagtaggagtcccatatgggatagaaacactacattttaagtgtatatctagtgcaagtttgagatatgggtttgggccctaaggggtacccagttttgcgcgcatgggtgaggactcacacactggaccaccacacacgcgcgcgccgccgccgccgttcgtccgaccaatcgatccgagccgggttggcgggtgggtgaggtgtcactttattttttaaagaaaaattatttaattaaataaagatttatttttatttatttacgattttctgagagcaaacagtagggtgttacagagcgatacagttcggtgcagagcgtatcgtacttatacagaggctgttttatcttggggacgccgtggttgctagactgccgtgcacacttcgggcagagccgcgaaacgtcttaaagagagcgacattgtccgcgactcagccagattattctatcggtaattcgttccaattttactgtatttaatttcggaataacatctactgctacggttcatagcgacagtcgtggactggatcaaagttaatgtggatggagccacttttgacaatggtatgagttttggttatggtttcattgctagagatcactcttgaggcagtccaagacagtaaaactgggcaaattcaatgctaaaatgttagacgcgataggaataaaggaagtactaagttggattaaaagaaaatattggttaaatgtggtggtggagttcgattgtgctaatgtagttcaagctgttaattctccatttgtcaatattattattgatattagaaatttattgtctgatctttgtaatgtgattgttgtttttgttaagtgatatttgcaaataaaattgtcaataactggttgtattattaatgggaacaatattcctactagtttagattctttgttgttccaagtaattataataaaaactaaagttgaaaaatacgtaatgatgactatttatacttagaataacatataatatcaaaatccaacaagagtgcacacccaaaaatacacttaagctattagccgacttattcataatattaaggagattaagtgcatgtttgacatca

SEQ ID NO: 314631 - DNA, 1065 bp, Cannabis indica
aaaatgtgaaataaaatcaatggagttagtgttggtatatatgatgaacagattttagagccttagaaagtggaaactttgtgattttttattgtggcatgggtgaatttttgggttgaattgtaccatattaatacagagaaatattcactagttaagcaatattgaaaaataacttaacaaaaagaacataatataaatcgaaacaattattaacttattactattgttgtaaacaataacttaacagcagtagtgtttttttacctttaaaaaatgggactaatttatctacaactgttaaattaatgttcacaattgtaacttgtaagggattgaatttatgattttgatattttttacaaatattagtgtatgattatgcttgaattgaaactataagatgaaatttaagtggtggaggaggcagatgaagttggtggcactcgaagcacttgttgtagtaaccgagcagccaaacgttgagtgatccctccaagcacacgcccgcccagactacgtccctccggttgttgcagcacctgttcatcatcataacaaccatcattgagtatacaaactcaatcagatttcaattttcaagaacatggcaaaattcaatgaaaaaatatgaggcctctagggattctcattcctgtgagaagaattaaactcaaaattttcgtttgggttgtaatgggaaacaagtctttatttagtggggtccccgcctaatccttaaatatttaagaaccagaaattataacaattgccatatcgatgcccatagactcgagtagaccgttgaagcaaaccacagactattcgaattacatttctttgattgttctgagcttaaataaacatttgtgtcagcaattttatgttgaatgctatgcaggaaaaaacagataataaagaatgataataaaaataatgtaactttattaaaagaaatagtagaagttattacttgtaacaagggctgcaaagaggctggatcgaaactttcagaggattgaagaagtccccatattctagatacttgatctctgagctctaaca

SEQ ID NO: 314632 - DNA, 3646 bp, Cannabis indica
ttaattttcaatttttttttttgtttaacatacatttttgctcacatacccggatcctggatccagaccatagaacctggacctagacctcagacctcagatcctagaccccagatcctgaataccgaaccccgaaactggccccagccctagacaccagacccgaacttggaccccaaaacacagaacacgaacccatactttggactcggacctaaacccagttatggagtcagatcggaccaggacctagaccaccgacccaaaccccaaacacgaaccgggacccggaccccaaacacgaactgagacccgaaccccaacccagaactaaacctcaagcccgaccccagacccaaacccttaccccggaccccaaacacgaactgagacccgaaccccaacccagaactaaacctcaagctcgaccccagacccaaacccttcccccggaccctggaccctagaccaagacctaaacccggaccccgaaacacgaacccgaatcaagaacccagacatggagccggaccaaacccgaacttagacccaaaccaccgacccgaaccccgaacacagacttggacctggacttcaacccggatgtggaccccaatcccaaccttggacctggacccgacccagatcctgaccctgatccaaaccttgaccatggacccagccctagatcttggctttactcgaactaggacgcgaaccctgaaccttgacctggaccccaaaacttaacccagaccccaacctaggacctagctcgggtttggggtctgagcttggggtttgggatccggggactggggttcaggtcaggtccaagtctagggtcgggtttgggttaggttccggggtccaagtttgggtctggggtctaggtccgagtctggatttatgttttggggtatgagtctaggtttgggtctggggtccggggtccggggtcctgtgtctggggtccgtggtttaggtctagggtctaggtttgggtctgagtttgagttcggggtccaagtccaggtttgggactaggtcttgggtccgggttcgagtccagggttcgggtctgtggtccagatctaagtctgtgttcgggtttggatttggtttcaagttctagtccgagttcgagctggggtccggattcgggtttgggtctgaggtttgatgggttcatgtcatggtatggtgtagaatattcatttttatttttaagaaaaatctaaaaataattttaaaaaacttgagccaaacaccactattttttttttgatcaagaaaaaaaagcttcattaatcaacagagctaaatacaacaactagcacaaacaccaaagccacacatggctcaagaacaaagaccgccccttacaaaccagccaagacaagccaagactaaccaaaactacctattgtgtaatctcaataagtagtctctctcctggtttgacatgtttcttttgtttacaagttgtaatatgtacttaatagaattttttacatcattaactaaaccaaaaactgatctagaataaccataaaaaatacacctatttctgttaagccaaatgttgtagattacagccgccaagatagtgatattgagccaatgtatcctagcttgacctcaaaataacccaatcataccaactaatgtaagctatcggccaagccctgtaacccatccaagaaaagattaattccaggactttttgagacaatagacatctaaaaaagagatgctcatgggattcctccttctcctcacaaattggacataagttcgaattaagcactatgtggaatcgagattaattatctctagttaggagatgagtgttcatcacttgccataggatgaatctgtgtttaggcacagttagtgagctccgagcagcctgtgataattgacaggaccttgaatcagtcttttgttgtacaaccagttggttctaaacccacctgaagaaccaactttaactatctcattctgattaaacttttgccttaggtgacaaagtttacgccaatacaagctcgagtcaggctttagattataagaccaaaagttattagatttcaagtagatattatcaacccacataacccatatcaggtcttttttagtagtgatagcccagacatatttggcaaggatagcttggttccacttgataccatctttgaacccaagacccccataagccttcgggaggcagactttatcccaggaagcaaagtggatcttgctcctgttgccatttaagccatagagaaaacctcaacacagtttttcaacctccttggtgatacaacgaggaagaacaaaattactcttccaatagtttcgaagcccaagtaacacagaatgaatcagttgagcttttcctacaaacgacagatgtctactcgaccaagtgtggagtctttgttttatctttttgattataatcccagtcctctgctttctattttgttggcctaagaggaacacccaagtactttagggaaaaagtgccttcaacgatagttgtaaatctctaagaataatttggatatcaccattattcatgcctccaaagtagacttgagatttttttgcggtaatgtgcaagtcagacaccttaccacactcatcaagcacctgtttaagaaccagaatagagggagttgaacccttactaaacagaatcaagtcatcagcaaaacacatgtttataatttttcagccccttacacataggatgaaacctgtaggatgagttagtagcagccatttgaagacttctcgtaagatactccattatgagaacaaatagtaaaggagagattgggtccccttgccttaaccctttctctcctttaaatttgccttgaacctgaccattcataataatggaataagatgtagctctcaaacacatcataacccattgtatgaatttctgagggaaattaaaggtagccagcaagtcctccaagaattctcaattgacagtatcataagccttgcttatgtctattgttatacccaaaatttagctgccacctcaatgaacgacacgtgtcaggaggaagggaatgtgaatcaatatgattgcttttatggaataactcattaattacataagagtcagagtatatttgtaatgcgttgactgtgaggtcttaggcgaggaatcaatgtacaagctggcacttagtatataagcgagaaaccatatatcgctaaatgtgaatagcgaggtaccagagaaagcgacacatatcaactgtgaaagtccttagcatgcaatgaacaaactaagtgtaaaagtcagatcggctcaaaaaacaagtaagcgaggtgaccatctcgctatgggaagacttcttatagctttattcagctaacgggagcgagacttacaaccctggcgagtctgaagaattctttataaataactgcgatcgacacaagacatacatcgtcgacctcagaagggagaacggccccagctcgctattgggatcattataaccaagtttctgtcgagacatctccagatacaacaattaaagacgtatttaatacatgatagttttgacccagtaaaagcgggaaaatcacagctatatgattttcaaatcat

SEQ ID NO: 314633 - DNA, 1995 bp, Cannabis indica
accatacttaactttttaaaactgatgtataaccttttttattttaagtgtttttattaatttttctagttagacttctagtaacacttatatgactagtgttgataatttttaatcaacaaataccataacaaaaaattaatcaaatgccacaaaaccataagaaagaataaaaaaatgtagcctcattatatttaaagtttacaaactcaagagtaatcctcaaaaagtgatcaaccgacaacagaatcgtatggatctaatgcttgccacgtgtttgcacaaataagaatgaaaaacaatagagacacaggttcgttatagaggtacgacccccttgtgatagcgggtaataatctacttcccttttagttgtattaatactaagggttaatactatccagattattataggtaggatttgctatagtacccttaggaatacaaggtacgaataaataatgataaaactcaagtgttgagatgatgctagtataggcgtgtgagagagaaagtgaggaagagagaatttgtcatgaaaaacaaaaataatatgtttgtgttcttgaaaaaacacgtgttctaatccatgcagatcctggccggccaaggaggcctcatttcagatctggccggccataagtggctttcatggggtctggccgaccatagggaatgtgtccctaggctggctaacctatgcttggaattagggttcttggctggccactagactaggtctcccaccactaagacctagaaccctggctggccaaggccaaggctcaatgtgggaaaccaatttttcttcctcttttgacctcagctagggtctcgtgacgcccttggaggcatataactgtggccttatgtgtggtttctcttagaaactctgtataaggctaggtagtgagtccattatagtcaattgtacaacttagggcctactacatgtctttgtaagtgtacttaagacggtacttggtcgttgatcgatcttgtacattttgttttacctagaaggtacccttgggtactgttgacttgaatgtgtttgtagctttgtcaggttgctcacctctccttatttctaccatgcaggtagtgctggatgtttaataggggaggtgacagctacgtaggcctcttataattatggccagaacaaaatagactctgcgtagggagcttctgtattacccctacgtggccaaatgggccacaaggggtcgagttagaatggtggaggagaccgctgagccccctgctgatgctgagctagagatagaccaaggggctgagagttttgatctagaatctgagctggaggaggttgctccagtgaggaagaggaggtataggacctgttctgtcttccttaattttcccttggctcactatgacactcgtggtaatccactgaacatgcttggtgagccttcaaaactaggactggaccatgtcctagagcaatctcttgagccgcagatagtggatgcgagactacatggagtttgttttgtcttgcctgcttctactctgtctgaaaaggcctttagtgagattcttgcttgtggcttaataggggatgtccattatgagattccccatagaaactgttgggcgcacaggcttaaataaaatctattttaatataatcagatttactaattaataaaacatcagaaatcatttatatgttgcatggttcacatgatttatttcatgattgtatttaacaaataaattctattaagtccataatatatatatatttgttcatgattataccgtcgtcagcacagtggaatatatgttgggttttgtgccctaaataaaatccatttcaatataatcatatttactaattaatcaaagatcataaattacttttatgtttcatggttcacatgatttatttcatgattatacttaatgtataaattctattaagtccagaacatatataaatatatatatgttggaaattatttt

SEQ ID NO: 314634 - DNA, 1774 bp, Cannabis indica
tttttgtcttcacctaaatttactcatcagggggaggatgatgatttgttggtatattctatcacatgttctacgcctgacatatgttttgacgagtttcttattcctccatctgtcttggtcacagctcctaacatgtctacacctcctccaccttttccgcctcctattaaagtgtacttcaggtgtccgccccctctgtctcctctacaacttgttcatgtcttgcacctgcttcttcatcatcagatccggatcccagggatgatctttccattgcattacataaaggcaaacgcaaatgtacctatcctatttcttcttttgtttctataatcatttgtcctcatcttcttgctccttcattaattctcttgattctatttcgatacgtaaacctattcgtgaagctctatctcatcttggttggcttgctgccatgatagaagagatgaatgttttagatgcgaatggcacttgagacttggttgttttaccttcaagaaaacgggtcatagggtgcaaatgggtattaatctagatggaacagttgctcgattaaaggtttgtcttgttgccaagggttatgttcaaacctatggagtcgactattgtgatactttttctcctgttgctaaattgacatatgttcgactttttatttccattgcagctactcatcattgacctttatataaacttgatattaaaaatgttttcttcatggagatcttcaagaagaggtgtatatggagcaatctcctgggtttgttattcagggggagtcagagcgagtttgtcgtcttcgcaaatctttacatggtttgaaacaaagtcctcgagtttggtttggtaaatttagttaggctattgagaaatttggtatgttggaaagtaagtccgaccattctgtgttttataaatgatcaactactggtattattttgttgattgtgtatgtggatgatattgttattactggagatgatactagaggcatctcatcccttaaatcattccttcttacccaatttaacacgaagaatttggggtgctcaagtattttttgagagttgaagtcactcgagtaaaaaaggtatttttctatatcaaagaagtatatacttgatttgttaactgagacagaaagattgggagcaaaatcttgtgaaccatttgaagaccctgagaagtattgcagattcgtccaggtattgcagtctcagttagtgttgtcactcagtttatgtcatctccaacgatttatcattgggcaacattaaaacctattttgtgttactcgaaaggagcacccagacgaggtattgtttacagggatcacgggcacacccaaattgagtgtgtttcttagatgcagattggactggttccaaggtaaatagaagatccacttcaggttattctgtctttgttgagggtaatttggcatcttagaagagtaagaagcaaaatgatgtgtccagatacagtgcagaatcagaatgtagggctatgagacaatctgtgtgtgagataatgtcgatagatcaacttttgactgaagtaggattgtagtaccagcaaaattgtggtgtgataatcaagttgctcttcatattgcctcaaatcctttgttccataagcgtactaagcacattaaagttgattgtcattttgtttgtgagaaaattcaataaggcttatctctacaggatatgtgaaaactggagaacaattaggaaacaattttacaaaggctttgaatggggtgcgg

SEQ ID NO: 314635 - DNA, 986 bp, Cannabis indica
catgttcaatattgatgttgttgttgctgtagttttaggttgttttctgtggttttctatgcttgaattgaatggaattaagtaggtttcatgcatgctagttaccttggttcaagtttgtgaaattttgttcaaaagctatggttttcaaagtaaagttttgattttcgttgctgtggttgctgctattgttatgttgtgttttctggtgctaatttatgttgaaataggtttagttatgcttgatttagtggttgtttggtggtttagtcaagttttgagtttttgaactcaatcttgaacctccaatggtgaaatgtgtttctgtgcttaaagcttggttttgttgctttagaaatgttctaggggatatttagaacaggtctggaagttttggtgtggtttggaattgatttgagcaaagtgtgaatttttgaaaaaaattcctgcgaggatgtgtggggcattgatttcatgggacctttcccgtcatcgtacaataattcttacttattgctagctgtggattatgtctccaaatgggtagaagcagcagcaacacacttgaatgacagtaaaacaatgctaaattttcttcagaaaaatatcttcacccggtttggaactcccagagcaatcatcagcgatgaaggaagccatttttccaacaagcaatttgaagctttacttgcaaggtatcgagtacgtcataggactgcattaccttatcatccttatagtaatggccaagtagaagtgtccaacaggcagattaaattaattctagagaaaaccgttcaacgctcacgaaaagattgggctaagaagctggatgatgcactatgggcttacaggacatcgttcaaaacacagataggtatgtcaccctataggttggtatatggaaaggtttgtcatcttccagtcgaattagagcataaggccttttgggccatgaaaacattgaatatggacttggcagcagc

SEQ ID NO: 314636 - DNA, 893 bp, Cannabis indica
tggtaaaatatttccaacatagttgccatagaaatgaacaattgaacagatctgaatttagcgacaagagaaaaatttacttatcaagaagccatgaaaagtcctcaatctaagctatggctaaaagaagtgatggatgagctgagttccatgtcgtgaaacaaagtttgggatttggttgtcctaccgaaaggttgccaatccattgggtgcaagtgggtctataagatcgaacttgactaaaatgggaaaatagtaagatataaggctagattagttgttgagcgatatagccagagagaaggtattgatttcaaagaaaccttctcacctatttctaccaatgattctttataaatcatcatggttgtggttgctcattttgattttaaacttgaacaaatagatgtgaagactgccttcttaattggagatttgtatgaagatgtttacatgactcaacctattggttttgaggagcctgaaaaggaacatatgatttgcaagctcaacaagtctatttatggacttaaacaagcattaagtcaatgatatcttaaatttgatgcagttgtcactgcaaatggtttcaacgagaacaaagttgatcaatgtatatatataaagttcagtgggagcagtttcatttttctggtattatatgttgatgatattttgcttgcttttaataataaagttttgttatctaagacaaaaatattattgtctgaccattttgatatgaaagacgttggtgaggcctcatatgtacttggaatacagatttcttggaatggaactaatggtattcttgagttgtctcaaaaacttacattgatcggatcttaaaaagattcaatataaatgctggttctcctagaaaggcaccaata

SEQ ID NO: 314637 - DNA, 2521 bp, Cannabis indica
aaaaaaaaaaaaaaaagtaaaacttagtaaatcactttagaagactaagaaataaaataaatctttaacactttataacaccttgccacaaaaagaattcaaaaactagtgttgaacagaaggagtaatcccgttgcgttccattataagaaaattctaactttgttattttttcgttttaaaaaaatatattttgagtaaattgataataaggttaattattgaaattacctgctagtaaataagttcctagtaatatatgttccaacaataaataatcgtcaaagccttcagtaatatttactttcatgcacaaatatatattgtaatgattgtatacttagaataggaattagtaagacaattagcattaattgattttattatatgattaaatgttattatttattaaatgcatgggttctattttcaagaaatagacattaggattgtaatttttcaatttcgaaaattttattaaactttaagtgtgttatatataatatatgtgcaatttaatatgtttatgattttttttcggcaacaatagaaatgtgacggtttggccaattgaatcatataagtaaggtttagaacctttcaattagtggggtaagtatattgaatattagaaatatcaagattagacgagattatggtaataaactattttatccctaggccttaagattacttaagtgcgaaacaaggggcgaattggccatttttcttaagaggtaaattttgttttttgtagttttagtagaataatcaagctgattttaagaaaaaggaatacaaaaataattatatcaattgttcattaagttagaaaattagagataaagctaagtttatccctctgatctctctcacgttgagttcaactcctgagaaaaccaaaggagaccagaattttgtcattgattttctatgattcttagcaagaaatctaggaaaggtggtggtacaaatcaaaagtaaagccctagaactcttccctttgaatttttggtagctttttattggtttgaacatgtaaattttaagaaaaggttttttccgaacctaggtttattttgggttatttttgagataaaataaagttgcttaaagcttgtttgaggttaatttgatggctgattgtggtgttgagcaagtttgagttcaagaactcaaacttggctcaataatagtgattttcataactttttgttatatatattactactgcttgggataggtttgttgggccttaattaggtgttctcgaaggttgtggaaagtttggagttgatttgaagtagaaatgagagttggtgtgtttctgcagcggaaaacgatggactgtttagaaacagtctaagtggtctaccctttttactagcagtgacctaaaaaaatagtttgccatttttacagaaacgacctgccatttttcaagcagtctttttgaagtcttgtttttttttttttcatcgatatttagagtaattctacgctatttatcgataagaaaatttctaattttgagtttaagtccctgagaaggttttagcaaattgtttacccattttacgtaatgtgacatagggcctccgttcaatgagcaaaatttctattcaggttgactagcgcatgcacttaaatttaaaaatgaggtaagaacaatataaaatatatatatatatgtatgtgtgtacatgtgatatacatatttatattgttagaatagatgaattagtatcatagaagcgcaaactatagtactggatctgcatcgcgactatagtgctggtagtggatagaatgtatgaattggtatcatagtggggtaaactatagtgtcgaatcagcaatgcgagtatagtgctagttttgactgatatttaattccataaagtattagttgatgttgtcataacagtacaaactatagtatttggtcggcagtacgagtatagtactggttaagagtgatattatggttaatgatatttttgggtatagattgatgttatcatagcggtaaaactatcatgtcgggtccacatcacgattatagtgctggtgcctagatacaagtcagtaatgtgtatgggtgcctagatacaagtcactaatgtgtatatatattttatgcttttcttactgagtctgttgattcacaaatatatttgtatgtgtaggtaaggaaaaggcaaaggctaagcagtagtgagtccggagcttgcgagtctttgaaaatattgagatggttagaccttgagtgtttggtctcgggacaacatgagcttcttttttgtaatcaatgtgtgatacgcagggccgtctcaaatattttgaaggccctgatctaatcttaaaaatttagcccctaacaaaaataacaagtacaattaaattcaattttttttttgttagatgaagttcaaaaatttaattttagaagtttaagttaattttttttttttttaaaaattgtttttgacattatatataccttagctttaccacaaat

SEQ ID NO: 314638 - DNA, 730 bp, Cannabis indica
ttttgccgcaaattactcttgtttttttatatgttcaactcgagatatgttgttcgaatttagattgagttactctcttgggctaattatgtagaatttcatgatctatatatttatatcataacataaatcaatacagtctattaaatatattatgtctatttatctatagatgattaattaaaaataacaaaaataatttcagacattttttgtaaatattataatgtaagctaatacggactatttgttgttagaattttatactctaaataagctcatttcaatataatcttatattgctgtcaatagaagattagaagtcatttaagtttacatgtagttttcatgtttatagttttaatatgcaatttctgtaaaatccagaatatatagttattcacaattacagagatgccatcacagtggaaagtaattgtgattgtatgcttcaaaatttaagtacctttttattgctcacagtgcggagaagaatctgaaactccggaacatgctttatttttctactatatatggtttgattccaatgtgatatcggttgggggtatggtcggtgcttcgttgttgtgtacatggaccaatgccgaaaattctcctctttctcaatttgaaaagttattcatgagtcttttgaattgataatgattaccttatggtggctttggtatgatcgaaactcagtattttttggtaataaacagtcaagatt

SEQ ID NO: 314639 - DNA, 1265 bp, Cannabis indica
gtaccaaacactacaaaaagtttaacttttagtcacaacaaaatttgtgactaaaagtaaaaaagtggtactaattataaattattgttattcttatgttgtgattaaaagatttgtaactaaaagtattagtcacaaaaattacaatttgttgtgactaaaattaaattagtgacaacttgtttctaaatactatgttataatcacaaatactaatattttgttgtaactaaaagttacatttaatcacaaaaaacttatattgtgactaaaatgctgtcactaaaagtaatatttttttgtagtgaaatgaaccttaagcaatcaaattgacagttggtgtgagagtcaagttatgtaagattgatcgagaaataatgtttttttttattttttcttgctgaaatgatagttggtaggaaaaaggtactctaaaaaaagaaatagatcacaaagaagatattattacatgatcaaataataaatttaactcattatgtactgaatggtagttgaaatatatggacctagcaaaagtagggaccaaacattgcaaacgttttattacatgatcatatgatgacttgaggtttcggtttcgaaaatggtgttgatctccagagtaatcagcatatatctatggttgaatgtcccctctataatttgttaaaaactccttgttttgatatatgtttgctatgattggtattggatgtgtgagctagaagccattatatgatattcatcttatttaattactaaataggtaactttgactaatgatcagttgtgagagtttgatgtttcaggttgagattgtattcttggagtttggagaattgtattaacatatgagattagtttgaaacaatttcattttgagttacaaattaagtgactattaattagttgtttaggcttagttttagttcttattaacttcttgctcttgtaactaactcttttataaatgttaacttagaaatcttttctagtaatgtggacatcaatatttgacatgtggcaagaaggataatgtcatagagttgtgagtagactcgagccatagtagaggactctagccctgcgtccgagttgacttcgtgagttccaaaatgaaagtttggacttcaataacttgaatgtaacttactatctttcagtattctgtaccatgaaggcatgaaacaacttaatccaagttctgaaagctgacactacaaaaaactattacttttagtgacaattttttagtcacaacgtaa

SEQ ID NO: 314640 - DNA, 2609 bp, Cannabis indica
gttcactgagttctgtgaaaggagtaaaattattaagagcttctcgtcggttttaagaccccaagcaaatggacaagtagaagcttttaataaaaccttaaaggatactatcaagaagaagttagatgctgcaaaagggagatgggtagatgaactaccacaagtacttcgggctcagagaacgacagagaaaacagcaatagggcacaccccattctcgttggcatttggctcagaagcgatgctaccagtagaagttaatattgcgacccacagacgtgaattctataatcaagaagaaaaccaagaactccttaagttgcccttggatttacttgaagaaagacgtactaagtcgcaaattactaatgcaacttatcaacatcgaatcatgaggtactttaacaaaagagttaagaaaagactcttcaatgttagagatttggtgttaagacgagtatttgcaaacacacgagatgcgtcagagtacttaatccaaactgggaaggtccttatgttaacgaggcaatagtaggaactgagatttataaattggctcggcttaatggctcgctaataaaaaactactggaacagtgaacattttcggccgtattactagtaaattttaaatgtaaatgctgtatttatctttgtagcatgtaaatattgttattcataaacttaaagtttgttcaagtaattacaaagttttattcattaaaattacttgaggggcatatatacgtgtatatcaattggaattcatctagaaatacatattatattgcaaacccacccatgttaaaaaattttccataaaagagaggataattgattaaaattatctatggacaatacaaagtcaaaaaattaaaaacattttcttcagataagaatataaaagtagcagttgtaaatgagatcaactcataaaacaacacaaagccacatgcagagttgaatatttaacgactcgcattgttcaggtatgtattataaacgaggcatgaaaatgccttgaaaaaataatacttaacctaaaatatgaatagaatgcctaactattcatataagtattcaaaaaatatacaaaatagttgataaagtgatttattcaaagtatgtttaagttttcttttaagttatatatggatgatttaaactgctcacataatattttataaatagtaaactactcgcttataataaggtagactataacttctctcgaatcgaaaagcatatgcagaaaataactgatcacacacatacatagtagattaataactaccaaaatgtatcaaaggaaaagcgagaatagtggaaatgctttctcaaagtaccttatattggatcaaaatataaacgttgatttgtgaattaaaattcaatgaacaaatatatttaattcaagtataaggcgtgagccattaaaagattatgcatataaagcaaagttggccatccaacattgtaaaattgtctttacaaaaaataatgccacaagagacaaaccattgtctcggccaaaaggccattttcctaaatatataaaataaaaacaacaaacaaatttaaaaccaagtctacatagtaggagacttggttggatcttcctagtctgcctcaacctcctctgcatcaccgacctcctattttttggtcttctcgcagaaggcaagcatctcgtcagctccttcacccagaaaacaaaagtccatcttgggattggctgttcaggcttgatagatggtccttctggcaattctgttgaccttgtttttggtgtcaaccttggcatcttcaagtttttgtcagcctcagcctggatggtcttgatggcctcttcgagctctttgatcttcttctggttagcttgacattgcttttcagcctcctcctttacctgagaaagctcaaactctgagtcatgccacttcttggccatgacatctcgatgctctctagtctgatgaagctcagtctcaagcatttcaactctctgaagtcctctatgttgagcggtaaaggatagaagagatgcttgcgaggaatgaaaatagacaataagaaagaggtacaaagacgaaaaggaaaaaggaacaagaagaaaagagactaacatgatgcatgagatcataacttctttgcaccagaccctcaaattgccttttgtgagtagatcccagtcatcagactcaaaggcttgataacaccgccagctgttggtagcgtgtagcaagcagagttgtgaaccttcggtcacatccaaggggcaaggggtaggagggctcgagaagaaccatctctaggtgagaatcagagaacttcactcggtgaacagacccagtgggctattcactagcgctcaccatggtaggtgtagccttctctagagattttgctggcttgatagtgagttggctcgaggttttcttctttttggtagttgtttttgttcttttgggttctttgatagaacccgaggcttcatttgcctaggcaactcattttttggctcttttgtcaatgagcggggggctgttgaacatattttctaaatcaagatccatatctgcgagataaaagagatacatcaaacactgg

SEQ ID NO: 314641 - DNA, 1094 bp, Cannabis indica
atgttaatgaaacatacttagtagtaaatctagatcctggtaaaatatttccaatacactataccatatgcactagagtaccgacttcatactcatgttggtagggccaatttatactcccaaaggttaccgagtgttgtaccacatgcactagagtatcgattccgtactcgtgttggtaacaccgtaactactctaaaactctacattgtaccaacacccttaaaattatattttcattagtgttagtagtgtaattaattaataacaagcatacattcacatatatactttatgctatcttacgtcgtttctgtgctcaagtgtgtcggtcaacctgagtagaattgcagctcgatgtttcacagggccctaaatcacattatttgtaattttggtgagagacacgctaaaacacttttcgggaactttaaaaatcaaactaggaataaccctatcaatgaaagacaagaccatatcctgaatatcaacaattcgaggcaaattagggctcttggaaaaactccaaccggtaaactggtttcccaactggctaaccggttcactggggtttcttgagggacaaatcggtttaccagtttctcaggtcctactaaaccggttaaccagtttaatgcatggaaacccaaaaattgatcccctaaacataaatcaaccccaaactctccaataatctccagaatacctgtatacattatagtgaactaaattcaagcattcaaacacattaaacaacccaaaaaataaaaatgccattagagctcgaagcttgagctctcaagctccaacctcacccaaacttcacaactaccaaccaaatcagctctaaccaacctaaataatctcaaccataccacataactcaatctcaaaccatctcaacacctacaacaacttagaatcaaaattcaacaccaaaacctaattttcatgcaagaaacacaaagagggagcgactagggaaaaattaccttgaaccaaagcactcaattccttcaagaatcctcaaaaataaacagaataatccaaactctagctaccttctagcacaatcgagagagagagagagagag

SEQ ID NO: 314642 - DNA, 1064 bp, Cannabis indica
aaggcaccaatagtgaaaggtgacaatttctcaaaagctcaatgtccacaaaatgataaagaaatagatgaaatgaaagcggttctttatgcgtcacttgtgggtagtctgatgtatgatcaagtatgcacacgccttgatattgcttttgttgttgacgtgttgagtagatacttgagtgaccctagacttagatattggaaagcggctaagaaattcatgtggtatcttcagggtactgaggatcatatgttgacttatatcgaagagttgtcactcttgatatatttaggtttagtgatgtcaattatgcagaatgcgcggatgccaagaaatccacattaggctacatttttatgatggggagaggggctattttgtggaaaaaggtcaaacgagcatgttatgaggctacttgtcaagcaatatggctacataactttatttcaacattgggtgttatggactctaactcaaggatgctgatattgtattgtgacagttccacagcagtagctttctttaagaatgctataagtacttcccactcgaaacacattaacataaagtattatttacttaaagatgaaatttttgagactctcatttccattgagtacatacctactattggcatgtttgcagacccactaatgaaaggcttactcatgtgtgtttttagagcatggagctcagtgggagttttgttattatgtattaaacatgctagtattttgtgtggaattcttatgatttgtgctttgaatatgcataaagatatttattgtcatatgtatgtgttgtgcaaaaggaaacaatcaatgacttatgattcagtttaccgaactaacaaacacgcaacacaatctaaaaacaatataccaagagatctcaagattcaagtaaagaattaagctgtaaaatagaaaaagaataacatcgggtttaacgagtttgagcaatgtgcaatgctctacatctcgatcggaatagtagtagccatatctttattgatatcagtatttacaaggttacaagaatcctcacaaactctcagagattac

SEQ ID NO: 314643 - DNA, 585 bp, Cannabis indica
aaaaagttaatttatttatttaatgttttgcgaataaatgacgatatgagagaaagatcgccgctttgccttattatgccaacgcgagccttacgcgaaccctttctttaattttcttgttcttcttatgcttttttgccaggaaattgagtgtgacagcgagtctggagagagaaacaaagaagagtgagaaaatagaaaccaaaataaaaacaaattaattaagaaaacaatataactaaataaataaataataagataagtctatactacatcgttaagagatgcattaaaaaaaactaatttcttaaattttaaataatttatgataacaaaaataatgttcaaatatattgcacgccatatatctatttggattttactttttatatggtaaattatttaaaaaatttgaaaaaaaattacattttagatagttaaaaacttaggtggcgtttggttggaggtaatgaaatagaatggaatggaaaagaaataattttcattctattcctttgtttggttgcattttaaagtattggaatagcattccaatggaatgcaccattccaatgtaacaagaaa

SEQ ID NO: 314644 - DNA, 1489 bp, Cannabis indica
tgaaactcacctgagttttgcagtggtggaactaaaaagccacaagttcattatccgttaatagctttgttttgaaggggtaattttttgcatatagcgaaacttactgctaaagtttggtagggagaagaatagctagcacgcttcatgattaagcttcttttagggtgtgaaggtttcatcatttatagcaaaatcaacttatcttcttaagtccatctcctagtcattaaatttaccaaaattaacttcttaccttgaaagaaaacatctgatcagtagacttccatgacagataatacttcatctcattggttgccctggatagattgggttgtcaattgccaacgaccaaagattgttcagcatcaaaatggatacagttggcaatggcagaaacagaagatcaaagattttctttcccccctgcttgatatattcttttaacaaaacgatgtcatcgatttggtgtagagttttggtctttcttctcttgtttgataaacaaaacagttagcatgggataagtttgttgaggattcatactgtcatataatatgatgtagagctatgtccaaaatggtttcagatattcaagacaaagtctgcctttggtaaatttactttgtacgatgagcatagctggtgcagttgtcactttactctggtcttgtaaaagtaagaagtgaaatacctcatctgttattccaaatagtcttttgattttctccataaggttaatggtttattatttgttcgattacgtttttttgacaacactgttctgagtctgacacagattgaatttgcaatagaaatataaccattgcctcgttctttgacatcgttggagtcctcgtgtgattttcggtttatttgatgtgtaaaccatgtgctcctgttttatacgataaaccttaggttgtggaaattaagttgttgagaaagaacttgctaaattgatcatccttttttaaggctgcaggtaatctccaatgagagtaccttctataattatcagtataaaaatttactaatttattttctcttgtccatataaaatttgacttttacaaaaaatactgcaatgacaatttcaaaagttgtctaccatgttttacgtaaatgttaaattaataattatttttgataaaaagtaacttttttttcttttaaaagtcaaaatacctacccgttgtccctcactcgattcatattattttaatatttgaattgaaaaatgaatgtcattgcatatgtggtaagacagattcaatggacaagatgctctgcctgttagctctagttaggttccttggccacgttttcatcgagatagtaatagttgacaaacttgggatttggaaatgattttacaatcattaaaacattgaataggttggtctgttttcaaacatattaaacaaagttatttttaaagagattatttcataaatcctcaaaaatgacaaaaaattacatttttaca

SEQ ID NO: 314645 - DNA, 652 bp, Cannabis indica
taaaatacaattcaatataatattatacaatacaacatggtgtaatacggcgtaccaaacgaaccctaaattatttattgaatttctacgtttataaggtattttatttgcaaagttggctatctttaaaaaacaaactgagactcttaataaagaagaaaagaagaggtcgcttcacacgtggcaccatctccttttgctccgacaagtttttgataattattgtcggttactgacattctaaatcagctatctatctctcttgataaattcaaagaattaaaaatcaattttttaacttattcttcaatttcattcaagtttgcgagagtttcaagtcgtcgggaaaatcttggatttatttgaaaaaaagctttctagtccttcaaatctcaatagtagctactgttaacattgaaaattcactaagaagaaatatcgagatcacatcaacatgagataaaagaaagaagggatgagatgtgaagccaaggagctcactggagctccgtgccgtgctgcgccatcaacgagagagctctctctatcttcatgttgcgacaccctcatcagcgaggaaggtctcgctgccttcatgttgtgttgcccccatcagcgagaggaggctctcgctcgttgtcacctcatcaca

SEQ ID NO: 314646 - DNA, 781 bp, Cannabis indica
gaaagtgactacacgagaaggaacaacaactcttttattttaaggaaaatggtaagggtgatattaaagtgttgtatattaatatgggaccttatacattttttttatagagtgatgtgaatcacaaaaagataaatatatccaactaattgtctagttaaaaggtacacaaaatcaaaatataaaaccacttatataaaaatcaagctacccaaaaattttaggaaaaaaacaactatagaccatccgaaaaatgtgccattatctattaaaaatataccattataaataaacaatttatttaacttacaaaataaatagataaagtataaaattaattaacacactaaacaaacaagatgataaaaaaaatttatataagaaaaaaatactcaataattttttttacaagaaataaaatttaacaagaaaaatttatcttttaaaaacttcttgaataaaatattgtcacgagattaataagtttctcttccaaggaagaaaatattaaataatgaaacgcctacaaccacaaaaatattaatgcaaaaattagcacactaacattaataatgataaaattaaaaatatttagcaataaaataaggtaactcaaatagtaagttaaacttatctttaatgattctatgactttcaattaaaaaattcacctctgtcaaaatataataagtacattcaattaacacataattatttatgagagcttaaaaataatactatattatattacaaaaaaaataactcaaattatacttttttt

SEQ ID NO: 314647 - DNA, 1393 bp, Cannabis indica
gccgttaaaaattttcccgaactattgagattgttaaatttaaggacttttgcctaatttcatttaattttactattttagtgattgtttatgtactaaatcatgcttcctagactttgatatctaccaaatcatgcccctcaaatttgatatgtactaaatcatgcgtcttacattgaaaagactcacaaatattttgcaattaacctctcaatttcctcacacacagctcttatagaattttgaagcatgacatatactttaacatatttgattacttctgagagaatcttttagaacaattttgttagccattaatttagtcttaagttccaaattggtctacataggtttttttatttgtgttatatgtgttacaccaaaacattacatagttcttttcatagttattatttaccatacatgaaaaagtgaagttgagaaatcaattaggcatggcctaagacaatcgcaaattcacaaacaccattgtaaaagcaagcattttagtcattatattattatttcaacagtttattacagagacaaaccattttgtctaaatatggtaactttcatctgaggttgattcctctgtatcagctcaaatatgcacaaatcacttggctgaaacaattccctcttgcaaatgcagcccatccactagaaaacctatactctaatccaactgatcccttattaacagttaagttcacatgccaatttttctcaccaacccaaagagttacagtttgtgcctttttctcgaaataaaggtttccaaaagcccttggaatatactgcacaacgaagaattgatattcaaacataattcattcttcatgagatgaaattatttaaaaagaagacaattttgatacaaagatgtcatgataataatgtatatgaatgagccacattttttacataccattcttcttccatgcacatgagatgatctcaaattcacttggaggtaaggattgtctgagatgaatttgctggctgcttcagaagctagactaagtccagaagatgaagacctctgattattattagtgccttgattgtcattagtattttcttcacataccagttttgcaaacttttctgcattaactatataaacaaaatgtatataagctaacttttctaggggaacgcttgacattattcttgtcttgaatcataatagacttgttacctgaaggttcaattacttctttatttgctttatcatcataattattgctagtagaagaaggttcaattttcacacaaggagttaaacttgtcttatttgcacctaaaaacaacaattgcataattagtaaccatatttgcattcaattatgatgatgatgatgaatatataccttcagaattaccataa

SEQ ID NO: 314648 - DNA, 1555 bp, Cannabis indica
ttccaacactcacacatcttgaccattatggttcagaccacaagacctttagtaggtatgttctcaatgtcatccgaaaccaattgacaaaacatagatcttaatttcattttaataagatgtggctcaacgatattgattgtgttgagattatttctcgttgctggttgcagaattcatctggtgatattctctctgattttttttagtatacaaaattgtgcaactcgactgcaatattggcatgttgagaaatttaggaaactaaaaaatgacatctcttaagtgcaacagcaagtcaaacaacttcaaacttctttgaacacagctcctggccatttgcaaagtgtacaaattctagaatccatccttgacgaactcttagctaacaaagaacaatatttgcagcaaaggtctcaggttgaatggttgcaatctggtgatcgtaacactaagtttttctatcctaaggctgatgctagaaactttaataataaaattaaatcattgttatgttatcacttcaagggatggtatttcagacatcatctaagcttattttgataatctttttacggcacaagaagaggatcattgggcattatctcatgtattatccactattcctaccacagtcattgctgcttataatacgtttttttaatgtgagatttcacactggatgaggttctttttgcattgaaaatgatgggttccgataaagcttaggaattgatggcatgtcagctatgttctaccagcatcattggcacattgttggaaattaggtctctaaagtggttcttcatgtctttaatgatggaggtaacccagcaactttaataagactttgtaactttgattccaaaagttaaaaagactgtctatgaaagattttttttacaattagcctctgtaatgtcatatacaagattatttctaagatgttgcttatctgcttaaaggatgttctccttagtgttatatctgaaactcaaagtttctttttctctaatcgtttgagtacgaacaatgtcttgcttacctttaaaatggttcacagtctcaagcatcgtaagaagggttccaaataaggctatactgcacttaaattggatatgagtaaagcttttgatcgggtgggatggtcttttttggctgttgtcatgggaaaaatgggatttaatattcgatggatatctctcatcatgaagtgtctacacacaaatagtgttattttatgccctaaataaaacccattccaatctaatctgatttgttatcaataaaaaattagaagtcatttatgtttacatgttgttttcatgtttatggtttaatatatatatatacaaaatctattaagtcaagaacatatagttattcacaattacagtgatgtcaacacagtcgaatgtgattgtgattatatgcttcgaaagataaagtccctgtttcatcagtgcattggattttacactgatgtggtaatcagcgatttagtgtacttacactttgcataagtgttatgttctttccagaacattggcaaagt

SEQ ID NO: 314649 - DNA, 958 bp, Cannabis indica
taaattaaattaaaaagtgaattaatcaaatgccttctgtgcagcctaaactgacctacatagtcgcccatgaagaggtaattggtatcaggagcactgccaccgatccggaaaagctcaacgagatcgtggaactgaccgtggatgtctccacataccgtgacgggacatttaactggttgcacattccactcctccaccaagatcgccctggcctgctcgcacagcgtcctcacctccgactcaggcagaggcttgcactgcatcaggtgaccgatctggcggtccagatcggaatgcgacggcatcgcagcgtctctctctggaaaaaaggttctctcgatccgtacacacggtgggagctggactcgccggagacggggaagtgaggctcaggtcatagtcgccggtgagcgaccggcgagcgttgagggaggtgagactaagattagggttaggttttgatattattgaggtgtgtaaaggggagagagagagagagagaggaaaagatagttttgggttgtgaagctgaaaaatgttgttacaggtgagaaagagagagagtatgtgagcacatttgttatcagaatggagtcaagatgttgcacttctggtcctttaattttatgtatttacgttcttgtcctttatctttggaattttctgtttgttactcaaacatcacattaataaaactattgaaaaatgacatactaacatttataaaagggaaatttgattttttatgcttacatttggttaaaaaaatttttctaaacaaataataattaatatttgtaaaatatgacaatttttatgatattcctaaaatatccccatttacatcaccctatttacaccatcgggctacccatcggaccatcccatcgggccaccatcggaccacccatcgggccacccatcggacccatcggactaccatcggaccaaatct

SEQ ID NO: 314650 - DNA, 1538 bp, Cannabis indica
gttttgtataaataatgcctttatgctacaactccaatacagaatttttccttttttaaaaaaaaaaaaaatccttcagatataaatgcagattgactgaatttttttgtgggaattttatttccatctatatttaaaagaagtaaacttgaaataatttcaaaaaatccctcttcatatattttttttttaaaaaaaatcacattattttgtattaattttactacttattttaattaaatatgtataatttatttaataggtatatttttaagaagaagaaaaaaaaaaattaaatatatattttatacaaaataaaaaataatcaaaatgggtggttttatttttgagatgaaaataaaacttgattccaaaaatttataaatgtaatttatttaaataatttttattttacgtaataaatatttaattatattaatttttttctttcaattcatattttttaaaaatatacttatagaattaaattgtattttaaatattataataaaaattaaaataaaatattacatgaaattttattagaaaaattctttaaaaaattataaaataaaattaaaaataaatattaaaattaatataaaataatatatgaaaaaaaaataaaaatattaggctgtagataagaatctccataaaacattcatttgttatatttttcaaatctaattaggcttcatgcaagtctaaactacaaaaaaagccactgaaacaaaatgtaaattaggggcaatattgtaaatagcatatttgtacgtgtcagcaatgaatacaggttatttggcaagtgtggaagccatgcaaaggtaactaaaaaccgaaaaacgacgaagaagacacgtcaacatcgtaaaataaattacttaataataataataataataacaataaatggggggcacgtgacaagcacgagctcctcctccgtaccgttcaccgtcccgtttgccagaaaattttgtaccggaaactattcccgctctttgggagaaactccttccttgcatgcattaaaaaaaaaaataaaaaaaaaccaccattgtccgtacactttttttttaattaattttttgggctgttttaatatttaaaaataaaaaaaaaatgttggggactgtgggcgccctaagctatatgcgccagtggttttgatgatatttaatgcaagagtgagtgagtgagtgagtgagtgaagtcattattaattagtaaccttcataaattagatttttctttcctcatatgtttttttattaattatttttaaatattacatatttgagatttgttgttgtgaagaatgaaatttaatcaattggtaaattagataaaattaattatgtgaagatatagcttatatatagaacaaaatcattcactatatgaaaaaataggaataattacataagacactattttttgtaaaatatttatatttttacgttcaaagaatatttttttttacatttttacggttttccaaaaaataacacgaaaacaacataaaatcaacaaga

SEQ ID NO: 314651 - DNA, 1132 bp, Cannabis indica
tattttatttatcaaacttttcactgaaaattgattttgtatttaaacttaaatgaatggtttggatgacttaaattagctatgtactagttagaaatgagaaataatggatgcttgatattatttttatattttattgactcactaaatttatctattcggtgactacataactgtaggaatattattgttcttttatattgatgagtagtcttgattttattactaataattttttatagatataagagttaatccattatttttaaataagtattttgcaaaataaattaaaagatcattgataagtattattttcctacaagggtcaaagtttgaccactcgagttatagatattacatatctgtcacgccgcgatcaggtcatgatatcttgaatctataaattctcagtagtttagtaaaaaattttaacaacctaaaagttaagacgcacgatttggtatatatgaatgtttgtgggacaaaaattctaattagcctaaagattacaaccaactgatttatgatgattttttttttgtcactttttatgctttgtcactattgcaagcaaataatattttttccccacacatttctatttccttatacaaagaattgtttttctttttaacgacttctgcaaggaattatattatatgcaaggaaagaattttctattaaaagtgtgaaggtaaaaatagaaaacaaaagatgctctaactttagtttttatttttttaaacacaatactctaatttcttcttctgattttgaattccttacaaattgtaaaattgattaatttcatttgttgcgataatgtgaataaataaaagagaagttctaatatattgtatacatctgttaaaaaaaatatcttgtatatatctttggttagagatagagatagagaagaggttttgtttggttgtttaaaaaaaaagatagaaaaaacctaaagggataacttcattttaatactattaatgtatttttatattttaaaacattatattgctaaggaaataataatttatatatgatatgtttcaattgttagacatttatatatataaactgaaatgtatatgtttaagtattaagtgcggaattaatcaaacatata

SEQ ID NO: 314652 - DNA, 757 bp, Cannabis indica
taagaatattgttttgaagaatagctttctaatgagtgattactcaatcttatattttcattgtaattttgatggttacatattttttactataatataattaaaataattaatttttaatttatacatttaacaatacttttttagtaattaatatttataaataattttatttttatatttaaattcttattataaattttttaaaagtattaaatcatttaactataatatttacaataatttttttttacaaaaattaaatttccattccttttaaaagtcgcacttcgcatgcggcagtcaaatattatataaatattaattgaataaaaaaatcgatattaataattttaaacttatttttaaactatctatatttattaaaaaagttgataaattaatataaaaaaactctaaagaattctaaaaaaaaaatattatgatactatttttttatataaataaaaaagcacaaattttttttatgtgtacattatagtgaagaaaaattagaaactgaacaataaatttataaaaaattcatcatataatgtcaaaataaatatcatcattgtatctcatttttttttagttactagtgcttttaaagttgatttgatcaccatgtctcccctaatattcttcccaataggtaaatactgatttttattagagtaattagcggctaaaccctcccaactcttattttacttgcaattaaccatccaaatttaaattttggtgggaaaaccta

SEQ ID NO: 314653 - DNA, 808 bp, Cannabis indica
tttcatttttattttttgattttattaagccggatccagctccgtgtttggggtcggggccattgtccgagtccaggattgggactagggtcggagtctgtaccccaaggtcgaggttggagtcgaagtccaaaatattgatcaagagaagaaaaaaaaatctgtttaaaaatattttgaaagtgctttttttttttcaaaatttttaaaattttgattctcaattaaaaaattgaaaagtgaaaacagttttataaaacatattttttcaaaatatttttacttttctaattaaaaaaaacataaaacacattaaaaaagtgttaccaaacgcacccttaatgttgtttattttaattttataacttagtgttatattattttttattttactagtattagtgtttcttaatggttattttgtatttttaaatatgttagtattttaaatcaattattatttttgtgatatgagaactaaaatgaaagattatattttaaaataaaataaaataaagattagaacgtaaaaaaaaattgtatacaaaattgatgtagatttaaaatccaacaccaataatagtgtagaatttggtgtataatttagtgtgtcattggtagggacgggacctagtagtatcaatgtgggggctatagccccactaacaaaatattgcaaatttaaaaaaattaaatgtaattttttaaaatttgtataattatagactaaaaaaataaaaaagacctccacaaaattaaataaatctagtaaaagtgattataatataagtaaaaatatttttttaat

SEQ ID NO: 314654 - DNA, 537 bp, Cannabis indica
ttttttttttttttttacaagttgatgtgctaatcagattctattttagtctcttttacactttttttatattctgagggtatttttttaggtaatgtttattatactttaataattaagcttaacattataacttaattatatttgtaccgttctaattaaattgttctattattctaccaatttagcaattttttcattataggagaataaatatatttttaattgtttagtttttttattagttacacaaaaactacaattaattatatattattttaattaattggtgatctcgttctttcttagttttgaacttaataatttattgtttttgaattactaataaattagaactattggcgtgctgctgatgttgtttggctagctcgtaccactcttcgacaatagatgtgtgctcaggctaagcggctggactcggattctctgccttctaatcgtattgacacgagagaacacttgtccaaaccggctgctgaacaaataaaattaatgtggatggggcggtttttgaag

SEQ ID NO: 314655 - DNA, 1577 bp, Cannabis indica
ttatatattatttttatgttattatcgtgttacttttatgtgattttttattgtttcgtgttatttttataaaatatcataaaaatatataataaaaaaaatatacataatcaaacacgtaatttttttattaaaaatagtacttttttgtaaattttctttttttatatataaataatatatattatatatggatatgtagttggttaatcatgggattgaagagaaggtattagaggatgtattgaaagtgagtaaagagttttttgagattcctattgaggagaaagcaaaattcttgagtgatgatcctttgaaaagttgtaagatatttactagtattgattatccaaatgaagatgtacattattggagagatgctttgagacacccttgtcatcctctacaccaacatattcaattttggcctcaaaaccctcctcaatataggtatatatatattatatatatatttatataagtgattttgatcaattattatagcacactcttatttttatattttagtacttgtgttttcaaaaaactaacaaatttctactactacaaaatatacacaattcaatcagaccatcgctataaattaatgaaaattagtcagctatgaaaattagtaaattatatgagataaaatttgaagaagaaaaaaaatgttctatctctcaattactctatatttaagattcacttagttcaaatagcaaagaaaggtttttcttttttaaaaatacacataattcatttaattggttttaaaaataccacattttttaaataagggtcaaatcttttttctaaggcccacctaaggtgcagggctaaacctaattgtacaatattgtgccacatacatattaaatgtaaaaatattgaatcatttataagagcatgaattactccactcgtcgtcactataattatggaatcccattctcatcatttaccgagccacgccacgtgacactgcaggattggtcgagagacttgcaaaattttcgagcattagcttcgcaaacatatttcgcattcaatttattttaattctatttaatttttgttttctttgtcatttatagagatgtggttggggcttacacagttgaggtgaggaagctaagtatgtatatcttagaattgattagtgaaggattagggcttgaagatggatactttgagaacaatggtgaattggttgaagctcaattgatgggcataaatcattatccaccatgcccagatccaagcttgactttaggattacctaaacatgctgatgctaacctcataagcctacttcttcaagaaatggatggccttcaagtcttgaaagatgaccaatggcttgcacttaagcctctccctaatgcttttgttgttaacattggccatattttacaggtaattattaatttataatgaacaaaaatatataaatggtttttttctcaaattttttactttgttaattttattttaaaaataaaattggattattaccacggtgaaattatgacccctctagtacttgtctcaaatagttgattggcgtattgaga

SEQ ID NO: 314656 - DNA, 1179 bp, Cannabis indica
aaaagtacgatcagcctcatgaaaagaggatcacgccaaacaatgcgccaccctattagcagatcgctttactcaactcaaagagagattactaacttcggcacataaagccttacattcgaaatagccataggagagaccatatttttattacttttgatatcagaaattactcttaaacaatccggctcaagaaccactccatcccatccattagatttaatccaactcaatgcttccttgattccaattgcctccacctcatgtggctgtaacatgcccgatttgagtactgtccgggcctgcaacatcacaccagcagcacatctcgccaccattcccaccccgtatcgcccatttgagttgaataaagcaccatccacgtttactttaacacttgggaaggtcggaggacaccatttctcagataaaaccatgttagaaccaggaagagtatcattttctagctgctgtgcattgcaccagtccagaaaattcacttgtgcagtgtgaattacctcttcactcgaaggagaaatagagttccaaacaatatcatttcgcatcttccacacggctcaaagagtcatagccgcttcaatgctttcaacctcactccacttagccaaaccttcctcaaaccagtgctgaaaagtcattgcaccaggtgccacaaccggcactttgttctgtcgccagcaggatcgagcaaagctgcatcgaaccagcaaatacagtgctgtttcaggggctgcagcacacaatggacacccagcttcgacttgcacatgcttagtagtcaataagaaccttgtaggaagacaattagcacacactctccaagaaaattgagtaccttcggaggcactttaatagaccataacttgctccgcacatcagtagggacagcatgattgacattgttattagctgtaacaccctaactatcttaggcgtattacgtgatttttaaacgtactgtgcagctcgttgctaatcaacgaggtttatggaaaaacgtgattaattaaaattttgctttttaattgaacttataaaccatattacaaaagactcgggatcccgatttataaaatcatttacaaaagttttaactgttcaactattacatcaaaataaaagtcgtctaacgaccagttacaaaaattcagccttgct

SEQ ID NO: 314657 - DNA, 742 bp, Cannabis indica
ttttttaattatgtcataatattacatttaatagttttaatttatactattattaattaatatttatatttgtaacaacatacctttaattttattaatgttaaaaaattatagaattaaacagtatagagaccacaatcaacaatatcaattcacaacatatgactggaaagcaaaagtgatatctaattataagtcactgatacatacaagttcatccaagcgtaaaaataattatatttttagtgtaagattatatgctcaaataaatggcaacactgaaagcgtatcttaattacgaagtaaaataacttttgagatctaatataatataaataatggattattataaagaagtaacatttcaagctatacttatttatatatatagtaatattatcaataattgaagactaataccaacttttataatttatttctttgaaaaagattaaatatattgaaagtagttttaataaattttcaactaagtgttggatactacaaatttatgctgatcagaaggaagaagataaaagactcaaagatatactacaaatttatgctgatcagaaggaagaagataaaagactcaaagatcgatataagaattttaatatatattccattgaagaaacaaaataagaagaaattgttaaatttttatcttaaataataaattacatataagtaatattttaaaaattataataaaaaacttatcctatgtaatattttttaa

SEQ ID NO: 314658 - DNA, 1580 bp, Cannabis indica
ttgtagaagtgaatttcaccatttttataatgtgatttttagatagcattatacacaatgaacacatgggcaagaacagtgatagagaatgtttggtcactgattggaagaacagctccaccagattttctagcaaagctaacatatctgatatggaatcaccacaaagcaattaagcatatcgacacggttagagcttacacatttggttctcattactttgtagaggttgatattgtcctcccagaagacatgattctgattgaggctcataacattggtgagaacctgcaagagaagctcgaacaactccccgaggtagaacgagcttttgttcatatcgatttcgagtttactcacaggccagaacacaaaagaaaggtttgatgaatcacaatgacaaatcatgacattcatcatcatcatttcaaggtttttataaactatagtctatgaataatataataagctgctcatttttttatgtttggccttgtttttttctttctttcttgtgtgaatgaaatactaatgtatcttttttataatctttttcgtagaatcagattattatctaagtttttttgtgtaattatataaagttgggttcaactctctgttggtttttttctctggagtactaagcctggctataacctgtaaaagcagtgcatatattttatgttatattttaaagaaaatgtcacttttgttgtatacacaattatacatcattttcactccaatgttaggtgacatcgattttttttttttttgcacagtaattaaaatattaccctaaacttgattttaataaaaagttatagtgatttaaattagaactagttgcaaaccaaatcacgggtgaaaatcaagtaacaagagaataatgaaaatggtttaagtatttggtcaaagcaaacgagatggttagcataggtagaatactacaaggcagaggaagtttggtccaagcaaaattccaattataatgcgcttgtgagtccttaacacatggacctagcataatcatcatgggttttacttttgtaagcaattatagtaggagaaatcctaaagggtactagtagtacttagtttaatatttttatttgtccaattttaatgatttataaaatatttaaaaaattataaacttaattaatatatttttttggactattctggagcactttatttatgcatgttataatttttgagtttattcaaattatattagctcgcggacaaaataataccggcaacatatgtatacctatgccgacgagaaaacttgccggaaaaagttttttttttttcttgtagtgtataaagagagacacacaaaatttatagtagtttatttcccaagtcgcgatggtaatagaactaggtttacctcgatttttcatttctcatgagaattacaagaaaattgactaatgaaagagctcaaatttctagttagataaagtagagagagattctttgaccttatgaggacttagtagaatgtaaaaaatgaggtagtggagctctctttttataggaaatgaggtccattaaaataatacaaaaaa

SEQ ID NO: 314659 - DNA, 1472 bp, Cannabis indica
tatatgccagccgaaatatacattaaataataaaatatttttgtcaattaaatataccaaaaatggaattaacatattacatcacgaattaactcatgacattaaaacaaataaaatatttagttttgttgatttaatatataattattataaaataaattctagagtgatgatgaaaaattattttattatcactaatttctttgacttctttttcattttattttttaaaaaaagaattatcactaactaattctcttttaattattataaaaacagtaattatgttttgtttgtttttttttcttataaggagtaattaattatattgtttagttgtcttatttatcacacttaattatttttgtgagaaaattacaactagtgtagtgtggataatcaaatcaactgaaacttaattaacaaacaattaacaataatgtacaatattaataaataatacaaaacaattgaagataaatcagggatgaaaagattaaacctataaacaattaaagcactaaaacaataaaattaaaaccaagatatatattggttcaagtcctataaatcgatgtgatctatgattctactccagttttggaacaccaccaaaattctcttattgattgagcaagaacatggtacaatagaatcgagatcgattctttgttggattcactcaaagtggttactttgacactcttactcaagaatttttttcatctatagaagattcttcatacaaatcttgaatccaatccctctcttttctctgtacctctcaatctttctctcttaagatcacctctcgaaactcgtctaaacttcttctttttgtactctaaaatgttaagtgttggtggtatttatagatacaatatatagatcctaaaggtggtgactacagaaagctaagttgttaagttagtcacgacttaacaaacttaacaaaatcctcgtaataatatctccatgtcagcataagtatagtgcttccgaatgagacataggcttcttggaagacaaaccaaagcgcacgatgaagggacttctcggatatgaaaggcaacaactggagttgactatttgggaatccctataaggagggaacaactagccatccgaaactccttccggaggaggactagctttcctgaagactacactcatagttgacatgatagacatctaagaacgcccttccgaatggcatctatcattccacgatacttcttctggatgaacaagttagcctggtgttgcccctgattttgcccaatatatgtggaccaaccagataaggacacgtggatcaagcaatttacaatatttgctaagtctttatgccataaggtagcgtccaggacatagctcccggagaaggcatatggaactccatatgctcccggaagctcgagtaatgctaaggcatctccgcgagatgtcaggtttctcctgagcaatcaagt

SEQ ID NO: 314660 - DNA, 1179 bp, Cannabis indica
cttcttcaattcccctttaagctctttcagccgagtaaccagttgaaacatttgagtacctttaataggcttttgccagaccttggaaataatccctgaaaactgaggatgtgttgaccacattctaaaatacttaaatttttttttaccactaagagtttcagggtatatggttagcacaactggggtatgatcaaagattccctcggtcaagaaaacagcttctgaattaggcaacttatctagccaagcttcattgacaggtacactgtcaatcttagaataaattctctcattgcattgtcttttattacaccatgtgaaaaaatttccacttgctttaagatcttccagttggcagaccttaatgcacttgacaaactcatttgcttcattgtattttaatcttttaccaattctttcatctttgtgcaatatttcattaaaatcccctagtaccacacattcctcctttataaccatatgttgtaagtcattccataacttagttctcccttcagcctcattgtatgcatacacaaatgtagtataaaacttgtacttaccatctactgtagaaataagtaaatgaataagttgactagtacatttaagaatacttacattgaaactgggtggattccaagccacaataattctccctattttgtgccatgcaatattggatgtaaagcaccacccttaaacatacttagatataaagcccctaacttctgggctttaacccttgtcttgagcaaaccaaccaaaccaattttatggctaagaatcaaattcttcactgctttttgtttctgttggtcattgattcctcggacattccaacttaggattctattcattttgaagaggaggatctccccctcctctagtatgatcatttgtaagtatttcatggcctccaattgtgattacttgaacttgtgtctttgtcttctcctcaacatagaaagaaggtcctgcttacatcgaaagagtttggaaggagttactggcgtaaacctcagtagctacttcttttcctatttcttctttccattgtaaacttgttgaaagccatcaacacaattggagctacggtccttttgttcctgctttctttgtttttttcctctcactatccattgctagttttttccttctttttttcttgctatc

SEQ ID NO: 314661 - DNA, 2235 bp, Cannabis indica
cagagaagtaagagttattgaccgagagctgacctgtaacaattgaggatctggcttttgcatcagcctgaataagagcaaactcccttcctggagcgggctttgctgctgtcttctactcttctttcttgaattgtgaacaatctctcttataatgtccaggaaaatgacactagaaacatcctcgactcatccagatggtgcttcttacaattggaacattttgggtatgtataacagatttcagaaccaccctgatagttgcctcaaccctagttcccttaaaacctcttgttctgatttaagtcaccaggtgcgatggtgtctttctcttctggtcagtggtcgagtcactacgacccctaccataaccagaggtaggaggagtaatggctccaccaacaacctgagtccctcagggctcttgaacaaactctatagtgtatgcagctagagaagtattcatctcatctaagtttctcagaataactgaaggtccttgcatcatacaattcccataagagaattccatacggttaccagccgttctctgttctgctaagaacaccagaataaaaacaattggaatttgagatgaaggtacgacatgggacctttgttatcttaatctcttaatttcctcatcttgtcgttgaatcctagcttccatttcaacgaacctttgctccaaatctgatggaacttggagttgatttttgtgaccacctccataagtctcttcacaatcttgagtataagggggatcctaatctctccattcaccaccagtatcgtccacattagcccaactagatatttttgctaggcgtccattctataggcaggcgtccattctataggacaaccctgcacattcatgagtcggctaggtcaggcagcaatcataattaaaatctaactaccgcttacatgggaacttaatatgctcctattcagctaacaatctactaacatgctttctatcatatttctaatcatgcataacaagtaaaaacgattacaactcgtaaaaacttatcgaaccctgagtcaagcttatctctgatgatgattgtacatatcttaatgatcttcggaaaacaacctggcggctctgataccaaattgtaacaccctactagtttaggcgtgttattgtgattttatatttactgtgtcgctcgttgctaatcaacgagtttattaaaaattgtgagtaattaaaactttatcaaagaattttactttaataattaaacataataatttacataaatcgagatcccattttaaaagttacaaaatatttaaacttcaaaggtggtcgtctagcgactagcaaagtgagccaacatcgtcttgaagacctaaacgctctaggtctaatcgtcttgatatatccagaccgtaactaggcgcccatacacctaatcacgatttgataactaggtcaggaacgttctcgatagagtatgactaacttcgaatccagcctatactcagtatgcagccaaaggtatctcgcttaggcatctcgcctagtacatgaacaacttggtttatgcacaagccttccagcaatggcatgagcactagtgtactaaaaaaacttaacaactgctctttgaccataaggccttgtgatatgtaatgcctaaaatgtgacttccactagcagtggttgtagtatagatcgggcggtcgattccacagagaggtgattatgagcaaaaacgttagttgaaaaatagaaacaaaaggttaatagatagtgatgatagtaaccaatgattttgtgatttttgttttggtaataaatattaaaaaaagagtaaataaaggtgtagttaatagtaaaagaaatgaaggcttcaagaatcatccatatgcttgtttagctattttgtacccttgattcacaaagttgataaatgatttaacattaaatttcattatattttgagtatacaaattcttgaaaatgaaagaaataatttaatcttatgtagaacctaaaaatgacattatacatcaagcaataatgcaataaaagattaaacataaaactaaacataaatattatttttactaaatagaaacacgtagctagagcatgactaatcctatatatctttactaaaaataatgacaaagagatagaaatagagatggtggtgatagtgaatgaaatgaacattaatattacttttcttaatttttaagcacataggaaga

SEQ ID NO: 314662 - DNA, 588 bp, Cannabis indica
ttttttagatcaacttaagctgtacacaagaataaaataacttgcaatcagctacaatttacatccaagtacaacataattagagacgtgcaataaaatttgaatctacattagagaggggccgcgcgaacgcaggcccccactaccacaaattatgacgttggctctcctacttgaggagaccataagctggcacccctcctaagtgcaatggaggtcaccaacctaggccatgagccttcttgatcgctcattgaccccgtccaggtaagtaagtagcttttcgttctttcctttacttatactatcaacagctattttatgttttattcgtattcaatgtgggacttaaggaaatagctttggtgtcaactgctaggtgccgtgagtgagatccaactccacatgtactctacatttggtaataaccccaaaaagaaaaaggataggaaaaaatcaaattattaaaaaagtagtgtattgttatattttagagaaatttgcggtcaaacccctttatgtttatatttgtagacacttaacccccttatgttattttttggtggtaaaactatcttatgtttactt

SEQ ID NO: 314663 - DNA, 1682 bp, Cannabis indica
atctgatctagagatgttatgacaaaattgattatattttctattttcgttcgtgttaaaaattatcttaaaggtggttatattaaaaaataaaattgttgaaaattgaggtcagggtcctatttgtacaattttgaaaaatacaggatcgatccattttgtcatttaacaaaacaaaaggtctaattgataacttttacaaaacacatgatccaaaaatagtatttatactaaattcaaagacttactttttaaaagaagaaaatgaagcttggtttggtcagtttaaactgaccaaaccgtggattaaaatggttggttttttttttttttttacatgtatattatggttggatgatttttggattataaccgtgaaaactgaaaaccaaattttggatttttttttgtgtaaaaaccaacaaaccgatcattgctcacccctagctcacattagcatgacattgcctgctttgaaactagacactcgagaatttatttttgataccttcccaaatgacctcgtactgatagagtatgtggaatatttatattcaagacaatttttatttaatctttcaatgtgagacttaaattgataccccaacatactcctacatatgcctctcatgcttaaagatagtaggattattcatccaaaagagaaaaaaaaatagtatataggattaactagataccttataattatgaaattatgatcctattattagatatctatgaatgagtaattcaaaaatattcactcatcaacaacaatattgtttgaaccaattaagaagagaataattgataattaatctcaacttctctatgatcaaagtacaattaaccttattttcttgggctgtcctcctagaggtaatggtaatgattattggggaggaggagagaaagggtcaggttcttggatttttggaatcaaagagttgagtttcagggtccttaggaccatcgacgccggcaacgggcggtcgatcttaccacgtacatggtcgagcaagatcagtgtaaagaagagaagggagtgacagtgagagagaaaggaaatgctgcaattaattagagtttacaattagagagagaaatacagaagaagaagaaaaaaaatgaaaaagaatatatactgtattattgtttataatatatttatttttatagtttttaaattatttttataatatttaaataattaatgttataaggaccactaaaaatatatcacgcgtaacgtgtggcacttacctgagattttctataatgaataacaaaacggaacttgagttcaatagattttactgttaaaatttcaatttttgtggttaagtattaaaaaatgtaaaatttaagtgattttgctgctaatatccctataaattatgcactaagaaaaaagtacacaaaaatagtttaaccgttatagatggtcttaggtgaaattatgtggtctcgtttggctaagcttatacttttactaatagctaaaaatataagataagtataagttttgacttatttttagtgtgaggaaattacactctataccctttttatattgtcctcttttatttttaccctcttttttaaagtctatcacttttacctcttttttttaaacattgtaccaattttgcccctgtcacttcaagatactctccatgtga

SEQ ID NO: 314664 - DNA, 951 bp, Cannabis indica
tagggcacaaaatccaacactttcttgggaaaaagtgtgccttcctaagaagtttggtggtattggctttagggaaggaaagaaatggaatgttgctctcatggccaagtatctttgggccatatcttgcaaacaagacaaattatgggttaggtggatagatgccatttacttgaagggtcagagtatttgggatgttgaatttaaacaagatgccagttgatactacaagaaacttcttcatctccaatcagttattggtgaagctgatgttaagatggcggagaggaaaggtaaatttcaatctaaactgttttatgtctcgttgatccaagagcagaatgctgactatgcgaggaatatatggaatagattgatcttgccaaaacacagatttataggttggcaaattgagaatgaacagctgctaacgagagataaaatcagcataatcatgcctatttctactgatgtttgccctgtctgttgtactgtgatggaaacacacagccatgtttttaccaactgctgctacacacagagagtaatacaggaagtcatgtcctggtgtggtgtcttttgttggccgagcaacatcaacctatggttgtccaggccttcgaataatttgagggacagaattctgaatgctgttgtgttagctacattgtattcaatttggaagagccgtaatgggtgcatattcgagctcaaatgcaaggctgctgggtctttaagcagggaaatcaaagtggcagttaaacagagagttttaagctgcaacattagggagaagggggctttagacaatcacttaattaatgtattagaaagttggtaatgttgtgtagtttcttgctggttttgtagctggtttttgtactttgtactgctttgctagtttttgaataaagatcctttcttgttcagaaaaaaaattataaaaattag

SEQ ID NO: 314665 - DNA, 487 bp, Cannabis indica
attctcgtgggatcgacctcactctttgtaagtctattacttgttaacgatacatatacttgcgtgtttaatttaccacaatagtggctttagagacaacattgagtttgattctcaattctgcaaatctagagcttgagattaatttggtgaggtaatcagctagttgaaccaaagttagaacatgcttcacttgaattagttgctgcaatactttgaccctaacaaagtagagattaatctctctctctctctgtctctctatatatatatatatatatatatgctttgtttgggcatggaggatatggctagcagctagcaaaattgtgctctggttgtcacaccagaaggaaggaacgccatgtttctaaatacgctctgttatcagagattgaaaacaggacacctcaaaaaataatttctaagcttctaaactctgccattttggccttcccttcgtcatttgctagattggacggtccag

SEQ ID NO: 314666 - DNA, 1228 bp, Cannabis indica
ttttttttttttttttgttctagttgggtatggttcagtttggcaaattggagctttgaggagtggataagaaatgttagttgcagctctttgttatttgaagcccaataaaaacttgaataatcttcagttttccattcatatcatgctatagttttggttgagtataaaaaagtcaaccaaaatagtatacactgtatatacatcaatgatatgacccgagtagaagaagtctatgcagatatgacctgttttgaaatttgaaactattttaagagagctttggctcaagttttggatagccaaataaatgtaaatggaaaataaaatatatgattaaaaaagaagaaatagatcgaagaatagctgggtttccgaactatgcgcaaaaagggtacttgaacgtactctgaaatagagaaagagaaagaagtactttaacagaagtacaaaaatctggggtagcaaatggtggtgtatttttttttcctattttacttttgaaggagaacatgtgcttttatttatttaatatatatatatatatatatatatatatttgtagcttctttttgttatttttattaatttgtgtttgtgtagtgtagaactgtagatcatgagtaattaaagtataaagtaatgaaaaagactcaagatatacccaatattacatatctctaacttttatggagactaaagcaaaatttaaaaatgaacattttttaatactgatactgctttatttgttagtaatagtatatttggatatgactttcacaacacttcaaccttcctatttcttcatcgttgttcgtgatcgcatccccagtacttgcttctccatcgttctgatcctccaacaaactatcacggtaaatatctctctctctgtttttctttttttctttttcgtagactgaattcattccattttatatagccgtatttcaatattatgtgaattgtgatagtattttagttggtgtatatactgtttgatataatgtctgtgtgattcgtgaaagaattggttatattaagggccagtgatcacgattctgaagcaacttttctgtagtttaatacctcttgatcatattcattgttcaagttaccttaagagttttctattttaattttctttgtctatcgtttgttgctgtaaatgagttcaatatttttctttctttttttgtttcacaactcttttttattctttcttttt

SEQ ID NO: 314667 - DNA, 809 bp, Cannabis indica
tgaattctactaatattttataaagttaaaaaaaattagtttgcatatattctaatctttagttaatttaatagagaaaacaggtatatttggaagaaaaaaaaaaggaaaaagggcaaatacaatgcccaaaatcgacacgtggcgagtcatcagcccctctgccagcagcactatacccaccagctgcaaatataaaaaatctgttaaatatgtcttaacaaaaattatcaacacttacatttatttaacttctgattggctcaatttctttccccatagcatgcggaaaaaataaggagccccacaatagatttaccctatatatatatttaactaaaacaacaaaaaagataaaaaagagtaatgaaaaataataaaaagaatgagagaaaaaaaaatgtaatatttttacctcactactatttatagagctacaactacaagtaactaaaagaatagttatgatctatcttagtttactatttatctcacttgatggaggtataattttactaaattttttaaaattttagctaagagcactcacaataagtgagctataatagctaaaaaattaaaaaaaaaaaaaaaaattagctaagaatttaaaattaagctctccaacaaatactttaaactcgtaactattttagttcattccaaacttcaagaatttttctttaggctaattagtaattttttcccctgaactttgacatgtactaaatcgtgccacctaaactttttttgccattaaaaattccccccgaactattgagattgttaaatttaaggattttgtctaa

SEQ ID NO: 314668 - DNA, 538 bp, Cannabis indica
tcaaacttccttacacttttatacacccaagtaaatctctcaacacttcaagcaccatcataaaatagaaccagaaatacaagtgatcctgcaattcaataccgaaccacaaaccactgaatcagaatagcaaaattaataaaaaattacaataatgggaaagtgtcaaaaaataatcgagaaccaatcaagaacctatagaaaagtaataattaataatcgttgaaaaaaataatcattcaatcatcgagaatagtccagaacatgtcaaaaaatcgtcgataatatggggcaagaaagttggaaattacaaatatacacaccatcaaaaaaactattaataaacaatcaagaacacaaagataatatgccaaaaatagttggaaacgcaaaaccattttccattttggcaaataatttagaacctatcgacgacccatcgagaaaggtcttccttgacattgagacattagtgttgagaacctttcgaaaacgtatcgacaacccgtcgagaaaggtcttgttgggttttatgccc

SEQ ID NO: 314669 - DNA, 1291 bp, Cannabis indica
gtaattatttttatatagaagtaccttgttaatatgagatttagaaaatgtataactaattacaatttaaaatttgtttttatttatagttggacttaatatatatattttttttataataaatcagtggttaattttaaataaaatattctttgataaaaattttaggagaatttacagatgaaaagaaagggtaaaatcaaaaagcaaaaaagaagatgcacacgcttccaggaatccagtgacccaaaacatttatttatatatgcatgtcagaaagtaaactgaagccaagtagaaagtgatttttaacttccaactattattctatttttctttgcaataaaagaaaaaggtattattctactttcattggagcagctcctttcgtgtttgttttattagagagagtcaaaagtgtgcacaaaagccagaatttgatatttggttcccattttttttaaaaaaatagttcacaatttacacgtctagttaaaaaggttgtggtgctataatttaagttgagcagataaactaatatatgtcttggaaatgaaagtaatatataatttttcagagaaatgctaaaagggattactggtgctaaacactattatacgtatcaatatcgttattagtgtaatttagtattgagtcccatagggggtatcactagccaatcataaggcaacacgtcttaagggtgctaggcacactgatgcccaatagcaatgatcataattttcaagtgtgggttgtatctaactatctatctcttgactattttgtaaaagtattgctaaaagacctaatttgataattattattatataaaaaaaattacttgaaaaagttacttgcttgaagtgttagaaaatattagtaggtgaaaatgagtcaatttaaaaattattgactgtttccgaacaaaatattaattcactaacataacattaatgtttcaataaaacaagttcaacttcacatctaagatgatctttaattaatgaaatattataaaagtaatgggctgttatattttaacatatcttaaaaaaattaattaaggtctaataatgctgtaaaaagtatgtcaaagttaattattcactcaataatttttatgttaatttgcatctaatttattagaacacaaagctaaaaattaggtcaaatataatattaacttaaataaggagtgaatgatgttatttttcttaatttttagaattatactccaacatgtaagttatttttttccccaaagtagatgcaaattaactcaaaaagt

SEQ ID NO: 314670 - DNA, 1101 bp, Cannabis indica
ttttcttgaagtctcatttttctttgtttttttttgatatttaggatattgccttgctatttatcgactaaagaacttagttttaaggctaagttcccaaaaagtgatttagcggatcacttattagttcatatgtgttgttacttaggggcctttaaatcgtcgagcagtagtttccactcaagttgaccggcacacttaaattcagaattgaggtaagattagtataattatatgcaagcttacatgttatagttgcctgttagatagcatatcagtaaaagcaatattagtgtacataaagctgcactgaatatcgatgaatatatgttaagttaaattacaaagccattagctaggcatatcagtaagagcgatatcgatgtacataaatttgcatcagatgtcaacggatatatgctaggctttatcatataaacattctagacctagtatgctaggctatatgctagggttttgttattgattttgtcgactcactgatactgtttacatgtgtaggtaaaagcaaagcgaagtctgaacaatagtgagctcaggctagatgaagattgtacagatcgagacagttagacctggagtattcagatcttcgaggatagttagggtttattttgatagtcattaggggacaacttttgtagtacaagtattttgtaaacttttgtaacttataaaatgggatctcgaaatgtgtattgtaattatgtattttagtttaagtttatttataaaatttctaattattcacatttttcagtaaatccttgattagtaaaggagtgcacagtaatttgaaattacgatcatgtgcataatctagtagggtggtacattgagccttaaaaattacaacatatttttttactgttagtcacaagaaaatttgtgactaaaagtaaagaagttgtgactaatttataatgattatttttatgttgtgactaaaaggtccgtagctgaatgtattagtcacaaaaattataatttgttgtgactagatgtgtttttagtcataatatttattgtgactaaaactagattagtaacagcttgtatctaaatactatattttagtta

SEQ ID NO: 314671 - DNA, 1313 bp, Cannabis indica
aaactcaaaaaaatccctccttacaaacagaaatatatccatggctgataaaaatccaaatgatggaaatcattctgaagaaactacacatcgccttgggaaagagccaatgggttcacaaagaccccatactactggaacgacacattcaaagagaaattatggtggtgataatcgaaacccagaaagaaaaaatgaagatatataccaataattctataaggtatatacctagaagtgaggatgcatatgatccaactaggtatgtaccattaatggaattggaatttagacaactccggtacttaatgggcaccaagttggtattgtctatcaatgtattgctagctagtcaggaaagtatgtcattgcctaggggtggaacccttgagctgacttaataattcttggatcttcctcaattaggtcatcattcttgctcctcatgcatagtattcacctaggacatgattaatgaccaactgatattcactatatatgtctaggtagtctgccctgactttatgtgcaagatttagtccaacagttagagcttcatatttagcctctttattggacagtttgaaattgaacttacttgccccatccagctgcttccccaggtgtaatgagggcaatgccagcaccagacaggctgtctgtacaacttccatcaatgtgaaacttctaggtttaattgtcttgctcttgcttcttctctggctcttgcttttatcctgaatcttgagagattttaagagacatgcatgtacattcagccacgaagtcagcaagagcttggccttttatggccactcttggttggaagatgatttcatattggacatgttttatttcccacttaagtaactggccagatgcttcaggtttctgtagtactttttgcaagggttggtcggtgtacacttttatggaatgagcttggaagcagtatgtcagcttttgaaaaagtgggtatcaacttttagcatgaataagtcttttgctgacatagtatattgggtgctgaatgccatttcttctctaatgagagctgaacttacaaaaaacatcgtgactgtcaagtatatgcccaattcttcattgtctaaaggctttgataggataggaggttaagctacttgtttctttaactctttgaaggaagccttatactcctctgtccattaaaatttcttatttcctctaagtatgttgaagaaagggacacacttgtctgtggattttgacacaaaattgcttagtgctactatgcggccagttaagttttgcactgtaaagcccgcttagtt

SEQ ID NO: 314672 - DNA, 1651 bp, Cannabis indica
tcctcccgaattctgagttgatgataatcagatcgcagatcaatctttaaaaacaccgtctttccctgaagttgatcgaacaaatcatcaatttatagtaacagatactagttcttgatcgtcaacttgttcagttcccgatagtcaattcacattctgaggaaaccaactttctttttcccaaacagaactagagctccctagggcgatacactgggtcgggtaaacccaatatcaagcatctcttgaagatgtaacttaagctccttaagttctactggagccatcctatacggaggtttagaaataggttcaactccaagtaccaaatcaactacaaagtcaatttgtggcggcaatcttgccaactcctcgggaaatatgttgagaaagttttaaacaactctgactacttcaagcccaaatgtctcgggtctgtgaagtcaatcaccactgcgaaaaatcttacacatcccctgtgtagtagatccctagcccttaaaaccgaaataactggaatcagagacccctgaaccgatccaacataaacaaatggatcctcatcctcttgctaaaaggtcatcattttctgcttataatcaatattggccaaatacttggacagaaaatccatcccaagtataatatcaaactccgttaatttcagttctataaggtcagctatcaactccctatcttcgatcctaattggcatagacctagtgcgcttattggagataaccaactttccgctaggcattagggttccgaatcctctttcaagaagatcataaggcctacccaaaagattaattactctcgataccacatacgagtgtatagtcccaaagtcaaatagtacattaaaatgggagttgatgataagaagctgacctgtcaccatagaaggactagctgcagcatcagcttgggtgataacaaatatctaagcaagtatgggctttgcttccagcttctgcttatctttctttgcctgagggaaacttttcttaaagtgcccaaccatgccacacaggaagcatgcttttcgattacactctctgggatgatgtttcttacaacgtgggcactcaaggtaagaataacccttgcatctacctttgccttggttcccttagagctgcttgttttgttttaaacccaccactgtcgacgtaggtttcctcttttgctcaaccacaaagcccctaccacctccaccataaatagaaatatggcaagtggtatcctgacctcctatcataacctcttgaggttctagaataaattctttaaggcttccagtcaaaagagcattcttcatatttgaatctccctgaagaactgtatgttcatgcatccaaattctctcatgcaatgtttccacttggttaccagccataccatgctccgctaataataccgaatcgagaatgagtggcatatgaggtaaaggtactacaggagacctttgttgtttcaacctctgaatctcctcatcatgttgttgaatcatagcttccatttctgtgaacctttactccaaatctaacagagcctgtgacggatgaacatcactcccattagaagcactccaaaggctttcaccttggttacggggacaacttggactccattctctccaaccgtt

SEQ ID NO: 314673 - DNA, 2000 bp, Cannabis indica
aaataaccatggaagacattgaagatgaagtcaaattttggagaccctcgattatatgttatgtgcttggttcaaatcagcctttgtagatactggaaggctttacaaacagggtatggaatgggaaaattgacagagttaaactcttatcacatggcatattcataattagattctagagctgtgagtttcgtgatgaagtgcttaatgggggatacatatttttcaacaaaagacctacaatcatgaaaccctgggatccaaatactaacttcgaaaaagaggatattcatacagtacctatttgggtgcacttaaaagatttggagctgaagtattgggggcaacgttctctcttcaagatcattggtcaggttggaaacctgtcatggttgataatgtgaccaagaaaagagagagatcgagttatcctagaatacttattgaagtcaaaatgaaccaaccattgctagatatgatcaatttcggagatgaaaatgggtccaatacacatgttggagtccattatgaatggaagccaataacatgtaaacattgtactggtttgggtcactctacagaggaatgcaggaagaaaagtgaaggaaaaaaatagtgggttgtaaaagatgacaaaagaggaaaagtaatggaacaggggattcctaaaatagatacagaagggttccagcaagttactaagggctagaaggcaaaagactcctctaatgtggttatgacacagactggaaacaattttcaagttttagaggaagatgagaatactgggcagatcataaggcacaatgatgggtgcagtactatgcctcaaagtgttaagacaggagaggagggagggccctctcttgtcaatggataaaatgctatgttggaatgtttgaggggctaacagcctgcacaaacagaaccatattaaacattttattatggctcaaggtgtaggtctggttgggctcctcgaaacaagagtcaaagctcagaaacttggagctttgtactcaaatgtgtttctaggatggtgtttttcttcaaacttaccatggcataaaggtgggagaatagtgctagcttggaaccctattgtatttcatgtaaatataatagcttgctccagccagactatgcacttggttgttcaatcagttgatggaactttttcttgtttcatcaccctagtctatgcttttaatgatatattaggaaggaaattattgttgaaggaaatacaggggtaccacacaactgagaaatggatgctaatggctgattttaatcatacattggcaaaggaggaaagaattggaaattgagttaaatatcaagctggcagagatttcattgagtgcattgaggcttgtaatgtagaggatgtgaagtacactggatgttttttcacatggagcaacaaacagcaaggtggggattgaatctggtccaaaatagacagagtattagtaaatcaagcatggcttaatgcttttcctactgctgaagtgctttttgcaactaagggcacctttgatcactcccaagccctgctccacattcatccagaatgccaaatcagggaaaaagccttttaggtacttttgaatgtggagatctcacaaagattttgaacaaagaattaaggaagtctggactcgacaacatcatggaacaaaaatgtatcaactcgtgtgaaaattgaagagtcttaagcaggtttttaaggagataaacaaggaaggttactgcaatctccctgcagaaacaatcaaagccagagaaaacttggagacatgtcagaaagccgttcattcagatccatcaaacactcagttgcactcagaggagctcagtgcgaggaacacactaatgtagaaacaggcagattatttctctatgttgcagcaaaaggctaaactctcatgggtcctaaatggggatgaaaatacagctctattccatgctagcatcaaggggaggaggaggcaaaa

SEQ ID NO: 314674 - DNA, 818 bp, Cannabis indica
aggaaacaccttaaaacaaatatgtgttgtttaaattaaacaatagtataattgaatttggttccaatatactctctccttcctaaaatcaaaatcttctatgtttttcttattcttccaaacattagattaaagttcgacaatacaagtaagtggtatgttgtcacctgttattggttctataactcaatattatgtcctacattttttaattaaaaaaaataaaatataaaaaattgttaataacactatcttgtattattaattatcatttgtaacatcatattaggtttaattgtattgtattatattaaattggattatttatcattatttgatataatactatgttaaattttaatttatattaaaatattatatatttaggtatctataaaaattaataccacatatagttttatataaaaatattgtataaaatacaatttaatataatattatacaatacaatacggtgtacgaagcctaaaatgcttaataacaattgctcaaatattaacaacacaactttacttgtaatgatatatattgtgaacattgttatgagacaccaaagtatttaatatcactaccaggtttcaccttataattgattaacaattttttataatctttattaaagtaaaataagtggacttgatattaaattacaccaataacaatattatactttataagaaggctaattagcaatattatactaaattatgctcctgaaatttttttggtcgttgatttaaggacttttatctaattttagtaaaaaaattctaacatggatgaaagttcaaggggca

SEQ ID NO: 314675 - DNA, 1175 bp, Cannabis indica
aaactaacagccatgtaaccttccttcccgcgtctcttacgttttaagtagtgcattatttcataggagatcataatgttgtccgttataagtcttccgggaacaaatgcgctttgattatcagagatcaactgaggcagaacatctttaagtcgattagcgaggaccttggacaatattttatacaagacattgcacaatgaaattggtctaagatcactcatcgaaataggatttcgcaccttgggaataagaaccacatgagtatcattcagtccttgtggaagctcgccattagagaagaaattccgtatcatttgagtagtatcaggtccaacagtactccaacagcgttggtaaaaaccaggtgtcatgccatcgggccctggagatttgtcgggatgcatttggaacaaagccttacggacttcctcattcgaaaccggagctagcaaatttgcattttgcgtggcagttatggtggtgggaatattgtttataacacccgaagtatccacaccagtagagcaaaataaattctcgaagtaggaggttataacatcagtcagaccatcttgccaaccaatccaatcaccattagaatccttaagtttggtaattgaattatgttttttccgcgaagaagcaagggaatgaaaatacttactgttgtgatcaccatcccgcagccataattgtttcgacctttgtctccaaaaaacttctcgcttagcgtaggtctcgaacagttcattttgagcatcttgaaacttggctatggagatatcatctcttcctttcttccacagctggacttccttcttacattgctgaattttctttttaaaattacccgtgtaacattgcccccaatccgcaagagctttgccgcacaaatcaatttttttcagtgattgaattagagttactaaattcccagctgtccttgactatttgggtacataaaggctctctcaaccaggcattttcgaatctaaatctcttcttggcagtggtgaaatcgggtgcagaaagggaaagaagaataggtgtatggtcactgctagagatttctaaattaaataatttagcagaggtgaacatatctagccacttttgattaactacagccctatcaagccttacttcaacccaattagatgtgcctcttccct

SEQ ID NO: 314676 - DNA, 852 bp, Cannabis indica
tagctcagcaaactgacaaaagacaccgagtcctcatagaccaaggaagacttaaatatttttaaacagacgtcattatagttacccaaactaacaaatatttattattactactaaaaaaactaataaatatttattatttataaataaaacaaagaataaaggtaatattgtattttgttatatataaaaaatgaataataataatgtaaatttattaatttatagggcggtaaagcgaagaaaataataatagtgttattatatatgaatttttctccatgtcggtactggcacattgtgatgcatcatatccacgtcaataatatgctcgattacggatattattaatatttccatgatcatcaagaataaataaataattatttaacggacaagagtccaattatatatttaatttttaatatcaactaaaaattaaatttaatactatataaaaatatcatctaataaactaaaatttaaaataactaaaataacaacattatcaaataataaaatagattacaacatatgaaaataaatttttaagactgttttatcccatgtgtctcgcgataagaattttgcagctcataatttgacaaaatataccctccggttagatgatgagctatcctgactcgagaaagtttcaccgttgattgtagttggctgcattattaatcatgtgtgaatccattcactacgtcaaaaaaaaatcaaaacatttgaaaataaacgtacaaaacaatcaagttttacaaatccaattccaaaaaaatactaaatatataattaaaatatatatcattaatttttaatatttttattaaataaattaaaataaaa

SEQ ID NO: 314677 - DNA, 1141 bp, Cannabis indica
gcataaaacccaacaattataaatatcccaagtattcttcttggcagtaggttcctgtcctagatgaggagaaagctcaagattgcatgcctcgagcacaatacctccagaatacttcccctcaggaagtcgaagaagtagcatcccgaggtagtcaatgtggttggtcacccacaatgcttagggtcgagcgcaatactctagtttcatttcgagatagtcgctataacttttacacttggaatcccctcctcatagatcgtattacacataggtttgatagttggtatcccaggttccacgtccaaattaactatactgagtcatactatggtatagtccagcagtacggtaccatgacagatagggcgagtcatttagacgcgagctgggatttagaaccaagtaattcctatgatatattcaggatcacaggttgtagggattttagtagatattatagtccttcttcctcgtcttctagtaattatggtaaattccttaggcaggaaattatgccccaatctccccttttacttgattttcaataaatgctaatactttatcttgtctcacagaaatgaatttcgagggtctcgtccaccgaaagggaaagaagaggttgaccatcttggaggcctcatcggactcgaggtggaacccctaaagaggttcaagaagacaacgactaacaagaagcgagcctcccagaatgctaatctcgaggtctctgaaacagacaccgaggatcaaatccctcctccgatccctacaagtaccgacgagcctacccctaaagcgatccaagcttctgcctcctcgagccaagcactcaaaactttggctgtagaggctagaaaaactagctcagagtacaccgcagagtttagtgcgacatgctgtcgtcatttcaagtctttcctccccccatgaatgggattttgatcaatcatggggatctggggggaaatgctcaccaggagtttatctcagaaccctctcattaaatgtccttaccttcatctgatgacttctttttccttctatccttcaaaagacttatgtatttttgtttgttggtccagacatctttcatttcttttggcgcccagtggggaggcatggataagatcaagtatct

SEQ ID NO: 314678 - DNA, 749 bp, Cannabis indica
atgtcccaaagcaaatgaccactaaagaactcacaaagctcttacccaagtcgtgggtcaccaactatgcaaaaacttcacaagccataacctatggttcaaaccacaactaagccttcctaccacacaaagaagccaaacaaaaacacctagctgttttcgcacccaatatgtcatcgcacccatccaaccaatagatccagaaatcttgtactttgattcccagggaaagccaatttatgcttttgaatcctcaaacagacaaaaatacttggatgtctgtaactgtaaaagttgtttaaaagatgatgagccctcacgaagtcccactctaggaaagcgactcaagcaaagggtagaaaaaggcaacaaaaatatcaatttattaggtcaaccatctagaaaattcgactatatagtcaaatactccacaccaaagagctacaatcagcctgccataaactaccggatggcaatcggatgattctttaaaagattcacagccacagattgtctttccttgttacaaaagataagcaaaatggatgaagaagcatggaaaaaaatttctagcaccaactgttcaaccattagttcaatcacttcgtgacgcaaacatgatcacctctagcgcatccattaattatgatgcacatttccctcatctcaagaggttcgaaaagactgaagagcaaggtaccacttcccaccatccaaaaatacaaaatcctacaactaggaatgctgat

SEQ ID NO: 314679 - DNA, 981 bp, Cannabis indica
caagacaacattgttccaggcttgtttgtcactatgagtagttaaaactattacaatttaaattgcttagaaacaccataagttagattttatttggagagaagtttctcaatgtcaccgaacacttgatcaacaccaagatatagaattatcccatacttaaacacagtactgaaataaaatatatgtaggaacaaataccatagaaatgggattcacatgaaagaaaaattgaagtttatttattgaaccaaaatcagaaaattatgaaagtttcttcaaatctttccatccagattagacaaaccacgtatgattcataaataacaaatattcatattataacttttaaacggtaataatatacagaatttctaaatcttagaagtaaacaatatcatgtttttgttagcaaaaaaaaaaaatatgggaaacctaactattattaaaaaagaagaaaaggagaaaagagaattggatagtagctaaatcatatcccactaaaacgccaatgtagaaatctatacaaaatagagagaatcacttgaaaagagtcaaagaaccagacaaagttttcattccatcgtctctctgtatttaatcctcagtacctgttgtgagtgaagtaattgtttatccggccaatgagtgaaacggaattccttctctccgatctagggtaccgctgatgagttagtgacaaaaccgaagaaagcagaaaaggccgaaagagagagccaagaagttatgtgctatgagtttggaaggatgaaatgaaagccaccttggcttataggtgcgctaactcaaacaatacaacatacccacagaattgctattacgcacactactagaattagcctttggttagcaaccattcataaaaattattatatattaaattatacttaattatactaatacatttatagaatttttactagacaccaaatttaacatttttttttatatttttaatta

SEQ ID NO: 314680 - DNA, 1114 bp, Cannabis indica
tatattttctcacgaaaaaaaaaataatcataataaaagatataatttattttctttttagtttcttttgtatttaattagtaggaaaaaaaaaataattcaaacaaaatttattggtaattaaataaaatgctatgttttgtgtgatttattactataagtatgttataaatttatgagacaatttgaaacttattgaatataaaacgtatttttgaaaagggttagtgacaataaaaggattagtgttctctctctatctcttcctagctagggtttccttatccctttcgatctcgtgatccatagggtttctcctcttttgttgggttcgctgatcagatctaggttggtcgttggtggcgccccgagctctcaagttctttagcaggcacaagttgacagacaaatatgagaatggaaacactaacttaaaactatcaatggatattacatagaatgttttaatattccaagaacactactattattttatgtaattttctttgatgtggaagacgataaaacaagaacacactattatttaatgtattattttcatgacaatttaatactctttaattattataatgtaattgcttactttttattatattttataataacattaatatgtatatgtacccgtatataatattttaatccaacaatttctacttgagcaacatataaaaatttactatcatgaaagtatttacaacaatctcatctattaactatattcacatctaaagaattaaagtaatcttcctcatattaataatattaaatgttattattgcagcctttaataggatataccaaaattgtaaattaatattatacatatatgtttattattattattattattattattattattattattattattattattattattattattattagggtaaatactattttggaccttgtattttgtaaaagttacagattggaccctgtattttgttaaatgataaaatagaccctatattttctaaaatggtaaaaatacgaccctaagtttaattttagacaattttttttttaatacaaccaacttgaagataattcctaatacgaacagatacaaaaaatgtaa

SEQ ID NO: 314681 - DNA, 2713 bp, Cannabis indica
aataagtgtcatctgtttgggggtaagtgaacaataggaggattagcgtcgttttgtcacactcacaatatctttaccgtcggttttaaaaggccacataaagcataagtgaggcttttaaaacgacgctaataatgaacgaatttttttaattttttgacttttaccgtcggttgggtaattagtgacggagtaagaaccgacgcaatttatgtattttttgtgacattttaaaaatgacgaatatattcaatatggtactattcacgtcggtcaacgcgatgaacagtcgcgttgaccgacgtgaatagtgacttttgtagtagtgttagtataaaatttaatacatattaatttagtatatcattaaaataaattagtgtaaagattctatatagaatggttcaccattataatttattaatgatctttagtcatatataactagagatggaaatttataccgcagagatggataaccgcggggacccgcacctaatggggtggggattccccatcttagtggttaatggggcggtggtgggggacaatttcaatacccgaagcggggatggggcgggggcggggataatactatccgcaccatatccgaccccgatatagatatatataattttttttttttttttttcaaactttgagacatatttagtttttattttctattaggttatgctttttttaagtagttttatcttttatcttctatgaattatgaatgcataataaatatttgtgagaatattggtttaatttatttttttcaattattttaaattaatgttttttttttcattttaccttaatggatacccgatgggttccccataaccgatgggtattcccctaccccgaatccgttggttattagacggggatggggcggggatgggggtataaataggtagcggggatgggggcggggattgcattccccgtacattaaccgaccaatttccatctctatatataactacacattatataagtggaaattcacgtggttctcctaagtttataagtcaacattaaaatggagccatcgccaagttattcatgactaagttttagagaccgatgacccaattgatgccaacactaacctcttctcaaagatttcatcattatataaatatgtatatatatatatatatatatattataaaagataaaggatttatatatctatgctcaaaagaaacctaaaagagcaaactaaacgcacacccaaagaaaaagaaaaatgaaacttctcaaattagccataatattttttcttgtacttgtacagttaaatccattggcagaatcagctacttcaacactagaaaacttcatccaatgtgtctcaattaattcagatttttcagtgttaccactctcaaacatactattctttgctccaaacacttctctctacacttcagtccttcaatcttcagctcaaaacctcagatacttaactcctcaactcccaaaacctcagttcatcttcacacctttacacgattcccatgtccaagcagctgttatttgctcaaaacagctcaaattatacctcagagtccgaagtggaggccatgattacgagggtctctcctacgtttcgcaaattgaaaccccttttttccttctagaccttgcaaacctcagaacagtcgaagtggacatcaagaacaaggcggcatggattcaggccggtgccaccatcggcgaggtttattacagaatttatcagaagagcagagtccatggctaccctgctggactctgcaccactctaggcgttggaggtcacataaccggtggcgcctatggctccatgatgagaaaatttggtttgggagctgataatgttgttgatgctaaaattgttgatgcaaagggaagattacttgacagaaaagccatgggagaagacctgttttgggccataagaggtggtggtggagctagtttcggcatcatattatggtggaagatagagctagtacaagttccagccaaggtgacagtttttacagttagtaaaacgttggaacaaggagcaactaagcttcttcataggtggcaacaagttgttgataaacttaatgaagatctattcataagagtgattatacaatcggttaataaaggcaagaacacaactcaaaagactatttccacttcttaccaagctctgtttcttggagacactaacagactccttgatgttatgcgtaagagttttcctgaattgggtttgacaagaaaagattgtgttgaaatgagttggattgaatctgtggtttacatctctggaacatacccaagtggaaccccacctgagattttgctccaagggaaaacgacatcaaaagtttacttcaaagcaaaatctgattttgtgactgacccaataccagaaacaacactagaaggggtttggaaaaggtttttggaagaagatactcctttaacgatttggacaccatatgggggaatgatgagcagaattccagagacccaaatcccatttccacacagaaaaggagtcattttcatgattcaataccttacggcttggttcgatggaagcccaaaaagttcagcaaaacacgtgaagtggattcaaaggctttacgattacatgggtccatatgtgtctagatttccaagggaagcttatgtgaactatagagatcttgat

SEQ ID NO: 314682 - DNA, 527 bp, Cannabis indica
tatatatatatatatatgttgacggtggaaacttatcaactaacctttggccgaaaattctaaatttgaattcaaaacttagagctaagatgaagataaaatgaaaactaaaacaacaatagatatagagaaaaattgctttgtatttcttcaagttatgtgtttacaaaattaatttttcaaccccctctcacatttgagaggagtatttataggctctaatggcctgtggtacaatggtggtcccaaggtacaaggtgatatctatagtctgcaggctgtagatggtggtcttacgccttgtatttttatttggtgtcatgtggtcccaacttgcaggggtagtgattgttgtgcacccttgttaaggatatcagactttgcagttgtggtgcctccactagtctaccttcttagcatcaaaacttgcaggaggcgtggttatacccaccttacatgcacaccatgtcgtacctccgttgcatttgtcctcaacatttcgggagaatctgttggaaatattttac

SEQ ID NO: 314683 - DNA, 1007 bp, Cannabis indica
aagtttcaagcagtaaactgccaaaaaaaaaaacagtacaaatgttgtttccagcgtggcacagtataaatgtaataaaatgggaaaaatcagtagtggttgtaaatttccctaatagttctcaatcgtagagcttatatacttaagcataacattcaattataactaaaatctagagctactaataaataaaaaaatgaaagaaaagtaaaataaaatatcaacatatatagaatggtctaaagcaatatggcctatagcaaaagagaaagcatatagaaagtaaaaagcatgcaagacaagaactaataaatgattacttaagttcatccaattagtgaagttttcctaagcaatccacatcatttccccaacactgtggtctctacaaactcaaaaacgtaaatccactagcattataagagaaaatatgaaatatacgtgcgataacctctcgtcaataaaaaacttgaaatagccaaaaccaaatcacaacgtcacccacgtactatagtgataatatcaagaattattttctctttaagtcacttggctctagattggtatttgataaaaaaagactgactgaaatcccaattttaagcgaatatcaacctttcctatgcaaaatagttcaataaaataaaaaatataagatttatcctattaccttccatttctaattgtctttgccaagaatattaacaatcaaataataatattagataatttttacctgctaatcccttaatggagaatgattgcttaactctcggctcgaatggaaaatgacgaagatgaagagctgattaaggaggagcatgtttggattttatgccctaaataatactcatttcaatgtaatctgatttgttatcaatagaagattagaaattatttatgtttacatgtagtacttttcatatgttatggtttaatatgtacaaaatctgttgagtccataacatatagttattcacaatgacagtgatgtcaacacagtggaa

SEQ ID NO: 314684 - DNA, 2404 bp, Cannabis indica
tttagggcacaaaatccaataaagggctaagtggccggttgaacatattgttcatccagacccctccttctatttaaatcatccctgagatcatgagttgttcccaatctgttcaatactgaaacactaggctgtctcagtgattggttagtttggtcggtcagctggtcggaactgcaagtttgggcagagttattaggtataactccacctgatgaattgctagataaggtctagctgcctaccacttggcccacaggtggaacctgtgaccagggatcggacggctgaccgttcagagtttgggcagaatgcccaacaggaagttctttcgagccgcccaatgggatgctggatactgtggctggttgctggttagcaacttggtaggcttttcgtattagtatggtagcctgtcttttcggtcgtcgatggctgccttctgagccttcaacatttccatctctccatccctccattcagcgaactgacgcctctgctcttcgaatgcaaggttcactgcagcacggagctcttcttgatcatgatgcaaggtattggtatgaccttgcatgagcccaagatcattgcggaggttctggatctcagtatcatctcctatggtcgtttgaacattggttgcggaaggaattcaagtactggaagtacccaaatcagctgtcgaactggtgtttctagtctcttgcactccgggtgtgatcccagccagaggagatgtcacaccttgacccatagtaggtggttgcgtgtttggttgctcaggattggtaacttgtgggacccttgtgttttcaggagtctgcagtgtaggatctgccactagtggatcaacctgatcaactacgcctctgcgagtttgtgccaccattttgtgtgtctgattaaaattaaagtgaagagcaaactttgattattgctctcaatgaaagcaccaaaatactgacctcactttaagccaacaacaatgagtcaattaataagcgatagaaaatgtaattaagataaggtaataactaataaacaataaagagcacaagattttaaagaggttcggcccatttagtttggtaatagcctactccccttgaattgtattaacttaagaacaaagaatacagtgtttcctctcttaaagctctcacaatgaaatctctgagtgtttactcttagatctctctaaagtagttctttcgacccatattccagtgaggacgaatcactatttatagggctatatgcatgaggaaaggtttcccttttgcttacaatatctataattggtaagaaaatacattacatatttagaatacataaattgagggattcggacagcttgccatatccctttgatacgatccctagattgtagggattgcttttgtgcttcacgatgtaaatcttggaattgccaagtgttgatacgttgttcagatcatctacccttaccctgctcggtcacgcagactctatctgtgcatatgtgtgctgagctctgttcagaatatctcttcagccagatgtaggaaataggagtcacgtgtcactagtatgtgttgccatgtcatagtgcaaaaaatgggataacagtagaattctcgagaaaattcattccaagaattgaatcttcctagagccagcttgaaataccattgctgggctatttctgataaagttgctagaaagattcagcaccgtacatcaccagtaaatttttaaagatctatttgcatctcgaagtagttgatgtgtgtaagaggatcttctcttccggtatacatctttcataccagcatcttgaacttaggcaggggtaaggcattaatatatgtcaagaatggagacccccttgacctatctagttcaaggtctgatggttttgggccaactaggtcctttacatatcccttatttgatccaactatgcttgaacagacggatctgatgtaacaggtacttgatcaagtggcctttcttggctgggctaaagcctttagtcgaccataccttggctggccataccgtaggtgagggtatgtccatggccatccagcccatgactgggcaactggctttggctagccagtcctagattaggtaattggccatggttgactagccctaatctaggcaattggccatggccggctagccctatactaggtagtgtttggctgattgctctcccttgattggccagtgtggcctatgtgttgatagggggttaatcacagtaattgctcgggtttggtggatccacttgtttaaagtaatattcagtggtggaacaaagtcactttgattctcactccttgagttgatgttgtccattatgtttccacttcttccagggcctagtctgtcaaagataggccttagaatgact

SEQ ID NO: 314685 - DNA, 1071 bp, Cannabis indica
ttttttgtttttttttcaaactttgacacatatttagtttttattttctattaggttatgctttttttaagtaggtttattttttatcttctatgaattatgaatgcataataaatatttgtgagaatattagtttaacttatttttttcaattattttaaattaatttgttttttcattttaccttaatgaatacccgatgggttccccataaccgatgggtattcccctaccccgaatccgttggttattagacggggatggggcggggatgggggtataaataggtaacggggatgggggcggggattgcattctccgtacattaaccgaccaatttccatctctagtgggagttgtatttgtttgtacacaatatattacttgtaagtgatgataaaagtttcttatttaaggtgaaataattcatatttcaaattataatttttgagataaagaacataaatgatatatacaattttagttaattagagaatagtcacaacatctctgatcaaataaaattatatattattcatcttatgttacttatctttatgtgtgataaatttaactcaaaccaatatctgtaaaatgatttgaaatgagaataaattaagaacattcatttgcttctatttttaaaaggctaatatattcctaagagtttgcataagacttcactacatttttttcaagaatgctaagtagtatcaaaataacttaagttaagaccactttataatttcatacaaagtgatgaagtatctatccttaagatactaaagattacatgcatacatacatactttattgagatgaactgacactctagaaatatagttaactattttgattctaatttcactggctacgttgatccacataaatcaacatttgattacgtccttaagattaccagtatattgtatcatggagaaccttaattgttatttctattatagaaaaatacatttattattttgagaatacatctcgtatggtgtattatagagtttcatactagtcctagagtttagaattatattttcaggccattaagaaaatttt

SEQ ID NO: 314686 - DNA, 964 bp, Cannabis indica
caataatttatgtaaatcatgattcatgtatacaaataattatatatatacataaatacttagttataatatcaaacaaatatatatataaatttatataaatataaaatagacctgtaaccagctgctgcattgagcttgatctttgatttttcttcatatggaagttcaaaaaatttgtgggttttttcctttacttcttgtaataaagaaataggtataccatgctccttctgctcaatataattatatttaattagtgattaaataaaattaattataaatattaatttgatattaaaccattaaattttgattcaattaggaataataaaaatttaaatttttttaatattacctatttatgcatggctaatatttattagactacatctcatgtttttaggtatatccaaatccgatcaaatatttatactatttgatccaatcacattaatttcagtcatccaatcaattcaatattccttaaattggttttgtccacattggatgtattttatatacatttattagtttaatttgagtttatctaatattttagacataatattctttagataaaatcgaaactaaatgaaaataataattagtttaattagatgttagaatttaatttttggacattccatccaacatccaatccgattcaattagatatttaatatttaacaattaattcattgaattcgatcgatttatgcacaatcctaatcctacctattaagaattatataaatatatataaataaatatattataggtaagagtatataccacatagaaaaagccagcttgagtacaagcttgatttaattgcctaacaacttcaataacacctccatcttcacccatttttggatcatcacacttggccaacagaggactaacatctgcatatatatatatatatatgtttatatatatatatatatattatcagttt

SEQ ID NO: 314687 - DNA, 1566 bp, Cannabis indica
aaaaattatcactagtttcttgtaatcaactcctgttaaagaggcatctctagcttgtatatatattattattatatacaaataatatatatgaatgaagagaatgtttcttaatatatttatacatatataatggagtagcagaaatcttctctaatatttgttgaacgatgagagtaaagagcaattaatatatatatatatacactctataatgaggagtaattttcagatgaattttcaattgccttatctggattacataattaaaaaagttttatatattaattgacgagagagtgatgtctttcgttgcgttctcaccaaaaaaaaaaaaaagtccaaaaatggtgtttatgacaaaattgtcatggtctccgtttctcatcaacgtgaagtgacgagaatggaggttggagaatgggtttaaactagtacatcgtccaaggttaggaatatatatattgatgaggcgaccataaaacaaattctggtactgtaaattatagctataatagcttgactttatagttcgtggacatacttgagcaacaaagttagatctatctaccgacacgtatgggctcgatgtcggcttacatcttcctttagaccctccaaaacatcaaagtaaatttaaattcaaaatagtaactctctacaccaagcttatcataattaactgtttaattagaccataaaacatatgagaggcacgccttctatgagttgttatataatttttagattaaataattatgttgtaaaaaaaatattttatcatattattgttgatatttatgctctaaataaaacttaattttaatataattgtatttacttttaataaagatgagaaaatatacccctgacttagtcatatactttgattcacatgttttatacataattataggtttattatatgagttctattaaattaatatatagttattcacaattacagtgatatcatcatagtagaaagtaattgtgattatttgtttcaaattatttagtctcacgatttatcaatgcacttaatttatattgacgtgataattagcgatggagtttggttacacttggataaatggaatatctttttccaggatattactaaagtaaactagcatatgatgtatcgatcatacattagactagacaaatattgacagtaaaaatgatatcacaaatttactgttatattttttctaaatcaatattgttacttagttaatcatagatcatttgatcacaatcctgagatagttaagctttagcttaaatgtattgcacgagttctttgacttgttcgttactagcttacccgtaggactagcccatacttacaacttgggagctcagtagtacaatttagtgagagtgttaaccatagatatgggcatctataacttctatatgaagtgaaacgatggcttcctttaaagctctgcttaacataataaatgatcgagcactcatttcggtaattatattaggttctccgaaatatcatttataagtagttaagtattttaaggataaaatatattaaagggtaaa

SEQ ID NO: 314688 - DNA, 1898 bp, Cannabis indica
gcatagtcgctcgagactttcaagggaaagtagtgatggctaagtcaggtagttttgctggtataggcgctctagatttggctgaagcaatcagtataaagaaagcgctaagcttgattaaaattcaaccatagcggaaagtggagctgaagtcagattatttggtacgtagcagtccaagctatttgaaattcattatatatgctttattcttttaggattattataaaaaattatcataagctttttgcatttttaaataatgttttttttattattttattttttattaaataatctatcaatatagttgctcatagtcttgctagagtatcttgttatttcccagatcaagtgttcagtaatggtgatgttcctgttaaggtacaaccttatcttttgactgatttgataaattaataaaagttttatatttgttttaaaaaaaatacctttttgagatgtaaatacaagaaaagaaaactcattaatttaatgaatataaaaaataaaactcgtaataatataaatatacaaatatcagaaaacctctaacacacttttacatggtttcaaaaataaaaataaaacaacaaactattaaatattctcatttaatggacatatatttttcttttggactgccaattatttttaaaatgacatatattttatttatttttgaaaaattatgaataattttatttgtaaaatataatatttaaaataattaattgcatgcatataaaataaaatatgatgatgtaaattagtcaaaaattttaaaaaacgaaccacatatttactataactataatataataaattattatataaaaaataattttaatttctaaaaacaaaaaataatgtccccacaatatactttaaaattttctaacatatatatatattaaaaaaatataaatatatacatatatacattgtatgtaggcgtagatcgactagagcgtaaatatgggttgagctttttaatttagcacgaaaccggaatgagtttggaaggcacgagcacgatctgatacgaaaaaatatgagcttggacatgacacgacacgatactgcaaattgggacaacatagtacaaagaaaaaaaatgggcctaaacacaacacaatatgacaagacccaaagatacaatacgtaagcacgaataaactaacctgaaagcacaacacgttaaaaattcttattatttaataataataatacatatgtatttactaataaattcaaaatttaatcattctaattaattttttatatgattatatgtaaagtattgttaaaaatttatataaaaacaattaacactataaaaaatatatataatatattgattaactcattaattgtaaaaaaaaaagtgaaaagtgaagccagagtttgacccgtgacatatttataaaaattggtcggtccgagtaaagcacgacatgagtctgagcatatcacgaaaatatgggcttacatgtagtgccaggcttatcctttaaactattggcacaatacgacacgatcatatttttttatgggccgattcaacacaatccataatattgtggactttttaaaatattggtggggtcggcacaatacgcacatgtttacagctagagaagtgctaaaacacactactagtgcctagcaccctactctatattacagctattggtgtaattaagtattaggtcacatataacttaacacaataacttttaaggaatatcgctaaccaattataagatttttaacaatctcaatagtttaggaagaatttttaacgactagaaaagttcaaggagcatgatttggtacatttcaaagcttagagagcaaaaatcttaattagccatatatattataggttttttttt

SEQ ID NO: 314689 - DNA, 2039 bp, Cannabis indica
aggatagttttgtggtatggtcattggacaagagaagtaatccattttgggctcataatttctacttcagcgaccttttcagttttaacagataagtatttcaagtttttttatgtccttatgtttaatatggattggtttaccattgtttctttcacattaacttatttcattatattgtctggtaatagagttttattttttgttattttgtagattattttgtggagggcctacaattacagagaattttctgataagttttattttaaatataatctgtttaatattgattttcagcagttttaaattagggtgctagtttgttgttactagccaaagggtaatacctttggctagttatacttagaaattttgttgtttttttagttttttagtattgttgagcttgtgttttaggttgtgtgttaaattctaagtttgtattttaattttattttgaagattgccattctaatataactgtattttttggttttggtgttattgtgttttcagtttcgctacttctgacgacaactattataatgggaaggtatttttcaatatgacagggagttgtttgaagacgttatagctttattgtctaaatttccgggcgtagttttgtcccatgttgctcgcaatatgtattctgcaactcatggtttgacaaaatatgcccttcggttagacaatgagctatcttggttcgaggagattctaccgccgattgtggtttgctgcattgttaatcatgtgtgactttgttcaccgcaccaaaaaaaaaatattaaggttttttaagcatagaaattcaaatttccctacatatattatgtcacgaatgacactctgaaaaaaatatattacacatattttcttgattatcgcacttttcatataaatatataattcttttgttctaatatacatgtaatataatttagtgttatgattatctataaattgtgcacatatactaattcttgtggtaaatcgagtacacatgaatattaatttctggcaagttacgattgggatatgcataaatcattaattatttttttttcttcacactttgtgataattttggtagcatgacaattttaatttttttttagatttcatatattttccatggttatatctcacttttgaagatcttttgtagcttaaaaaaaagcctagatcaaagtggtccatgaaaaaaaatataagaaaaattttagcagtataaaagtatgtaaaagtagaattttgtcttggctatatcttacttttggagaccttttttggcttagaaagatctatggagaaaatccattagagaaaattctaagggaagagcaaatcaaaaaaaaacaaagatttttttacctatcacttactttgtagaaattcttgaagatgacaattttgtgcacaaagccttctctctttcttgttttctctcctgtttcactcttacgtttaattccaaaactaccaaaaataattctttattatgctgcttctcttccctttttaaagagaccctttttctttttatttttttattgatttttatttttactaaccacccacttaacgtagaagtggtgagagtggagaaaatatctcctaacttaactctcatcttgactgatctttttttgattattattgttatcatattattattattattatcactatgtaattatacatagtggcagacaagatcaaaaaaggggacaaaaaatctcagacgagagaggcccaaaaaaaaacacaatcaaaaatttgaataagattgactcgtggattatggagaattttaactacaaaaccacgtaaaaaaccttgtgttcatatattacttttctatagcttttatttattctgtgtgaaatcatcatcgtgaggcttaaatttagttaacgaaaaatctgcgttaacaatttagagctttcattaagagcctctgtgaaaaagctcaaaaaaggcctcctgacctaaaagtaattgatgacaccgaagataataatcctcaagaa

SEQ ID NO: 314690 - DNA, 551 bp, Cannabis indica
aaaataaaataaaataagaaatagacaaattaatgtctgcccgagcgtgtaaaggcgcgtgcacatagtgcggatggggatagagatactatgtttttctttttcagttaaaagaaaataaatgagcacgtgagtatcaaacatagacagctcattgccattgctacatgacgcgctttcgattcccaaatgggagggacattttcgacttttcacttacattaatatattatttaaataaaataaaaaaggaagcttcttaatccataagaaaatagagtgtaccatgtgtacagtgatgactaattaatcatactattattagtgagcacattctaaatctgattttttctaaattaaataattttaaaaaaaattaaaataatttattccccttaaaaaaaattgtttaattattcacaggtcacatgtgaacaataattgaatattgtttttagctaaatatatataaaataagataaggtttcgtgactgtaaaaggtccttgattagtagttaattgaaaatgacaccatttcatttttattaaa

SEQ ID NO: 314691 - DNA, 1286 bp, Cannabis indica
caagagctcagatgtcctccctggaagagtctcttaaaatctgaactagttcccacagagcacctccactaatcatgtcctttgcatttacttttgtaatttaaaaactaacatttaagaaactaagctatgaacaaataaaaataatttggtgttaacgtctagcaacatttattttataatttttaccagtaacctaaatgttttcaaaaaaaaaaagactggcctacatttaaattgtgaagagtaacttaaatgttgtgaaaaaaaaagtcaactacattttatatataaatatatataaaaaaaactatataaattttactaataaattatgtaactagcttattgtttaatttaatttacctttcatatatttattattgatatatgtatacaaaagagtatccaaaaagttgatgtacaataattattcacgtcataaatttttaaaagtaacccaagtgttgttaaaaaaaataatttaaaattatcttaaacacacaaaaaataaatctaaaaataaggttttataatatatgtttaagatataatttagctactttgtacatatgtttttttaaaaaattataaaattattttgtaaaagaaatttattgagaatattatcttgaaattttgtaagtgatatcataaagtatttactataaaatatgaagttagttattatttattgaattttatataaattttaaattttggtaattatttgtaaagaaattataaaataaattaaaatattggttttgatttttttttttattgataaaaaatataccaattttatatttgaaaataataattttaaataataggtcacattaatatttgtttttgagtctaacatattagtatgggaaaaaaaacaggaaaattccaaaaagtgtaaaatattacaatattactatgggtcggcccaatcaacatttatacagcccacaatgaaaaaattacaaaaataccacctggtctataccttaagccgcacgtcacgaacatagacgatgaagaaacctccatcaatccaatctgcaatgcaaccagaatgaaaccaaaacaagtagaacaaccataaattctggtgaaatttgattggaaaagaagaactccaatgatctaaacagaaaattacgaaaaaaaaacctagaaaaaccgtgaagaaaccgaaattaaacatttgatttcggttttaatcattcaaaatcgctcaatcaagaattgaaaatccagattcaagcaatgtaaatttgtattaaacagatctg

SEQ ID NO: 314692 - DNA, 1697 bp, Cannabis indica
cctgtattttctaaaatagtaaaaaataggacataagcttaatttttgataacttttttttttaatacaaatacaaaaaaaatagtaaacagttttgtcatataacacttttaaatgggattataattaaactttatttttgacaaaaaatcaattcagggtcctatttgtactattttagaaaatacagggtccattttatcatttaacaaaacacaggatccaattggtaacttttgtaaaatagagggtccaaaatagtatttacccttaaaaaaaatatggaaaattttagatagtttacaaaaatattggtagcaaaaaaaagtgttgtaccataattatataaaaataaaaaaaaaaaaaaatgaaaccttaataaagtatcataaataaatttatcaatatttctataaacatttactggagttaaacggtaaagtcgtcaccggaatgagacgatggaatagaaattaaaacataaaaatcatctatctgaaacatccaaataaaaaactttttaaaaaaacttttaaaaaacttgtagagtaacataatgaaattaagaatgtttaaatcgtattagtccatctttttttttttaacaaaaacatgagttttttacatgctaattttcgtatagatttctgtgattattttggctaattattagtaataattttttatttacaatcatttaactaatatatatattggagttcgtttttcataccttattactgcaagttatttatatatacatgctctgtttttgtatttttagcaattcgtctccaccattgagagctttgatcctgtacaacaatggtgaccgaggttgctttttgtgtttatgatcatttagatatgtattgtggctatggtagctaatgcttgagattctgttggttcgacaatggtgttcgcataggtttttaaggtctgttttttttttttcttttttttgcgcgaatggagttcagtgatgaattggttgataatcgaagtttatgtaggttttataggaaggttagccgattgattttcaaattttgttggatcgattgaatcttacgcgctagttttgcttctttttgttttgttttgtttttgattttatttgtaattccattttctgttacacgtgtattattgtaaattaagaattaagatcctaccaatttaaaatctatacagttacttttttttttcttctttaaatgcttaaattaatatgtctcacaataaaattgatttaatacaatatgaccattttaacatcttgattcttaaattagatgctaactatgtatatcttactattataaaagtgttgtaatgaggtgatagtttgaaaaccattttaccctttaagaaattcaatattaacaattttgccttttcacctctatttaattctctgttttaattgacagctcatgttttggtaatttccaatatattttgaagctcaaaaagtgtaacagtcaattgacagctcacgttttggttaatgtaatgcttttaatatattaaatatcttccattttaagcttcaaaaagtgtaacagtcaattgaccgctcacgttttggttaatgtaatgcttttaattgacagctcatgttttggtaatttccaatatatattttgaagcttcaaaaaagtgtaacactcaattgacagctcacgttttgg

SEQ ID NO: 314693 - DNA, 1271 bp, Cannabis indica
catgtataatttttttaattataatattttaagtgtcaaaaccctatatataaaattcacttatctttaaccaacaaacattaatacttcatataccatatatatataatttttttttaattataatcaaaaccctatacataaaattcacttatatttaactgagactagctcaatggtcatcgagttcgagtataaaatatacattataatatacaaatggttaaattaaaataaaaaaaaaaataacaacttatattttatataacaaagatatagacacgtaagaagtatatatagtactagtactgacaccctgatgggtgcacatgaaatgtagtgtatgtataattggaaggcaagggtggcctaattaacagtgccatatattcccttatttgattttctcaggagaccatgatgattaatggaaaagaaaaagaatgtagaagcagggaacagatcatcatcatcatcttcatcagtacttaataatattatgctgagcaatcatcataagtttgaggataataataaagcacctatcgacaacgaagcagtaacgtctctttcactaaacactactacaactacaactaattccaacatgttttccttagccaatgccaaagatgtctctcttgagcttactcttgcaattgcttcatcaccttaattcatcatatccatatatatatctatagcatatatatatagctagtagcagctaaattataattaacctcatcatcatatatatacacacaattatatatatgacgaccaaattatatatattattgtattgacatgcaaaaacttgtgtactgtcgtgaactttaggactagaactacttattattaagtactcttttggtttatttcttattttccttgaaattttcatgcagtagtacttgagtaatgataaatcattttgtgtacgtagtactacagtagtggatggaatatatatcattataattatatgcattaattgtgcctatacatgagaatgttgatatatatattaatatatataaaaccaatcatatcgcgcggcctgtttatatgagatgagatctctttagctataattaatgattagaaaaatctattagtcctatctaatactatctacgatttaatcaaaaatcacgtattctgatcagtgagggaactaggagcgggccccttatgtacccttagagtgcgtttggtatgagatattcaaaataatttgattatagggaatattatgaaggaaaata

SEQ ID NO: 314694 - DNA, 990 bp, Cannabis indica
ttggctattttacatcaaaatccaagtctcagcaaaatgttgtgatggaaagtaagcatagcaccttccaacattttgagcccatatgagctaggattgtgtgtttctaactggtactgttaaagctacttgcactaaaaaaccagttatctagggtgcaaaccaggtgtaacacatatggatcattgcactaaataaaacaattttgatggtgaagctctctctgatagaaatgaataatagcacaactcttgaggagcatttcatttaagtttcttttgtttcattttagttctctctatatttctaatatttatgcaagaggaaaacagattaagaaatatattaaaaatatacaaataacctcacatactctaaccaatgtgagagataaattctagcagtttatgaagaactacaccaaaacatgtaacaaacactttgatgggtcaagaagattacttactttgtctataatcaaaatggatctattgtgcaaatttctgtggagattgcttttgtcaacttccatggctaagtacttttcccaaccactggtgatttgaagtggattaaacatatcacaggtaacttctattgtttctgttactccttttcatttccaagaacacaataatagatattttgagttaaaaaatgaaaacttaagtcagtttcataatagtagtcttataaactcagattttgactatgaaagttacatctaacatattatatcacttcaaaaaaaaaaataccatattacaagaacaatgtcctcaccatagattttgcatttatttaatagtaataattaaaattaaaataataaaaaaggtttataaaatcaaacaaaaattgaaaacagtctggaaactcaaatagagtatatcgaaatagaaatttgtggaatagactaattaaaaaagtagaaattatataaacttaccttcaaatgggagaaggtttagtcccattttttcattcatg

SEQ ID NO: 314695 - DNA, 1928 bp, Cannabis indica
accaccttacacttctcaaatcaaagtaataatttcaaattcacaccaatacttttcacactaaaccaaatcgacacaaacaatcactaccttaagcagcccattgctccaagaccacaccaaaattctaatatcacaccaaaaattgcaaagccacaccaccaatttcagattatcaatgtacccaatttaaatcattcccacactaaattcactactcagcagccatagtgttatccaattaagaagaatgaaaattgtacccaattacttttgaccatcctatctatggcaacttggacttccttagcttctcactagcaaaaattgactgcaatgatggtgctgggtggaagtgatgaagatggtgattgtgactggtgaggtcgttagtggttcgaatgggaggttggtaatttgtactggctattgttgggttgggtcgaagaggatgtaatggtggctcgtgggtttcttagagttaggcggcggttcgtggctaaggttggacggtgaagaagaggttacaagttcagtggtgttggagatatgtgtacttcgaatggtctgtggtggctgaacggagatagaggctctggttgtttctgggttgagtcgacttcggaggtgcgactttggacagagatgattcgaatggatggaggttcgggttagcttgctgggtttagtacggttcgaaggtggtgatggcggctgggtgaacagagatggtaattttgaatgtaggagtcgaatatgttgctggttgctattgatttgttgagattgggttgagatggcttaggttggtaatggaggcagctagagctggttagtgtggtttgaatggatcttgctgggtggtgatggtggcgatttgtgctagggacgaaggttgttaggtcgtgagtggggatgatgatgaatgagttgggtagggtttaactattggatcaaaggattaagtgttgggcttgttggtaaatctaaggggcccagtttaacttaattcatggacccgttagactatggggtcaatactttcataagatcaatctacacaatccacccaaaaaaggaaaacacatagtacaagggccaaatgattggtcctaataaagacgaccaccccaatgattgcatcattaaaataatttttaatctcgtgtttctttttatcaaaccaacaatcactctatttttttcaaaccccaatagcaaaaccctttctaccacctaatatgtttgctgccaaatctcattgttgatccattgctttagcatctgagcatatctttttcaccccaaacttaatttttcagcccaattttgaaaattcatcactccactgccttcttcatctgattttctgcacaaggaaaggaacactttctcaattttaccatgacatttatttataactaattatataatatatattactctttttcttttttttttcttttcttggggtgcctttatggaattttttttctctctttttttcttttgtattcttttttttttcaattcaatctctttttttctttttcttttggcacctccaaattacaaatctcaagcatccttcaaggagataaaggtcttttctcgattgacctctgccacctaataaagcttcaatcgttgtccattgaccttgaattctcttcccaatttttcatcttccaccagaatagccccgaaaggatacacttccgtcaccgcaaatggacccgaccaatgggacttaagctttcccggaaatagcttcaaccttgagttaaacaacaacacttgctgatttttcactaaaactctttctttgattctaccatcacgccacttcttcatcttttccttgtacaactttgaattttcataggcaaacaatctcagctcatctatctcaaacagtcgcaatttcg

SEQ ID NO: 314696 - DNA, 1106 bp, Cannabis indica
atccaagttcaatatcggtttcttctaatgtatgctccatacatctgatactagtaaactttgccaatgtcctaaaagagacataacacttatccaaggtgtaagtataccttatcgccgattatcatgccagtctaaattcagtgaactgacaaatcatgggaattaaatttttgaacatataatcatgattatattttactgtactgacgacactataatcatgaacaaatatatacatatttatatatgttctggacttaatataatttatacattaaatataatcataaaataaatcatgcgaaccatgcaacataaaagcgatttctaatcttatattaattagtaaatctgattatattgaaatgtgttttatttaggtcacaaaatccaacagttgaaaatggaaatttttaggggttacaggggccctcgcctcggccacggtttggctcgccgcagcgtgggcagcgaggttgtggccgatgcagccacaattgtttttcttaggaatttttgggtttttgttttttccataacttttgactcgggactccgtttgggacgttcttgatatctttggaaagctcatttcgagctctatatgcgaatttttaattggaatgcaaattatgtgattatgtgaaagtgattttgggattaaccctatttgtgaaatcccgggtatgtatgactaggactaccagcgcttgctcaagaagacctgggggttcggaatctccacatacttgggataccaggtaagacagtagttagcacgtagacttaagcgtgtggcgctcatgtttgataatatgcttgtgattaagtgagaaactggtattagggttattaccctaaagtgagcggttatatgatctaggtttaaagaattatgcaggtaaggcataattaggttagactcggtaattagaaccgagataaaccaatctaaggccttattgtaaatagacgtgtgagcgcaatacgtaggtctatgtcatatgataatagatacagtggcattagtatttatttaaattaagaatatattgcattatgttgtttaaactgtcttgctgggcttggctcacgggtgctct

SEQ ID NO: 314697 - DNA, 2592 bp, Cannabis indica
agaaattagagcttccacacttatctatttttcttctaatctcatgagaaataaaaactcgaagtagatgtagcttaattaccatcacgacacgaggagcaaactattattaatttattgtctctctaaattacatacttacattcattatccatctcatcaatctagagagctggtgttggccacttttcaatgtcaacattttgttgctttctttgagaaccacaatttgagttccccaactacaattagaattctctgctaggaattttattttgaaaggaattcataagttcaatcaagaaatcatccatgaacatgcaaagccatactaacactcctggtagccatgccactacatagtaagcagtaagcattgggattctctataatgaagcaaagtacgagcaaccattcgaaaggagtcatacttgacaacatggatctatgggtcctctgcctgatatggagtagtcacctgttaggaaaacgagctatgagcaagcatccaaaagtactcaaactcgagatcgcaaacctaaaggttcaccacatgcagctgataggaccaaccacgattctgctggaagtaatttgaacaatgtgggaaaccaatctcttctgtgggattctcttcacaagtctaatgactctagaccactctatgaccctgcaaagggaaagggacctataatcatacatagggaaagaacctggacctctaccacaaaagtgaagagtatgagattcggagggtgaagatcaatgaactactcctcacaccaaagtacttctaagatgaacaaggtgcttggttcaggtacttcacccgaggtcctaacgactaacagtacaaatacttcccacaagtgcatgggggcatgttaaaacttgagcattcggggtaactccctccacatatcagtctaaggaagactattttgaaagacatggtcgggatggtactgcgagccactcctcacgaagaaaatgcccaagagatgactctatcgtcatacgggataaatcccgagagttaccatcaaggccacacgactaggaatcaaccataaggtcttggtctatcaatgcctttaatcaacttggaagacaaaagagcttgcataacaacatcaataagaagcggccaactgatacacacatcgccacagtgtgtagggctgaattcaacacccttgccactctagttaaggttatcactactctaaagccaatagattatagattagatcaagagtagtgttctcctctcttagataaaatcaaggctttggagatcccttcaaagtttagaaatccagtgtggcatccatacactggcaaagaagactctatctctcacatagacaactacaaagtatagactggcgtgcaaggcattaaagacaattctgattgtcaaatatttctagccacgctacaaaaagtagcacagtaaaggtctcaagttttctttgagatctatgaattcttgggaaaagctcaagcaagcattttataaccaattatccccaacaaggcacagactaatcgagcccaacgatttggtctgcatcaaaaaataagaagatgaacctctaaaggattacctaatggttcttatgttaggatttatgctctaaaagcaagtaattaatagataatatgttggttttatggtactaaatcacgtacgcatcggacgggttttgtattatctgattatcattgtaccatatcccaatgaatctccctatgtgtgtacattaaatcaaaataataaattaaatgtttagaataaatacctcttaaagactatcagggtattctcgaaacttctcgtatataatatcctataatctagataatgcaatttgaattcacactagtgtcttccaaatcgttccaccacacataaggaacaatgtgggctattacgataaagtgtataatatattcttattgatttctcaacccatgagcaagaacactttcagagagaaaactgatttatttttctctcttatttttgaaaattacaatgtaaaagtgatgttcttatttctcaaattaggcttctatttatagtagttaaatttctttaataaaataatatttaattatttaaacaaataaatatttataaccgaatttggttattgatatttataaaggaatctctcaactacttgagagattatctcaacaaccttaaaatatctataatcactttttaaattagatatttacctaactagatcaattaaataattaaataactgaaaaagacaattttcattatacaaaaataaataattactattttgcctatttaaaatatatttttttgagtatcattatactactatttatccctacgtgcccttgacagtgtttcacagtggcgattcggggaccatggacctataattctaagccccaataaactagcttatttattaattatcatcaaccaaataatcttcatttattaattctatgattattccactaaaaatatagaattgaactcttattaattttagaattatatttactgagttttactgtagtgtccattgatataattaa

SEQ ID NO: 314698 - DNA, 1700 bp, Cannabis indica
aatttgtacaattcgtacacagggaatattctaatggtattcctcccaaaacttaggacaggttacaatgccacataagcagccaagtcaccaattatttcttgacaccaccctcaactggtagggtgattccttcacttgaagtttgtcttttagaaagtgaaatcttgttggtgacaatcctttggtcaggcagttagctatttgatcatgagagggaacatatctaatttctagctgtctttgcattactttgtctcacatcaagctctatgttcttggttcttgcatgatatactagattgccagtcatggcatttgcactcatattatcacaccaaataatgggagttgcagacaagtgaattgtcatttccttaagaagtccttaaagccaatataattctgcaacaacttgagccaatgctctatactcagattcagtactagagcagctaccacactttgcttctttgaggaccaagagatgagggagtctcccataaaaacacagtagctagcaatagattttctattatctagatagcatgcccagttggcatcaaaaaatccaattagattcaggtgttcaccaggagaaatgtgcaattgtaacactctactagtttaggcgtgttaacgtgatttcaacttaattgtgcaactcgtttctaatcagcgagtttattaaaaattgtgattatttaaaactttatttaattacttatggataccaaaataataatgtatatataaaatcgagatcccgtttacaaaatatttacaaaagtttcacagtgcataatacaaaagttatcgcctagcgactatacaaaatacgctcagctgtcccaaagaccgtacgctccaggcctaaccgcgacatgtacaatcttcatctgctttctctcacggttgctcagccctagccttgctcttacctacacatgcaagtaataaatgtgagtcaacaaacacagttagaaaagtataatcataaacataaatatatatatatattcagaccgcaaccaggtgcccatacacttaatcacaatctactaactgattcgagaacgttctcgacaaagtatgactaattgtgaattcagcctatactcagtactctagtcgtactgatgtggtagcagttaattcatactatctgatagcctaacatatatatgatgacatctctgtgcaactctatgtacacctcattgatgccctgatatgttaatctgatggctatagatttgcctaacatatatatgttggtatctcggtgcaactctatgtacacctcactgataccctgatatgttattctgacggcaactaacatgtacgctaaacatgtatacataaatgcaaccattatactaatcttacctcacttccgaattcaggtgtgccgaccaacctgagtggaacaactgctcgacgatttacagacccctaaatcacattattcataaaactggtgagtgatgagtgacacgataaatcacttttcggagaagtttccctatcgatgaataacatgccaataccttaaaaattacaaaaacaggaaaaactagggttccctaaaatgccccaactggtagatcgattccccaacaagaattccggttctatggggtttcttggggaccaacggatcgaccggttcctacaggttgttgggttttatgccc

SEQ ID NO: 314699 - DNA, 1299 bp, Cannabis indica
ataattgaatttcatcattaaatttttaatcaaatgaccattttgctaaatgtttataaaaagagacatttactaacttaatttctaaatatagggccattttacatctcaacctagtttaaaattgacacttaaaagtagtttttcgataaaaaccgtaactatatcatttcttgatactatttagagacagttttagaatcagattttgagagtattatgaagagccctctatggtatcagttatttgaaaataaccgatgccatatcatatcgaaatacgtatttggtttttaccatatggcattggttattttcaaataaaccacgccataagattatataaataaactttgttcagccttcttcctcaacatgaaaacacaaaaaccagcaaccaccataatctacgaaaaaacccctcgccaaccaccttccaaaaatcatatatctccaatatttttgcaccatttaagctattttttttttaaatcttctattttcgatacctaaacctatacacccaaaacgttacattttttttttaatcttttttcactataaaccaaagccatggaaacaaagtggtggttataactccggccaccaattttagtggagaaaatattgaatgtcaacgtccatcaagtgataaatatgatttctattcattttagtaatgtacattactttgttttttgttttgtaattttttttttttggatttttccatattattaaaattatgttgttgtatatgtgcatgctggtcggacttttgtcgcgattgattgccgcattgcgcttattaagtaaaatttaaatcttaatatataatatgtatgtatgtattttgttttattaaatatttgtatatataaatattttgtgttgtgtgtacatatattgtgtaattcatttatgaaaatattgtaattgtattgtatatattctaagtattgtatatatattgtgaatgtgaatgagataggagagatttaattagtttaaaaataaaatttttaaaattttattagtttgacatataatttattatatatgtatgtatatgtaatttttttttttaataatttatgtatataatttactaactagtaactagttatttttttataactagtaagtagttaaataattaaaattttaatttagttgtattttattatattgtagtttgtgaactaattttgaaggttctgaataatttagagttgatcggattttagtttgctagaggtatatacattcactaactttttgttattaattatttatcaa

SEQ ID NO: 314700 - DNA, 783 bp, Cannabis indica
ggtaacttgaatcttttaatccaacctcaaaagaataaagagtacaagacactaagctaattatagaacaatcacatattttgacaatgattattctagaacaatcattgtcaacataccatatttgcgaagcaacaattttatcaaaaaaactagctagatattttttttcatcccacttttgtttcaaagcactatatttcttttgaaattttttaaaattaccaaaataacttttttgagcatattttgcatggtgaaacatttatgcctaatattccccttaataccacaaaaatgacaaattgaaacaaaccgccttacctgagatcttacctttttgaacttactggagactttgcttctgagacgatgcctttgctatagtaggtaaatttgatggaacattagattttataaattttgtgtttccataactttcggaaccatttgatccaaaaccaccaaagcctatttgacatgcattctaaacttccttagaaatagaagaactagggttaaacatttcaacacttttcttgaaatctcaagtttcttatagaataatttattcatctttcaacaaaaatcaatctcgtattctttaattttcatttcaaaagatttaattattaagactcagctaataactcgtcacagatttcagattcattagaatcagaatcttctttttcaatggtattattcaaactagggctgtacatcggtcggtttagtcggtttatactatatattttccaacccaacataaagatcgagtta

SEQ ID NO: 314701 - DNA, 2166 bp, Cannabis indica
ataactaatcagattgtaaagggttttatttagggcacaaaacccaacacatgggtactcatattttgtatttaagacaacttcttttgccatatttttgaacaacatatcccttcagggatactccttttgttaagtactttttatcgctaaatttgatgtgtactttaattgtaacttaattcctcaaaaagactttaatctcttttctaagtacgctcatgcaattaatttatagcttggtgtgatgaatattttctaagtataaacatgaaaaagatataaatacttaaaaaaatttggaaaccctgaaaaactgagacgttgagatcgaataatcggtaagttgcattaccaatttttttagcgattaggtaagggccttcccaattattgtcaattacgccatgcacagaatttcatgtattaaacatgactctttgcaatatcagatctactactcgcaaactcctttctttaactttggagttgaaatagcgagatgtgggctgttgataggccgcattttttaattgggcctatcgcgcttctctttccaaaaattgagttagatcaattgattttatgtattagtctcgacgttgaaaacgtctcttcttaatgacttagctccaacctcgactggttacatgacttcacatccatatgacagtgagaagggggtttcaccagtcgttgagcgaggagtcgtgttttatgaccacaaaacttgcggaagctcttctggccacatgccttttttctcttcaaggttaccttttatggtatccttgatgattttgttaactgcttctgtttgcccattactctgaggatatgcgactactgaaaaagctttttgaatccccagatcattgaaaaagtttatgcatttccttacaatcgaattactttctgttattagagattaatatttagggaatgccaaacctacaaataatagctcgatagacaaactttgcaggtgttattgttgcaaaagcctcggcttcagcctacttggtgaaatagtctattgtgaccactgcatattttattcccccctttccttttggtaactcgccaattaaatctatgcccagaatgcaaatggccagggactagtgatagagtttaactggcttggtggtctattgacgtaggtgcaattcactgacattatcacatttcttggcaaaattggtcgcgtctactcgcaaggttggccagtaataatcttgtcgaatgatcttcaaggcaagggaattactttcggtgtgattgccacaaataccaccatgtacttcatggagtatataattgcattcgtctccatcgatacatttaagcaacggttggctaaaaatcatgcaatatagtttgttgtcataaatgacatatcgagcaactcgatatcgtaacttttagcctcaagtttatcttcagggagttttcttgttgttaaataagtaacgaagcacaaggtattctttgaatttagataacaatacctttaggcacttctgtcgcactaaaccctaaaataaaaaagggtaaggagatgatctaattaaccaggactgggtgctccctgaggtaaacgatcaatgtccggagggaaagacatgtccattgagctactgatgggaagactactaaaggaggctactcgagtatgtacttttcctttggtttttatcttaatcttttacctgtgcagattttaacttttctttgtgcgggtcaacttgaagatggcctgcacctactcccaagcaaagtctatggctttaaagactataaaaaaaccaccaacttgaagagggaggtggaggatgccaagaaggaggtcgaggataagagtgagaagctaggtgaggtgaataaaaaacttttggctgccaacaagcgagttgaggagctgcagcgggaaatcaaggatatgtcgtccactgttcagctcgaagcaaatattgacgctctgaccaaggatcttattactttgaaagatgagagggaaggtctctggactcttctcgctaacttaaccgaagagaaataggatttggaagagagtctcaactacgagaaggccaagcgggaggtactttagaaggaggtggatgttgggttttgtgccctaaataaaacccattacaatctgat

SEQ ID NO: 314702 - DNA, 1189 bp, Cannabis indica
atgagtatatttagaatggttctgtgccttctttcttgagctaaaaatttggttgaataacagtgacaggaaatttggttgcttgtaaccagtagatagcagccaaaatcaccttagcttcagcaacttcaggaggaactaagcccacgattagaacaaccataccagccttaacattgtcacaatcatccctgaccacgactcccagcttcttctcaatgctattaatagcagcatcaatattgattctccagcttccaacaagaagggtataaacctgctcatcacgctcttgaacacaaatatctgtcttgaaaccagaatgataagcacaatcatattcaaacaaatatttagaagcttgatcagaaagttgcaaggaggcaggttttttgttatgaaagagattatttctttgatcccatatcatccatacaaggcgaacaaaataggtgtactatatttatcatgaaggtcaatagccttagcaataaactcattaatatttaaatttttattacaagcatagaagtcaaaaaatggagaatgtttccaggcttttcttgcacttgagcaatcaaggatagcatattccacaatttaaattggagaaggtataatatgtcgatagaataaagaagaagccacagggatggaattagaaagccacatcaggtgtttaactttcggaggagcaaaagaagaccagatcttagaccgaaattgcttacactgattaaaagatgatgaagaaggaagatccctggaattaagtgcaaagtgatagacagttttgacactaaaaagaccagaattgtcctgactccaaacaagatcatccttacaattattaccagaaataggaacattgaggatgtgatcaacaagttgatcatcaaaaaactggtggagcttaagagaatcccaagccccagatagggaaataaagaaggagagagtagactcagggagagagaagcgtataacttgaatttgaaatgagggagccattgatcctcaatgttgcgaatattgctaccattaaccaccttccaaataagaccctgcttcatcaaatctcttccccataaaatactgcgccaagagtatgaaggacttgttggaaattattttaccaggatctagatttactaacaagtatgttggattaaaaacctaatatgaattc
